United States Patent Application Publication US 2006/0134663 A1 - sequence listing, part 74

SEQ ID NO: 195611 - DNA, 1000 bp, Homo Sapiens
ccccagcagctgcttctgagaaaacagagggatggagaagaggacaccacccagatggtggaaacatctatcaaaagttaggatgtcctctggaaagcctctttgggtgtctgatttcatatctccttcctcatcagagaatggcgtcgcctcctatttgatgagaatttaaacacatctagaacatgtgcttatctttttcctatctcctgtctctgggatcacatcatactgcctccaagaatcctgtccttaacccccttccttagaatttacagcatagcctggaaacaaccaagcattcatctttattctaaagtacctagaacagagctggatctgtgacagatgctcaatggctgtttaatcaaacaggaaaaactcatatttggagtagggagtagggggaggcaaaatggtactctcaatgaattataatattttaaaatttgtcaatagagaatataatacaaaccagagaagcataaaggaaggtcatgctaattttcatgaggtagtttctaactccaggaacaaaatggtgaaagggcattctaagtcaaaggaatttatcatgtaaagacgggagtaacacacacacacacacacacacacacacacacacacacacacacaccccactctgctacaaccacaacaaacactttgttgttcttcaaatgcaccaagctctcttcagcagtgttttgtagtgcgtataggacatctttgaaatattctggatatttaacctttgtcttcttggcatgttaaaaatatcttctggcggctgggcgcggtggctcacgcctgtaatcccagcactttgggaggccgaggcgggcagatcacgaggtcaggagatcgagaccatcctggctaacacggtgaatccccgtctctactaaaaatacaaaaaattagccgggcatggtggcgggcgcctgtagtcccagctacttgggagactgaggcaggagaatggcgtgaacctgggagg

SEQ ID NO: 195612 - DNA, 1000 bp, Homo Sapiens
agagtgagaccatgtctttaaaaaaaaaaaaaatgctgggtgccgtggctcatgcctataatcctagcactttaggaggattgcctgagcccaggaatctgagaccagcctgggcaacctagggagaccctgtacctacaaaaataaaaataagaaaattagccaggcatgataggacacacctgtgatcccagccactctgaaggctgaagtgggagggtcacttgagcctgtgatcacactactgcactccaacctaggcgacagagagagactgtctcaaaaaaaaatgaacaaacaaacaaaaaacccaagaatttctcttctaggtctttttgtaagagcagtttcagatgagggggaaaagagaaaagcagcaaaaactactaccaaaaggaagaaaaaggcctaaagaggaaacacaggaaactgaagataaacttggccttgttacaattctgaattggactagccttgtctagaagtaacttaaataaatatttttcctctaaattaggatatacttccataaataagtgtagcagactcaaaatgacaatcttgacaataaactatgtaagatcagaggattcaaatttattttgaaattcctagcaaccttctccccagtgaagatatacacatacacattttatgtcaaaacgaatatgcttggggactccttctattagcttatacccaaatcctataattgcatttctatattttaaaacctattatcttacctttctaatggttgcgacacatattgtagaaagatttaatgggtctatagcttccaatttcattccttccttgaaccattccccactctggtctacttcttttacctaaagaattatatgaaagcacatctactgttacaaatgttgttattttgataattaaaatattaccaatgtgaaaagatttaccaggtgccttctcctacctacctaatattataactcaaacttccattaaggtttagagagaattc

SEQ ID NO: 195613 - DNA, 1000 bp, Homo Sapiens
  misc_feature (992)..(992): n is a, c, g, or t
gggttactcctggaccctggggttaggagttggaatcaggctgttagcgataaaagggttcaagttgactcattttccttatcaggcttagtagttgaagtgacttgctgagcttcataattcttagagaacctgccatgaacccagctccctttctatgactcaccctgccaccctgtgacacatagagtctgaatggcaggtctggggctagaacccacgtcatctggacttggagtccagtgaccctttgggttaagcatgtgtgtgtgtgtgtgtgtgccatgatgcgggaggaaggtccctgctctctgtagctgttttcttcatcctttgctctacaagccctaacagccgattctgtcatccctagtctgcccctctcctgtttctccatctcctctgaccatgatttttttctgtccctggagggatgatggtctcattctcacctcctccacgaaacgtgttagcttttcatattcctagatccactcacttctcatcatctttttttttaaacaaaattttattgaaaaatgtaatatgacgtgtcaaagttgtaaagttattgagtaaataagcatgtatcctaaatattgaaaaatattctccttttgtaccaggctatgtgtcacggctttggcgctttgcacagactattagaaataccttataacattaaaaataggacattgaggccgggcgtggtggctcatgcctgtaatcccagcactttgggaggccagggtgggtggatcacctgaagtcaggagtttgagaccagcctggctaacacggtgaaaccccgtctctactaaatacaaaaaattagccgggcatgatggcacatgcctataatcctagctactcgggaggctgaggcaggagaattgcttgaatccgggagtcagaggttgcagtgagccgagattgtgccactgcacttcagcctgggcaacaagagtgaaactctatcaaaaaaaaaaatnggacattg

SEQ ID NO: 195614 - DNA, 1000 bp, Homo Sapiens
tgtgtaataatcaaattagagcaattgggatatccatcacctgacacattcatcaattctttgggttaggaacattccaatttcactccgtcagttattttgaaatatataatattgttaactacagccaccttatcgtgctaccaaacactagatcgcaatcattctatctaactgtattttcctacccattgtccatctccctaacctgtcttttgtagcttaggccaactccagcctgacacctgatgctgtaagttttcactggaattcagccaggctgctcatttgcatatagtttgcatattatccagggctgcctctgtgcggcaaggcagagttgagcaattgctacagagaccccatgtatggctcacaaaacctcagttacttcctcttggatcctgtaccgagaaagtttgctgagccctgagtcaatcatcccacattgactggatagctccctatacagggctagggagagagggaagtgcaagtcactctgcttgtcttggagctgctttctatctatggggagggaaaccctcacaactgttcttgggcgtggtacgtgctgcattaccagcagggctgcattaccagctattggagcccagagaagaagggattagttctgcctggagggatttcaggaaggcttctcagaagaggccaggtttgaattgcaccttgaagaatgaggcagacataacagaccattacataacgagccaggagattgaatcagtaataaaaggtctcctatcacagaaaagcccaggatctgatggcttcactgctgaattctaccaaacatttcaagaagaactaataacaatcctgctccaacttttcccaaaatctgggagaaaattatgaggccaaaaccagaggaggacactacaagaacattacaggccaagatccatgatgaacatagatgcaaaaatcctcaatctaatactagtaaatcgaattcaatagcacattaaaaagatcc

SEQ ID NO: 195615 - DNA, 1000 bp, Homo Sapiens
ccatcctggcctctgctcgccctaaaacatgccgggcacagtccacctcggggtctatgcacttgttcttcccttcacctggaatgcttttcttcaaaaaatccccatggcttgctttcttacttccttcaggcctgaattgaaatttcactttccctgtgaagaggccttgattaccttctttaaatacccccctctcccagcctcaaagtttcataaccatcagttaccctgcttgatttttcccacagtcttattaccagttgaccaaagatatttacttacttggttttttcacttgtctatctctccttactgaaatgtaagttccatgatggcagggatttttgtctgtctggttcaattctgaattctcattgcctaaactgtgtccgacatgtagtgtgtgcataataaatacatattcacagagtgactgaatgaatggatggatctctcccttcaaaatgatattcagattccctctatagtcttcattctaactaccagcccccattctggacttaccccttgaggtctgtgtttctgtgatgttctatgcactgggtatccctctaacaccagaaccaagatgaaaaaacagatttcctgatcctcagcctaggttctgtccactctatgatctacgacgtgcatattttcaatggtctgttagtggtgtctaaccacgaaggcaggcttagccagacattctgatcgtgcccaagagtcctatttagaaggtcatatgaacaggctctcttgcccatacatacaggctttaaaaagttgaatgatgttcttgttagactctgtggtttaagaaacacagtgcaaaagggagtccattattgggaatggaggatcctgggacaagctgagtgaaacaagcacactctttttcggaacctcttaagattctgggaggccctttccaggggaataataaggccgaattgagtgcaagagacatatctttgattttcataacctttgctcc

SEQ ID NO: 195616 - DNA, 1000 bp, Homo Sapiens
taagagctcttagatctttatagtaataaatattgtagtgtacaatggtccattgggaatcctcactcatatgttattccatgattgaagatcaaggtgtcaggtccatttagaatcagtgtattttgggtatgttttaagctttaatccatattttgaaaaaatagttaacaatatttctaagggaaatataatcactttgcttgccttgcactcccccactccccactatagagtgaattgtgagtttcaaacactggtattcctttagtttgaattttcccataagtagacggaaaggtaatgaccttggcctatcacgattcttaagtggaaagcctttttcagcttaagaaaccactacctgattgagagtggctttcctagctgaaaataactgtttactgcttaaaggataagtatctgtgagatgcaggtatagttaggtgagtcttgaatataacattcttccatcatcaaaatctcatcggagaggttttgccaatggtcttttaaaatagaggtgccattccagagtggaggtgatgtattttgtgtcctctatgatacaatagtatatgataaaaagaataaatataaatagttcttaggtcacatacatgccctgatgattatatgaatgaaatcaaggttggctgagatgctgttcaaggtccgggaaaaaatgaaggtttcacagattcacacctttgctctaccatctactagctctgtgacagtagacaagttatttaaatctcttaacctcagcatcttcaactgttgaaaaaaaaaatctaaaaagtatgttgttaaaaacagagtttaatttatgtttgcatggataatgcagggccgtgttgtaaaggactctagtggaaagatggtctccttgtcacttctgctccctagccacacagtttctctttgaggaggtaattactgttccaggcaaatgcaagaacttggtttcaatgttccatgatgaaatattgaattc

SEQ ID NO: 195617 - DNA, 1000 bp, Homo Sapiens
tgtggtcttgactgaaaatgattcacggtataacaatatgtatgtcgattccattaagcaatactaactgacgttaagtcatgatttcgcgccataataaagatgcaaaggaatgacatttctgtattagttatctattgctatgtaacaaattatcccaaaacttagtggtttaaaacaacacatttgctggcccacagtttttgagggtcaggagtccaggcccagcataactgggtcctctgctcagggtgtctcagaggctgcaatgtaggtgttcaccagagacataggcatcactggggtcacactcatgtggttgttttctggattcaattcctcctgggctattggccaaaggctatactcatgtaagccatgcgagcctctcccacaaggcagcttgcttcatcagagctagcaaaaaagagaggttgctagcaagatgaagtcacaatcttttgtaatcgaatcaaaaaagtgatatctcatcactttggccatattctatttgttagaagtaaaccacaggtcccaccagctccatgggagtgaccacctcagtccagggaaaacagctgaagaccaagatggtgagctctgattgcttcagttggtcatcaactattttcccttgactgctgtcctgggatggcctgctatcttgatgatagattgtgaatatcaggaggcagggatcactgtggaccatcttagcagttgacctaacacatcttcttttcaatatctaagaacttttgccactgtgactaatggtcctaatattaagctgttgtttatatttatcatatatctatggctacatggttatattatgctgtggttgcgttcggttttatttacagttgcttttacaaatatttgctgtaacatttgacttctaaggtttagatgccatttaagaactgagatggatagcttttaaagcatcttttacttcttaccattttttaaaagtatgcagctaaattcgaagctt

SEQ ID NO: 195618 - DNA, 1000 bp, Homo Sapiens
tgtcgcccaggtttgagtacagtggtgcaatctcggctcactgcaactcctgccttctgggttcaagttgattctcctgcctcagcttcccaggtctctgggactacaggcgcccactaccatgcctggataatttttgtatttttgtttgtttgtttgtttttgtttgtctgtttgtttttttgagatggagtctcacactatcgcctaggctggagtgcgatggtgtgatctcggctcactgcaacctctgcctcccgggttcaagcaattatcctgcctcagcctcccgagtagctgggattacagacgcccaccaccatgcccgactaattttttgtatttttagtagagacggggtttcaccatattgaccaggctggtcttgaactcctgacctcatgatccacctgcctcggcctcccaaagtgctgggattacaggcgtgagccaccacgcccagcctaattgttgtatttttagtagagatggggtttctccatgatggccaggctggtctcaaactcctgacctcaggtgatccacccacctcagcctcccaaacttctggaattacaagtgtgagccatcgtgcccagcctgattttctatttctaaatgtttcttccagtagtcctgcaccctaagaccaaggccttggaaggtgaccgctttagtgttccaaggcagatgtgtggcttcttaatcaaggaagttatgtctgggaggggagaaggagccctcctgggcgatgaagcaagttcgaagcaactggtgaccactctttaaatgaggacttcatccctagggtccagttaaatttcagctagtccagggactaacacctcaaagacctacacagcccaagtgaacccagggtttgaagtcaaatctccaacatccacctataggaaaaacaactcagaaaatactttccagatatatattttttttgagatgaggccatatcagtcagaaatgtagaacaatagatgaattc

SEQ ID NO: 195619 - DNA, 1000 bp, Homo Sapiens
ccctccccaacatgcaatgctttaccaagacacccccttctgcagctctcctcaaagaacaccctgcaaatctgcctattgcactcttctcactgctgccctgcttgcgtctcccctcctcattcagcattgcagaaggtctgctgaaggttcatgtatctgttttcccctctgagattaactagttaattaatctattaatttattgaacatcctaggcctcactatgtggcataggtcctggagatgaagagaagggaatgaatgacgctgtctctgaactccgatagctcacagctggaaaaacggacacgtcaacatcacaatggatgaagttcagggggaaacgtgtgcaggagggatgaagagggaactatggacgtaggtttttaaggatgagcaggaattaggcaaagaaggtgaagggaaggtatggttcaggctcatgatcgtggactttgtaagcaaaaggggaccaccagattatgagaattagagtcaccaattatgaggttaaatgaaagaaatccaaatggcccagtgggttataaaccagagtctggggttggggaatgagcatttatttaaatgaattctaaaaatacacttagcagcccagctatctgaagggagaattgggcatgtattaatcgatttcctgtaattctgcaagaccacagcggaggccaagttgtctaggacagtcaagggctgtccagtctgccctgcagtcagtccatggaagctggcccaggctgcccacctgctggggtggacctagctagaggggcagaggaaaccgatggtgagaagacagaccctaagctcactcatgaaaatcactggctttctacactaagagcacagagttttaattctgacacactgggtcttcaaaacacctttcagaaatatactaatatgcttactgctcccttgaatgagcttaaatatagggaaggaaacagtctataatttttcccatacttggagaatggat

SEQ ID NO: 195620 - DNA, 1000 bp, Homo Sapiens
aaaataagtagggaaagtttaatcctttaaataacattacagaggataacaagttgcctatccacaagatgtaaaataatataactgttgctattagttaactagctggacggtttttcagacattattaaaaatgaaaaaaacctgtaaaaatggaaaactagtaataaggtgatgacattatctgcatgatttttggacctcaattatggaatgttatttgtaattaacatattctcatcacaaaaagaagagctagataggagtcgagtcgcattactgatttaattctacagcactaaatatcatgaatatcatgacaaataacatttaccatgtacagattaggcaaccgtggtaacaaataataaacaagtacaggtaccactcactattcaaacccctgctctcaaatttaggacacaaacatatttatatatttttttctttaagacactcactagtcaatattttaaactcaggaactaagcagatgtgaatagcaagagataaagtatatgtgctcctggttggccacatttcagaatcctatagaactgacacagaaaatgtttgtggacatgagagaagtggaggttttttttagaactgggttcagtaaactttttctgtaaaggaccagataataaattttaggccttgaagacaagaaagcaaaatcaaaggtaccatgtagttgttgtttataacaagagaaaaaccaaattttgacaaaatttttgttgatgcaattcaaaatataataattcaatatagttttttgtaatatagatctacaatgagaagaaagacattctttttatgggaataatcttttgctcagttgaaattcaaagttagtgttattagattctccacagtagagagaggaaaaactaaagaaagtcttcccttaagaaaaatccatacaagacatgagttaagaacatgagaccaatgaaattaagatactttatttttaaggtactttaaagaattc

SEQ ID NO: 195621 - DNA, 1000 bp, Homo Sapiens
caacagtcataaaacttaaacattatttttaggttctgtttctcagaatcctgcagtttactgagattcaactaaaactgattcacacagtccatatattctcactagttaaaacatccttttcaaggcacagtagcaccttcctataaaaatccacttagccaaatagctgattttctgagccatacacggatgcagaactaggacataaacacacactttaggaaagtattagagagatgttttgggagatctggcagtagcattcaactccctgtccacatatattcagtccagtggtagtcagcaattacaagtttctgcaatttttctgtgccagtcatagttttaagattttacatgcattaaccatttaatcctcatttaacaataccataataataggcactattattatctctgttttatatatgaggaaattgagatgtaaagacagaagtaatttatccaaatcacccagctagctggcagtaaaaacagtctgcaaacccaggcagtgtgactccacagctgatgttcttaactagtactatatcatttccacaaatggtgtcctataggcctgggttcagatctagctttttccactctcgctctatgactatgagcaaggtatttcataatctctacagtagaggtaatagtaactgccttacaggatataagggttaaatgtatgtaaaacccttagcataatacctggcacataatatctattattatttaacttaacctgattgacctcttttgttcctatggttttagtgcatatattttgtgtgtccttataaatcccctacactcactcccttttattttatttgtttattttttcttgtacaagtttataagacccttttaaatccttcctgtaacaatgtgaggagggcagggagagtatcctcctcaatcatgagatagtggtattgttgttgttgtttaagattgtgttctcaaataatgacttgagaatatcagc

SEQ ID NO: 195622 - DNA, 1000 bp, Homo Sapiens
ctgttacttaggctcaaactcttgggctcaagctatcctcctgcctcagcctctcaaaagtgccgagattacaggagtgaacccctgcacctggctttttttttttgagacggaagtttgcccttgttgcccaggctggagtgcagtggcgcaatctcggctcaccgcaacctccgcttcctgggttgaagtgattctccttcctcagcctcccgagtagcagggattacaggcatgcgctaccacacccagctaattttttttgtaattttagtagagatgggatttgtccatgttggtcagtctgatcttgagctcctgacctcaggtgatccgcctgcctcagcctcccaaagtgctgggattataggcgtgagctgaaaccgtgcccagcatttttttttttttcaagagatggggtcttactatgttactcaggcttgtctcgaactcctgggctcacatgatcctcccatctcagcctcccaaagtgtggatttacaggtgtgagccaccgtgcccatttaggtagatgtctaagctgcctcccagctctgatcttttatggctctattattttatatgttcttattcctttcttttcaatgcccaggtattatccatgcagcagaagagaaggactggaaaactgcgtactcatacttctatgaggcatttgagggttatgactccatcgacagccccaaggccatcacatctctgaagtacatgttgctgtgcaaaatcatgctcaacacgtaggtgcaccttaactctggactacaagaactcagatccttcagcaagtctgtttgccatggcagagatggcctgagcagggagtttggccagttacagaaacagcagcagctgcggcctctagggctggctaaggtagagcgggaggatcaaaagtggtccagaaaactttcgcttgctagtctttcagaatcaggcagacattttagaaatccccttcccagctcctcttggagaattc

SEQ ID NO: 195623 - DNA, 1000 bp, Homo Sapiens
aaagttcacctttttacccctggcatcaaggtcctctgcaatctggccctaacctagccttccagcatccctccctgctggaactttccactcagactcactgtttctcacacataccttatgccattgctaattcttaagccaccagattgcttcttgggcacatgagtccacgtggacacggttaaatctcctgcatgccttttgatatcttgacgtttggaattgagctgggcaattgctcaatgtgaacaatgattctacactttaaggaactggggacatgatctttccaagataaaagggcttttctttcttttctggtctcctaatgccacctcaggtcacgttccactgtgtggagcccagacaattatcatgctgtggccagagatgtttaattggactttaaaagatgagaaagcagcagggagctgattgtcagctctctgacaagactgtgccgcataggtggccagcagcacagaggagggctggcctgcccagtgtcatgactgtctccacccctggggcagtgaggttaggagagaagggcaagatgtagcagtggcaggacagccttcagcagactcagtgccagattgtcctatatcccgtttctaccccaagaactgtgctcactcagggggcaacaaagacttcttttttaaaattacccttcttcttaagacaaacttctctaacccttcatagtaataatttatttttataatgggttttcatctccatgcaaccctttaagcctctgaggtaggtcagggaaaatattaacacttccagttcataaaggagtaaactagattcattatgctgggatgtgagtttgccaaggttatgcaactagtaaatggttaagccagaactgcagatcagctgtcaaagatcactgatgcaacagcagataaaagccatttcaaacaggacaagtatactactccacctcctgcttcttaatgctattccctgaagaaaaaagatc

SEQ ID NO: 195624 - DNA, 1000 bp, Homo Sapiens
catgccaaccaactcactaccatccttagaagagttgctttctcacaattatgctctgctccaatatataccatcacctgaaacgccctcccctttcccacttacccaaattagactcagcccagaagtctcagccacatcctctctctctgcaaaattctccaagacctcccagctgaatatgattgctcctttctctgaaatgtcacagcagtatggctagtgatcttttcaatgtgagtgacagaatcccctgagggttgcaattgttttttatgcatcttggtactgcattttaaagtgagttacatagcctattatttattggaccatgtcctaagccgttctttacagaacttatcatattgctggtgatcaaatctgttttcccagcagaggatcttcagaacaatccctctgcctactgtaaaaaataatctcgtctatgcctagtagtggtagaaaagtcactttaagaaacatctattctgaagtgaacaatatactcacctggtcacctagcatgtattgggtcctgccatgtggcagaatccatgcctaactctgcagtcatttaaaattactgctcagctcatgagctgttttccaagttatacctgcatcagaatccttaaaggagctcatccaaaatgcagcctccagatatcaactccagaacccccaaaccagagtctcaagagctggtgcctataacctgcgttttaacaaggtcccttagtgagtctcaggtacgttaatgttcaagaaccaaggctctaggccagagatcttacaatggttatgttgctctaaaagtgcaccagcccttgcacatgactgacccaatgtctgaggaagaggaaaaaaaatgagcaagcagttgtgaagtactttctacgaggatgagtagaaggaagagggattatgatgcctggagtagatggttatggaggtcccgactggacattctcatacccccagtaaatttcataaagaattc

SEQ ID NO: 195625 - DNA, 1000 bp, Homo Sapiens
agaatctgagccagggtgcaagttttttctgcgtccacctcctggccgtggccttctcactgcttaaagcgccccttggccttccctggaagtctgacctccgcaccctgcccgcggcctcgggagggctggggtggcctaccttcttaggccgactgtggctgagatgaagactgagattgtactacattgagtcaaagaccaacctgcatacacactcccctgctcccaggctgtctcaccactaggcaacaccgcctccatcttacttacccttttgcagggcccttttcctggttcttgagaatgtagcaagatttccccgctcaggatggggatgggtcggaggagccactctggaagtttcccgggcaagaaagtgttggcaataataataacgggctggtcaggaagtagaagagaaaattaagacttagatatcctgtggaaaaagaggaataatatctactgattgatgcggggagagagggaagcctggaaagatcggaggtgaaagtaaaactgagatttgaaggtagaggtgtggagggcctgtgaactctatgcagatgacaaatgtcaaaaaagtgcagttgcttttcagggagagaataagtgtcctaaaaaagagacagccaattcctctgtcttccaaagttccgtgaaatagaattacacaattttgcttaatggtagaatattccatgtatctattaaaatcaacaaaaggccgggcgcagtggctcacgcctgtaatcccagcactttgggaggccgaggcgggtggatcacctgaggagttcaagaccagcctggcaaacatggtgaaaccctgtttctactaaaaaaaaaaaaaaaaattagctgggcatggtggtgcatgcctgtaattgcagctactcgggaggctgaggcaggagaatcgcttgaacccgggaggccgaggttgcagtgagctgagattgcgccattgcactccagcctgggtgacaagagcgaa

SEQ ID NO: 195626 - DNA, 1000 bp, Homo Sapiens
gatgggattaggtctgtcaagcatttcacaccgcctgacacacagaaagcacttgataaatggtgactattaactatgcagagttggaagggacttcaggaagacccaccccaaccttctcattccacaagatgaaactcagacaggtcctgtgactgagccacaacctgcaaaggagccagtggccagtggcaggctggacccaggcctactgactcccacctgagttctgaaggcccaagccgcctctctgacttacagaagcagtttatcacccaccactccgtaagggtccctcctgggggctggtctaccccattatgggtagctcccccaagggaagtgctgtgtgtacatctttttcattcactggaagagctcggcctcacctcgggcaggtgatgggggcttggtcaacattaactgactgactgatcagcggcaatgctcccctagccctcccagccccacagtccagtttacactgtatgtggtccctggcccaggcccgtgccaagctcaacttcctgccctagcccaacctgggctagtggaaaggaaacgctgggcataaaaggaaagaggtgacatcaataggtagagagatgaggaggggacagggaagggctgagctaaagaaggcaagccagagggacatgacgtgtatttggggcagggccagagtgagggctggcacagctggggaagagagagtgacgggctggcacaggagtggggagagcaggctccaggggaaggctgtggctgctggtggcacaagggtccccagacagaggagctctggccctgctgggtttctgtcacccaggtcctgccaggtttaatcagccaggttccaaagagccagctgtgttccctgaggtgaatgagcacgccaaggttgtgtcctgtccccaggcccccaagatcctgttcgaactcgttcttactaaaaaactttccacgcttgagggctcagggagttatggccttggaattc

SEQ ID NO: 195627 - DNA, 1000 bp, Homo Sapiens
gacagggtttcaccatgttggccggactggtctcaaactcccgacctcaggtgatctgcccaccttggcacgcccggctagttccagttatattctaaacattgaattgtaaaaatggaactttggactttggattgttatttttcaaataatgcaactaggtaagctgaagttatgcttacagtaaagatttaagtaaatgttttactagaaaatctttctgtgatgttcttatttacttatttccttctcttctgcctgtgtccctctgcacccctcccccattctacgtgctttgcagtattaattcaaatgttcataggatatgaggaactcttttcttctatcctgagccacatacatgttttgagaacctcttacatgtttgatgttatcttgggtactataaaggatacaaattatattggctgtttttttaagcactttataatctagttttggaaagagaaaactagattagggaacaatccataaaacaaaattagggaatagttgataaatcatgtgttgataggttgaaaaggacttagagcaagtacatatcagtatggattttgaaattttagcatacttttcacagtggaggttgaacttcacttgggccttgaagcgtatattggattgcgttaggaaaagagaaaattgaggaataatgtgaacaagctatgaaggtgaaaatgtgtacacatattttgccagagtaaagaaatggatgagtttcatgcataggttgactcatttttttttatttttagtagaactagcagcgataataatactcagtaagtgctaactgctattactttgggattgtgctaagtattttacccatattatttaatctcactgaccctgtgaaacagattttactacccctattttataaattaattgtggaaaagctctataacttgtccaatggcatgtagctataagtagagtaaagccacagtttaaacatgaacactctccaacctta

SEQ ID NO: 195628 - DNA, 1000 bp, Homo Sapiens
ctacatcgagggtgagcaaactttttctgtaaaggtccagatagtaaatatttgtggctttgtgggccaaatactgtctctgttgtaactctccaactctgccattgtagctcgaaagctgcaaaagtgagtaaaggagggaaggtgttccaataaagccttaatggtgaagacaggcagccgctggggtctgggctgtggattgcagttcgatgacccttgccctgtatcacgcaggttctcaaatcactcatcctcatttgcagttagatttcagtacaatgtctgtatcttcttaatctatcacaacagcgacaattaagaatctcaagagcactagaattaaatcactattcaggctcttccacaatgcttgctatgccaggcagcacaggaaaaggaaattttgcagccatacaatggtggtgaatgaagtatgtattcagcagagcaaaatgtaagggcaacacattcaatcgttttcttaacaagaaatattttcatggacacacccactttggctgttgccacggttaaaataaattcacaggcagcgagagggcctccgttgtcatggcaactgagccattctccaaggagaaacgtgggaccctgacgtgttggcactttgccagatgtggaaactgcgaagtgcttggttcttttcataccacataatattcacctctagtatcccggtgtgtgattttctttgcagccaaccaaatttttccctgtttcccagatttgtctgttgataattgacacatctgttaggatcgctaatcttggtggtgcacgccttgtctcacctgctaaacacctcctggaaaggcggtttgcccttgtaccgcgttctccccaattgctaaatctccaggcttacatgaggattccccaccaatgaccttaagtttttccatctgcaacaatgtttttctcccaccagggagctagctgatggcacacttgcgtctgatgcccggcttagaggaaggcc

SEQ ID NO: 195629 - DNA, 1000 bp, Homo Sapiens
ttctttatacagcaagctttatttcagaaaggaacagcagactcccaggggagaaattctttggaggataatatattcataacaaaaataaagtttttagatcaaattaagctcaagaccatatctaatacttgatgaagaatttcttcctcctttccctagagtattgtcaattatttttaaatgatctcatttttataaagtctttgaattaaaatggaaaacataattaatgcttttggagagaggaatgagaagatggataccacagaatatgacaattccaaaaaaggtatgactctctggactggataacaaatctgggacaatgaaaaaaaaattgacatactcaaacagtcccctaaattgatcacttcccttaattaagaaaccactaggccaggcacagtggttcatgcctgtaatcccagcactttgggaggctgaggcaggtggatcaactgaggtcaggagttcaagaccagcctggccaacatagtgaaaccccatctctacaaatatacaaaaattagccaggcataatgacgggtgcctgtaatcccagctactcgggaggctgaggcaggaaaatcgcttgaacctgggaggcggaggttgcagtgaaccaatatcatgccattgcattccagcctgggcaacagagccagactccatctcaaaaaaaaaaaaaaaaaaaaaaaaaagaagaagaagaagaaaagaaaccactatattttgtttacatttattagaaaggaataggaaacagattttttaaatttagtaataaaagggctaatgtatgtgaaataattagtaattcattccacttagatacttttgggaaaaaaagaagcagtatcttctgcttcttttttgagtgtgagacattttaaaggtactttgatatcaaaaatgcaatttcaagtataaggtaattcttcctctaatcacagaagccaattacttaatgcacaaaaggatgttagacaaggaattc

SEQ ID NO: 195630 - DNA, 1000 bp, Homo Sapiens
tcacaccttctcatttccctgtcattcaaagggagaaagaaggaaggcaggagctccagagtgtgaagagtagagtagctgtggaaacttttagggtgggggagacccgagggggatagaggccatgcctctgtttgtggtattcctacaggcctgggaagagtggaaacccgccctcgctgtgtcccagcagagcagggtggtggagctggccccagccccgcagccccacagccttgtggcttctgcactctggtgtttgtcttggctgagagctccacagggctttttgaagctgattccatcaaggcaaagctggaggagtcaggacatgggatcacagaagaggcagctggaaggggcctcagatggggaaatagagggggtcccacagtgagatgatggcaaagcaggaagagagcccagggctcctgactccttgcacagtgctcaaaccaagaccatgtagcttcccgagtgggtgaggagcccgagacaggctccaaatcttctaggaagacatttgaatgccaaaggagcccagaattgtgctgtcccagaggtgcctcctcttctgggttcctgacacagagactccaggactccagattccaggggctcactgcacctgtagacccccccgggccaggcaagggtctccaaggaggcctagctggcccgggacactgggccatgccccacccctgacaaccccataattctcagatgtggattcaggactgcccttgctttacctctctgctcagtgaggaccctcccgtgtcctgttccacacagatgcagatggatcacgtgtctcacagctgaaggcctcccccatccgtctccaccatctgctgaggccccataattattccaaggcccggtgcagcctcactcagaggggagagttcacgcggtcctgtaatgcaacccaggcccgaggccgcgcgggcagggggtcccagctgggtaatgagccgctggctttattgaattc

SEQ ID NO: 195631 - DNA, 1000 bp, Homo Sapiens
cataacatcatgccagctggcaaaggaaagtacttaaaggattcagatccatttttatagagcaggctatgcagagtgaatttagggctgagagacagtaaattgataacaggcacagggcatcacaaataaatgatggaacagagtctgcaagtggggacggaaggagagcatgggagtaatacaatgctgacttgggaacactcagactctttgcactcatttggaacattggagtattaggctacgtttttttgttgtttgcaggatatttctttttcttaagaacttcatattaattttatcttctttctttttcattaaacaagacaagatgaggaagagaaagatcagtgtgtgtcaacaaacttgggccttattatgcaagaactttcttaaaaaatggagaatgaaaagagagtccttaatggtatgactcaatatccgtgttattctctatttatgataggaaaatacgtgttgcctgggagttatctatgccatgtgtatctcccccgacacatacaccaaaaacactaaaatacagcaacgtttatacaacagaaaacgctattcttcaggccatgaatctgtttgaagatatttcagttgacatgggctcataaattgaggtctgaaaccactgaatctggtagcaattgagaaatcaatacatgttttaaaagccaatggtcacatttgttactagtgtccccagtcatggagactagggttaagatactgacattccaaagatatggtaaacaaaccaacccaccacaatgggtaactggcattttctctttgagatctttttctcttcttgaaacaattagttttcttcaaaaaagtagaaaagttggaattgtattaaattccaagaagaaaattagcattagctcttataatcttaccatataaaaaatcttgattaaactttggtatattttaaaaatcagatcgatatagctaggtagcatttttaactaaattggaattc

SEQ ID NO: 195632 - DNA, 1000 bp, Homo Sapiens
cagtctcagagcaagaagggtgttagttagggaaggcctactatcatccttgcttccatgttaaactataaactaaattcttccccagttatcttagcctacaaccaggagtgaacaaagacagataacctttgaggctagaggcaggaaggagtcagccacgttagatttctctcactgtcaaaatttttgcaaatgtggtttcacttattggcatgagacagtataataactgtatggtacttgatatgtttctttcaagtaatgagaatgtaagctatctgagggcaggtattttggtctatattgtttgctgatggatcccaatcccctgcaaataagatagtgtctgatatgtgataggcactcaataaatgtttatggcattgataaacaataatatcacttaatgtccagtcaaaattatctccagccctcataatatgaatcaggtcaggtctagtaaattcccatcctcatgtccacagtatttgtaaattcccagctggcttacattttcatgaacatttctgattttgagtttctgcttaagtaaactactctggttaaccattgcctaaagacttcatatttaaataaataactcataactcagccctttaccttgctttctgcacataaacactcagaaattgtcaattctgtattgtgaacatactttcctgatgcactggcaaaagacaccactcaacatgaatatcaggcaatcctgttatcagtgttctcactcaccccactgctttactcattttcttctccttttcccttctgtctctcctaaagttattgcatttccaaggcagagcactttgcgcatttcatttgcacgtttgactcctataaatgctttagagttcccaggaggtgtatattcttaaatgcccagccaaggtgtagccatagaaaataaggaacaaggctgggcatgatggctgactccagtaatcccagcactttgggaggccgaggtgagtggatc

SEQ ID NO: 195633 - DNA, 1000 bp, Homo Sapiens
cctcccaagtagctgggattacaggtgtaagccaccacgcccagccacctatttttattttttatttttgagatgagttcttgctctgttaccctggctggagtgcagtggcacgatatgggctcactgccacctccctatccctgactcaagcaattctcccacctcagcctcctgagtagctgggactacaggcccacgccaccacacccggctaattttttgtattttttttgtagagatggggttttgccatgttgcccaggctggtctcaaactcctggactcaagtcatcttcccgcctcagcctcccaaagtcctgggatcacaggcgagagcgaccacaccagggtatttattcatttttgacataggatctctctgggttggcctgtaatggcaggatcatagctcactgtaacctcattcccctgggctcaagcgatccttcagcctctgcctcctgagtagctgggactacaggcctgcaatacaatgcccagctaatttttaattttttaatttttatttttatctttttagacagagtcttactctgtcacccaggctggagtacagtggtgcgatctcgactcactgcaacctttgcttcctgggttcaagcgattctcctgcctcagcctcctgagtagctgggattacaggtgcccaccaccaagcctggctaatttttgtattttttagcagagacggggtttcaccatgttggccaggctgatctcaaactcctgacctcaagtgatccacccgcctcggcctcccaaagtgctgggattacaggcgtgcaccaacgcgcccggccatttttaattttttaattgtagaggcaggggtcttgctatgttgcccaggctcatctagaactcaagtggttctccctactcggccttccaaaatgctgggattacaggtgtgaggcaccacacacggccaagtcttcgctattgtcttaaccagtttaaagagatgaaatagatc

SEQ ID NO: 195634 - DNA, 1000 bp, Homo Sapiens
agagggcttgataagagctatctcttcattctcatcctgatcttggagtcactcaaaagatcaagagagtgttcctgcaggtgatggggcaagaattatggctttcctattggctcactccaccaccctccacagggctctttacaatcatggaagagaatctcactgacttcatcccttctcaggccttccccctatctccttggtgactgctcagcgacattgagaaccaaagtctggaaggccttggtactcagagtgtggtctgcagaccagcaacatcatcatcacctggagcttactggaaatgcagactttcaggccccttctatgaccttctgagtcagaatctgcatttaccaaaatccctaggtgatagtaggcacattacagtgtgagaggcttgccgagggactatctctgccctctccctctgcaacctccagatgctgaatttctctgctctaggagttttattcattcagcatgcacccaacacctattatgtattgacatgcttaggtcctgggaaaacaaataaataagatggagcccttgaggagttcatggtctgataggggaaacagatgtgaagacagtaatatgagatatggatgaaatactgtgggaggacagaaaaaggaacgatctaacttttcctggagaaaactggtaaacttcacagaggaggtgaaatttggtctgggttttgaagaatgaataggagtttattagccagagagggtattgtatagggaagagcatgagtagaggcatgggattgtggaccagcctggcatttgaggggcaaaggctgtggctctgtctccagatagtgcttcatgtcccagggaaggctccaggctttgctgcaaatcaaagggcttgggaaatggtttctgcactcagcatgttgataagaatatggataaatatctacacatcacaggagcctcttgttggcctcttacactctaaagccccaggccctcttgccctg

SEQ ID NO: 195635 - DNA, 1000 bp, Homo Sapiens
gaggacctttaaaacttctccaactagagttatttataccttagtaaacctatagcattttggttgctatctgtattatagcacatatctcattgtattgtaatagcctatctgttttcttccttgaacatgtgttacgttgttacattctcagcaaccaactaagtctcaaatgcttgttgaattagtgaaaaatgtgaggttcagtgctttttcctgccatacaacattgcccagagagcttttagagcttcaaaacatgctttcctggaatatcataaaaatcatgtatttatagtattgatatataatactgtacttttagaattttattaatttttttaaatggagagcccagctatcattttactgattttcagggaataatgtcaataattaataatttgttacaaaggaacttaccctttaaaaccaatcaataagtaaaattttttaaattaaaaaaataaagaccaagcaaatgttttatgttatttaataaaactcataatgtatattgattgacagaaaaggtgcttatactctgaggcactcttcttgtaagggatacagaagatctaaagtaagcagaaaccaatggattccttttaatgttaatttttttaagcacacatgggactgttagagtatttgaagtaatataagtctatgaaatacaagaacagcctttggaaacatacaagatggttttgcaaccaggttacaactgcactatgagttttctaactagtctttgttgctttactgaaagtataatctttgtctcaagccggcataattcatttaagcaaggcagtttgaaaacaatggtaaaaagaaaaggtgaaatcttttttctttgaattgtttcattaacagaaatacctttctaccataccatagaatgctttaaacataaatcaaactggaaccaaaatacagtggcacactgactttccattgactttcaatactcttctgtagtattgacaatattaat

SEQ ID NO: 195636 - DNA, 1000 bp, Homo Sapiens
cccagcatggtgaaaccccatctctactaaaaatacaaaaattatctggacgtggtggcaggcgcctgtaatcccagctactcgggaggctgaggcaagagaatcgcttgaacctgggaggcggtggttgcagtgagctgagattgtgccattgcactccagcctgggggacaagagtgagacttcatctcaaaaaataaaaataaataaaggtatccacttcttttttatccttgctgacaccacatgtctattgtttaacaaaaagattgttaatttgatgaatgattgtttttaacttacacttattatttgttagtaaaacttaactttttttatttgtttattggttatttttcctgttttgtaaattgttttttcgtatatgttgtccatttttctgttggtttattttacattgagttgttagagtgcatgttttgcaaatggttttcctatttaatcgtttgcctttttaatttgttattactgttttgataagcagaagattgtgtttttgtgtgtgtggttttttttttttttttttttgagatggagtcttcttctatcacccaggttggagtgcagtggtgccatctatgctcactgcaacctccgcctcccgggttcaagccattctcctgcctcagcctcccaagtagctgggattacaggctcgcaccaccacacctggctgatttttgtagttttagtagagatggggttttaccatgttggccaggctggtctcgaactcctgacctctagtgatctgcccgcctcggcctcccaaagtgctgggattacaggtgtgagccatcgtgcccagtggaagatagttttttattttatccatcaatctttcttttttaaaaactaatgtcttttatatcttttgcttttggccttcctgaacccaagataatgtgaatcctttattattatttttttttaacttgaggctttttgtgatttgctaataagcctcttataaatgttt

SEQ ID NO: 195637 - DNA, 1000 bp, Homo Sapiens
atttttttttctggaactccagttatacaattgatagaccatacgcatatcatctctgactcttaacattttctcttaatccttttgtctctatatgctttatgctggatattttcttttgacttaccttacatacttttcatacttttctttctgttcctcagattgtgtaatctcaattgacctatctttaaattcactgatttttttcttttgtctgctcaaatctgctatcatgtctactgaattttttttcaattattgaatttttcaattccaaaatttctatttgattcgttaaaaattttaaatctttattggtattctttatttggtgagacattgttctcatatttacattaagttctactgacatagtatcctttagttttttgaacatatttaaaataggcaatttaaagttgcttagtatctccaacatcagggcttccctcagagacaatgtccactgtttgcattttgccccttgtatataggtcatactttcttgtatctttgtatgtcttgtaattttttgttgaagcctggacattttagattatataatgtgttatctctggaaatcagattcttctcctcgccagggatttattgatgttgttttgattatttgtttagtcacttctctgaactaatttttccgagtctgtgttattgtgcatggccactaatgtctttgcttggtttgtttagtggtcaattcatactagacagacgttttagcaaaagcacaaattattacatactagacttttgaataactactgtgttagtagaaattatattattaaatccatacatgttaaggttctactgtagtattatagctaattcctttgattttctgggtatttagttatatcagtaatgatttttaggagtctgattctaatatttattccctggtttttcacacaaattgtttacaatttagaattattataaaaatagtgctttgtattgtgtatgcagagaattc

SEQ ID NO: 195638 - DNA, 1000 bp, Homo Sapiens
agcaataggtgcagaacagcgatggaaactccctcccgtggtgtctgtgcctcgggcctccatcgcggttaacctgcatacagtctcagagaagcggcactgccctccatgacagcctcccctcaacaaggatgctctctccagcgggtgcatgggcttggtctcctgggaaacagcttcaaaaagggaacaaactggttctaagctccagggagaggccagggagggcctgcctggatctgcccccaacgtcccgtcccccaattcttgttctgtatccccatgagactccgggaagtgctgcgcgagactctcttttctgaactgcgaggcaggacatggtaccagacaaaggactttttttctagcattatcaacttcttccaatgaaaaacttttcaaagctgtgaaaatgacatcccgtgattttactgtttgtttacttcttcccccttcaaccataaaaggaagaaagggacaagataaataaagagatgagggactggggcggatagaaaaatcaagtaggaaaatgagagatgatggctgcgtccagctagtgtccacagtaccgactgcagaagccagctgggggccgaggcaggccacagctttgtcgctgagcttcctggaggccaggacaaagaaaggagtgtggccagaggtgtgttcacagggggcatacaataaaaggggaatatttcataatagaagcccagctcttcctgaaacagaggcctagaaaaaacgatgccccttattcgagggacattctgttaaaatggactctgttgaaaaggcagcatggggtaggggaaagaggccaggctttggggttggacctctagagttcaaaaccccagtttccaggcagctgtgtagctttgggcaggttaggtgacctctctgagttcttgttgatgtctggaaagtgggataatgaggcagtgaatggaaaggtgcccagcacatatctatggatgccccccgcgcagagtgc

SEQ ID NO: 195639 - DNA, 1000 bp, Homo Sapiens
aaaatgttctaaaattgttgtgatggttacacacagctgtgaatacattaaaagccactaaattgtacactttaaatgggctaactgtataatgtgtgaattatatctcaataatcttttttaaaatctggcttcttttccaatgaccctgaacactttgttgacttctttagaagccatccccgcttttgcttaccatcatgacttgcaatcatacaatcacaatttttgtttcttggcgctccccacacatctcgatgaaaccatactctcttctacagttctgctggccttggaggtaataccatctttgctctgagcttcatgagacacctttctaaaaatctcatgtgcaagagggtcttgcacaacttccatcaggatgaaaccccagaataaaatagccagtttcacccaaagttctcagcatgaattaactagtcaaatttccacctctaccttctaaaaatgaaattatcagtaagtctaagacttatcagatgtctccagttacagggttgagatttccacacatatagtttaaacacaccatttataaactaccttgtctctgtgtcaggttaaaaattatacaaatttgactgggtgcggtggctcacacctataatcccagcactttgggaagccgaggcaggcagatcatgaggtcaagagatcaagtccatcctggccaacatggtgaaaccccatctctactaagaatacaaaaattagctgggcgtggtggcaagcgcatgtagtcccagctactcgggaggctgagacaggagaattgcttgaatccgggaagcggaggctgcagtgagcgaagatcgtgccactgcactccagcctggcaacagagactccatctcaaaaaataataataataaattatacaaatttattcagggatgcatataagagtaagctctgggtgccaggcgcagtggctcacgcctgtaatcccaacactttaggaggccgaggcaggcggatc

SEQ ID NO: 195640 - DNA, 1000 bp, Homo Sapiens
gacaggggacttatatttgggccgatggattaaaatatgaggtgaggcatataaccagttatagttctaagctgtgattattggatggaacaatcagtttcccacaattgaacagactgttttcgtagatgtcattcagcatatgggttaagaaaaatttgcagaaccagaggatctagtaactcatgactgcatgggacccgccagtaattgttattggtttcatctgtgtgttctagaggtattctatgtgttctaagcacagagagcacacgtacatgtatgtagcttgtcctacttttttctttgagacagggtcttgctctgttgcccaggctggagtatagtggtacgatcataacactgcagcctggaacttctgtagcctgtcttgctttttacaaacacacatagtttattatacactctctttggcatatttacttagttagttagtgagtctgagatggggtcttgctctgtcacccaggctgtagtgcagtggtgagatcatgactcactgcagccttgaactcctaggctcaagcgatcctgttggctcagcctgctgagtagctgtgactagaggtgtgctccgcagcacgcggctaatttatttttactttttttttttttttttgtagagacagggtttgccatgttgcccaggctggtctcgaactcctaagcttaagcgatcctcccaccttggcctcccaaagtgctggggattacaggcgtgagccaccacacctggcctgtacctttaattttgagatcaaaccatatccattcatgtagatctgtttttagtggctgcatgtattccattatgtggcttttatttaacctgtcttgtggggttgaggggaatgtgtatttttaagctgattgcaaggaccaaattgttcgccaagagattgtaccaggctcaattcccacccacaaagtgagtgagcacctgaaatgctattctaaaaatcccaaatgcagagttgct

SEQ ID NO: 195641 - DNA, 1000 bp, Homo Sapiens
caggtgaggccctgagacctgcccaggcagcccacaaggtggtaaagaaggggctagagtgagaactcagggctcacagctccactggcctcttcccagcactctgacttccctgagaaagaagtttgccatgaaagaagagagtagggctgggggagcgccctcctgtgagtcaggcagaggctgcaatgggctcagcggggagaaggcctgcctgcagtgaccagtgggccctcagctgccaaacccacaactgtcagatgcttctcaaaagcaaaactggaacattaaaggtagaaatcatgctcggccagatttactctcacatgtgcacacacaacttacacatacacatgtgcgcacacacacaacatacatatacaccatacacacaacttacacatatacacgtgcatacacaacatacatacacactcatacacaaacttacacatacacacgtgcgcacacatacatatacacatacaccatacaaacaacttacacatatacacgtgcatacacaacatacatacacactcatacacaaacttacacatacacacgtgcgcacacatatacacatacacaccttacacatacacatgtgcacacacatacactcatacacaacttacacatgtgcacacacgcacaacatacatatacacccatacacacaacttacacatacacatgtgcacacatacacaacatacatatgcactcatacacaacttacacatgcacatgcaacttacacacatacacacaacatacatatgcacccatacacacaacttacacacacatatgcacacacaacacacacatgcacacacatagacacacaacttacacaagcaacaaaacatacacatatacacacaaagtacatgcaggcacacattgtgcacacaacacacatgcacatatacacatatgcacacatgttcacatgtgctcacaacatatacaaacacacacactattttggatc

SEQ ID NO: 195642 - DNA, 1000 bp, Homo Sapiens
aaaagaaaaaaaggtaatcactgagactatggaattataattattttaaaaaatataataaatattcatatttatatttaaacattgatatttaaatacaaacgtatttatatttaaatgttaaaaatcagaattgtatagtcagaaacagtcaaatttaattaaaacatgtttttgtttcttccccagagaacaaatataatatctaaaaaaaaaaaaatctttaaaaataagtaaatgtccataagtgttgaagttgtatgtttcaggagaaagaggcaggaactattgtagtacacctgggtctggatcccagctgacccaccatgaccttgactttcaccctccccatggtcttgccctctctgttccccgttccagaggctgggcactcactgcagctggctaatgatgaccatgtggacatgctttcgggccttcaggatcttctccagccagtggatgtcgtacgtgttggggttccggaaagggatgtcaggtggtggctcacacctgcgatcccagcactttgggaggccaaggcgggtggatcgcttgagcccagaagatcaagaccagtctgggcaacatggtgaaacctcgtctctactaaaaatagaaaaattagccgggagtggtggcgcacgcttgtagtcccagctacttgagaggctggggcaggaggattgcctaagcccatgaggtggaggctgcagtgagcagacattgcaccactgtactccagcctgggcaacagagtgagacgctgtttaaaaaaaaaaaaagaaaatcaacatacacaaaatgtgggtcatgggcagagcagccatgtccccagggagcaggcaggccagctgggggctcctgaaggctaggctggctgcagagggagggagggcctccccctttccccgggaggagggcttggtgtgctgaccctgaccacagacactgactgtatttctcgttgaagagttccttcacctgctcctgcaggatc

SEQ ID NO: 195643 - DNA, 1000 bp, Homo Sapiens
aacatagctaggtatatagagtttcaggtgactgtttaggtactttgcactatcacttttattaagtcaatttcatgggggttcatattagtttcctgaggctgctataataaaataccacaaacttggtgttgtagagcaactgaaatttattatcttacagttctagaggccataaattcaaaatcagcatcactgggccaaaatcaagatgttgacagggctgtgttccctccagagactctaggggagaatcagttctttgactcttccagcttctggtggctgctggcattcattggcttgtggccacatcactttagacttcaaggccaacatcttcacatctctgctcccttttcacattgccttcactatgtgtgtcagacttcccattgcctcccttttaggaatgtgtaattgcatttaaggcccatggagctaatccaaaatactctctcaatctgaagatccttaatttagtcacatcttcaaaggccttttccccgtatctggtaacatttgcaggtcccagggattagactctgttatctttggggaacagttttagcctaccacaggattagaaggagtaagccattgaaattggccaatcagagactgttacttatcaataggaaagttggaatattagggatggaaaaatgaaatgaatagaataaaattgaacctcctatggatattgacttcaccagaccttggcttacccatttacaccgccaagataatgcagttttaagagcactttttataatcagagattgctctataaatcagatatttccttatatatttctattttctgtagtcctgtgttttccaattgtgtgctgtgaatcattagttggctgtgaaatcaatttagtgaatagagaccagcattaaaagaaagacattaggataaaaaatatctaaatgcatcacatgtagtaggggtaattattgtttcatgaaacaatatgtatatgtgcattggatc

SEQ ID NO: 195644 - DNA, 1000 bp, Homo Sapiens
aaaaaaaaaaaagaaaataaaaaatcaatagagaaaatcaattaaaccgaaaactggtaatttttaaagaccaataaaattgataaacctgtaactgaactcaccaagagaaaataaaagacataaatttaaaatataaaagagaaattaaatgaacaattctatgcccataagcttataaaagccataactgccaaatataactcaagaaataggcaagcagaatatgtttgtaccaattatgttgactgaaattaaggctgtttaggcagaaaaaatttagtaaaggcttactggaagccacatatgaggattgactggggaagacacatcagcaaagtgggtatgttccaaagtctgctacaagtccgaaggcttttataaggaagtttgggagaaggaaaggtgactcctcatatcagagttgtccttttcaccggaaggtacaatacagaggttaagatcattggcaagagattgcaacatacaggctaaaatgtctgtgtgcaagacaatcagtaaaacttcatgattctagaacaaatcagcagtgtctgtgtgtcagttgtttacatgttaatcgatatgtcaatcgtgtgaggaactgacaataaaatttgaggattccttattcaaggacaaaaggttcaccatgaatcataagaccatcaccacgtgggtaatttggaagcttgccaaatgtgacctaaggttatcaattaaataaattgaaggaatagttaatattcttccaaaaaggaaacttcaggaacagagggttttacttggaattctgtcggtatttaaggaataaataggggccaggtatgatggctcatgcctataatcctgactctttgggaggctgaggtgggaggatcacttgaggccaggagttcaaaaccagcctgggcaacagagcgagacgtcgtttctatgaaaaatttttaagttaactggacgtggtgatatgcacctgcaatcgtagctacttaggatc

SEQ ID NO: 195645 - DNA, 1000 bp, Homo Sapiens
ttaccagacatagccaaatcactctccaaaatgattgttctaattaacactcacaatcctaccatcagcgtacagaagttccagctgtttcatatttttgctatcacttggtgtggtataaaaccatcattctcacacactgttaaaagggcacttttggctgggcacggtggctcacgcctgtaatcccagcactctgggaggccgaggcgggtggatcaactgaggctgggagttcgcgactagcctgaccaacatggagataccccatctctactaaaaacacaaaattagccaagtgtggtggtgcgtgcctgtaatcccagctactcgggaggctgaggcaggagaatcgcttgaacccaggagacagaggttgtggtgagccgagatcacaccactgcactccagcctgggcaacaagagcgaaactccgtctcaaaaaaaaaaaaaaaaaaaaaaaaggcactttcattcaatattggcaattatgtacccaaatatataacgcatacacattttagacacaccaattctatttgtaggaatttatccagtatacagagaacttatcacaactggtactaaccttgggattagagccttggactcctcagcagtctctgggcaaaggttggccaaacaggccaactcaaacttatgaagctttttctggagtagcaagctaatcaaaaggaaaaaaaaaaaatcaaaataatcaaaaacaaataaacaacaaaaatcaaagagtaatcaacaggaaaaaagggatcaaacgtagctagtatttaaaaatagctagacggccaggtgtagtggctcacacctgtaattccagcactctgagaggccaaggtgggtaatcacttgacgtgaggagttcgagaccagcctgagcaccatggcgaaaccccgtctctactaaaaatacaaaaattgccaaggcgcagtggctcacgcctgtaatcccagcactttgggaggccgaggcgggtggatc

SEQ ID NO: 195646 - DNA, 1000 bp, Homo Sapiens
ctgggtggaccagatgtatgatcgctgctggaaacatttcacaaaactgcctttgcttgtgttaacgtgcttccccaggataccttcctccatccataatgtcaagcctaaacaagaatgctaagagcttgagtcactgaaagctcgggtaggtgccagcgtctgttcccagactgctcacgcattacttgagcaggacatggatggtgacttctatgggacccactcccatcaataatctgagggttgtgttagctcttaggctttgaaatgacagcctcctggggataacaagagaatgggaaaggttagggactagagaagtatgtcactgatttttaaaaaattccttgatatggaaaagcaagatttctgttttcttgcattatgagtgactgtgtgggggaggtaggaaagtgtgcaaatcacacccattcaggatatgacagccaagacaagaaagatagaggcacagtttctcttgtcttgcaataaactgtcattgtatcactttgtctttgattctcaggtgtggtttataatgaccttcgctttctgtttaaataacactatgactcaatggcatattaccaaagattattgccattgaaggctgtgcctaactgtacacttaagtgtagcttaatgatgtcccagtacaacaccacgtggtgatatgccttagttatggttattttattcctaattagcacattaatttaggctgttatattttgcatgcatttgtattccttttaaaagttattttcccctttattcaaagtaaatgaggcattacatgtttgcattgtatttatcaagctcataccatgtgcatttcacattcgttatgtactgagtacctaggaaattgcttggcatattttttgaaatagctttattgagatgtaattcatataacataccattcacccatttaaagtgtacaattcaatgacttttagtatattcacagagttgtgcaaccatcaccatgatc

SEQ ID NO: 195647 - DNA, 1000 bp, Homo Sapiens
aaaagtcctgagcgtgtggttttgccatcaagtgactttttacccgtaagtatataaatccttttcagaaatcacagccaatttttttaaccttaatttgtcttttgtttaaaaagcagtaaagtgtctttttggttacttttggctgtgctgatagataaggctactatttaggttggtgaaaaagtaattgcggtttttgccactggcaaatggcatatggtgaaatccgcatttacttctgcacaaacctagtactactctctagcaggggacttactctaaagcatgagtttgctgggaaacagaaaagcgtgcattctagagggactcattacaggcagtgttacctgaggaatggcctgtggtccaaggttctgtccttcactgttctgtgttccagttaccacctggcccataaaagggaacctgtcaaaacagggtacacaagtatcaagtgatgagcgtttagaaattattaatattaattaaaaactgtattaggtgcttaacagttttctcttccagagaagaacagtggcaatttcttcttcatcaaaacactaaagccctacctttcatgtactgggcagatgtgatcctcactgtaattcgatgaagtgtgctcttagcaccctcatgttacttatgatgaaagtaagattcagagatattccgtaaccttccccacaaggactagtagggctgcaataagaagccagctaggctgactctagaggttttactctattatgtgcctcactccactttacgataaaatgaattcaagacttcagaataaaaataagttgatttagttttataacgaactctaaggaaatgttttctcattccagtctgtgttaaaaactaattgagagcttagttattttatattctaaaacaaaagacatttcccaatttaagaattttcatacattttcatacatttctatatctaatgttaaagcaaatcaaaaatggacgactgaccaagatc

SEQ ID NO: 195648 - DNA, 1000 bp, Homo Sapiens
tatagtctctgttaatgcccgggaaatttgttttggaagacaaagccagcccaatggcatttggatgatgctgacttattttaaaggggagaagatacccctagatgtgcaagtcttttataggaacagctgtctatgatgagtcttcatgctccttttgcttctctgaacattctggcatgcccctacctagctgctattttcttgatttcatagaaaagcacattctaccctcagaaaatctgctgtccatttggaatgataagataaatcagaaaattacccattgttagagctaaaagattccttggggattatccaatccattatttttcaatctcctatcctgacaaaaaagagtaagtgttttgtatggagaaaaaaaaaagaagtttccctttggtaaataaatttgggcttcagagcatattgtatatccctcttggagatccacggtgtgcactgcgatattaaagcctctgagaagtcctgcaaaaaagaaaaccgctttatttgatttaacccagcatttcttaaactgttttgacctcatttttttcttcttttttcataataaatattagcacctcacaggacactcagcccagtttggtaagcatggcctccttcatggaagaagaaatctgtgttcagaaatattaagtgacttgctcaaaatcaacacaaagccagacttgaagccaaattttctaactcccactccattgttctttctacaatttataaccatgtcgtggctgagtaagggtttatgacttttaaagatgttgtcatttacattcctaatggaaaatgtaaaggcattagggtcatactgacatgtgtttgaattcaggtcctctgattttacgagctcatgaccttgggggagcgaatcctgccagtctctctggatctctttcttctgtaaggtgaggatgataataatgacctcccagggttgccgtgaggcttagatgagagagtgtatgtaaagatc

SEQ ID NO: 195649 - DNA, 1000 bp, Homo Sapiens
gtctgctctcagcacttattttcagcattacactgaaggatctagccactgcaatacggcaagataaaaataaataaaagacttccagattgtaaaggagaaagtaaaaacagcctttatttgcataagacatgatcatctatgtagataatcctgttaaatttattttaaaaactatcactagaaataggctagactcagtgtctaataccggcactttgggagactgaggcaggaggcttgcttaagcccgggagctcaaggctgcaatgacctgtgatagcaccgcagctctctcatctgggtgacagagcgagaccctgtcttacacacacacacccacccacaaaaaaactatcacagaaataatacacaatatactaaagttatatttctatatactagcaacaaaacaaacaagttgaaattaagaaaataatacaatttacaacggcatgaaaaatgaaattcttagggataaatcagacaaaagtaaaacttttataatgaaaagcataaaacatcactcagcgagataaaataagacctaaataaatatactgtgctcatggatcagaagactcaatatagctaagatgtccattctcctcaaattggtgtatacattcaatgtgatcccaatcaaaatcacagcaggctctgtgtgtgtgtgtgtgtgtgtgtgtgtgtgtgtagatgctgacaaattgcttctacgatcgcatgaaataaaactaccgtaattaagacagtgtggtattagtctaaagaaagcaaatagatcagtgtaacagaacagagaatccagaaatagacttgcgtatgtatggttaattgatctctgacaatagtgcaaagacaattcaatagacaaatgacagtgttttaaacaaatgatgctggaaaaattagatatccatatgcaataaaataaaatttgattgtttcacatgttataaaaataaactcaaaaaggactatatatcaaaatgtaaagctt

SEQ ID NO: 195650 - DNA, 1000 bp, Homo Sapiens
aaatgcagccctgcccgctggactaaactcccacgctcttcactcagatcagcagggagaggcctcttctagctcccggggtccacacaatgccatgcccgtccctgtccccggggcaccttgtcaggctgggtggggcaggcacacacaatctccgcatcttcggccgagaagtagtcattcttcagcaagttgtccaccagacactgagtattgcggatgtgagtgaccagaagttcccgattgcttttcagtaattgaatgtgggggtgagactctgatgggattatttccatctcactgtggccctgctcttccatagttaaagtagcaagcggctacttttcccaaattcatcttcagctgcgtgtgtcctctcagcagaagggcaatcaggattcaggccgcgccctccagggcccctgctactctgcgcagcccctgaagagatcaatgacatcatcagcaaagcaaaagctacagaaagagctcaccccacctcccactggttgtggggtttctctacctagagcaggaaggaaccatgcttaagacctttatctggccaggcaagttggctcatgactgtaatcccagcgctttgggaggctgagatgggtagatagcttgaagtaaggccagtagtttgagaccaacctgtgcaacatagtgagacacccatctctacaaaaataaaaaaaattagccaggcatggtggcgcacctgtagtcccagctattggggaggctaaggcaggaggatcacatgagcacaagagttcaaggctgcagtgaacgatgatcacaccactgcactccagcctgggtgacagagcaaggccctgtctctaaaaaaacttttatcttagatgcattaaagaaaaaaaatcataatttaattgtttgcacttgagggttacatctctagggtaggtgaccagagatagccaactcttttttatttttaaatcaaaacatctttattattactataaagcaa

SEQ ID NO: 195651 - DNA, 1000 bp, Homo Sapiens
gttcttccaattataaaagaacattaaaaaaaaacattttaaaagttcaaaaaatgatgaaagtatttaacaacataggagagcaccaggcatcactgtggccgcctgtgcagtgaagccagcgtggctggccttgctgccttctgggaggggctgtctggcccgcaggctggagctcacacttacgtgtgtacatgtacacgtgtagggggcgctgctcatacttgatgagatccccccaaaggccgccggctacagtagggacctggagggaccaggatgatagcaccggggccaaggacagtggtgggtagcactgagcggtcaccagccctccccgcccctagcagagcgggcccacccctccaccctcgcccccgaggacaaggtcagtgggcggcagatgacttttcctccaggaggctcttcaggctttggtggaagtggttccttcaacaaaggcaggtaaaaaaccagcccacaagccaatcctgtggcctccagggacaaagggtggcaggatggtcaccttcaaggtcattcagtaaccctcacccccacagggacaggccttctatttcctattggggaacacacaataattccacaaggggggcctgagaagcttaacacactgacggcaccccgatctccagattcccacgtccacctgcctctgtgccgtccgacacacatcgcaaacctcccgagggggccgaaactcccgatgccccagctccctgccccccacctccagacctgctcccccacccacagtacagcttatggtcccgcagcacagagctgctgaaaccagggacgccaactcctgctccgtccctctcgctccctacatccaactgaccgggaagtcctgccagctccgccctcaaagcccatccctgtccaccttttgctccatttattcaagcccctgctgtctcctgcttgaggtatcctcctcacccactcttgtaacccttgaggcctgaggaagctt

SEQ ID NO: 195652 - DNA, 1000 bp, Homo Sapiens
tgcctgtccccaccaggtgagagccattgaaacctgtccccacgccactctcaggtagccagtcagcagtgcagtcagcaagcagtgctgttgactgttagtgttctcaaaggcacctctaaacgtggaggctgctgggaagggaaatcttctgactagggaagagttttagagtttattaaaaataataacaaaagaggccaggtgcggtggctcacgcctgtaatcccagcactttgggatgccaaggtgggcagatcatgaggtcaggagttcgagaccagcctggccaacaaggtgaaaccccgtctctactaaaaatacaaaaaaattagccaggtgtggtggtacgcgcctgtaatcccagctcctcgggaggctgaggcaggagaatcacttgaacccgggaggcagaggttgcagtgagccgagatcatgctattgcaccccagcctgggcaacagagcaagactgcgtctcagaaaaaaaataaaaataataaataataaaagagaaggaggcaacaactaggagagaagttgtcaggtaagcttgggcagcaagacaaaggtgaggatgctcaagggggagcctcatgggaggggaagaggaaatgttcctccaaagcaaacatagggttccatggagggaagtaaaaaagttaagaatgggcccagcgcagtggctcattcctctaatcccagcactctgggaggccaaggcgggtgaattgctcgagcccaggagttggagaccagcctgggcagcatggtgaaaccctgtatctactgaaaatacaaaaaattagccgggcttggtggtacacgcctgtagtcccagctactcaggaggctgaggtgggaggatcacttgagcctaggaggtggaggttgcagtgagccaagattgcgccactgcactccatgcagcctgggtgatggagcaagaccctgtctcaaaaaaaaaaaaaaaatgcatactgttcagggccagagaattc

SEQ ID NO: 195653 - DNA, 1000 bp, Homo Sapiens
tccctagcacagaagacagtaggaggagctggtcttcctgagtcacaggcagagagaagtgactgaagatgtgtcttaggggactcccaagccttcctcccagaaggggtggtgcctgggaggacctgcagaggagctcccgcatctcctcaggccctttcttctgcgccatcttgtggcagttgagagcaggcccagggcagaagggaggcaggggcattaagagctcaggcctccagctgagggactgcagatgttgggtaagctgaccctggaattaacaggctcacaccttggagggggcagtcccatagcaggctcccaccctgcccttcagagttgcagcaggtaatgctgatgccagaaccttgtcctgacaggaagcctctgattagggccctgaaccaagttccttttcgcatctgcagactcatggaggcaaccactcaaggtcactctgagaagggttgaacgtgctttattaaaaggactgaggatcatgtgtgttggtgtgtcccggagtctgctctaaggtaaatatgtgtgtgtgtgtgttgggggggcaggggttgtgcctgtaatcctgtgtgtgtgacctccttattagaggatttttgttcattaaagtaggagtgtgaatttgtttgtttgcttgtttgtttttaaagtagtactgggtgccatgtcatgcaatatttggaacatacttaaactaaaaacttgttatttttctgtacttccaattcccccggtattgtatattttatttgtcatccctaccctcagaaagcagactaatatctgcagtgcacctggattcacagttggaaatataggggacaaaaaaagtatagtaatattattgtgaaaattcagtaaggcataggcagattatcaccacctctgtaagaatatatagagacacatgtttgaaagatgcataatgagatgtagaacagtgtctctctcagttgttgtgttgtcctagctcagagaattc

SEQ ID NO: 195654 - DNA, 1000 bp, Homo Sapiens
taaatactaagggaactcagaggctggcgggatcctccatatgctgaacgctggttccccgggtccccttatttctttctctatactttgtctctgtgtctttttcttttccaaatctctcgtcccaccttacgagaaacacccacaggtgtgtaggggcaacccacccctacaggatgaccggtatgcactcccatacttgcgcagcattttttttttttaagaaacggtttcatcatgttgccctagctaatcttaaactcctgggctcacgcaatccttcctgcctctgcctctgcctctgaaaatgctaagcaaaaattggtaaattctttcatctgaattttatataatataaagtagtaagaactgtagaacttccaacacataatgactccatccaaatctctgcactagaggcaaccaaactccatcagcagaataggaacctctgtttccagcctctctgagtaaacagaatcttaacttctttgattaccagctaacatacacaactagcctaaacacattcacactgaccaaccctttgtaattttttactggagtgctgctctctcccagacttccaatacattgagaagcattgacctggacccctgacggctagttgaggggtctaactggaccagtggttctcaactctggttgtacattacaatcacctggggattttaaatgtcctcccacctaccccttcatgctcccttaaaaatgatcagtcacttctgcaaaactcagaaggaagctccactctttaccctatcagtagttactaaataaaatctgctctctccactttaatcaatgtctgcctttgtttatctttaatagtagttaatgcctttcatatgtgtaaaggttatgtccaaaaaccttaatttaaaaaaatctgtatcaaagaataaaattttcccaataaaatggataataaaagaattaaaatatctaactgcttttcacacactatttagaagaattc

SEQ ID NO: 195655 - DNA, 1000 bp, Homo Sapiens
agtccaagcaagatgacagctgaattccaattcagttgacttgtggtcagggcaccctggaacataagcaatttaaactgagttttctacacttggataaaatggcacattttggcagaattttaaggtttacagtttcacattccaaggtgtggctgttgtaccattctgacacagaattggcatctctaattaacgttatgtaaaacagaggcctgtgaggcagagctggaggagaccgttccttgtgaggcaaatagtggtatttttagaaccaaaccggatttttcttttggggtccacatggcacttaacagatggtgatgtgggcgactgtggtttaagatctgactcggttcataaagacacccagtcttgtcctggtcccaccctataggcagtgatggctccaggctcatccaaacaactctgcaacaagatggtgtcagccatccacgtgggtggacaccgctggaccccgtagacaggcagcgcctggactgcagggcatctgggaactcagcctgcttcagcctgctggcgatgttcagaattagcataagcatgcttattttaatttggaaaagaacttgaagtttttcccctcatggctctttttagttcttaaagaatataagtttccattgaaactacccttccccaaaggctactacccttctttgaattgttctttaatattccattctgtctgctatataggctgcattttttcagaaaccaattctggcaagttaagtagaaagaagagagaaagccatttaacatgtgctcattttcttttttcagaaaacattacacataactcctggatagaaattccttactaccaacacacgtgctactaaattcattttcttaatttgatcacattttatttttaaaaataatttgttccctatatcaatatcctgttccacttatttgaaatttatttgatcttgtctttgtgatttgttgaattaaaaagtactcagaattc

SEQ ID NO: 195656 - DNA, 1000 bp, Homo Sapiens
agtggggtgcacctaattatttcttacatgctatagtgttcctatctccaccttgtaccacagcacaaaaagatgcatacataaaaaatatatatttaagaaaaagacacacaaacatgtgtgtgcccagtttctgatctttttaaacagggttaactgggaatctaataagtggttttgattaaattaatataagtcgaatcttagaaagaaagcaaccatgacccacgattctaactttaaaactagaatatttatgtgatttgtattattctttgtttttaagagccttccaaatggtaagaattactgaataaaaaatataggtaagagattaagcagtttatctcaaagcaaaacatctaaagtttctacctctgtcctaggaacaaaaataaacaaccttcacatagatctgaaagttaagccttacacagattttatgatttgcattttacttcagagtgtatagtataaaagcgtggatatggtttaatttttttttattttgccaaacagcactgacataggtatggttttaaaaaataaatatgtgggctgggtgtgttgactcactcctgtaatcccagcactttgggaggctgaggtgggcagaccacataaagtcaggagatcgagaccagcccggccaacatggcaaaaccccatctctactaaaaatacagaaattagcagggcatgttggtgggcgcctgtaatcccagatacttgggaggctgaggccggagaattgcttgaacccaggaggtggagattgtagtgagctgagattgtgccattgcactccagcctgggcaacaagagtgaaactctgtctccaaaaaaaaaaaaaaaaaaaaaaattttctgtcactacaatcacataataaacgttccatttttatcacagctcagaatttgtaactataaatattactctctactaagaaagtaaaattatcttgccctctatattgtagagaaagaaagcatggaattc

SEQ ID NO: 195657 - DNA, 1000 bp, Homo Sapiens
aaaaacaaaaatttgcacttagcaatgttcttttgcccagtcttcttcgtggcccagagtatcaatttgcaaattgacaggttggacctggaggacctcactagataaatagaaaaaatttacttccatgatcaaaattggttgacttaaatgcagtatggaaaaggagtaacaagtaacattacactggagaaacgttataaacagtacctgcagatggtcagcattagcatcatcagtgatgtcatgttgatagtatgcacacttgatgtaatgaaaatgccattcacctctatgatcgtcctcctaaaaaaccataacctcagtctaataagtaacacatcagataaacccatattgaaggacattctcaacaaaatacctgaccagaactcaaaactgtcaaggttgtcaaaaacaaggaaaggctgaaaaactgtcacagtctagaagattctaaggtttaatgactacatgtaatatggtgttctttatagtattgtggaacagaaaaataacactagataaaaactaaagaaatccaaaaaaatatgaaatttagttaatgtgtcaatattggttcattagttatgacaaatataccatactaatgcaacaccttaacaactggggcagggtatgtggaaactctttgtgctatctctgcaacttttctataaatctaaaactattctaaaataaatttgtttaaaaaaagaccaattcccataaaaaattaactcagaaagagatcagaagttaggccttattaatatcactcgaaaattaattacaaatatcaccccaaaattaatttagtgggtatgggagatgtgtgtgtatatgaagcaattgattttttggggggtgtttaatgatttgtaagttaaattatgttgaggaacttggacttgttcagtgcagttaaatgaagcaacagtattattttggaagacaattcttttgaatatcctgtaatttatttttaagtatagaattc

SEQ ID NO: 195658 - DNA, 1000 bp, Homo Sapiens
agaggagttgaaactggaagactatcatctattgtggtagtggtagatttctccaaaatatggcactcatattttatctgttttaattaatgatcaacttaatatttgcaatgtttggactattgcaaaataagttagactgtacgtatatgtcacaatttacataattggtttcacatgcaatttgtatttcatacattataacatgtgaacaaatagtttcttcccccatgcaggagtattggattataactttgttacctggaaggcggcaggtgtcttggttgatggtggtggtaagtttatgattacaattatggagtaacatggaagagagacaatgtgagtactatgagaaggtaattttcacatttgcctagtgaaagccaaggggactacaaaatttgtgacaaatgaaaatagtaatattgaatgcagtaacttctgaagatgtgaatttaacagtgaccactctgtgctctttcccactgtttctttatgtacttacatggttatctcatttgatcctcatacgcattctatatttactccatttcagataaggctgaggcaatatgaccaagtagaagtgggggaaataaggctgggatgggggctctaagagtctgtgtaaggcttaccaagcatgctctggataaacacattcaccaacagagaccgaggatgacttccctgaatgtcattgttttcctaaaagacctttcagcaggaattgcactcaaaaataaattgggacatagtaatttgatgctcctgtattgctgtctactcattgtctctcttttaaataagaacacattgcacatccatttctcaatagcatcaatgaatacaactatctaatttaagcttcattcaggaaataaatagcaggttctaatatgggctccagaggcgtaaatacatgtgtatacataccagcatgaatgtacataagtgcatttgctctgcccggtcacagcaattactacaaaagctt

SEQ ID NO: 195659 - DNA, 1000 bp, Homo Sapiens
gcaaactctgagtgattgttatgtaagtaaaagtttgggaagcacttcctcagttggtctctgaggctgcctaggtcaccatttctattagaatcacaggatgccttttgggccagtgtgaggacgagagaggttctcctaagaatcagaggggcccacttcaggaccccacactcccaggcagctgactccaaatcttgcagctttatgctcttcgatcctatggtcctctgacagagttcctggagggccaggagcttccagagagaacttgaactgactcagtaaagccaggtgaggagtagaaacccctccctgatctctgtatgctatgtgacacaatgggaactcaaacaagatcattcttcccatttcaaaaacatgcacgacactcagctgcagagaacactggaaaaaagaggcagactcgaagcattatatttttcaaagtatgacatgaacgcattcctaagaggaggcagaaatcaatttatatgtcaaaatggaactcacttcccatcatgtaatgtgcgtgttcttggaaagctataaataagtgaaacatctgtgtatcaagtcatactttaaaagaagccagaggccgggtgtggtggctcacgtctgtaatcccagcactttgggaagccaaagcaggcggatcacttgaggtcaggagttcaagaccagcccggccaacatggtgaaaccctgtctctactaaaaagacaaaaattagccgggtgtggtggcgggcacctgtaatcctagctactcaggaggttgaggcaggagattcgcttgaacccgggaggcggaggttgcagtgagccgagatcgtgccactgtactccagcctgagtgacagagtaagaatgcatctcaaagataaaagataaataagaggacccaggaatacaaattatattttcaaacatgtgatttaaaagatgataatggcagattcctttatagacaaaacagatatcttctacttgaattc

SEQ ID NO: 195660 - DNA, 1000 bp, Homo Sapiens
tcattagtgatagaataacaatgggagggttataaggaaaaaaatatttgcccagataactatactttcccacctgatatttttaactcaccagatttaataaatccgatagaaattattccacttggcttgctcatattgatcatcataaccatcattattattctctatacagtcattttgattatgtgaccatctgtaacagaaatgctctcccacttccctgtgctgacatcaatgttacccactctttaatggtaagtttagatattatcttgtctaggaagccagctcttccactcctagtttagagggattccttcctcctatgaacttcaaatctacacagtaatggctcacattgtattagcatttacaattttcaaagcaccttcacttactcctgttgtcattgggtatacaatctcgtacctccttgtatttgtgtggacagttggtaaaggggcacttgagaggctaccacatgccaagaacttcactaagtgctttatatactttctcattaaatcctcataacgaccctagaaggtggatagtgtgtttcctattttgcaaatgattaatctggggcttaaagaggtaaaataattcacccaaggtcacagataactagtaatggagatgctagaatttaaacgtaggtctgtttgactctaaagtacaagctttttccattagaccactttgcagtgttcgtgaataatggctagcagcaggtatgataaacttcctatgtgcataataagcacttcacgtgcatgatctcatttaatcttcattaacgacttgatgaggcaggtactatttctatcattcccatttttcatatggggaaactgaggcaccaagacggaaagtaacttgccgaggtcaccaaactactcagtagtagaaccaggattcaaatccagacctacctaaatctaaagtacaatctctctcctactacactaacctgtctcattctctcctcaaagct

SEQ ID NO: 195661 - DNA, 1000 bp, Homo Sapiens
ctttcttagttttgtagagagcaagtttacccaagtatatggaatagaagttcattatcatgttaaaaatccatgtaataactgggcgtggtagctcatgcctgtaatcccagcactttgggaggccgaggcaggtggatcacctgaggtcaggagttcaagactagcctggtcaacatggcgaaaccccatctctactaaaaatacaaaaattagctgggtatggtggcaggtgcctgtaatcccagctacttgggaggctgaggcaggagaattgcttgaacccaggaggcagaggttgcagtgagctgagattgtgccactgcactccagcttgggtaacagagcaaggctccatctcaaaaaaaaaaaaaattcatgaaagatggctaattatcccttcctaaggatatatccagttatggtcacttactcctgaatcattcaaatgcacaaacaaattcattagtggtaaagagaatgaaaaacaggcatgtacaaacatctgcacctacatacaaaaataacacatgaatatgaatggtactacctaatccactcctttaagtagaatcagcagaacaaaattgcacaataagtaccactacttagaactacacccacagataccttggaatgccctgatggtacaagtttgggtaaattttagtgctcataagaaggaaaaaaaaggggcttccacaccactataaatatagaatcctagaatgctagaactagaaggaattctatggacccattcattttataagaatcctaccccttcattttataagaaatgagaagctgagcaaagtgacttgtccaagatcttgtaaccacctagtggcagatctgggcctagaccaagttacctgggtccagtctagtacttccactatacaaggctgcttgctctgaaacacctagaatctgttctcaaagcatagtctcaagcagagtcagggggggtgtccctgagactctttgaggagatcct

SEQ ID NO: 195662 - DNA, 1000 bp, Homo Sapiens
aaacaaagtgcgggtcagggctggtgggccgtcatcgaggcagtggcagtcgggctggagagcagggtcagagctgggaggagttctgaattagagctgtagagctctggtgatttattgggtagatgggggagtgagcggtaggggaagatgaatcccttcgatcgtaaaagaccgatggtatcggtccacaattgctacataactaaccataaaatctgatatttccaattcaaactcaagactatgaagttcttacttaacctcttctatctcacacctgtgtcccctttgtctcatgtcaagaatttcagtcttaagtaccctaaggatgatagaacatacgcaggcctttgctttatcccgcagtacatactcggcagttccggaatgacaataccagcattatcttcaatgatatgatcattgaaaacacttacaattttccccatgtcttctcttccttgagatagaatgcactagggatgtacagttgaattttgtactttcaagtcacttggagtactgcttctctagtcaccaagaagattacagttaagtttatttgttttatttttaatttcagagcttgctttttattattttactttttttttttttagacaaagtcttgctcaattcctcaggttgcagtagaatggcatgaacaggactcactgcagcctcgacatcctgggctcaagtgatcctcctgcctcagcttcctgtgtagctggtaccacaggtgagtgccaccacatctggctaatttttttttttgagatggagtctcgctctgtcgcccgggctggagtgcagtggcgtgatcttggctcactgcaagctccgcctcctgggttcacgccattctcctgtctcagcctccctagtagctgggactacaggcgcccaccaccacgcctggctattttttgttgttgttgttgtatttttagtagaaacggggtttcaccgtgttagccaggatggtcttgatcct

SEQ ID NO: 195663 - DNA, 1000 bp, Homo Sapiens
gtctccagcaggatggaaccccagttgcccatctggactggttcattgatgccctttattggctcatattcctctcctctcttacacctccctcccctgcaaactcattccaggaccgcttcgtggaatgtcctctcaggtaaactacttgccacagcatttgcctttgagggaacccaaactaaagcatgtgaaaaagctgtgggaggagttgttgttgttgttttaatagattatatttttagagcaaaactgagtggaaggtacagatttcctatgaactccctcccccatacctacatagcctcctctgttatcagtgtcccccaccagagtggtacagtggttataattgatgagcccaccttagcacatcattatcacataaaagtccatagttcacattagggttcactcttgatgttgtatattctataggttttgacaaacttaatgacatgtgtcttccactatagtatcatacagaatagtttcactgcccgattctctgtgctccacctatttatctctccctttcttctaacccctggcaaccactgatctttttacctttgatgttgtatattctacaggttttgacaaacatataatgacatgtgtcttccactatagtatcatacagaattgtttcactgccctaaatattgtctgtgctccacctattcatctctccctttctcctaacccctggcaaccattcatctttttacttaattttgccttttccagaatgccacatagttggaattatacagcatgcagtcttttcagattggcttatttaacttagtaatatgcatttaaggtctttccatgttttctgtgggttgagagctctaaatgaccttaggtttcacagtgactttttagatatgacaccagagtcatgatcctggaaagaaagaattggtaagctgggccaggcatggtggctaacgcctataatcccagcactctgggaggccgaggcaggtggatc

SEQ ID NO: 195664 - DNA, 1000 bp, Homo Sapiens
catgatagtgaataagtctcacaagatctgatgggtttatcaggggtttcggtatttgcttctttctcattttctcttgccactgccaggtaagaagtacctttcacctcctgccatgattctgaggcctccctcgccatgtggaactgtaagtccaattaaacctctttttcttcccagtctcagatatgtctttatcagcagcatgaaaatggacaaacacagggacactatttccttttgcacaatggaaagcatcataaataaggtaaaaattaagatacagaacagaagagcacatgtgtaacttcaatttattgacttggatagtttctagatgatatacacatatttatacccaacaaattagtaatttaaaaaatcctcaagacatttaaagatgggcaaattatatggaataaaatgtattgaagacaaaacccaaatggatagtaatcacaaaaagtctggtgtcactgagagtcaagggattacaaaatatcacaaaggaatgcacttccatttgcaaacagtggtaatgccgtgtgttgatagaaatatgtaatcgatcttttctttggtgggcaattagcaatattgaggaaagttaaagatgtatgtatccctaccacttgaaacacctggaaatgccattaccatgcttatattctagaacagaagttctctgccatgactgtacatgagaatcactgctctagaatatggcacaatacacattcatgcgcattattccttgtccagcaaatgcaagagtttctctagaggaggggcttatctcaatcctaggctcctgttagaatctcttcaggggttctttcacaaaagtaatacctaaacatccccctccaaatctgattaagttggcctggatggagtctgactgaggaagcctggatgcccattaagttcttccagggaactattgaaaatcttgacacccacgttgcaatccaatatctctggatttgagccccaagct

SEQ ID NO: 195665 - DNA, 1000 bp, Homo Sapiens
tctgattgctggcagagctctgtctgggtgaggaaagagcccttcaggtcttcgggaaacactccccttgggcatcactggcagagttgatcaatggcctcgcctccccatgctcttgttggaaagaaggagctcccacttatggggcatctagagtacctttcaaaggtgggctccttgaccctcacaataacccaataagtggatattatgagccccatttcacagagaaatgggagaaaacagaggctcagagaggtcaagaaatttgttgaagccacattgccaagaagtgagagagttgaaattaatgcccagatttgtttgattccaaagttctggagcctttgggattccccaaaccctgagtgagaaagttcaccttccaggactttccgtgctcctctggcaaggacaacatggtgagaattaccccaacttgtccagggccttcctgtgtgagattaaccttccgttccccgtttcttccatgggactccaggtggcagcctcgagggaattccatcttcaggatggttgaggaccaagaaggaagaatctctgccctcctttgatatcccttacctctgccctggctctcctaaatttgttttaagattaatgattgtggccgggtgtggtagctcacacctgtaatcccagcactctgggaggcagagtcaggcacatcacatgaggccaggagttcaaaaccagcatggccaacatggtaaaaccccgtctctactaaaaatacgaaaattagctgggcgtggtgacgcacgcctgtaattccagctactaaggaggctgaggcaggagaatcacttgaatctgggagggggaggttgcagtgagccgagatggcaccactgcactccagcatggatgacagagcaagaccttgtctcaaaaaaaaaaaaaaaaaaaaaaattaaggccaggagcggtggctcatgcctgtaatcccagcattttgggaggccgaggtgggcggatc

SEQ ID NO: 195666 - DNA, 1000 bp, Homo Sapiens
tgaaaggtatttcagatttatgctttgcagatgatattggtatgattaatgcattcattgcttttttttattgcttttcacagataatgtacatgatgcatggaaaatgttgtgggtttaaatctgtgccaggtttagactgtgaatatcaacagatgttatcatataagtaccataattattataaaataaaaaatttgtcatgaaatgcagtgacataaatttcatttatgtaaattgctttcattagtataaaaccttagtgtagctgttagggtctgtgaagcactttagatgagattaacttggtataaagtggtcacaaatgggttgctttaaatttaactgacaagaaaataacacccaaaacttaggaaattgctgaggcatttgcctgcattgctggtaccgcttaaataggttgactgtgaattaataacaatagactgctggctcaataattgcagaaaataattgaaaggagaccttaaataataacttaaaagtattttggtcttgctcatttctgttctgtttctgtttttcgttagtatgcctgcccaccgcttcagtactgccattatcaatagctttcgggtttgcactgcagttttgtccatagttgtggtgctttagggccatgacacagaacttgcatttagatgtgtcagaatacaaatattgggtgcctgatggagcagctgtagtggctgagcagtgctgcactcacattcctgtggctgggtagcggccagttgctttctgccctcaggagggattcggtccagcggtgtgggcaggtggctgaggttcttcttcctggctttgagctctccatgttttgctctttttcttacatccttttaaacaaaacaaagcagtaatattctctcccctgtgttgcagagaattactattatgttgcgcttttgatctaggttagagtggggcattctgactcatttactgaatttcgcagaaagacactaaacaagattga

SEQ ID NO: 195667 - DNA, 1000 bp, Homo Sapiens
gatacatctttccccatctatctgaattgtagtgtcatatggaatacatttgccaccccattaccccattatatgttcaaatattttttctactctttcctgccatttgaccatatcattaagaaactttcatttctacaagggataaagcagtaaggaaaaaagagaaagcatacatgcatgttgtcaagacggcaaaaaagggaaagctaactctaataaaacctgagtaagatgactaggttctcagatttttagatgcattcctagtccctctttttatctctcttcttacatgtgcatatcttccacactcccctctaaggacaacctatcagtcgaactgaaatatcaatttaagaaacatctatctagaaggaagaagaaagaagcccctgggtaagtaagagtattggcactgacaagattatcaccaaaagcttctgttccatccagaaagttgcaaaacactttgctctttcttcatctccaatcattgcttctttggctatcacatccattcagaagcagaactatgtaagattttagcaggtaataagacaatcagaccatctgaataaagcctattgtaatagtagaactgcagagctcctgttagctgtctttgatgtgcattgtgaagaaccaaattcaccctccaaaaatcaatcagctggaagagcccatttgatgtctatcaattacaaaatttaatggctgcagactagaagaaaataaagatgatttatgtaatgttttcaaattcccttggatgctcaggctggcctcatactgtttggtaatttagaaagacaggatggcacatttaaaaaggtacctcacttaaagttctgccacagtactacaagaagtttattatagatggatctcctagagaaatacaggattcttattttaacgcctcccaccagatccttggtagtcatcttgttgttgtttacatgtgatttgaagtgagtgaagagctgattgagaattc

SEQ ID NO: 195668 - DNA, 1000 bp, Homo Sapiens
ggtggctcaagcctgtaatcccagcactttgcgaggccaaggcgggtggattatctgaggtcaggagttcaagatcagcatggctagcatggtgaaaccccgtctctactaaaactacaaaaatttgtccggcgtggtgacaggcacctgtaatctcagctacttgggaggctgaggcaggaaaatcgcttgagcccaggaggcagaggttgcagtgagccgagagtgcaccactgcattccagcctgggcaacagagcaagacttaaaaaaaaaaaagactttactttttataaactctgctgatgaactgtgcaaatacaaaaggggggtggcatatgcatatccacttatgtgatttcaaattatttctggaaaaatacatgagaaactagtaactatggttccttctagagaggcaactagaaggcaggcagggtggggaaatttcataatttccctttttgaaaattgctgtctagtctatttagaaagaaaaaaagaaaactgctctgacttattatgtgtgaatcttaaaaggatatatatataggccagggttaatggctcatgcctataatcccagcactggcaggctgaggtgggcagatcacttgaaggcaggagcttgtgaccagcctggccaacatagcgaaatcccatcactactaaaaatacaaaaaaattagctgggtgtggtggagcatgcctgtaatcccagctactcgggaggctgaggtaggagaaacatttgaacctgagaggaggagattgcagtgagctgagatcatgccactgtactccagcctgggcaacacagcgagactctgtctcaaaaaataatactaaaaaccaataaaattggatccctacatcacaccatagagagtacattttgaccttgagtaaggaaggatttcttaagaattgtaaaacacgggccgggcacggtggctcacgcttgtaatcccagcactttgggaggccgaggtgagtggatc

SEQ ID NO: 195669 - DNA, 1000 bp, Homo Sapiens
acctatagcctggagcctcccccaccccctgcaccccactccttgcttccagttgtcctgcctttctgaactaaacccatgtatttcttaaatgtattgtattgaagtctcatgcctccctaaaatgtataaaacccagctgcacccctaccaccttgggtgcatgttctcagggcctcctgagggctgggtcatgggccatggtcactcctatttggttcagcataaatctcctcaaatattttacagagtttcactcttttcatccacagaggaaacatacccccaggcttggaagaaggaaagaactgcatccagattgggctataggtacagttacttcctacagaaatgcgtctttcctatggcttcttaaaactaagaaaaatattcagttatgagaaaagaaaagaacttttatctgaggaacacaagtccttttaattattgggcccagagaggtattaaaaacaggcagcaattgttgcagaattttgctccttagttcagttgtaagtgggttcttttcacacaaccaggaaatttaggcacgcagacacattaaagggtgagtagagcaggattttattgggtgaaaagagaaaaaagaaaaaaacagcaaaacgagatggagtcctgctaataggccccccacctcacagattgaatcccaggccgccacacaggaactgaagaggccaggctcctcccactgcctgtggctccgccccatcccccagtgcgcatgttggcaggctcagacaaggccctgggcaggttccctcatctgcacaaaagtatctcatgtaaacacttgtggggcaggtcggagattctccggggacctcttttaatatgcctaggcatttggctgtctcacaatcatgccctactccctgctttgagctatgtattcatttcttgaaatggcttgctattgccacaggcagctataaattaatctaataatgccacatgggacaccataacccacacccta

SEQ ID NO: 195670 - DNA, 1000 bp, Homo Sapiens
ggctacaggtggctgtaggtgctgcagccttcgggacagagcagggcctgtcctcggccaggctggtgtcattatcagctttatgccacgctgcctctaaaggggaaaagagacccagagtgcgagttcagaaattaacaaatgagggcagtgggggctgtttccactgtgccacaaccagatgcggaagattccacgtcacaactgtggtcagcagctgtctgccttgaggaaggctctacacacccgagaaagcatgagagcttccaggagacaggaaagctgctgatgggaaaagcagctgccccatcaagagcagggactctgaggcccctgcggggtccactcaaggcccacggagagcaggctggctccctgctggggccatcagtgctgcgcctgactggctgaaggtgggcttgctctcagcccacaggctcctcctctggaaagaacgcaggattaccactcacttacactttaacagagagctttattttttttgagagacggagttttgctcttgttgccaggctggagtgcagtggtgtcatcttgggttcaagtgattctcctgcctcagcctcctgggtagctgggattataggcacccgccaccatgcccggctacctatcattttttttgagacagagtctcgctcttgtcacccaagctgaagtgcaataacgcgatctcggctcactgcaacctctgcctccaaggttcaagcgattctcctgcctgaacctccctagtagctgagattataggtgctgccaccacacccagctaatttttgtatttttagtagagatggggtttcaccatgttggtcaggctggccttgaactccggacctcgggtgatccgcccgcctgagcctcccaaagtgctgagattacaggcatgagccaccgtgcccagccagagagtttcatttttaacaagatgagagagactcttggtgttcaaagagaggggtcagtccagagagaattc

SEQ ID NO: 195671 - DNA, 1000 bp, Homo Sapiens
ggccaggggaggaatgatgtggtttggctctgtgtccccatccaaatttcatcctgtggctcccataattcccacgtgctgtgggagggactcagtgggagatagctgaatcatgggggtgggtctttcctgtgctgttctcatgatggtgtataagtctcatgagatctgatggttttgaaaatggtagtttccttgcacaagctctctttctttggtgccatccatgtaagacttgacttgctcctccttgccttctgccatgactgtgaggccccccagccatgtggaacagtaagtccgttaaacctctttttcttcccagtcttgggtatgtctttatcagcagtgtgaaattggactaatacaggtactgaaatcctctgactttatttctaggtgtttgtttgtttgtttgtttttgagacagagtctcactctgtagcacaggctggagtgtagtagcatgatctcggctcactgcaacctctgcctcccggatcccggttaagcaattctcctgcctcagcctcctgagtagctgggattacaggcgcgtgctggagatggcatggtggggttccaccatgttggaaccccatgagactttggactgtggacttctgagttaatcctgatatgagtgaagactttaggggactgtttggatggcatgattggttttaaaatgtgaaaacatgagatttgggaggggccaggggaggaatgatgtggtttggctctgtgtccccatccaaatttcatcctgatggggttccaccatgttggccaggctggtctcgaactcctgacctagttatccgcccacctcagcctcccaaagtgctgggattaccggcatgagccaccacacccggccatatttctagtttttaaaatacctaaaactatacatattgataggtataagccacataagcaaaagttctttagggtcctcattttcatgagtgtaaatgggttttgagaccaaaaagct

SEQ ID NO: 195672 - DNA, 1000 bp, Homo Sapiens
atgtgcgctgactaaaggccttaccacatgttttgcatgtatatggcttctctccagtgtgaattctttcatgttgggcgaggtgtgcactctggctgaaggccttcccacactgatcacattcatagggtctatcttcagtatgaattctcttatgtcgtgtgagagatattcggtggctgaaggcttttccacattcctcacactggtagggtttttctccagtatgaattctttgatgttcaataagaaatgattggcggccgaaaactttactacatttattgcatttgaaaggtttctcttcagaatgaatattctgatgtattttaaggtttgcagttccagaaaacatcttcccacattccttacactcaaatagtttctttttctttgtatgaactttctgatgttgaataagggatgaatgccgattgcagaccttctcacatttattgcatctgtatagtttttctccattatgaattcttagatgcagaataagggttgaaagccgcctgaagaacttgtcacatttatcacatttgtacggtttctctgaagtgtgaattctctggtgaagcatcaggggtgaaatcctattaaataatttcccacattttctgcatttaaaaggattctctaaatggtgacttctttgctgtagactctgacttaaggccttcgcattttcagggattttctctccagcatgaattcttttatgtacaacaaagactgatttctttttgaagcctctcccacatttattatatttatgtgttttctttccattgtgaattttcttatgaagtaaaagggatgacatctgattgaaggcttttccgcactttctgcactggcagacattcccaacaacatgaattttctgatgtatattgaaagactgacattgactcaaggccttcccacagtcaagaatttcctttccatcatgaattctcatatgtagaataagggttgttctttgattgaagct

SEQ ID NO: 195673 - DNA, 1000 bp, Homo Sapiens
tgattctcctgcctcagcctccctggtggctgggactccaggcgcccgccaccatgcctggctaatttttgtacttttggtagagatggggcttcaccatgttggcaaggatggtttcgaattcttgacctcaggtgattcacccacctcggcctcccatagtgcttgctgggattgtgggcgtgagccaccgcgcccagcctggaagctacaactacacctggcatcttcttgctcctcgctccccccaccacaaatccccactttctgcttttctgtccctttctgcctgtctgtatttcatatattctctctagctctttctctctgaacctggtggtccctaattctgggctaggttgagccatatcacctgtcagccacttggggcccagaaccattttatcaacatgtccccgcgctgatccccgggacctctgtttaggccacctcacttagcaagagggactcagcagatgggatggagtgaaggaccctgagctcagaggtgatcctggatgatctggggggcccagtgtcaccacagggtccttataagaggaggcctggctgagtgtggtggctgatgcctgtaatcccagcactttgggaggccaaggcaggcagatcacttgaggccagtagttctagaccagcctgaccactatgatgaaaccccatctctactagaaatacaaaaattagccaggcgtggtggtgtgcacctgtaatcccagctacctgggaggctgaggcacgagaattgcttaaacccgggaggtagaggttgcagtgacctgagattttgccactgcactccagccccggcgataggagtgagactccttctcgaaaaaaattaaaaaataaaaaataaaaattgaaacaatgatgatgttatgagcaatagaatgcccttagcctgtgcatggcaacatcacgagtggcacggtgacctggtgtccccgccccgtggagatgtcattgacacaatcagatc

SEQ ID NO: 195674 - DNA, 1000 bp, Homo Sapiens
tctcctgtttcagcctcccgagtagctgggactacaggcatgcaccaccacgcccagctaatttttgtatttttagtagagatggggtttaaccacgttggctaggatggtctcgatctcttgacctcatgatccgccagcctcggcctcccaaagtgctgggattacaggagtgagccaccatgtccggccggaaatgtttattaaaatagcagatgaggccgggtgctgtgactcaggcctgtaatcccagcactttgggaggctgaggcgggtggatcacgaggtcaggagttcaagaccagcctgaccaagatggtgaaacccatctctactaaaagtacaaaaattagccgagcgtagtgagacttgcctataatcccagttacgagggaggctgaggcaggagaatcgcttgaacccaggaggcagaggttgcagtgagccgagattgtgccactgcactccagcctgggcaacagagcgagactccgtctcaaaaataaataaataaaaatagatgatcatagacaggagggatgaagtagaagattcaaagcagcttaaaaaaaggaagtaaaaaagaaataaggtcaggagacaagattgagtgactgtgaaacatcaacaataggcagatttaaaataaagtcaggaaatagctagatcaaagaatagaaaggtgaaccaggtgtgatatccacctgtagtcccagcttcttgggaggccaacgcgggaaaatcacgtgagcccaggagttggaggcaccgctgcactcaagcctgggtgacacagtgagaccctgtctcaaaaagcagcaggaagagaggctggcatgtggggctccagggggtgtgaaggagggtccacaccctccttcctccacctggccatactgagcagcacattctctgagccaacggcccctacaaacacccaccctttcctcctggtagcccagagggcgcccctgcctgctcacttcccaatgtcgggatc

SEQ ID NO: 195675 - DNA, 1000 bp, Homo Sapiens
tcctcaggattcttaggggtaggggagcccgccagggccagtggtgtctttttgaggagtggagagctgggcgggtggcccaggcccttggccgagaagccgggaggcgacttgatggctttgttgacagcaggggcatccaagggcttggccaggctgagcaagccgggccggggggccccggcgaccacctccttcagtgagctggacttcttagccaggcctgggggcagcccaaggtgggcgtcaggcagacccttctgcttcacaagctcgtagaggaggtcgatgggtgcgccgctgctttccgactctgccactcccagctgccgcaggtgggagcgcgcgtggctggacaggccctttcgggtctcaaagcaggcaccgcagacctcgcaggtggtcaggctctgggctgaagggcaacacagaggccgggagagcaggctgtgaggcccacggcccagctctcccgcttctcctcccctgagagtcccactcacccaggctccatggaagtgttttgcctccgtcaggccccccaaacctcacaatgaccctaacaacgcagagaatagcttggctgctttgccaataagggttagaaactgagactcagagagggaaaagttgtgcccaagggcacacagcaggagatagagcccttctgtcatccagccagtgggacacctttcacaacctttcaggcctacggggtgccctggcaacaggttcacacaaacgctgacctgacagccacatgcctcactgaactaagttctaaccaccctctgtggctcaactcctgcccgaaacactggtccttgcagtctcctgcaccctcttccacagagcctttatccttgcctatctgcttctctgtctccccgttccccaacttgaatggccctcaagagcaagggccaaattcattttgctcctctcacctccctggagtccaccccagggcccgtcactagtcaataacaaccttaggatc

SEQ ID NO: 195676 - DNA, 1000 bp, Homo Sapiens; identical to SEQ ID NO: 114906

SEQ ID NO: 195677 - DNA, 1000 bp, Homo Sapiens
ttgcagggccatttcaaaatatgtcaaagaaatatatttttgggtaaaatactttgaattctttcagggcctgctatctgtcatgtgatgctatattagggtcaggttggaatttggtatcttactgctacaaagagtctgttttgtcagtcttaatatctctgtttaatgataatgctgatcagttgtgcctgaattccaaagggaggagggtataatgagggatgttcgacttcccttcctatcatggcctgaactagtttttcaggtttattttggaaatgcccttggccaagaggcagcagtccattcagtcagttgaggggtttagaattttatgtttggtttacagagtaaatatgaggtgagggctaaaagcacattttctgagtcccaaatcaagatacatgggctaactagggatttttgtgccattttcagatgtgagacgctgtcttggaggcatggtatgaatgtagacatgatgaaaattccgaggtattttgatggtttttggacagcaagtcagaatatttggaattgggactatttgggggtttaaattgtaaagaagagcttgagagggaatgttgaggcacaaggacagattaactataggtagctgtagacaaaattcaagtcagttttaaaaatgatgagttgaaaataaaccatgaaactgaattagccagcagccggcaaatgcattttctcattgacacctaagcagtgataaaattccctcattgtagatcctacctcttcttcagaaagcatatataggcttgcctatatgctttctgtaaaataaaatcaaattcccaaaagttccagtaaggttatatgctgttatttttatatacctcctgttctcccccaaactcttgcttcctcaaatgcaacatcttccttctgttgccctcatctggattttcagatcatccatccacccacccatccctcctcccatccacccaatgagaatcaatggacttcctgt

SEQ ID NO: 195678 - DNA, 1000 bp, Homo Sapiens
tttttagacagagtctcgctctgtggcccaggctggagtgcagtggcatgatctcagttcactgcgacctccgcctcccaggttcaagcgattttcatgcctccgccacccaagtagctgggattatgagtgtgcgagtcaggtaaatgactggccaaatctgtatattttctagtcatcccccactcctgagaactcccagtgaataatggattgcctttaaatctaggaatatggttgggaaataattctttaattcttgttaaggcagctagcacaaataaattgtcagcaaaatatgaacaggttgactcgaggtgatatacaaggtgctttagtatgaggtataaaaccttctcaaatttgtttgcctttgagatggctttatgataaaaagatatgtgaccactttgaaatcatgcctgatgccaaaaaagcatgtggtggtggatttttatgtgacacactgtgttctcatcacaaagaacaagctgcgtacaaaagctaaatatgtttgctctcccctttgatcccacagatggatattagtctaatgcatgggttcacaaatatgtgtcctagaattacccaagttgcttactgtaaatgcagattcctaggtttcatcagcaaatattctgtttctataaatttgggatggggctgatctcctgcataaagtgcagatgatcaagggatcacacttagacaaacacagggtgaagaaatcagaaaaaaacccagtgattctatggtatactatagccctgatgagacacacttgtagcctaaaaacatggtttcaaggcaacgtggtataattgcctcaaattagccacagaatcctgctaaaatacatgtattgagaaaataaattaaaagaaactactatagatctgatatttaaagtcacaggatataggattacaaaataagtaggccaggcacaatggctcatgcctgtagtcccagcactttgggaggccaaggtgggtggatc

SEQ ID NO: 195679 - DNA, 1000 bp, Homo Sapiens
tctcctatcacataactgtctcttctagccatgtgccatctgcatctttggtgagtgacatcagtccactaaatagtgctgaagctatgcctgggatgtggaaagagggctgaaaggggcaggtgagcccagcaaggaattataaagaagagagagatgacatgagcacttcctgaagtcaccaaatcaggtgtcattttagatggagctaatctggggaattagatcacttaaaaaaaaaaattcctaggttgggcgtggtggctcatgcctgtaatcccggccctttgggaggctgaggtgggtggatcactcgaagtcaggagtttgagaccagcctgaccaacatggtgaaaacccatctctactaaaaatacaaaattatctgggcgtggtggcacacacctgtaattccagctacttgggaggctgaggcagaattgcttgaacccgagaggcggaggttgcagtgagctgagattgcgccattgcactccagcctgaacaacaggagcgaagctctgtttaaaaaaaaaaaattccttttcctttttttttcttcaggtcagatgggtaatgtgcagatgtcataacaaggttccagggtagcatatctcacacacgtgcacgaaaacccaatcgtcatcctcatgaactacaaaaggatcgcattagataacttttgcatgacatgaagataggggacctgggaaaagattcatccaagctagcaccatgggaaaatgagttcatagagttgtgtacctctgttagtcagggttctccagaggaacagagccaacaggctgtgtgtgtgtgtgtgtgtgtgtgtgtgtgtctgtgtgtgtgtgtagtgacagagagaaagagggggatattttaaggaattgtctcacgtgactcaggaggccagcaattccaggatcttgaggcttggtgggcaggctggagatacagtgacagttgcagtgtgagtccaaaaagtctactggcagaattc

SEQ ID NO: 195680 - DNA, 1000 bp, Homo Sapiens
tgtgatgccaggaggctgctcctgctgaccattcttcctcctctacctgcctccctgaccccatccttccgctcacttcaactgatgtttacataaaccaatgggatggctacaatgcccgacatgtgctgtggctggaaagcgtctatagctagaaactcactggaaagatctattttagcacttgcttatgcataatatttaataatgacaaacataatttaaggggcaaaatattgatagaagaaaagggaaaaatttaaaaagtagccctactataatcaagttttttttgttcgtttgtttgtttgttcatttgtttgagatggagtctcgctctgtcacccaggctgaagtgcgctggcaccatctcggctcactgcaacctccgcctcccaggttcaagcaactctcctgcctcagcctcccaagtagctgggactacagctaatttttggggctaattttttgtattttagtagagatggggtttcaccgtgttgcccaggctgttggcgaactcctgagctcaggcaatccacccacctcggactcccaaagtgctgggattataggcatgagccaccgcgcccggtcataatcaagtattttttaaaaacttttcttaaacctcattgcctgacaaagaagtcaggagctaatccctacttagtttagtaatcacaagtgatgacttagttctggcctacttgccatgtttcttgggacaaaactgactgagcagcagaatccaaggactatggtgcataaagagttaaaagtagtatctgagtgcacagcggttagatcaggtctcaagccaaggaaagcagggcaacacagagcaaataaccaggaaccaaaagaatcagcctgtgtgcttagggtaacaagcaagagcagattaattaaatggggtagtggggacaggtaggaaatccaactggatggaagccaaagttcaaatctcagaagcatcagaaggtcacagaaagaattc

SEQ ID NO: 195681 - DNA, 1000 bp, Homo Sapiens
taactaactgcaaagcctgtctttcattgtctagctcaatctaaagtcttcttaattattcttatcagagttcatagtgtaattctcttcacctttcaagagaattgctaagtgctacacaattgtatttcaccagcgattttctgaagcaatccacttggaactttgatgttcagaagcactccttcaaggctccacacatgtctgttctttcataggtagcagttacacaacacggaaacccttgaaggggatcagtcatttgagtaatggagtaaattgaacctcagtgggctaattatatattttcaaagttcaactaacttaggcagttagattatgacctaaattactgtgtagagtttctgcttcccattttggtttggaactagagccagagtggagacgaataacttgggaagtggcaagaagaagctactggcagtggcatggggggctttcaatatgcaactgcaaggaaaaggaacctacatgacctttttccttgcttcaatttccttttgaaaattagtggccctgacaagggaaatacttgaggcaaggtcttcaaaggaccaccatctgacctctcccttcatatttttccttctttctctctaccagttcttttcagaatttcaggctttcttctaggcttttggaataaaataatactaatcaggaacatactgtctcaatctggcagaatcattaaaaattcagcattggttctatcataatattgacctttaagactgatgaactgtcattttcttggcattctcttgaaattgtattcagtacttttcatgaattatctctgaattattgctgattgtcttttagtcttgcctgggtttccttctacctcagtagtttgatacttctcaaattctctggctaattcctccttttccaacagataaatgttaaagttccttggttctcagtttctggccttcaccccttctgtaactacagtccttccttagaagaattc

SEQ ID NO: 195682 - DNA, 1000 bp, Homo Sapiens
tggtattataaatttgttcatggataaagacagactggctaagtttgctatggaattgaaacatgcttcatgttgactgctctgaccccatacacattaattatagaaaccaccctttttaccatgtggcttccacattttaaccgcagatggataattgttcacaacacattcaatctagatgaagccagcaatctatgaattatgaacactagctgacacaatttcattatttcccttgagaatttgaattgggaaatgcaggagctattgtcacactgtggtgatgtgggagctggaaatttatatataattgggagctaacagacatatttggccatgaacaaactaaataataagccctttagaatcagtacagtgaagcggtggcattaagagaagcaagaagcaaagatgcagcatcttctaagagataaattaccttggcttctgtttgttttccgattaccatgaagccaggatttctgtcctcacctttacattactttaatttaatctctgttcattgcagtcattaatattccaaataacatggctacctaaggccataaagtgacttttggtggagtgaattttgatgttagtttagttgtcttttattaagggatgtagttataagcacaggtgtagaactttacaccttaattcttagtgatgttgaatgtccaccatagtatttttcggtatacctattaaaaccttagaagaaatttctcttagttcttaatactagataatgctcctaagcaattgatacagttttttttttcttgtgttacaatgacttcctctactttggattttgggaaggctgaggtcaaatttgggattcattttaataatgtaacagatattagcggatgacttccagttaaatttattacaacccactcatcttaactgtttttctcttacccttactccctagaaatatatttgtttatttgatcggatatatttgtataagtcatctcagatc

SEQ ID NO: 195683 - DNA, 1000 bp, Homo Sapiens
acatagaatatctctttacttaattagttctttgatttctttcatgagagttttgtagttttcctcatctagatcttgcaaatattttgttagacttatacctaaatattccattttggggggatgctaatgtgaatattaatgagtttttaatttcaaattccacttgttcattgctggtatatcagaaagcaattgacatctgtatccctgtatcctgcaacccttctatacttgcttattagttccagttttcttgtcagttctttcagattttttatatagaatatcatgacatctgtgaacagttttatttcttccttctcaacctgtatacctttttttccttttcttgtcttattgcattagataggacttccagtataatgttgaaaaggagcagtgagaggtggctttcttgccttgttcttttttttttttttttttgagacggtctcgttctggtgcccaaactggagtgcagtgccatgatctccgctcactgcaacctccgcctcctgggttcacacaattttcctgcctcagcctcccgagtagctggaactacaggcacccaccaccacacctggctaatttttttttgtatttttagtagagacgaggtttcactatgttggccagactggtcttgaactcctgacctcgtgatctgcccacctcggcctcccaaagtgctgggattacaggcgtaagccaccgcacccggcctattgccttgttcctgatttcaatgggaaagctttgagtttcttactattaagtataaagttagttgtaggttgtagatactgcttatcaagttgaggaagttcccctctattcctagtttattaagaatttgtatcacaaatcaggctgggtgtggtggttcatgcctataatcccagcactttgggaggccgaggcaggcagattgcttgagctcaggagttcaagactagcctgggcaacatggcaaaaccccgtctctacaaaaata

SEQ ID NO: 195684 - DNA, 1000 bp, Homo Sapiens
gaagtgtcatattttgagaagtggtagatccaagcagttctataatcaaacttatgggagcaggaagtacaaaagtgattggggctattctggtaggggcggatatcaacatgtgagaagtgaggagtcctggaaaggacagccaagcagaagtcgggatgaaggttatcagtaccatcgaaatgtcagagggcgaccatttaggggagataggaggagatcagggatgggagatggccataggggacagcacgcttgacggttgttgccgaagtattttctaacagaaactcttaggtggaatgtttctgaaggctttaaaaaactacaataaagtaaaaaccccagttggaactctttcctctccccagcctccttaccttccctcccatactcgacaagacattgtggacatgagttcaagggggcaggttaattcctggcattgccggttttcttcattcagaatctgtttatctatcaagtgactgtcctcgtaaaaagcagatgtttgttaaagtatttttataagcagcttaatataaaacattatagatttagtgtttggctttttccttataagtttataagtctgatttcaaatgttggaaatgtgtgctttatagtgcttactaaagtgacaagaaaatacaccatttgacacactatagattccaaacataacgttgcaccaaatagaaatgtctattttattatgcaatgccttagtcataaactgggctcagacaattctcagcctaaaacactgttgtcttttaaaatgcttccaacccaaaggcctttcatctcgatatctgtcaaacttgaataatgtcttctctttaatattcacataaggcagcctattaactgtgtcttagcaatgttgtatatagttcttttaatattcataaggtatatttttgaattttggtatttgttgagattgcacagaagtatagtaggaaatccaatgaaatggctgtttccaccaagaatt

SEQ ID NO: 195685 - DNA, 1000 bp, Homo Sapiens
catatactgaaatatgtatccattatgggatgggtaactaaaactaattaacatattaccataaatactttttttttttttttagatggagtctggctctgtcatgcaggctggagtgcagtggtgtaatctcggctgactgcaacctctgcctcctgggttcaagcaattctcctgcctcagcctcccaagtagctgggactataggtgcctgccaccacgcctggctaaatttttgtatttttagtagaggtggggttccactgtgttagccaggatggtttcaatctcctgtcctcgtgatccacccccctcaccctcccaaagtgctgggattacaggcgtgagccaccattcccagcccatacttatttttttaatgtggtgaaaacagttaaaatctactgtcttagtggttttcaagtatgcagtacattgatattaactacaatcaccacattgtgcaatatatctcttgaacttattccttaggtctaactgaaatgttctgcccttttattataatgtggtggaaggtatctgagttaccagtgatgaatccatacaggcctgcagccactggaattcttgcatcctcagaagaaagaatttgactgagggccataaggcagagagagagacccgggcaagtttcagagcaggagtggaaggcttttgtttttgtttttgttttgagacagagtctcgctcttgccacccaggctggagtgcagcagtgcgatctcggctcattgcaacctccaccttccgggttcaagcgattctcctgcctcaatctcctgagtagctgggattacaggtgtgcgccaccatgcagggctaatttttgtatttttagtagagacggggtttcaccgtattggctaggctggtctcgaacttctgaccttctgatccacccacctcagcctcccaaagtgctgggattacaggcatgagccactgcgcccagccgagtggaagtttattttaaaagctt

SEQ ID NO: 195686 - DNA, 1000 bp, Homo Sapiens
gttaatgttctttttatatggaagaatatggtctatcttgataaatacttcatctgcacttgaaagcatatattcttctgttgtcagatggaacgttctgtaaatgtctattaggtctagctgaccgatgttgttcatgccttctatatccctactgattctcagtctacttgttacaccagttattgataaaacatgtagacattgataaaggattgttgaaatctcagattcaatggtaggtttgtctatttaacctttctgttctatcagtttttgctttgtgcaagttctgctgcgtttatatacatttagaattgttatacctttttgtgaactgaccctttgatcaatatgtaatgtcctcccttatcgctacaaaattccttgtttctcatgttaatatagttacttcaactttcttttgattagtctttgcaaaatataccttttcccatccttctatttctaagctacctgtatcttcatatttaaagtagatttttatagactgtatatagtagtcgggtcttgcttttctatccaatatgattatttctatattttaattgatatatttagaccagatattagcaaacattttctgtaaggggccagatagtaaatattttaggctttctgcctcatatattattattatttttttattattattattttgaaacagggtctcacgctgtctcccaggctgaagtacaatggcgtgatcacggctcactgcagcctttgcctcccagtctcaagctatcctcccgcctcacctctcaagtagctgggaacacaggcacatgccactgcacccggataatttctgtatatttttgtaggaaaggggttttgtcatgtggccttggctgatctcgaactcctgagctctgattatccacccacctcggcctgccaaagtgctgggattacaggtgtgagtcagtgcgcccggaccctggctcacatattctttgaagtaactaatgaattc

SEQ ID NO: 195687 - DNA, 1000 bp, Homo Sapiens
ctaatctttattaagtatatgtaaatatttcagagactttttttttaatctgccttaaggcatttcaattaatactgtgatgtatcccagtgaacactttaccttccaagtgtttactagaaattttctaattttcacgttggcactgagggagtctttaatacataacttacctttcctaactcttcaggagtgcacaatcagagagttgggttgttttagaactgacaaagggctcggggagtttcaaatcaagtcttcttatcttacagataagaaactgaggtctaaagagatgaagggtcattgtccaaggtcagacttggggttatgtctcagaactaaggctggagggacaggttttctgattttttaaccagcatatttcaagttaatttaccattgtgtaccataattttctcattaaaaaattgggtagggtatgatgtatgatgtgcttttggcataactgactctcatgagaaatagccccaattagaaccattataaagatatgtaaattacttgtttgttagtttgatgatcaaatagaaacatctcaatgttctcttttctcattgtgatttgtgtgtgattttatagtttgtttttgttttgttttgctccattgtcaaatttgaaaacagctccctcccgtttagatagtaattggtcaaaatcacaatgcttatggatgtgcctttatctctgcttactacatgtctgtttagctaaaatattttcttctaaaaagaagctgagaatcaatgcccacagttcaagtgtggtcagcaaaaaaaaaaaaaaaaaaattgcagagatatatctaattatcctggcctggaaacttccttatgcatcaaagccacctctgtacattggacagtgctggtccgcaggagccagcctcttccacagactttccatcagaatacatgccctgttagatgagcccttctcactctttctcatcagggactgagataccagaagtgaattc

SEQ ID NO: 195688 - DNA, 1000 bp, Homo Sapiens
gcagggttgccagattaagcaaacaaaaacttaacaagtccagttaaatttaaatttcaagtaaacaaaaattttctgttgcgtgttttataaaatattttgggcatattcataaaaaattgttgtttatctcaaattcatatataactggacttcctgtttttccttctttttttttttttttctggcaaccctaatcataagcctggggactagaatcagcagctcttactagagccagaaccttcctaggcaagaaattgacaagtcagcaattaacaggacagttgacagaatttgggacaggcattgagggccagtctcaaaggtaaagaaaagaagaagacaggcacaaagaatgtaactatacatcccaagccccatagaggacttgggaggattctctcctcccatttgattttcctctttcatttagggaaacaagcaaactattctgtttttctgtttacctcaaatttgggaactttctagattgacattaatgcaatatttttttctgttgtagggccacatgcattcataatacactaaaatgtgaaaaaagggtatctttgttttctctatttcttatctagtatttctcagaagcctccacttcattgggtgatggagaaaaatctaaatttagtccagtctggcaaacagttctatctaataatgcaagtgatcttttggggataatgcagctttatagacttaaatgtttttcagatgctttctctaatattcctatttctcaggtaacctggtaccatcttgaagagaactccaaaaccgtagagtttatcacctcagagtcctgcctggaacaaaaatcactgatgaactttgagttctattacagaccctgtgtagtgaggtgagtattaaagccaggccttgataaaaggataaataacttcttgagtttctgtagattcagcagggatcagaagcccagcagagctgactttccgtatgactgaggtggagagaattc

SEQ ID NO: 195689 - DNA, 1000 bp, Homo Sapiens
attttcgtcccttttatttcaaagttcaagttgaaagtcataaatagtaaagtagccttttcaagaatcttcaaataattgaataaaatatttcataacctgaagttaactggccactgcccaacatcctggtacctttgatagatatcatgtcatgagttttaacatattttgacttgtaattgttctgcagtatgaaatgtcgaaagttaatcttggagaactaaagactgagtcattcctcatctgactcctctgatggtctacagtttcgatctttgggcgacagcctcagcaggcacattacatttctgtggtttcatcaaaaatgcttatttcgatgtcttgtgagtgtgaaatgtggataaagcctctcctacatacattacggttctatgatttttctttagtatggactctctgatgtcaattaatgcttgaactcacgatgaagggtttgccataatcattgcatttgtaaggattctcccaagaacgaattattggatgttgtgggagaagtgaattgtgcatgaagaccttgccacactcatttcatttggaaggcttctctccagtatggaccacctgatggtaagtgctgactgcacactgaaggctttgccacactcattacacttgtaagggtcttctccagtgtgaattctccaatgtcttgcaagttgtgaattgtgaccgaaaaccttgtcacattcattacatttgtagagtttctctccagtataaactctctccaatgatgtgcaaggttttatttttgactaataaccctgctacataaatcacatttatgtcatttctctctgggatggattatctaatatacagcatagagtgagtcatgattaaaggttttgccacgctcatttcatttgtaaggtttttccctaatgtgtgctttctgttcttgtgtaaggaagaatagattaagtaagtcccatacttgttagaaatatggatttgggcttagaaggaattc

SEQ ID NO: 195690 - DNA, 1000 bp, Homo Sapiens
agttgggaggtggcagggttgggatgaaccataggcatcgagactccagaagctgagctcttgcctccagggtaaatatgtgtgtgtgtgtgtgtgtgtgtgtgtgtgtgtgtatacacatacatatatatgtgtgtgtgtgtgcgtgtgtatgtatatatatatatatttttttttttttttcttgagacagagtctctctgctctgttgctcaggctggagtacagtggtgccatctcagctcaattacagtgattcccctgcctcagcctctcaagtagctggaactacagacatccacctgatgcctggctaatttttctatttgtagagacggggttttgccatgttggccaggctggtcttgaactcctgggctcaagccttggcctcccaaaatgctgggattacaggcgtaagccaccgtgcccagcctccagtgtgaatatttgaatgagggatgaatgagtggacagcaaggagtcttcgggggaccatgagaaagctcagcatctcccaaggagggccagggcaggggagggcagtggctagagttgctgggtggccggtaagggacagacgtgagcagctgtcccccacgcccattgccctggccccgattgtggctgctcatgaccaaggcacctccccaggggtctcaggggactgggggctaaggaggggacaccaggagctgtctgcctgggcctcttccagggcagggaagaggacgaggtttgtgtttgagagatggggatgcttcccaagcaccgctgtgagccagccaggctctcagacacagcctcgttcatttcattctcacaatgacccagaggagacgaccccatcatggcacctcagcatatcatagatgaagacactgagacctgcctgagttccccccggcgtcctccccttcccacacctgggccttctcctggagccgcagacagcagagtggctgggatcttgggctccagaactgggcaggctgaattc

SEQ ID NO: 195691 - DNA, 1000 bp, Homo Sapiens
atcctttgtctcttgggttttcctcctgatttgtgtttatagagtggggtttttttttctaataaaaagggaatgtgaaattaacatttgtataaagaatttatgagaattggcgagggacagtggctcacgcctgtaatcccagcactttgggaggccaaggcgggtggatcacttgaggtcagtcgttaaagaccagccctggaaacgtggcaaaaccccatgtttacaaaaattatctgggcatggtgttgcgcacttgtagtcccagctactcgggaggctgaggtgagaatctcttgagcctgggaggtggaggttgcagtgagctgagatcgcaccacctgtggtccagcctgggtgacagagcaagaccctgtcttggggctggggggtggaagaggattgtgagaatagacaagtgatccagcattgccagtacctttggagctcttcctacctgggatactattctccttaatcttgtcactatcattcaatggcatgatctcggctcactgcaacctccgcctcctgggttcaagtgattctcctgtctcagcctcccgagtagctgggattacaggcatatgccaccacgcctggctaattttgtatttttagtagagacggggtttctccatgttggtcaggctggtctcgaactgccgacctcaggtgatctgcccgcctcaacctcccaaagtgctgggattacaggcatgagccaccacgctaggcctatttgcttttctttcattttactctgtgtcccttaagaagatgtcatttagtttttgcatattgcttttaaaaatttaaataggctgggtggagtgactcaagcctgtaaccccaacactttgggaggccaaggtgggaggatcgcttgagcctaggagttttgagaccagactgggcaacatggtgagatcctgtctcttcaaaaaataaaaaaattacctgggcacggtggcacatgcctgtggtcccagctact

SEQ ID NO: 195692 - DNA, 1000 bp, Homo Sapiens
ctaagttttcacaatttaaataaaattctttcttttgattatatttcagattttgtccttaggaaactcttgatacaaattgccataatacattctaacaggttctgttattttcctaccagtagtgtaccaaagtgctgtcagtgtattttaaaaaatgcttcctccacttttccaaaagcttatttacatacagggaaagtttcagggctatatgcttcagtttaatgggggagaatgaggtagatcagtaccataatccttaccttccctttttccatgtcttggactctatatcaaaagcccatgagattgtaatcacagtgccttccttgtgttttcagattcaggaattgtagggcctcaacctatagactttgtcccaaatgctctccgacatgcagtagatgggagacaagaggagattcctgtggtcatcgctgcatctgaagacaggcttgggggggccattgcagctataaacagcattcagcacaacactcgctccaatgtgattttctacattgttactctcaacaatacagcagaccatctccggtgagctctgcttatgtgattctgcttctagaggatgatttagagcaggccagctgccaatccaggatctgtttttctgtggtttgtatgttgttttatacaattgaaattgtaccagtgataaactgtacaaatgacatattttttttaggactgtattatgagcatatccccataataggagaagtgatacaaggagctcatgccaggaagtaagtcagctgtcactctgaactgttaaccccacctgatggtgttttgataataatactttctcagtgaagggagcagtaaatgttgatttacaagtcacaagttccttatttcatggacatgctcggagcagttctggtctagagtgggaagggacttagcaacaatggcaaggtagtgttgtgatgctgatcacagatcctgatccaaatcctggcccagagtgatc

SEQ ID NO: 195693 - DNA, 1000 bp, Homo Sapiens
cagcctcccaagtagctgggactacaggcgcacgccaccatgccctgctaatttttgtacttttagtagagatggggtttcaccatgttggccaggctggtctcaaacttctgacctcatgatccacctgcctcggcctcccaaagtgctgggattacaggtgtgagccaccgcgcccggcctttttttttttttttaaatacagatgagattttgtcatgttgcccaggctggtcttgaactcctgagctcaagcaatcggcctgtcttggcctcccaaagtgctgggattaccggtgtgcaccactgtgcctgaccaaaacagataattaaaacttttttcaaaaaaatcaaacaagccaccttggcccccaggattccacaggttaagcctatacctctgcacctctgctccctcctcaagacccaataaaatagcagtcctggaaggaaagacagcagaagccacaagaacaaagagaagcatcagggtgggggtgggggggttgggagggtatgcgactaggcggaaggggagggaatcaatgcaagccttgaggcgggagcagatggctgagaggtaactgagccagcagggaggctgctgagacctaggcaccctggaaggggggcaggtagagggaagaaggggagagggggaaagggcggtgacaagaagcagaaggaactggagactaggaccacacatgcaaagtgactgagggtggggttaagcccaggatccctccttgactgggggtaaaccaggaggactctgagaacagcccagggggcaagtgccacactgaaaacaagcctgttcctctggcatggggctggtgggcaatgcagacatcaagagcccactcagccttggccttgaactccagtaaccctgcctggtgttgctggggacaaaaccacacctgccactgaggtccagataggggctctgcttagctgtgagcctggccatgaggtgatgacgatgggaaggatc

SEQ ID NO: 195694 - DNA, 1000 bp, Homo Sapiens
gttgttaagtggggccaatgccaaaaagaaattagggcaatccctgctagagtatctatcaccttaatagatttcctactcctaccaattactcaggacgcagattctttgagaaagtttctcctccttccgagacaaaattttacacattaatatgtcttatgctacttgctgttgcacatatcactaattgaaatgatacattaatttgcataatttgctcatttctgtgccttcttctctaggccgtgagctccagggtgaaagactgaaggctcttcctccaagatcaggaacaagacaaagagacctgcttctaccactgctatttaacattgtactggaggtgctagccagaacctttagaaaaaaaaaaagaaaagaaaagaattaaaagcatccagagagaaaaggaggaggaagaagaggaggaggaggtgaaactgatgataaaaacccatccaagaatgtaaatgtgacatctgcagcaggttcaaatctaagctataagacaaacggaatccttcgtaaggactgtcatctattatgcacagagagccgaaatccattactgaaattctcttggtgagccacctgatgggcccagtgacgtactagtacacacaggagttgaaacaaaaaaaagtctggcatattctttggatgactggcagagtgtgacaccaatatggtacccagccctactatcattacaaggacttcatgaccaaaaaaataatagagaattgttttggtggttaaaacaattaaaagcatccaaattggaaaggaagaggtaaaagcatctctattcacagaaacataatcttatttatagaaaacactaaaccttccacacacacacaccccaaataaaacacctgttagaattaacaaacaaggccgggcgcagtggctcacgcctgtaatcccagcactttgagaggtcgaggtgagtgaatcacctgaggtcaggagttcaagaccagtctggccaaca

SEQ ID NO: 195695 - DNA, 1000 bp, Homo Sapiens
tgttgagggactcttcagtgcttgaagtttaagcctaacgaaattatgcaagatgcccactgaactgtgcctgctgtgtgaccagaatctcttaacctcatgagcattttttggttaaatgttggtaggaaaaactgcttattgaaaggcaaaacttgttttgtcacctgcgtattttagggtgatcatccttgaagtgatggcttatcatgtagagaggtttgtaaccaattgcaattcaaaagggagaaatggagagagctaacagcttaaggaatcaatagcctttgatttctttcccatttgatcactgcctttctgggtatattcctgactttacatagcctgcctttgccaggacagagactgtcttcagaaatcttagagtttactattcttgttcatgagaaattgttatgagattgctgtaggaaagtatgtattttactaattttattatttttttttgagatggggtctcactctgtcgcccaagctggagtgcagtggcccaatcatggctcactgcaacatcaacctccctgggctcaggtaattctcctacctcagcttccctagtagctgggactacaggcgtgcaccaccatgcccggctaattttcgtgttttttgtagagacgggattttgccttgttgcccaggctggtctcgaactccggtactccggtgatctgcccacccctgctccccaaataacgtattttaaaacatacagattataactgctttacaataggtgaggcattttttttcgtgtcataaaacatgcctgtgatgaatgcctttaggaaagcagtacgcctattgctagctttctgcacttccaagtcccaagcctattcctcctcatccctttttcaaggcaggaagctttgtagaatgagcatgggatatcagtgtttaaaacataagaatttcatactcgaaaatgatcttctctgtggaggtgggtgattttaggtttctagatattaagctt

SEQ ID NO: 195696 - DNA, 1000 bp, Homo Sapiens
tcctccaatgaagtcttcaaagctatccatgagggttggaatcaacttcttccaaacttctgttaatgttgacattttgacctcctcccatgaatcataaatgttcttaatggcatctagaatggtgaatcctttccagaatttccattcactttgcctagatccatcagaggaatcactatctatggcagctatagccttgaaaaatgtatttcttaaataatatgacttaaaagtcaaaatttactccttgatccatggctgaagaataaatgttgtgttcgcaggcatgagaataacattaatctccttgaatgtttccatcagagcactgtgcagtagatctcaacggtgggcctaaaatatttagtaagccatgctataaacagacatgctgtcatccaggctttattgttccatttatagagcacaggtagagtatatttagcatcattctttaggaccctagaattctggaaatggtaaacgagtactggcttcaatttaaagtcaccagctgcattagcccctaacaagagagtcagcctgtccttcaaagcttggaacccaggcactgacttctctctagcaacaaagtcctagatggcatcttcttcccatacaaagctgtttcatctacattgaaaatctgttgtttagtgtaaccatcttcatagctcattggtttcccaggtgaaggacgggggaagagagtgaccagaaacgaatatcatgatgtaacctgtaaggtgatgtatgctaattgtggtggtagctacacacatttacacatgtgtgaaaattcataaaaccgaacaccaaaataaaaaagtaaattcgactttatagtttttaaaaacttcaattaccactggatggtcatgacttccaattctctctctcttcctctgccttctcctgtgggtccataacccaaatatctaacatcccctggataacccatcatcacctcaaatttcacatttcataaaatgaattc

SEQ ID NO: 195697 - DNA, 1000 bp, Homo Sapiens
ccatccacccacccatcatccatccacccattctccacccatgcacccacccacccatctacccacctacccatccatccaaccgtccatccatccattcattacccagccattcattcacccatccatccatccacccatcctccacccatgcccccagtggtacccatccatccatccatccattcatcacccagccattcattcatctatccatccatccatcatccacccattcatcatccagccattcattcatctatccatccatccatcatccactcatgcacccaatggtaccatccatctatccacccacccaaccgtccatccatccgtccattcattacccagccattcattcatccatccatccacccacccatcatccatccacccattctccacccatgcacccaacagtacccatccatccatccatccatcacctagccattcattcatctatccattcatccatccatcatccacccatgcagccatccatctatccacccacccaactgtccatccatccacccatccacccacccacccatccacctatccatccacccatccatccattgatcacccatccatccatccatctatccaccctcccacccacccatctaccaacctacccatctatccacctactcatccatctacccatctgtccatccacaacagtcttgctctgttgcccaggctgcagtgcagtggtgccatctcaactcactgcaacctctgcctcctgggtttttgtatttttagtagagacagggtatcgtcatgttgcccaggctggtctcgaactcctaggctcaagtgatacacccgccttggcctcccaaagtgctgggattagaggcgtgaggcaccgcacccagccatggcctcaagcctttttttttcccccactctgtcacgcagcctggagtgcagtggtgcaatctcggctcactgcaaactccgcctccaggttcaagagatc

SEQ ID NO: 195698 - DNA, 1000 bp, Homo Sapiens
gggcaggaggaggtcagagagattctgtttcttcagacctgccccaggcctaaggtacacaacattataacaagagactgtaacaaaggctgtaggagttaccagccaggaactgtggatgaaaaccaatatatttatatatataataccacaaggggggtccaaagtggcagttagggacagggagtacttgtgtagcagtgacacaccaacccatctggaagtattttaatatttaaacaattggtatggctatactagtttgtgattatcagccttagttctgtatcaattggcaagatagtgtctaggtttgccacactctagctgtgtagcaccaagcaaagaacttaacttctctagcctgtttccttctctggaagaaaggggcttccaggccttaactcacgtactccccataactagactgggaattatctcctttgtacagatgaggaaacagacacagaggtgataagtgagtagcccaaggtcaccatctggtaagtggatgaactaggattggaagccagacctttcataaaatgatttctcagctcaaaaggtttttctgaagattcagtaggctcactgatagaaattgctggtgtgtggctggtattccatcaagagtggccattactactcccacccctgcccctctataaactccagatgttccagacctctcatctctccctgtgcacacaaggccttttcacatctgtgggtcttagtacacccactgttgctgtcaagaatgtcctcctcctcctttttttttttttttttgagatggagtctcactttgttgcccaggctggagtacagtagcgcgatctcagctcactgcaacctctaccctgcatcagcctccctagtagctgggattacaggcagccaccaccaccatgcccggctaattttttggtatttttagtagagacagggtttcattatgtcagccaggctggtctcaaactcctgacctcaggtgatc

SEQ ID NO: 195699 - DNA, 1000 bp, Homo Sapiens
cctgatgtttcacaagtgatgaacctttgttctttgttttttccccttaaataagcacaaacataataaagtcaacataaagcatcaaaaatgattctgctatacagaacctctgccatccaggtgcattacacagaaaggaaagaataatctttcactttttttttttttttttttgagatgaagtctcgctctgtcgcccaggctggagtgcagtggcgtgatcttggctcactgcaagctctgcctcctgggttcacgccattctcctgcctcagcctcccgagtagctgggactacaggcgcccgccaccacgcccggctaattttttgtatttttagtggagacggggtttcaccgtgttagccaggatggtctcgatctcctgacatcgtcgtgatccacccgcctcggcctcccaaagtgctgggattacaggcataagccaccgcacccggccataatctttcactttgaaggcaaaggcattaatgagtaaacaaagaaggcaagaccatcaaggccagcaaactttgctaaaattgtgacataattcattgctgcttttcagactcaggtaccatgatgataaaaggcacatacctagttttgcccttcactatgttttttgtcatttttaccatattctggaaaacactggtaaatcgctttaggagagagtgtggaccaggatatcctagggtgcctgaggcccttttcagagaatctgtgaggttgaaaagcttccataacacagtttcttctgtcattctctcatgagggtacagtggactttcccaggggctgagcgaaagagatactgcaacaaccgagaatccaggtatcctctattcagtcagacacccaggagatctgcagaaacactgacgcaatgctgttcttctcaatagaaatgttttgttttataaaatagttacgttggccaggcgaggtggctcacgctcgtaatcccagaactttgggaggccgaggcgggtg

SEQ ID NO: 195700 - DNA, 1000 bp, Homo Sapiens
ctatttgaataaagttttactgtctttcccaaagtagcttttaatccactgaattttcacagctatttaggtattttgattttaaagactaagagtgatgtacaaataaaatgtgaagaatgtgaacattaacagtatctgtgactctgggcaaatcttaccttcaatgtttctatcccctcttccccaaatacaaagtacagtccggtacataaaacatattttataaggtacttgaaaataccattagctttattgccagctaactacatgctgctgactcactgtaagtgtcgtctaaaaatcgtaagtctcatctctatcaattctctattttcacagttggattttcaaacataatcacacttttagtcctagcaaatcttattttcgccactgccaaaagagttaaaatctatatgtgtcctgttcctcccatctaccatatttatgacccaagaagttttggtaccatttaaaattgtatcttcatcctagtctaagacaaaaatctggataagatagagccaaggatagattatttatgataatcttagaaagtcatctctagagtgaaataaaatttaatcaccactggaaaaagttataaaattaattatgaatactgataatcataatgccaccccgcctatatttttctacttgttcacaaagagattatgggagagcagaccaaaaattttgctgaaagccaaatgcattctgtctatgacatccccaagttattggcccagacctcttgctaaacaggaattgctgaattcatgctgtcattctgtaagcactatactcttttctcagtgtttacttatatcacttgttaggaaatactattgggactcaaattataggttcagaatttactcatattgtttttattaaagccaaaatgcatttaactcaaagatgacaatgaaggccgggtgtggtggctcacgcctgtaatctcagcactttgggaggccaaggtaggcagatc

SEQ ID NO: 195701 - DNA, 1000 bp, Homo Sapiens
tcagagacttgtctgataaaacatttaccagacaattgccacagacagaacaatacaccaaatactgcagaaggttctaaggtagacagataggactaaaaaatagcacttgcacagaggaggataaactctggtgggagagaccgtctgaagtaattacaatacactgggtcaggttcagtgatgacaataacctcaaagcaaggcacagaagaggcagtgactaacttgctctagaggagggtctgaggaagtttcacaaagtgacatttaaattggtcctggatgctgcagacaataaaggaatattaggcaacaggcacagtgtgtgccatgaagagggggatcccccaatggtctgaaatataaaccttactagacagcttaccaggtaaggtattggagaggatgtacctgctggaatccgcaaatgatcacatacataaaccagagacagaaagatggagcaagccactgcacatacaatgggttggtcatacctggcctggcccctattggttctgcactgacagaaaaggcaaatgcccccttattttggtccttgatagcttcatatgactgagatatcagtgtttaagggcccacatggagagaagtccaactacggcaaaagttcacactacactttctaattagaaatgtctttttaggctggtggctcacgtctctataatcttagcactttgatggggccaaggcaggtggatcacttgagctcagtagtttgagtccagcctgggcaacatggtgaaaccttgtccctacaaaaaatagaaaaattagccaggcatggttgtgtgtgcctatagtccctacttgagaggctgaggtgggaggatcacttgagcctagcaggtcgaggctgcagtgagccatgatcacgccactgcactccagcctgggtgacagagcaagactctgtctcaaaaaaaaaaaaagacgatgacaaagaaatgtccttgtaatattaaataagatc

SEQ ID NO: 195702 - DNA, 1000 bp, Homo Sapiens
ggggcatgggattaggaagcaccaaaaaaaaaaaaaaagaaaaaaaaagggaatgctctgaaaggcattaaaatgtgtgggcaccagcctagaaaacacagtgagtcctccatctctaaagaaagaaagaaaaaaaaacccacacaattagccaggtgtggtggcacatgcctttagtcccagctacttgggaggctgaggcagaaggacattttgaacccatgaggtggaggctgcagtgagctatgatcacaccactacactccagcctgggcaagagagtgagatcctctctaaaacaaaacaaaacaaaaaaatgtgtgggcttctataccatataaagaaagttgaaattaacctataagtaaagtcaatgaaaactcttgaaacaaatgacacgattcaatttgcatgctgtcaagaacacaataatggaggaatttgaggagcagaatttaacagtggcaagattagaggctgagaagtcagatgagaagctagtcatcacacctccaagagaaagagaacctgaactactgcactcgcaggaaggatagaaaacattgaagagagagggtcagataagaaatacataggataaaaatctataggatgtaagaatggggggaagaggggaagaggagtttgacttgcaggtttctagtatgaacagatttatggcttggatgcttagcagatggtgcacacagtaaggaaggaaattgaggaggaagagcaatttggggaccaccattatagatttcaaagtgagatatgctgagtttgaaatgtttgtgaatgatctaggcagcaaaactctgataaggagctgagtttatgaatctagaagttgagaagaaaggtctgggttaaacatttaaatggaagctgtatactactaagagaatttaatatatgaagagaatgtaacttccactagggcagatgtattcattattttgttcactaatataagcacccaaaattatgtctgtccata

SEQ ID NO: 195703 - DNA, 1000 bp, Homo Sapiens
ctgtgggccagtatgggtctgtggcctgttaggaactgggccgcacaacaggaggtgaccagcatatgagtgagcattactacctgagctccgcctcctgtcagatcagggacggcattagattctcataggagctcgaaccctactgtgaactacacacgtgagggatctatgttgcacgctcctttgatctgaggtggaacagtttcgtcccaaaaccatcccccttcttcccccagccaccgtctgtgatgccaaaagggttggggaccattgtcctagtacagctaggtcaagggtcagcaaactgtagcctgtaggccaaattctgcctgcctgcctttttctgtaaataaagttttattggaacccggccacactcagttgtgtacatatcccactggctgctttgtgctgcaatggcagagttgaacagctgcaaaagagatcacatagctcacaaagcctaaagtatttcctttctagccctttacaagataagtttgctgactccagacctaggtcattccttagagtctaaatccaggatatccatatttctttttctttttcttttgagacagagtctcactctgtcacccaggctggagggcagtggcacaatctcggctcactgcaacctccgcctcccaggttcaagcgattctcctgcttcagcctcctgaatagctgggattacaggcacgtgccaccatgcccagataaatttttttgtatttttagtagaaacggggtttcaccatgttggtcaggctggtctcaaactcctgacttcaggtgatccacccaccttggcctcccaaagtgctgggattacaggcatgagccaccacgcccagccaggatatctatatttctaagaaagagaacaaagagtaattctactagatctttattatcagcgggccatggttactcacatctgtaatcccagcactttcggaggcccaggtggcaggatcacttaagcccaagagtt

SEQ ID NO: 195704 - DNA, 1000 bp, Homo Sapiens
ctaattgtcaataccatgtattctctgatgtattaaacagacaaacaaaaatcacaaggaattgaaccaaaaaataatttgatttataagacaatttaaaaatatggtcttattattaactcagactttttgttgttgtagttttggttcaaaatatctatctcttattattttaacttgatttgaaacgttgtactcatttcaaaattacttttgcttatccaaattgtgttctcttgacaagcctgatgattttgaacctttcactttcatagagatattacaaatgtctgttatgcatatctcatacctaaagacacaaataccttggcaatatagaaaaggaaagaataaattatcatttttggtattttagaaaattcttctttctccaaaatctacctgaattctttatttttttgagacaacaataattaggataaacaaacatcaggtaggtatgttatttgtaatactcggaaaaaatataagcaagcattttacagaagataaaatggaagctcggagatagtaactttcccaagggtacacagttgtccaaatagagacttttgtttgtttgtttgtttgtttttgagatggagtctcactctgtcgcccaggctggagtgtagtggcacgatctcggctcactgcaagctccgcctcccaggttcatgccattctcctgcctcagcctcccaagtagctgggactacaggcgcccgccaccatgcctggctaattttttgtattttttagtacagacggggtttcatcgtgttagccaggatggtcttgatctcctgacctcgtgatccgcccctctcggcctccgaaagtgctgggattacaggtgtgagccactgcgcccagcccatatagagattttaactccagtgtttctgacctaaaatctccctgtctttggccagtagtactccatgctgtgtcagaattccaagaacctcttaatacacaacaccgagaggtatagtaa

SEQ ID NO: 195705 - DNA, 1000 bp, Homo Sapiens
aagaggagacatgggcatcatttgtgtgagaccctgaggaaggagaaaggccccaccaggtttatcatattaactgtctctcctgctgcagtctagcaggacatatagatgtgtgtgaggtcccaggcgaagccaggattcaaggccttcaataaacaaaattggcatagaaaatctgccaggaattaccaatggaatattgtcttagttaatcagggtgatgtttgctaaatggcaatccatatttaagtatttgtttctgaaaaataattttaaagctagaaagccttttattcatttactctattcttggggacgcactcagaattcttttataagcacattatcagacaacagaacaaagcattgtagacattttgggagagtatgctgggcttaccatgatcctttctacttcctcccccacagagatgggcacctggcagccatgttgtataacatcaccctgctcactggtgaacaatgattggaccaggggcaatcaactgacttgtgctgggccaatcaggtaaattctctgttgatttgtgattttgacacagatgatcactattgccacttagttgctgttggcagctgtacaccatggtgaggtctgtggactcgaggaggtccacagaaaaacagaaatgaagcaaatatacagtgacagtgaagacaagacatggaaagaaatgctgcccagatcctggactattttctggttctgcttccatttctccctgaggcctgactgcattcgaacgtttgagttcctagagactctgtatccttataagaagcttccccttgtggcttaaactgtcccagtttctattgcttgctatcaacaatcccacctaattgataaacctagagaagctaaactcttatttaaaaaacaaaacaaaacgacttatatcaggatgaaaaagacagtgacttaattcattttcagtttctccatcatttaactaggaatgtcttccttttgatatct

SEQ ID NO: 195706 - DNA, 1000 bp, Homo Sapiens
tgcccaacacccctcctgcaggacttggtctgatccccacaccaattccttctctcttagagctggcggagcctgtctctccagcctgtgccctgggcacatcccataacctctctgagagcagaaatgaggcaacccacgctacctaacgcacggcgctgttgcaaggaggccctgattagacaatgtaggttaaagcagttcacaaagcatttctaaaaagtacgctgtggccgggtgtggtggctcacgcctataatcccagcactatgggaggcagaggcaggcagctcacctgaggtcgggagtttgagaccagcctggccaacatggtgaaaccccgtctctactaaaaatacaaaaattagccaggcgtggtagcatgtgcctgtagtcccaggcactcgggagactgaggcacgagaatcgcctgaacccgggaggcggaggttgcagtgagccgagattgcaccactgcactccagcctgagtgacaagagcaaaagtctgtctcaaaaaaaaaaaaactatgttgcaacaccctcattttccagcttaacataaatgctggctctgtggtcctgatcgtgcccgtcatagtgcctggcacgaaatacgatcaacgcaaacactacacagctcctatccctcaggggcagtgctaggtgagtttatagactcttcctcatttaagacaaaagccccacaagattgggaatactgcctccatttagcaggtgaggaaactgaggcagaatgaggttaaggtctcgcccagggttcactcaccactagagcgtaagcttgatgaagacagcattcatctattttcttcactgctgcagccacacaccttagcatagtgtctgggacactgtaggtagggcctcaggaaatgtttgctcagtgagtcaatgatggagataagattgaacccagttttgttttgttttgttttgtttttgagacggactctgtctcccaggctggaatgcagtgg

SEQ ID NO: 195707 - DNA, 1000 bp, Homo Sapiens
ctaggacatttcagggagtccacaatatcaaatctactttcataatattattaagatgttatttctttccaagatgttgacctttttactgatggtgcaaaatcagtggtgggtgaagctattggcagttaaacagtaatcaattgttgtagtcattgtattcatcacttacaataaataaataaacaaaaaacagttcacttaacaatgcccttgataaagaagtaaattactaattgtattaaatgtcaacccttgagtacctgtctttttaatcttatgaccaaacggaagttacacaaaaatagcttttgctgcatgcaaaccatctccaggaaggaggaagaggtggaggaggagtggggcagggagagggggttggagaggggggaaggggaagaggaagaagaagaacacctgtgttattgtctcggttgtgagttgaactcgtcagtttttccatggagtgccattattgtgtgaaagaactagtgagtgacaaactatggtgatttagatttgggtatttgacagacatgtcaatattgaataagatgaacctctcacttcacagaaaaccactgatagtatttgttgccaatgataaaatttaaatgttcaagtaaaaatcagaaagttggaaaattagtgtctgccaccataagcttgacatctaatagagactttcttgatgagattggaatgacgttttaaaaaaatatattattttgatttagtataatcaaataagtcaatatttggaagatgcacataacatagtgaactaatatgttcaaaatgatctatgcatgatcatgcatggataaaaaatccattcaaagagaatgctataccagcagattttaatattacacagttctgtgttctgtgttactgacttaagagttctttgtattagtttcttagagtctgcataaaaagtacaacagcctgggagggttaaacaacagaaatttgttttttcacagttctgaaggct

SEQ ID NO: 195708 - DNA, 1000 bp, Homo Sapiens
aagttcttgtcttctaccctccattgttatttttgtttttctctgggctttttccaactcttgatgtggaaaatgtaagcatgaacatttcactggaaatatgacttccttactcatttaagcctgtgaacaagcaatatttggggattccctccttaccatacataaaggattctatttttccatactcatcctgagaccaagcagtactggctgtttttgtttcaaaagttttagcaagtcctttctttcattcttgatagcatatcctctgtttggcagaacacaagacatcttttctctctgttttctttggcaagttatttccttatctcaaatttttttacccagtttgagagattggattttatccaggacataagcattctgtttcccttcaacagagtatcttgaagtttgtaagcgctgttaagaagactaggggttttatcttaatatacatataaaatgcatatgctagaaataccagctttcagagcttgtagaccaccaacctattttgaagacaggaaagagtagtgggagagggctgtgaaaaaaagctttattacggtgtatatgaatataacaaaaaaaaggcaattcttacatttaatttcttccatttgactctccttacctcaactagcatctattctagtacttcattttcttctttctttggtatgatcttttaaggtaaagccctcattttaacagaaaacattagggtagcttattatggaaatgagagcatattttcagatacattcctgctgttatccttatgggtactttgcaagcttctcttgttacggttctttgttatatatttttcttctttacaaatgtcattgtttatgtactgttaaaagtcctctgaaacaccctattccccttgctaatgttaataatttaaaatgtagtgacaccctttactgtgggggaatataaaggtggctgaaagcacacggcattcagcagccattgtagccataat

SEQ ID NO: 195709 - DNA, 1000 bp, Homo Sapiens
atggacactgacagagaaaagtccttgtttctactgtagttctgtagatttgcagaagatacaaatctggagccctcaatggccatattctccaccacactgagaaaatctgttatagaatgaagctaacatacgaagcagcaaagatgacatgggaagagagagacagagaaggagggaaagggaaagggaaaaaaaaagtaatctctctgtatatttaaagttatctatctttagccttttccttgcctcatcccccacaggcaaatctgagttacttggaactgaaggtgtagactacagtgaggcagtgtgaatacagaggacacagtttttattgggaggtgtaagaagaaggggaaatgttagtttgtaacaataagttccattcatttaaattgaggtgcttagcaaaccaaaagtttccaaagaaattgggaatatttatgctagaggggaaaaaaagggggtaaaggtaaatataagacagctgaattcaaataatatattgaagggggaaagagtccagaaagcctaattaggatctatgaccagaaataacaggacgcagagggtagtgcaatataaccattaaaactatccaggttgggtgcagtggctaacacctgtaatcccaacactttgggaggccaaggtgggtggatcatttgaggtcaggagttcgagaccagcttagccaacatggtgaaaccccatctctactaaaaaacacaaaaagtagccgggcagagcggcgggcgcctataatcccagctactcaggtggctgaggcacgataatcacttgaacccagaaggcagaggttgcggcaagccaaaatcgtaccactgcattccagcctgggtgacagagcgagatactgtcacaaacaaacaaagaaaaaccctgaacttttacctacccagcaaggtaaaagtttgtcatgagagactgggctcatcactggaagtattaaagagactggatggtacagttgatc

SEQ ID NO: 195710 - DNA, 1000 bp, Homo Sapiens
gctagtgggtcactaggagtaatggtgagtggtgccatcaaaaggccatcctgaagcatctggattgaaaggataatagaattgcctttggaagtcagaattaaaatgccaactaagtgacaatactttgcagggctggggcaaagttctccagaaggctgtgtatgctctgagccagcttccaatatacggtactgcttttcccatagccaggatatgcagagtccaggaatcaggggtggaagtggaagtggcacctcttattatcacccctagtgacccactagcaaaatttttgctacctggacacttggggttcctcctacctttaagtcaacaggctaagaagggagttacaatgttggctggggtgactgacccagactatcaagatgaaaccagtctactactccacaacggaggtaaggaagggtatgcgtggaatacaggagatccattagggcatctcttagtattaccatgccctctgattaaggttaatgggaaactacaatagcccaatccaggcaggactacaaatgacccagacacttcaggaataaaggtttgggtcactccaccaggaaaaaaacccacggcctgctaaggtgcttgctaaaggcaaagggaatacagaatgggtaggagaagagtgtagtcatcaataccagctatgaccacgtgaccaactgcagaaacaaggactgtaattgtcatgagtatttcctcctccttttgctaaaaacatgtttgttcaggtatacagaaaatatcttcatttgtaccaagaaaatatcttcattttatttcctttttcctttatcatgtgacataagatttattgacttcatatccatatcagtatttaagtattgttaactctatggaatagcatttggcttggggattggtgtgtttccagttgcatgaaggatagttgtattatgttaggcataattatgaccttattattgtctttatttgaagattacatatgatc

SEQ ID NO: 195711 - DNA, 1000 bp, Homo Sapiens
actttttttcacaaaagatttctctgaaccaggcaatatggtctgatagcatctgaaccacagtagaactactttcaaacttggagtcagtcctctcaaatctgccagtgcttcatcaactaattttatgtaaaattctaaatcttttgctgtcattttatcagtgttcacagcatcttcagcaggagtaaaccccatctcaaaaaatcactttctttgctcatctataagaagcaacttctcatttcttcaagttttaccatgacattgtagcaattcggtcacatcttcaggatccacttctaattctagttattttgctatttctaccacacccgcaattccttcctccattgaagttttgacccctcaaagtcatccacaagcattagaatgaacttcttccaaactcctgttaatggtgctattttgacctcctctcatgaatcacaaacattcttaatggcatctagaaaggtgaataatttgcagaaggttttcaattaatgttgcccagatccatcataggaatatctatggcagctatagcctaataaaagatacttcttaaataagaagaattgaaagtcaaaattactccttgatccatgggctgcagaatgaatgctgcgttagtggttaagaaaaacattactgaggcaagaggatcacttgagaccaggagtttgtgagactagcctgggaaacatagaccctgtctctattaaaaaaaaaaaaaaaattagctgggcatggtggtgcatgcctgtagtcccacctactcaggcagctgaggcaggaggattgcttgagctcaggggttcaaggctgcagagagctatgatcacaccagcctgggcaagaatgagaccctgtctcaaaacaaaaaaagcacacacacatagaaaacagaagagaacattaatcttccttgtacatcatcagagctcttgggtgatcaggtatattatcaacgattagtaatatgttggaagggatc

SEQ ID NO: 195712 - DNA, 1000 bp, Homo Sapiens
cgttcaaaacttgattcctggaacttctgaagtagaaaattaggggagaaaacactcattcaactttagaggaagccgccagtcagtgccttggacaacactcatcaaaggctatttgttttccccacctatctgggacagaatacttctcatttaactaagcaacaaattaaaagcacacagtggggtgcatatcactacacatatgtccggctaatgatgcatgacaagactcacactacctcccccctaaaagctttacctccagaatttcctattttaaaacaatactggactaaaatgtaacattcctgaagtaaggaaaatcacttcatgtaaaagcagagtttgaactatggaacacaagtcagtggatgcaacctgcttgtatggtaaggcttcatttataaggtccaagtcaaactatctacaaagagtcttgaattggtacatccatatagtgaaatcctatgaagcatttggaaaacagtgaagcagatctatgtatactgctgtggaaagatatccaagacatgttgtggggtcaaagataagtcacaaaacagtatgtatattatgattgcatctgtgtatggtaatgtatataaactttactatgtacagaaaatgtctggaagcatccatggagaaactgttcgtggcagttaccgctcataaattcagcagataaggattttacttttcactttatatcctttcatgttattttaaaatattcttaaaatcaagagcttgtattatttgtataagtttaacatattcctttaaaagcacagagagatctttacagtggtttcctccagaaaccacttatttaccattacagtgtttgataattgaaatgaaaaagttaaaactgttccttttgtagttaacatcattgtaatgttcctacgatagcttttattaatgaatttccatgggggacagaagagaaaaacgcacacaacggtattacaaaacagaaaaaaaataaggc

SEQ ID NO: 195713 - DNA, 1000 bp, Homo Sapiens
ctgttcctgagaaatgctctcaggaaagatggtgtgtcaccattttacaaatgaagaaattcaggctcaagggtatcaatttgttcaagctcacaagaaaggcagtaacaattctgacctagggttggtctagatgcttctgtcttctccattgcctcccatttgaactgggagtaccttgagtagtccccattggtgaacactggcttgctacctgacatcttctattggtgacttattgtaatggctctgccaatggtttttttgtgttttgatttgcagtagtaattcttgtcagtgctgtcacacagtgtaaaaacaatggcacgccatagtagaaactgtcagaggacgcacaacagaaagatccattatattgcaaaaccccaaagaggtgcacacatttatggacgtatgtgtaatctctgcgaaactccagtgtttcattgtgagttaggatagccttttgtcagagtctcaaacttcaggacacttgcggggacttggatgaagtgcccatcttgaattcatcagaatgaattcaccaaattgctctgccactcttgtgactcagcggtttgctgaatatattcacttacctctcttccctcctaaagtctactgaaatgacatagatcagtgaaatcaactacaaaggtagtcatgcttaataaaaacaaaaacttagttcttggataagtcagtaaagtggataaacctttgtcaagtctgttcaggaaaaaatgggagaaaatgcaaagctttagaaagaagagaagcttcttaactataaatgcagagatctttaaaagtaacgttgatcaaagcacaccggccgggcatggtggttcacgcctgtaatcccagcacttcgggagactgaagtgggaggatcccttgagcccagcagttcaagaccagcctgggcaccatggcgaaaccccatctcaacaaaaaaaatacaaaaactatccgggtgtggtggtgcacgcctgtggtc

SEQ ID NO: 195714 - DNA, 1000 bp, Homo Sapiens
gcctataatcccagcactttgggaggccaaggcaggcagattacctgaggtcaggagttcaagaccagcctggccgaccgacatggtgaaaccccatctctactgaaaaaaaaaaaaaaatacaaaattaagccgggcatggtggcacatgcctgtaatcctagctactcgggaggctgaggcaggagaattacttgagcctgggagatagaggttgcagtgagtcaagatcatgccactacactccagcctggccgacagagagagactctgtctcaaataaataaataaataaataaataaataaataaataaataaataaataaataaaaggccgggtgcggtggctcacgcctgtaatcccagcacttcaggaggccaaggcaggcagatcacgaggtcaggagttcaagaccagcctggccaatacggtgaaaccctgtctctacaaaaattagctgggcatggtggcacgcacctgtagtcccagctactcggaaagctgaggcagaagaatcgcttgaacccaggaggtggaagttgcattaagccaagatcgcgccactgcactccagcctaggcgacagagagagactccgtctcaaaaaaaaaaaaaaaaaaaaaaaaattaattaattaattaattaaaaggtaaggagttagagagtgatcaggaagaaaagaggagctatcatggagaaaagaggtcagggaaagcctctctgaggaagtgattttgtggtcaaggtagacacctgacatttactatcagtagtctttatgaaaccccccaggcagggatccatattctacaaatgaggaaactagacctcaaggtagctgaatgatttgcccaggtttatgaatgactataatccacaatgcccttttcattacacaaaggtttcaagacactcgccttaatctccaaggcaaaatctgcacatcccagacagtgccaaagaggattcattcaggtacaaaaagaaaatcaaatta

SEQ ID NO: 195715 - DNA, 1000 bp, Homo Sapiens
ctgagaggaagtcagccgattgtgtctcaaagaattgcattaaaagaaagtacaaaaccttttaaaagttcaaagattttgggaaattacctggttcagtctactcaatcagattaaaaaggactgcatgatattaagtaatttagtcaatgccactcttgaaataactaaatacagaatcaatgcttcaaatcctgatcatctgatcccaagaacagagacgcttctggactaaattcaagacaaacttttgctattataccaaggtcgcacaaaaatctatctagctcagcgctaacataaaaatcttttgctatttgggtcttgcacctttcagctttaagaaatgggcataaaaataaaaataaaaaagattccctgctttagagaaaataaagtagctttgtgagtgcccaggctgtcttattcatagtatccatgatatctacaattactggtacatggtaggcactccagtatttttaagagtataaaaatttttgaaaaatgaatcgttcaaaacctaaaatatatggtggaaaatatatgagtcttctgataccccctcagggaacattactttttgccattccatagcctcttagccttttggctgtcttttccaatttccttttcctttttaatgtatcttcataaattatgaaagattagttgacaatgcttaaggcagcaatccacattaaaaatctgtaattgtaataaaacatccattaagtttatttttaaagtcactttaagccagtagtgtcttatttttactcccttttgaaacagaagccccttacaatgaggattttgaggaacctgtcctgtgtccctcttacaaagttcccattggtaattcagagaggtcctcaggttgagaactgctggactgaactccttttattggctccaactcttcttatttcttcctatgaagaaatgctagtctttattgagttgagaaaacattacaagaatctgtgaaacaaagctt

SEQ ID NO: 195716 - DNA, 1000 bp, Homo Sapiens
agttcaaagtacaatattcttgctttcatgtataagcatttatttgatcacatgggatttaccacgtttattgtcaaacaattgatcttttcttcttaaattcctctaggatttccatctagttgatgtggttttcatgtttctaacagaaacagcaaataagaacacaagagagaaatgtttgtatcttgttgaaatgtggagtattcagggttatcactaaaaggcatttgagacatgaccacacagaaaagagaatccagggaactgtttgggaagacaaatcacattaagggtgtttatttggatttctaaaatttccctttctctggttttatttacatttcattaatatgaagtgattcaacctgagtaacattttgtcctacatagcttactgatttgacttttgcaagcagccggacaccaagagtggccctaaacaagttcttggttgatgcaaagctccacacgtattgaatcagataactgtaaatgaaaattgccctttaaatgtaatctctcaaaatcactagagttcatttcccctagagaagcagatagcttacgcacattcccttaggaaggggatcaagtttgttacctataaaactaagaaggcagaactgctgtcaagggcaggagttgaactgtacagttttaattcctaaactggacccaattcaatgggctttggtcttgatcttttccaatttatgttaactaagtcctaattaagcagagttcattttaaagaagtcagatgccaagtcttgtcttttctacctagactttcaatattgcagagctttttcttaattaaggtgaagaattccttttggctttcacaggcagaattttccacttgttccatttagagtgccagttggctttcacgctctgcaaccatgtgcctctggcacagctggaaaatttatgaacttctgtgggattaaaaaggtgctatatccttgggaaacgttcctaataacctgaattc

SEQ ID NO: 195717 - DNA, 1000 bp, Homo Sapiens
tcccacaccatctgcggacaaagaaggcccgtggccgcggtgtgactgtctcatcaccgcgtgacatgtgtaattactgcactcggaagcacagtccaaatttattccattcacaggacatttatttcattttcatcagacatgtttactccgcagctgcctgagcatctctgaatgcactggcccatagtttgcatgttccacgaaatattaaaaaaccccgcaaatttatcccatgccatttagagcttcctcaggtgtaggttcagctgtgtggttttccaacttctgatctgtaaaggaaactttctacaacgccacacataacagccagcacttctcgaggcggtgccgacaccctcacttgctggtggctagcatcattttgctcacctagagaaacgttttgcttcgtgaagctgctgtcctgtcagaagcagcctccgaaaggcttcttttcaaagtacttcacggaaagcagtactgcactgctgcaatttcatttgtttataccgaaatatggcaacactattcagattaaagcaaataccaaattgatttactaattcctattagccacattgaaacacaataaacaaaagcacatttaaacccacagaaattacaaagacacaaagtcctctgacctcgtttctttgcaaacacaactggctacttgtggctgtaaacccacatcttaacatttacagcctaactacccaaaaccactaatcctgtggggcacactgatgtggcatttgtagatttttattagcatatgaaattatagagtgaagaggggtctgctttttctgcaatgggttacattaacttggcagaaatgtttataagcaactgcatttagatgtaaatttggtatccaagacagtttctatttcttttaaaaacagacacaaaatccaattaagaccttgttattttaaaaaccctcatatcccaaatataaaatgctgtcatcgtagcgcatgttactgaattc

SEQ ID NO: 195718 - DNA, 1000 bp, Homo Sapiens
acctctgagaagatactgctcttctgaactttattttaatatctttcttgtgctttattttaccacattggtatgtgtctttagagaatatattattttattttgttttcatttgttttgtctggttttgaaattaacttataggaagtcatgctatcctctttcttatttgtttaacattatgtttgagttcctccttgttgatgcatttagtgttaatatgttaatgtttactcatgaatggtattcatttgtttgaacataccacaatttatatgtccactctatgttaggtgaacattttaatttttttcaaaattctggctaattttagcaatgcccttattaatatttttctgtatgggtctctattcatatatagtttcctaaataaacctatgagtaaaattattgagttacaattttactatatgataccaaattgtatttcaaagtagtttcaaaaattccaaataagtgccaacgatataatgaaaactcctgtttctctatgttcttgccaacactgtattgtccaatatttttatttttaacaatgtggtgctttaaagtaataacctttaatctatattttaacctaaagcttaagaagtcttgtcatcagtttatttactatttctgtttctgctttggtaaaatatttcatttgtgtcttttgttcattctcttattggaagattatcttttattgctgatatttaaaagattataggtgatgtcaatattaatcttttttctgttcattacattgcatcatctcccagtgttcagcttgttttcttcttcaattttttcatacattttaatgaagagattttaatttaatataattcataaaaattatccttcatggctagcacttctgtcttgaaattccaaggtagcaaagacattcttatatttttctctaaaagtattaaagattaactttcacaattaagtctttatgttttatgtgaatagtataggataggaattc

SEQ ID NO: 195719 - DNA, 1000 bp, Homo Sapiens
ttccaagactacatgtgggtcaacatgttatttaatccctaatacttttctaagatcccagctggaaccaataatattagatacctgggttggagtagggctaccaaaagtagaatttgtgaagactgttgaagttcacaggtaaagcatgcagatgatagtaccttgtttcctagttatatttttgaagcactaagcaaatgattaaaatggatttttaatagattctgtaatttttgtatcacagccttatactgttttgtgctctttatctgaaatgcagtcttttcctttatatgggaaacaagattcaaggtctttgagactgagaaaaagaattgttttagaagacaaatacataagtaaatctttcgatcaacacccctctcccattgctgagtgtgtgtgtgtgtatgtgtgtgttagagcagtcagggattgggaagaaatggagtcaagcaaggttaaagttctactgtataaactagtaaataacaaagcaaagagcatgttttaaatgattttttaaggttttattttgaaataattatagattcacaggaagttgcaaaaatagttttgagaggtcccgtgtactcttcacccagtttctcctaatgcgttttgcatcactgttaataacaatatcaaaactaggaaaatgacattggcataattcacagaccatattcagttttcaccagttttacatacacttagagcgtgctttaaaaatagttaaaaattactcagcagttaatagacctattatgattcagaacactcgaaaacttaatatgaagcttttatgaaaacctgatacaagaataagggaaaggagatatgctatacttagggtttattaaggatattcttacatatttgttgtcttttaagcatttataaatatacatatacaccctatattctaaaaatctaaattcaacatttatttttgtgatagaatcagatgctaaacttcttgaatttgtattaagga

SEQ ID NO: 195720 - DNA, 1000 bp, Homo Sapiens
tcatagaatcattttttaaacagtggaggtaggagtgaggggaggacaggagacactcaccaggcctgagatgggaacgttccctccctgttggccagctaagcctggatatgacctgcgctgctttaaatcagagtgagatggagaaaaggggtgaatgaggcaggagtcctccttaagcctgcgggagagtgggattcctatcccgagatagatttagatttcccccttaagagagccctagaaagtgggtaggtggagggggaggtaggagacccccaggcatctgggtctctaagatgcctccttgggtaggtggagggggaggtaggagacccccaggcatctgggtctctaagatgcctccttgggtgagtggaggggggcctggaggccagcaggtgcctggtgatggggccagtttgctgagtattccctcaactgagagaggaaggcaggaggcccggggtcttctagaacgtctcaaaaaaaggcaggcaggccgcacgaggtggctcatgcctgtaatcccagcgctttgggaggctgaggcaggtggattgcttgaggccaggagtttgagaccagcctggccaacatggtgaaaccctgttcctactaaaaatacaaaaattaggccaggcgcagtggctcacgcctgtaatcccagcactttgggaggctgaggtgggcagatcacctgaggtcaggggttcgagaccagcctggccaacatggtgaaatcccatctctactaaaaatacaaaaattagccaggtgtggtggtgcacacctgtaatctcagctactcaggagactgaggcaggagagtcactttaacccgggaggtggaggttgcagtgagccgagatcgtgccattgcactccagcctggcgacaagagtgaaactccatctcaaaagaaaaaaaaaaacctacaaaaattagccgggcatggtggtgcaaacccaaagtcccagctcttaggaggctgaagctt

SEQ ID NO: 195721 - DNA, 1000 bp, Homo Sapiens
actttttgcattcaactctttcaaaaaatagaatggcctctgtttttgacattaagtggaaaagcattcctattggcctcgaagcatttacattatatgtgtaaacatatagataagtggccacaacaaattttttttttgtttgtttgtttgttttgctgcttgctccaattgtgagctctaaaatttaaggacacttaaatctaaaatttaaaataaaatgaatgtaaatgttaaatctgtatgttttttaaaacattttggtttttttttaaactaagatgactgctttaaaaggatgacaaatattctaagtgaaaatctttgcaagattgacggtttgagtgaatattgtgaacttttcagtgttttgtgcatgctcaaagctagattagttcttgttttcagattttgtacaaatgaccccaggctgtattgttcaacacctcctttgaaagtggaatctttcatggctattttattttattgaatttgtggctgatttcctaagttcttggagcttaatatgagccatgaaatttttttatgagatttgttactgaaggttttagattcagttggtggaagagcgaggtatacagcagggtgcagcagccatttgtggaggacctattgggaatccatttactttctcttagtaagagcagtgtgtttgtgtgtgtgtgtgtgtgtgtgtgtgtaattttatgcgtttattttaaattaggtaaaaaattggagttggagggagaggcagatctaaaaattgggtggaaaccaccaaagttccttggaactaaattctcaagatatgtgtaatagcagatgagggagacacatcaaaatgtttgccaggatttgctatctactgcaagggattatctttggtgggcttaaagctatttagccctgtgttatgtttggattgagggctctgaaaactcctattacataaggaatttcatccttaagccaaactgtaaatgtgaacagaaagctt

SEQ ID NO: 195722 - DNA, 1000 bp, Homo Sapiens
taaatttccccatcctggctaacacggtgaaaccccatctctactaaaaatacaaaaaattagccgggcatggtggcgggtgcctgtagtcccagcaactcggggggctaaggcaggagaatgtcatgaacccaggaggcacagcttgcagtgagctgagatagcgccaccgcactccagcctgagggacagagtgagactccctcaaaaaaaaaaaaaaaaaagataaatttctacattttgtttagaaaaaaagtcaatgagcatcacagaaaaatgtgactttagatcaaacctggagcattataaaataatcctgtaagaaaggaagggagcgtataagtaagcgtgctgaatgaatgaatgaatgaatgggtaaccataggactgagttggtctctgaggataaatgtgtgtgtgttgggcaaactgttcaccagcataaaaaagtctcaaggcaatgaccccatggaatcaaggaatttacatgtggtgctggtacagcatcaatgagcacaagcaggatgctgggttagccacgacagctgggaagagagcaaatcattcctgggttgctatctgcatccacccatttcaaagtcctgctcaggcacagaggcttccctataacgggaaacacacagcattaacatcaccatcatctggactcccttcaagtccataaaaagccgtcatttagggcatgtcagtacagaacaactataaagttaaggaaagttctaacaaagttatatatgaaaatagcttgctctctcattctctctctctctctctcataaatacatgtataagagagagtgactcagtggttccaacccaggcagaaaggctgcagagcccaagctcccaccaccacactctcaatcctaaagggacagaaacttaatgccattttaaatgctacaaagccaatgtttatgtcattgaacttgtatttttagagctgtaagaatgcagcttaacagacttactggaattc

SEQ ID NO: 195723 - DNA, 1000 bp, Homo Sapiens
attaagcattttatatttattattttaattcaaattaaccaagttctttatggtagtgaggtaaggtaataaaaaaacaattcattttcagagggaaattagatttatatgaatcattaccatgagaagaatcaatgaattggtaatttgtaatgacaggaaaataaaaaaaatgggtcactagggaaagaagcaaatcagtgcactaaaatctttaaaaccaccacaatatgtgaaaacatatttttaagagtgtacttaaaagatttctatttgatatattttaatatacaggaatttaaaattcacccatacattgatatctcaattttcaaaaaaatctatgccactgagacagaagatttttgaatcattctgttgttttgactttttaaatgtccttttctctcctcagctattttttaagcataagagctttcctatcttgaagacatttaaaaatagttcattctgaagaaactatcaaagggacatcaactggcacatatgcttggcatcagggcacaccaaatggcccaattaaaccatttgcagtctttacaagatacaatttaaatgtacccaagaaatgtcaaatggttcctcatgtagaattatctttaccaatgagctatgtcccaggaactgagcacctaaatccctgcagacatccatgaggtacagtttgtctcagacacacactggagcatgttaattaccacagaagagaaggcgttttcaagttgaacacaacgatcagaaatgccttcttcagtatggaaaatatggtcagaggaacatcaaactctgccagcacctccctctgttggcaagtgtattccccataccaggttctaaaatcaattgctctaaaatcaatctcaggaggaaaacctctatacttcttcctttctccactgggaaagtcttcgacagttcaggatatgtcttcccgatgtgataaatttaaagaacaatagtaaaagatagaagagaattc

SEQ ID NO: 195724 - DNA, 1000 bp, Homo Sapiens
ttcatccatccctccatccttccatctgtctgtccatccttccatccatccctccatccctccatccatccctccctctgtctatctattcacttatttattcattcagtgaatatttaaggagcacctacctgtggtagggcatattctatatgctggggatttagcagtaaacaaaatagacgttcttagctctgatacattccaatataaatagaagaccataaacaagtaaacttaaattaaaagaagggatagggctatgaagaaaaataaaccaagagtgtttatttcaaacacagtaatcagaaaaatgctctcccatgaagtgagggcaaaccccaatacatttaatgggaaaaccaaagtgatacttgggggaagagccttacaggtggtgccaagagcaagtgccgaggccctaaggcaggaggtacttggaatgtatagtaactcaggagaccagagtggctggagcgcagtggctgaaggtgagagtggtaaggggtagggttgggggtgtagccagggtcaagttcatgtaacctacagcaagatgagcctctgaatgttttccaagtgtgatggaaagctctggagagttttgcatggggaactgacataataagatatatacttgaaaggtctgctctggcctctaggtggagaattttgtcttaagggagaaggatggaaggaaggggaccagttgggaggatattgtacttagcctggtgagagatgatggtgatttggaccaggtagtagtggaggtgaaaaatagttggatttgggatacattgtcaagatgttgctgacgtgattggatgtaggatgtgagagaatggaattatcaatttctgaaatgtgcaacactaagaaatgcctatttgacatccacattgggatgctgagttggacagtacaatatttgtatctggagttgaggggaacaggatcagtgtgcatgatattgacagttgtggtgctggacgagatc

SEQ ID NO: 195725 - DNA, 1000 bp, Homo Sapiens
tatgtgtaaattatacacgccaaatttgtaaccccagtgtatatctgtcaagagtgggcatatgcttaggagaacatgaattaacgttagtaccagcttaggcaatgtataattaggaggataaaattgtcacaagaaaataatgcttgctaaagccacaacatgttttctttttattgctatttcaaaaaattaaccacattcttctattctcctccatgaaactgtatacctaagttatagtatttattaagcatccacatggaagacaagcaggtaacagtggttcattattagaaattgatactaaattggaaaatgtcagaaacaagagaagcattttacatataaacataggcttagaactgaaaagaaaacggaatagaatagatgcatataaaagagcaatttgaaaatctaaggccttgaaatcagataaactaatttctaaaacctggaaagcagaaaccctgagatttttgagaatctgaaaatttatcgtgcatttccaataaattttggtatgaacgcaaaagagagagataaatacttgggtttgcctaaaagataacaaacaatagatccttgtaagagactgctttcgctttttaatatctcagaaacaagaggagaaagaaaaggaaaaactgtcagaatggaaacactgattaatgaacaggatgaaagctaattacaagagcaggatcacagcccaaaagagcttaaagggcatcgatgtcaagagaaaaattactcagttaccttaatccatcatagttcaactagaaacactagaaaaaagcaaaaaattatcctgaatatcatgtaaaatcttctgattaccaactactatttgatgagtggccaaacgaagcaataaataacttgccactggggaataacaaaaagaaaaaaaaaaaaaaactctgaaaggcaaaattcaaaaggactagcaacaggaactgggtgataaataaaatctcccctgcttcctgaattc

SEQ ID NO: 195726 - DNA, 1000 bp, Homo Sapiens
tctctacacagtccaggcaggaagtagaagcactcacatcaggagctcagtgtcaggcaggcaagcctcctgcaggggagccccgccctgctcaggtggcctcatctcccctcccagctggtggtgctgccctatcagatgctgctgcatgcggccactcggcaggctgcgggcatccggctgcaggaccaggtggtgatcatcgacgaggcgcacaacctgatcgacaccaccacgagcatgcacagcgtggaggtcagcggctcccaggtgcgtgggcctcccctccccgggccagggcctgccgtgaggtaaagggacttggatggttcctccagacacctgggccaagaattcctccggaggtggggcttgctacagggtgcacgagtcaaggtggtgacctcatcggaggctgaccatggctttccagtgcatcccagaactctggggaccccgctatgacagagtgcctcatttccctgcacctcacctgcccccatgctcctgagtccctccagccctggatgccagcagccagttctgcaagccagggagatggcatgtgtgaggcagaagtcccctcaggattggattttgtcattactgaagttgtctggaggggactgaattgaggaatgctcaagatcagtgcaggctcctcctgctgccctatcatgcgccatgcatggcaccaggtgtctctggtcttcacgctgactctgccatgggggtggtgttcctgttttacattggaaacgtggagattcagagatggtcaagctctgtcctgaggtcatgcagctcatgagtgtggagctggggtgtgcccactggtttctgactgtgaaacccccacgacatcccaccagctctactgacctgtgcctgggctgaattgaggctgggatgtgatggtgaccttgaaccatcactctttgtagactctaggtcttttcccaacccggtggaaactagcagggagattccatacttgagg

SEQ ID NO: 195727 - DNA, 1000 bp, Homo Sapiens
ccaggcacatgccactcacctgcatgctctgctggtactgcatctgcagagaacctggggccgaggtagaaatatccagtccagagcctccctccacacgctgagagatgaagttgttcaaagatctcagggtggataaaaccatggtgttttcccccaggtcttccatggttgctttccttccggggacagacaaaggactggtcaggggcagcctttccacgtgccatcagccgtgcagtcagcagagcctctggacagccccactcccctaacgcacattggagctcataatacacccatgcctgtaaccacattcttcaatggcaactgggagccatgctgccaatttaccagacaaaaaatggaagcaaggaagcatgccaccaaatccccaccagcaagccaccaattgagtctcagttgcacatggacagatggacagctggcgcccgggaggcggggctcagcactcaggtggcacgtcccccaactgcactgtaagagggttctccagagacacagagccaacaggacacagagacagacacaagagaagggctttattggggaaactgactcacgcgattacagagactgtcccacaacaggccgtctgcaagttggagccctggaagcctggcagtgtgacacagtccaagtctgaaggcctcagagccaggggtccgatggtgtaattctcagttcgaggggctgctgggacaagtcctggagaccaaaggccggcgagcttggagtgctgctgttgaggagaggagaggaagagtgtatcccagctcctgcaggcagatggacacattcgccttttctctgtttttgtcctctccaggcccccaggctcttagatactgcccctgactctgaggatggatcttcagcacctggtccactcagactcccaagctcatctcctctggaaacaccctcaacaggcacacccaaaaccaaaaatgatgctttcccaggtttctaggaattc

SEQ ID NO: 195728 - DNA, 1000 bp, Homo Sapiens
taagcacgtgaaaagatgctcagcatcatcagtcatcagggaaatcctaatcaaaaccacagtgagataccactttttacccactaggatggctataatcaaaaagacagatcaggccgggcgcggtggctcatgtctgtcatcccagcactttaggaggccgaggcgggaggatcacgaggtcaggagattgagaccatcctggctaacaaagtgaaaccccatctctactaaaaaaaaatacaaaaaattagctgggcgtggtggctcacgcctgtagtcccagctactcggggggctgaggcaggagaatcgcttgaatccaggaggcagaggttgcagtgaaacgagatcacgccactgcactccagcctgggcgacagagcaagactccatctcaaaaaaaaaaaaaaaaaaaaaaaaagacagatcaggctgggcatggtggctcatgcctgtaatcctagcatctggggaggccaaggtgggcagatcacttgaggtcaggatttcgagaccagcctggccaacatggtaaaaccctgtctctaataaaaatgcaaaaaaaattagccacacgcggtggtgtccaccaggagtcccagcaactcaggaggctgaggcatgagaatcacttgaacctaggaggtggaggttgcggtgagcagagatctcaccactgcactccagccttggcaacagaacaagactccattccccacaccccccgacctcaaaaaaaaaaggacaaataagaagtgttgaccgggtgtgatggcttacacctgtaatcccagcactttgggaggccaaggcaggtagatcacttgaggtcaggagtttgagaccagcctggccaacatggcgaaaccccgtctctactaaaaatacaaaaattagccgggcgtggaggtgcacgcttatgatcccagctactcagaaggctgaggcaggagaattgcttgaacctgggaggtggaggttgcagtgagctgagatc

SEQ ID NO: 195729 - DNA, 1000 bp, Homo Sapiens
atacttgacatgattttgatcttcttaaatttaagacttgttttatggcccaccatgtagtctgtactggagaatgttccatgtgcactaaaggagaatgtgtattttgttgctgttggatagaaagttatatatagcccattttgtctaaagcacaattcaatgtcagtatttcccttttaattttctgtctcattatcggtctgttgttgatgggggatattgaagtccccactattactgtattgctatctatttctcccttcatgtccattaatatttgctttatatatttaggtgctctaatgtctaatgtctagtgtgctctaatgtctaatatatatttacacttgttatatcctcttgatgaatgtcctctttatcattagtgacttttttgtctcttatgaaagtttttgacttgatgtctattttaaatctaaatatagccacttctgttctctctttttttttttttttaccatttgcgtgcaatagcttcttccatcccttcactttcagcctatgtatatccttaaggctaatgtgggtctctcataggaagcatataattggatcttgattttttgttcattgaactactctgtgtctttggattggaaaatttaatccatttgtaattattgacatttaaggacttactactgctatgctgtttattgtctcctggttgttttgtatatcctttgttccttttttcctttcttatttgccttcatgatttggtgatcttctatagtgttaggtgtttattcttttttctttatttttttgtgtatctgctatagtgttttgctttgtggttaccacaaggcttacgtaaaatgtcttatagttatataataattgactattttacactgataacaacttaattttttccacaaacaaaaactctaaacatttatcctccaccctgcttgatctagtctgctgttgaagctctctattgcatttttaaatttcattcattgaattc

SEQ ID NO: 195730 - DNA, 1000 bp, Homo Sapiens
ggaaaatgcaagaaataatgcaacatgatccctaccctcaaaaaatgcacaatcttggccgggtgtgatggctcacgcctctactcccagaactttgggaggcagaggcgggcggatcacttgaatttaggagttcaaggctagcctggccaacatggtgaaaccccgtctctacaaaaaatacaaaaattagctgggcctggtggtgcgcacctgtaatcccagctactcaggaggctgaggcactagaatcccttgaacccaacaggcggaggttgcagtgagccgagatggtgtcagtgcactccaacctggaccacagagcgagaccaaaaaaaaagtaaaaaattggtagtgagaaggaagaaaatgaacaggcaatcacaggtaaaagacttttctggccgggccaggtggctcacgcctgtaatcccagcactttgggaggccgacgcgcgcggatcacctgaggtcgggagttcgagaccagcctgaccaacagggagaaccctcgtctctactaaaaatacaaaattagccggggtggtggcgcatgcctgtaatcccagctactcgggaggctgaggcaggagaatcgcgtgaacccgggaggcggaggttgtggtgagccgagatcacgccattgcattccagcctgggcaacaactgggaaactccgtctcaaaaaaaaaaaaaagaagaatactttcctaatggaaacctgttgatgtttgaaggagccaggggaagaggaagtgattgaagatgctggagaaaatggagacaacggagacacacctggcccggaagcagagatggtcttgggaaggacaagggaagtacttcctcttgtgtgcaaagcacggggctgaggattcactgcagctcacgttgcaggcacagaggctaaaaaattgacttgaagcattcccaaatgcagccggacgcggtggctcacggctgtaatcccaacactttgggaggcggaggtgggcagatc

SEQ ID NO: 195731 - DNA, 1000 bp, Homo Sapiens
agtgccaagtcttaagcaatcacaatatctttgaaaccaggctggttggtcttggtgaggataccagtgaatggtaatatagtccaccacattatttcattgaatccatacaactttctgagataatgcttttatcatccctatgttacaaacaaggaaattgaagctcagagaggttaagtattctgtccaaggtcacacagcttgtacgcttgtgagcgagaagtcgaatttaattgcactactatgctgcctcctccaacagaaaaaaataagacttccatcataaggcttgagatgggctggactggctctctctgacccctgcacttacttaatttctattttgttgtgccatgatattttcatcatggaacttacagtttctgctcttcctgccaattcttctcatgtctcttcaatcaatcacccatgagaggaaatctcattggccttaggtcataggtccctgaccagccacctatcactggctcttatcaggtcagacactctcccctggtcaaatagctcaggctgaatttctgagatacaaggcatggcttccgaggcagcagagaatgatttttactcctcatcaataccttcatatatgttgttcccattgcctggcattaccaagctccagctatatttactagtgatatagtttaaagaacttttattacatgtgctgtgctaagtacatttgaccttcacaataaccatatgatgtaggaaccatcattagtcccattttaaagatgggaagcggaggctcaccgagactaaaggactcactcactgtctcacattttaagcttcatggttggggcttctgaatgaaagcgctttacttatactatgaggtctgatggtgcctcttcctggaagcctgtctggattcccccttgtagagtgccttctctttgaggaatccttctcctgctcttaggaactgagcacattttgctgtgttctgtctgagggttgtgtggaattc

SEQ ID NO: 195732 - DNA, 1000 bp, Homo Sapiens
agatgtatataaacagtaaatttatcttagggatgttaactttcatcacaatctatcatgaaagcatattgtccatgggtataagaaaaagtttatatactctcccactccttccctgtttttggctactatacattttttgaggataaacaatggttgcttataaaattgtgaaaagcttttaaaaaattaagtgctgtacatttgtcaacagatattgtattaacaaaatgtgaaaagattgggaaggattattttttaaaatattattttgatttgcctctgttttagttttttgtttaaagttggaacagaagtataatgtagctatggaacttctgtgctctaatatgtgaatgctgttttatgcaaggcagcatgaaattgctggcatttaatagaccactaaaatttagggtccctaggcactcataaaaatacagtttgagcattcaagatgtttcacttcaccatgcaaagaaactatttagatgccagttgcagcacattttgtgggaaatacggggaaataataacaaagaaagagtggtttatgttttaagttagtttctgaacaattggggctttaaaatgctgtcctttcaatttcaatggttaaattatatgtttaaagtattttattaaaagcagtttatcttgattgactttataaaccatccatctctctcctctgtgaggaagcacatttggagaaaatggttgcaagtgtaatgtcagattcatgtactgaaatgtgagtgatacagtgggaaggggtttaatacattccaattattattgaaatatgttaacctctcagacaccccatctatcagacaactccccatgaaagttttagagtaggtaatgaaaactcttggtaatggaggtattcttcttatctccttagtaatatactctgctatattttgtgatagtttgtatttggctaccagtgaaaaatagattaggagatatcccatgagaaaaaaaagaattc

SEQ ID NO: 195733 - DNA, 1000 bp, Homo Sapiens
tgatggcaccaccgcactccagcctgggcgagaatcagaccctataattacaggctcacacctgtaacatggcgaaaccccgtctctaccaaaaatataaaaattagtctggcgtggtggcgcgcctgtaaccccagctactcgggaggctgaggcaggagaatcgcttgaacccgggaggctgaggcaggagaatcgcttgaacccgggaggcggaggttgcagtgagccaagatggtgccactcactacgctccagcctgggcgacagagcgagactttgtctcaaaataataataataaataaaaatttaaaaaagaaaagaaagtaaaccgaggaggtgaaagtggcggagccttctttgtggtgagaacgctggagtgaagatttagggaggtgtgtggggtcttccgggaagctcctatacctgatcagttttccgcaaaaggggcggaaccacgtgactctggaagtagctgcgggcgtggtagtcctgctgcgcgttgtagggcggaatcgccgaccacagcttgggcctagagcgcccataagcgcgggcagcggtgctcacagccaccccgtccaagataaagcctttctccagtcgcaggcgacactcgctcaggtacgccatcccaaccaccgtagcctcggagggcctttctggtgggggatgaggaccctagatggggacacccctgcgcattcttacgtgatgtcaacgacccctgcgacacaaaccctattgtctccactcaccccgggttgaccggtgggcccttaaggccgtgggggaagttgcttgcttggccccagaggaggttgaccagactgactatgcaagaggagttggaaagtgaaggggaggagactggataaccgattgtgggcagtttgtgtgcatttaggccccgctcccccagttttcctttaaggtgagtattctcttttcccacggtattacatgctatttcctcagctcagttttgttgaaaagctt

SEQ ID NO: 195734 - DNA, 1000 bp, Homo Sapiens
tgtacctcgacttaaggattaaattgtcaattaggaagagaaagtaaagtctaatttcttgatcttttcctatgtttttttctcccttgttatccaattcattgccattgacttagttctggccttccttattctttcttggattactgccacttaattggttttctttatttttgagacggagttttgctcttgttgcccaggctggagtgcaatggcgcgatctcggctcaatgcaacctccgcctcccgggttcaagcgattttcctgcctcagcctcccgagtagctgggattacaggcatgtgccaccatgcctgactaattttctatttttagcagaggtggggtttctccatgttggtcaggctggtcttgaactcccgacctcaggtgatccgcctgcctcagcctcacaaagtgctgggattacaggtgtgagccgccgcacctggacacttaattggtttccttagctggagtcttatcccttccaaccccttttcttctgtcctgctgtcataatgtgtgttttaaacaaatataatcatgccagtcttctgcttaaaccttataatgcctcttcattacctacagggtaatactcaaatcttagcgtggcacagaaggctcctcatcacttggctgacctctcctcctttgtcgctcactactgcctgtcattgaccttctgcactagctgagccactttagtctattttctttcataccttaggatctggtctttctcttttctgtacaatactctttctccctattttcctggtttatttccattgtcctttataacttagacaaggtgccacctcttttaggaggccttctctaatcctccatttttttctgtctacccttgcttccccctctctgccatccttcacagacttggttagataccctccctcttggcaccctgcatatcgtattataattgtcttttctgtttttcttgagggcaggaaccttcttgcttgaattc

SEQ ID NO: 195735 - DNA, 1000 bp, Homo Sapiens
ggaaagaaggaagggaaggagaagaaagagaaggagggaaaggggaagaaaagaaagagaaagaaaggagggaagggagaaggaaggaagggagggaaggaaggaaggggaaagaaaaaaatgttttcagagttaaactaaaaagagacaattttgtgcctaatttaaaggggagcaataaaatgaattaatgcaatctgaagcttttgagagaaattccagtgaagaacggcatcttccttatatttagccttaaaacggtttttggattgtaatatttttgttgatatatatttagtactttttttttttttttttgagacagggtcccactctgttacccaggctggaatggagtagcaccatctcagctcactgcaacctccactccctggggtcaagcgatcctcccacctcagcctcccaggtagctgggactacaggagcgcactagcaagcctggacaatttttgtattttttgtagagacggggttccaccatgttgcccaggctggtttcaaactcctggactcaagccatctggtggtcttggcctcccaaagtgctgggattacaggtgtgaaccaccgcacccggcctatatttggtactctattgcaatctatgaaatcattttggtttaatattaaatacaatactaaattgaattagctcacttttatgctggttttagtaaagttcttgttgcttttggccttttacagaggtatctcctaattgcctgcttttaatggctattctaggtatcaaaaattcagattatattaataactttctaaataatggtgtataaagttaatttcagttttttagtactttattcttcaattctgggtcttcgttacacagccttaaaggccagaaattcatgttttcattctggcaaatagagaactgcaaaggctttaacccagattttggcatatttccactcaataagcaacccttgcatattgtgctaaacatggaaagtagatc

SEQ ID NO: 195736 - DNA, 1000 bp, Homo Sapiens
aattcttaattaatgtaagagcttaaagagctccctgagataatttgagtcaatgaactcctatatatcttattggcaaattagacaaatttagagtatatgttatggaaaaattctgagaagccaagaaaatggtggtgatataaatctgagtttgaacatactctctcccaaaacaataaagaagatcaaatgaaactacataaaacccatgtcttctacataactagaagacatgaaatgtccaaatttcaaattaactgtaaatagaaaaataaacaccaaaccccagcaagttgcctcctccactcctaatacaagcccttcaggaaccaacaaagtcagctggagaaaatccgtgcagagtagacaagagggaagctagtggtggaccttagattgatctgaaacaaccaccagagagagaacgtcggcgctaagtttgaaaatactgaaaagcacactggtagatcaggctacttactactgggaagggacttaaccatatgtgctgcatgcgaggagatggtcttgtcccactttttgtgagaggagatggtcttggaaggataagtaaggcatcctggtaaaaagggtcaaagggaccctcttttagaggcgagctctggaaatcttgcagtgagagggaaattgaagaacctgcaagaatctcttcccttgcaaaactgaaggtagcccagccccttctcccatcattccccttccaaataataataataaataataataataagttcaattttaaaaaagaaagaaaaagaagttatactttgccacactgacagaagagggcgctcttgacctaggaattttgcaaccaccccaacccttccagccctgtccacagaaaggcggatcaaagtcttcatctaagcaaaatcaccagaataaaaagaacccaagcaattcaactgagaaaaattcctcccccaaataatggcaaagtggaagaaaactaacacaacactgaactgaattc

SEQ ID NO: 195737 - DNA, 1000 bp, Homo Sapiens
tgttttattcatagctttatccgcagtatctagaagagtttctgccacataaaatatgcttaagaaattttgttgaatgaactgattgtatgcatgaatggaaagataaatggatagaataggggcatgatatcaaggtatcttcaccactatttgagccagtctgaatgctttctgcagggagatgagggggaaatgaatgttgtcaagagatggggtctgtcacaagatccttgacccattgatcctcttgatgataattacatacttgttcagtacatatgagcaaatattttctcctagtcttccacttccttttaaataaactttttattttggactaattttaggtttagagataagttgcaaagtggtagagagtttccagatattactcactcagtaagccctattttaacgtcttacattacaatgtacacttgtgaaaactttttataccacattggcacatagtattaactaggacttcattcagatttcaccagcttttccagtaatgttttttttgtgttccaggattcagtgtaggatactatattgcatttagctgtcatatctccttagtgtcttctggtctgtgacagtttctcagtctttctttctttcccatgaccttaacagtttttaggagtgataggtattttgtagaatgtccctcactttgtgttgaagtttttctcttgattagattgggcctatggattttttgaaagaatacaccaaaggcaaagtgacttccttatcatatatcagtgtatacatgacattcacatgacatcactggtgatgttaaccttcatcactagttaaggcagcatttgccaggtttctccactataaaattactacttttccctttccagattctatttattagaagcaaatcactaactgcagcctatactgaaggggcagggaagggcaggagggttaagctttacctcccacaaagactctctcaataaattatttggaattc

SEQ ID NO: 195738 - DNA, 1000 bp, Homo Sapiens
tttggataagaaattaactaatagttaatattaataatattatacaaaatcgccagctgttctaaacagagaaagtagagaggagcttagagatgagggagggatgccttggacaagagttaataggaagaaagactgaaaagacagaacgtaccctaagaaagatccctctggaaagaacagccattgcatgccaaaatttggattccatgaacaaacatacatcaatacctgagtttagataattgaaggaataataaggagaagacaaagaagacaaatccaaaagagaacagagaggcagcaggtaggcagtgaatgcgtctttgagcacataggagaaaatgctctgaactggggaagtttacaaccaagggtccttaccctgggtctagcttccataattaatacagagggtgaattagacatgaaatgtgacttatcaatcatgtcctctagtcatcaactacaagcagggtgagctacttaatttgtagggcccagtgcaaaataaaaataaggagcttcttagtaaaaatattaacaatttcaagacggcaggaacagagagcattaagctgagtgcagagcccttctaggcactaagccctgcacaactgtacacacaggggcatgtacttcactagaaataaggcgtcttagatcttaggtaatgcagaagctttttttttttttatgcttaactggagagaaaacaacatagtcttggagataaaacaacaaattccaaaatacataagaaacagcaaaggaatgatccttccatttcattcgatcctgatcagactttattaacaaactcattccagttctggaatctacagagggatgtgaagcatctggaaacatactgaggataaaatgattaaaggattaggaagactaaacaaactggtatgacttggctcaaaaagaaggctgatgtgaattaagtataaatctgttcaaaaggcttattaaactgccattcaaataaaag

SEQ ID NO: 195739 - DNA, 1000 bp, Homo Sapiens
aggtggaaatgattactgaatgagagtgagagagaggaggaggtggcaaaggagtggtacaagtaggaaaaggtggggaagaggggcaggagaaggaaggggaagagagaatgcagtatggagataatatggaataaataatcagcctccacgctctgccttcagtcttctgcttctacctcccattggctgaacctaactagaagacagagaacacgggaaccaggtgctaaggttacatgggatgttgattcatttcatacaggtcagtctctctggatacagcagaatagagaagggtggagagtggctctatgtgggaaagcagaagatatccacctagcattcacctcctacctggcttcttctccaggacatcccaagagcatttcaaactcaacgggtccacaattgagctcataaactgcccgctgcataccctctcctctcaaaaaacaaactaacaaaaatccaaactggttctttgtcagtgttttccttcttttttgttaacaagtttattttcttgcatttcttattttaaaaattttactgtatatatttaaggtgtacaacatgatgtttcgatatacatatagaaagtaaaaaggttactatagtcaagcaaattcacatccattatctcacataattacttgttttttgtgtgtggcacctgaaatctactcttttagggaaaatctcaagtacaatacaatattatttcatggagccctcctgttgcacattagatcttctaatgttatcttatgtcatcaaatgctatcaatgtcaggattgaattctcattaccatggaatggattaaactggggcaagagtaggagcaaatagatcaatgaggaggctgttccattagtgcaagcagaaatgatgatagaatggactaaagcagtgttggtaaatatgaagagaaatggacagattaaagtggatagattaaagagatatgtagaaagcaaaagtaataggatttgggg

SEQ ID NO: 195740 - DNA, 1000 bp, Homo Sapiens
gcttcgaatagagcagcagcagtggggctagaaaaaagtatgaattggaagatatttaagatataaaattaccaggatttagtgagagactggatatggaggatgaggaatcagagctgattcccatatttttgtcttgagtacagcaaaagctatatgaattctgagactgtttatttaattgggtgattggctagaaaaaaatatatacatgtaaataaaaactgaggttgaaatcacaatcttcaaagtttcttaaggaactttactgtgtggattaccaaaactgatttttgtacttacataggtcatcagaaatcttaaaatttttgtcacaaatagccgggcgcagtgactcgtgcctgtaatcccagcactttgggaggctgaggtgggcagatcatgaggtcgagatcgagaccaccctggccaacatgatgaaactccatctctactaaaaatacaaaaattagccaggggtggtggtgcacgccctggaaggctgaggcaggagaattgcttgaacccaggaggcggaggttgcagtgagccgagatcatgccactgcactccagcctgggtgacagagccagactccatctcaaaaaaaaaaagtcacaaataaatttcgttaaaattttctgtttgtatccagaatttacttcctttctttactccttggaaggtaaattccttttgccatttatttatttatttagagacagagtttcactcttgttgcccaggctagagtgcagtggtacgatctcggcccactacaacctccacctcccgggttcaagtgattctcctgcctcagcctcccgagtagctgggattacagatatgtgccaccacgcccagctaattttgtatttttagtagagatggggtttcaccatgttggtcaagctggtttcaaactcttgacctcaggtgatctgcccacctcggcctcccaaagtgctggggttacaggcgtgagccaccgtgcccggcc

SEQ ID NO: 195741 - DNA, 1000 bp, Homo Sapiens
agccctggagtttcccagggcttgagcctagatcctaaatggtattatctacaatgagggcatcttggaagttgatgcttcccatattcttatttctagttttaatcaaagatctccaaattagcaggattttcaacttccttcttagcatttccattttctcacacaaaacccctcttaagtttgccatgtttaaaatttctcccttaaccggtttcatcccagtcttccccatccttataaatggcatccagtcccttgtcactctcctttgctccttcagtcctctcccccaacacttcatcaatgcaaatcatcagcaaattcaagactttttatcttcaagttttgtctccaatccttctacttcttgtcacttccaccactagcagctcagtcgtggccaccaccatctctcacctaacctgctacaagagtctactgctggttatgcttctccgaccctgcatctactgaagcctttccccacagcagccagagaaacttttcaaaagtacaaatgtgatcaagcaagtcactattctatttcaaaccttcaattgcttctcagagcacttaaaagacaaacctttcccaatgcctttctccaactaaccttgtggcatttgtctccccgctgctacgctccagctattctggcttccttgctgtccttcaaacatgccaagctctttatcaatcagagcccgactgactcagaacacttcactatatcattccagcccctcaataaatgtctggcattttctttctttctttctttttgagatggagtctcgctctgtcacccaggctagagtgcggtggtgcgatctcggctcacagcaacctctacctcccaggttcaagcgattctcctgcctcaagtctcctgagtagctgggattacaggcatgcgccaccaggcccagctaatttttgtattttaggagcgataccatgttggtcaggctggtctcaaacacctgaccttgtgatc

SEQ ID NO: 195742 - DNA, 1000 bp, Homo Sapiens
ctccaagtttttcctgttaatttgtgttgatcaatatcttccactttagagactttcctcttatgtctggtaatccttttgttcacgattaagagtggaggactaaaaactaatcggaaggtcagagtacacgcatctctattgtaagcttcaatgaaggatgatctacgtgtgttatttgttgggaaccacccctgtcagtcattttaggtctttcatcttgggctagtcagggttcccagagaagaggctaccaatctcccacctggagaagaagatctggcagccaagttcttgatgctcagttggaaaaagtgcttgaatatctctgcactcagcattgagtcacttagttagcctagcaaccctctgttttagtatctctagagtagtgggtaattcaagaacaattttggccctcacctccaccagagaacatgtggtaaggtctggagggatgggatcttatgtgctactgacatatagtgagtagagggcaggcatgctgttaaacatctacagtgcccgggacacacacacacacacacacacacacacacacacacaccccactacagagagttatcttgtccaaaatatgaatagtgtcagggatgaagaaccagaatttaggaaataaatctccaggcttctgtttggggtggggagagacagttgcccagatttatggagtaggggctggaatctagagatctatctacttcttaagaatctctaactcagtctcccttattttcatccccactcttaacccagttccaaaggtacacggtgctcccaagcttgaagattgtggtgtaaatcagatttttttttccagctttctctactgttggcttaggattcaaagcagtctctggtctgctaaattagtccatctattttcaagcttccaaatttttgttgctcttatctcctctcctgttttccttatccatatgggccctcactcttcatctctagttctggtagcgtttca

SEQ ID NO: 195743 - DNA, 1000 bp, Homo Sapiens
tatattctgttgatttggggtggaaagttctgtatatgtctattaggtccacttggcgcagagctgagttcaattcctggatatccttgttaactttctgtttcattgttctgtctaatgttgacagtggggtgttaaagtttcccattattattgtgtgggagtctaagtctctttgtaggtcactgaggacttgctttatgaatctgggtgctcctgtattgggtgcatatatatttaggatagttagctcttcttgttgaattgatccctttaccattatgtaatagccttctttgtctcttttgatctttgttggcttaaagtctgttttatcagatactaggattgcaacccctgcctttttttgttttccatttgcttggtagatcttcctccatccctttatttggagcctatgtgtgtctctgcacgtgagatgggtttcctgaatacagcacactgatgagtcttgactctatatccaaattgccagtctgtgtcttttaattggagcatttagcccatttacatttaaggttaatattgttatgtgtgaatttgatcctgtcattatgatgttagctggttattttgctcgttagttgatgcagtttcttcctagccttgatggtctttacaatttggcatgtttttgcagtggttggtactggttgttcctttccatgtttcaggcttccttcaggagttcttttagggcaggcctggtggtgacaaaatctcagcatttgcttgtctgtaaagtattttatttctccttcacttatgaagcttattttggctggatatgaacttctgggttgaaaattcttttctttaataaaaaataaataaataaataaataaataatttcacggtgaataaaaaaaaaaaaaaaagaatgttgaatattggcccctactctcttctggcttgtagagtttctgccgagagatcaactgttagtctgatgggcctccctttgtgggtaaccggatc

SEQ ID NO: 195744 - DNA, 1000 bp, Homo Sapiens
ctcctagtggggggccagacaatttgaaccaatggatttaacaggagaaaataccagcttaggggcagcagaaacttgagaaaaatccaataggagggttatttgttggctggatacaccctgcggaggcaggtcagactctggagctgctggttggaggaagaaatgggcaggcctgccatggatggttgtgtggtttgtgcactgaacaaaggcaacagatggaaggtgtaggtggggctgaattccagtatgtgttttgctggccaagccatgtggcatgacataggcttgcttctacccagaggaaaggatgcttgtttctttgcacaaagatgccttctctcaccagactatgcatgcatagtgctgtatctgctcgtttgcatgaggttactgtataggtttgcaggatccagggcttgtgggccaaagtacttgagctctgggagctgagggtggagatggtccacatcccggggtctgcacaatgcattgttctcctggagtggaatgactctcctcctctgagtcagcatcaagaccaccttgaagcatgattgtcaaactgattttcagggctctggctttctggtataccacgcccttcttcagggctgaaacactggtcattttgttagcaaaatacaaatatttcatggtcttcaaatagatggacatctaaatcatttatattttgagatgattagtgactgagctacttaattcgtgcaaacagattcaccaagtgcagtctgcaagtcttgccaggcttggccctgtgcaagttacaagaatttatcaccttgtgactatgtgttggcaaagctttgatggtaagagtatgtctctctctgtgaaagatgttcaaatcaagtggcccagtggctcttccatgccttggagggagctgtgaagagttctgtaaggggtcctaaaagggggaaggaaatctgtgtcatgccaagtggcttggccagcaaactacacactggaattc

SEQ ID NO: 195745 - DNA, 1000 bp, Homo Sapiens
gccatggcagcatgcacctgtagtcccagctgctggggaggctgaggcaggaaaatggcgtgaacccaggaggcggagcttgcagtgaaccaagatcgcaccactgcactccagcctgggccacagagcaagactccatctcaaaaaaaaaaaaaaaaaaccaaacaggatctcctcaggccgggcgtggtggctcacacctgtaatcccatcactttgggaggccaaggcgggtggatcacctgaggtcaggagttcgagaccagcctgatcaacatggtgaaaccccatctctaccaaaaaataaaaaaattagccgggcatgctggtgggcacctgtaatcccagctactcaggaggctgaggcaggagaattgcttgaacccgggaggcagaggttgcagtgagccgagatcacatcattgcattccaacctgggcaacagagcaagacttcatcttcaaaaaaaaaaaaaaacaggatctcctcaaagggatatcttgagcaagcataggccactatatgagggccgagtgtctggcacatagtaaatgttcagtaaaaaactattgtagactgggtgcgctggctcatgcctgtacccccagcactttgggaggccaaggtgggtggatcatttgagatcaggagttcaagaccagcctggccaacatggtaaaaccccgtctttactaaaaatacaaaaaaattagccaggcatggtggtgcacgcctgtactgccagttactcgggaagctgaagcaggagaatagcttgaacctgggagactgaggttgcagtgagttgagatcgtgcccctgtactctagcctgggcaacagagtgagactccatctcaaaaacaaacaaaaaacaacaacaacaaacaaaacaaaaaaacacccaaaactattgtaattattatcgttcaccataacatagcaataaggttggcagattctgagccagactgtccgggttcagatctcagctctaagct

SEQ ID NO: 195746 - DNA, 1000 bp, Homo Sapiens
taacctgttagaggttggtgcaaaagtaattgaggtttttaccattaaatgacaaaaccgcaattacttttgcaccaacctcataatttactgaaagggaagaaaatgtcatatacataaaggttaagggtaagggttctgcatctaggacgggaaaaatacaaagtgagctaggaacttcttgtgacagaaagcaaggaagcactcatagctcaagcttaaagggctcccacaggccaaatacaggacagtgtgagcatcaaaaagaaggtaatgttggtaaaacagaataaactaaaatccatgacactaaaacaatgagagtgaaaaaaactcatttaccaccattagagatgatattgtaccatttccttactcagaaaagtgttaaagaaaaaaaattaagaatttacctcaattttttagtagaaattataatttaggccaggcacagtggctcatgcctgtaatcccaggactttgggaagcagaggcgggaggatcacttgaggtcaggagtttgaggccagcctggccaatatggtgaaaccccatttctattcaaaacacaaaaattggctgggcagggtggctcacgcctgtaatcgcagcactttgggaggccgaggcaggtggatcacaaggtcaggagatcgagaccatcctggctaacacggtgaaaccccatctctactaaaaatacaaaaaattagccgagcgttgtggtgggcacctgtaatcccagctaattggaaggttgaggcacaagaatcacttgaatccaggaggcagaggttgcagtgagccaagatcgctccactgcactccagcctgggagacagagcaagactccatctcaaaaaaaaaattataatttattcctaaccgatgaggaaaatccttacagaagattgaaagcaaatcagtgtaaaagaaatgacagaatcagaaaaatcactatttccaaaaaccaatgaattaactgatttaggcaaagatc

SEQ ID NO: 195747 - DNA, 1000 bp, Homo Sapiens
aactgcatatctgtgccacaattcctcttggtgtaagggtccttaattctttttaaatgttgttgggtttgttttgctagtattgagaacttattttgtcaaattcaacaggggtagtgttctgcagtttttttcttttctcctgtggtttttgtattatagtaattctggcctagcataattaattgggaagtttttccttctcctttttttcatatttgtaaaggattggttgtaattgttcatcaaaaattggcaaaatacacatcactgatgcaattgagattgggcatattcttggcatgaagatttttattatttttattttagattcagggaaaacatatgcttgtttgttacaagggtatgtggcacgatgctgaggtttgggctttgactgaatgcatcacatatgcagtgaacatcatacccaataggtactttttcaacccttgtctccttcctctccccaccttttggagtctccattgtcttttgattcccatcattaattccatgaggacccaatgtttagctcccacgtataagtgagcacatgtggtatttgtttttctttttctctgttaatttgcttgggggaaaaggccaaattgtggcaatttgcatgcatctagctctgctatacataattaacaccagagccctcaatattttttcttttgcaaagatggggattggatcaaatatatccaatggatgtttttaagcagtttaaatacagagcctgttagatcacttgctcattttgctaaaatatatttggggagagagaaggagcctttgaggattttaggctatggatggccccacattctcatctaaattgtcatgggaccattggctaaaattaaagcattttacccaagaaaattcttactctcctcccaagagaatatttgatttgcatctgctacagaattttcttttatccttgattatcatttcgggttttctgggtcctttagggctgttttaagct

SEQ ID NO: 195748 - DNA, 1000 bp, Homo Sapiens
tctgtcacccagactggagtgcagtgctcactgcaaccttcaccttctgggttcaaggaattctcctgcctcagcctccagagtagctgggattacaggggtgcaccgccacgcccagctaattttttgtatttttagtagacacagggtttcaccatgttggccaggctggtctcaaattcctaacctcaggtgatccatccgcctcagccttccaaagtgttgggattacaggcgtgagccactgcgcctggccaaggactagtttaatattgttggtttaataaaaaaaagaactatgtcttttgacttatcagcaaactatacatgtatttaacttcaaagttcttgcttttttgatacttgcctaacatataaaaatagttaataaaaaatttaacttgagataatgactagatttgtttcatgtctcatacaatttttcaaacacaattgttaagaataaataaatgtcaatgagataaaagtttacaaatggactttctttttttgagacaaggtcttgctttgttgcccaggctggagtgcagtggtatgaacataccttactgcagcctcaacctccggggctcaagcaatcctcctgccttagcttcccaatgtgttgggattataggcatgaaccaccttgcctggcctacaatgaacttttaataatagttatgttttataatgtgttttcttaaaaaggtttctcagaggcaagcgtggtggcatacgcctgtagtttcagctactcaagaggctgaggtgggaggatcatttgattccaggagttttagtccagcttagacagcaaagtgagacccctgtctcctatacagagagagaaagaaagagttaaaaaaaagtttctaaaatctttttggtaactctatacccttagagttttgctgagacaaattaaataatacatatttttagctgggcttggtggtgcatgcctgtagtcccagctacttggaaggctgaggtggga

SEQ ID NO: 195749 - DNA, 1000 bp, Homo Sapiens; identical to SEQ ID NO: 114850

SEQ ID NO: 195750 - DNA, 1000 bp, Homo Sapiens
tttataggtgaagagtcaacttatatatttaatgcaatctctatcaaattctggcgggcttttttggtagaccataaaaaactactcctaaaatgtatctggaaatgccaagtgacaagagcacctagagaaataatttaaaaagaacaaagtggggggattacagtttctcatttcaaagtttgctaaaagctggactaatcatcaggacactggcatttttaatactatagacaagaataatgaaacacaattaagagtccacaaattagtaacaacatttattatcagctaatttcaaaaaccataccatttcaattaaataagaatcatttttatcaataaatgatgctagacaaaatgaatattctcatgcataaagatgaatttaggctactgccaatgtccatatagaggctagcagccttggatccacctgcaccccaccccagtctacgagtgtgtactctgccacactactgatgctgctggcatgtgtgaacaaggatgagccacaatgccactgcccaacaaagtgcttaggctggcaccatccttcagagtatcgtaaccagcaatccaggaacacaatagcccttccagcatagcagattcccaaccttaaggggaaagagagcaaagccaggggcccaatactagcctcccagagttacggcattcagcgcgggagtgctgagctgatccttggcacccccaaaatctaccataaacaaagctagtaaatgaaacccaccttattccgaaatcaaacccccaagggtatcaaagaagataaaagaaaaaaaaagaacccatccaaagtacagcaatttcaaagattcaaggaacatcagcccacacagatgagaaagaattagcacaagaactctggcaacacgaaaagccagagaatgtcttcttacctccaaacaaccacactagttcagcagcaatggttcttgaccaggctgaaaaggcagaaatgacagaaatagaattc

SEQ ID NO: 195751 - DNA, 1000 bp, Homo Sapiens
tgtcttaaccattcaaaaatgtaaaaatcattcttagctcatgagctctgtaaaatcagtgggcagacttagtcttcaggaagttgtctgttgttccctgctttagagtatggtaactaaaaaataaatagatgaataaggcaaatgccattcttgacccacagctggcccaggattcaagctactcaggataggatatatgtagcttggcctgtgctcttggagaaccttgacttttcacaattcctttccctttttgcttgctttattttattttattttattctttttctttaaagtaaagttagtgaggtgaaggactcttgctaagagtttctcagcccagaggttttttttattcatgctctttggttcttaagtcttaatattcctgacactagctggtttttcctcctcatcctactgtaggctaagtatactaatctctagacatttggaattcacttgcctcaggaggaggagctcagagcaattttatttgagtgaaagctcaaaaaaggcaatagtttagaagtacactccacacatctcagaaccattttgttcaaataaaacagcttggtctagaaaaagtcactctaaatttatgcaagtaagtagcttttacatttggctgccaggtgtgtgccagaatacctcatggaagtggagacttgcaagatccataggggtatttcctgtggctttctcttcaccttgtagcaaatctctagcaacctggacagtagattcaaatttttctctttatcaattaacatggaataaaaagaccaagaataggaacctttggtgccaaaaatcaaaagggaggaaaatatgttttatttgatttaaagataaagtcctattgctttaaaataagtcagaagaaataaaagttgaggttctcatagaaaccaactcctcctccttgctcagacgtagcatttgtgcctgttagatgctgtctgcacagtgccactgtgttacataaaagctt

SEQ ID NO: 195752 - DNA, 1000 bp, Homo Sapiens
ggagtttagctcttgttgcccaggctggaattcagtggtgcgatctcagcttactgcaacctccgcctccagggttcaagtgattctcctgcctcagcctcccgagtagctaggattacaggcatgcgccaccacactcggctaattttgtatttttagtagagacgggggtttctccatgttggtcaggctggtctcgaactccggacctcaggtgatctgcccgcctcggcctcccaaagtgttgggattacaggcgtgagccaccgcacccggcctttgctcaactcttaatttacagatgacaacaccaagactctcttcactgacttgaatctccccagtgccaccacagcttttagttataaaaataactaaaggagagcagaactctgagaatgctgtgagaataaagtgttttggaattgttaaccagtccttagtttttgctttctatctcattttcattgagaatttaaagtggaatttataacgaatttgtcagatctggtaagcatttgatacatgctagtttagtgactaaccaaacccaaccaaccagtcttctagggctgattaagcaaaatcctgataactgtttatgattattactatacctagggctgccataacaaaatacctcagactgagtagcttaagcagcagaagtctatttcctctcagttctagagactggaagtctgagatcaaggtgttggcagcaacgatttctcctgaggcctctctccttggcttgtagatggccattttcacagggtctttgatttttgcacacgtgtctatagccaatatgttctcttataagaacaccagtcagattggattagggcccaccctcacagcctcatttaatcttaatcacctctttaaaggccctatgtccaaatacagtcactttctgaggtactggggactgagactttaacatatgaatttggtgggacacagttcagcccataacataactttatgtgaattc

SEQ ID NO: 195753 - DNA, 1000 bp, Homo Sapiens
atttttttgtattttagtagatggggtttcaccatgttggccagaaagctgacctcgtgatccccctgcctcggcctcccaaacttttaaaatccaggcagacaagcccattatagactggtttgcacccagtatcacaattaaatcttggtttccttctttctttctaccttttatttccttccttctgcctagtcagaattactaagattcccttgctggggattttgctcaatcctctgtagagttaatatgtatgggtcctcctcaggggtgcacgatgtctcaagggactcattccagaactaatttagagggagttgatggttctgcatttgagcttttgacgattcttataaacattttcccaggaaagactagcttctcccctttattcttctgcctgttttattattggcaatgccaaacatagatccctgtgctaatgacaataataataattagtattgatgacaacattaacattttcagaaaggttttgtagtttataaaattaatttccatcagtcacactttcatgatgaattaactctaaagacaagcaaatgtctcctacccacaagggagagatctttgtaccagcttcgcagcattggaagacgtcctcggaccgcatgaaaacacaactgaccccttttctttcccctgagaagccagagaatcagaagatcgggtgctaaagccagagaggtcatcttgatactgatcctaccactaactgagcctcggaaggtcattcttctctctgaaatctttttctcatgtgaaaatagaaataacactactacttatttcacagagatgttgtgacaataatataagatggtgcatgtgaaaatccttaacataccacctagatcagaataagtgctgtggtagcaattatcattattgacttattcaatatatatttattaagtgtctacactatgctgggtgctggtgcacaaaagtaaaatggacaaggttcctggaattc

SEQ ID NO: 195754 - DNA, 1000 bp, Homo Sapiens
aaaaagtaaaaagaaattagtcttcttttcctgtcccccgactctccccagaagcaagtactataaaaagattcttatatgacctcttagatatatatataccttatcactatccccttgccctcctttttatttttagtttatttattcaaatgacattctattcattgttctgtagctgttcattccttctgcttaacactgtatcttaaagattgtttcattttaacacataggaattttaccactactgaatttgattccattctgtagatgcatcataattcatttgactatttatgtatatttagattaaaaagaaaacccacataaaaatttcagcttttgtaaactatattgaattaaatattttgtacttaaatgaatgtgtgactacaggataagttccaggaggtggaattacagggtcaaagggacatacattcagatagatgtttgccaaattaccttctaaaaatccaaccaatttatactctcccaaaaatagatcagaatgggccgggtgcggtggctcacgcctgtaatcctggcactttggcaggccgaggtgggtggaccacctgaggtcaggagttcgagaccagcctagccaatatggtgaaaccccatctctactaaaaaatacaaaaattagctggggtggtggcgcctgcctgtagtcccagctactcaggaggctgaggcaggagactcacttgaacttgagaggcggaggtcgcagtgagccgaggtcacgccaccatactccagcctaggcgacggctgtaggtgattaaatgagatagatacgtttgttaaaaacaaaactctcagttatttatattgatacatttatatacttacatatgtatatctggacatcacatctcataattggagaacaggtatctaaaaagttgtttaactgactgttaagaaatgtagtctgttgtctgtttcctaggtaagccacttttcttttcccccagcattggaattc

SEQ ID NO: 195755 - DNA, 1000 bp, Homo Sapiens
tcggcctcccaaagtgaccactgcgcccggcgcctttggttcttacatgagcctcctggagctgctgtgacaatgcaccacaaaccagggggcagggggaggcttgaaatttattctctcacaagtctggaggccagaagcccaacatgaagatgtggtggggccgtggtgcttctgaaggctctggcgggaggatcttctctgtctcttccagcttctgggggtggcctgccatagttggtgtcccttggcttggggccacatcactccaagctctgcctgcatcatcatgtggccttcttccctgtgtctctttctccttttttgtttttatttttattttttgagatggggtctcggtctgtcacctggctggagtgcagtggcacgatctcggctcactgcaatctctaccccacaggatcaagcaattctgcctcagcctctcgagtagctgggattacaggtgcacgccaccacacccagctaatttttgtatttttagtagagacgggggttttgccatgttggccaggctggtctcgaactcctgacctcgtggtctgcccgccttggcctttcaaaatgctgggattacagacgtgagtcacctagtccagctgtctctttctcttataaggacaatactcatgaccccagtagctggaagaggcggaaggatttttcctgagagcttttgtttcttcttttccttatcttttctttttgagatagagtcttgctccattgcccaggctggagtgcagtggcacagtcttggctcactgtaacccctgtctcccaggttcaaataattatcgtgcctcagcctcctgagtagctgggtttacagggatgtgccaccacacctggctattttttttgtatttttagtagacgaggtttcaccatgttggccaggctggtcttgaacccctgggctcaagtgatcctcgcgcctcagcctcccaaagtgctgggattacaagtatgagccacc

SEQ ID NO: 195756 - DNA, 1000 bp, Homo Sapiens
agtctttcccagtttttatgtctagaatggtatttcctaggttatcatggctgggtttcttataattttaagtttttcatttaattttttaatttatcttcagttgatttttgtaaatcaaaatgaaatgaaagggtccagtttctgtcttctacatagtgttaggtatttattccagcaccatttatgaaacaattcttcccacattcctcttgacagctttgtcagaaatctgatggcggtaggagggtggcattatttctggcctctctgttctgttgcattggtcttttttttttctttttttttttttttttttagacggagtctcgctctttggccgagactggagtgcagtggcccgatctcggctcactgcaagctccgcctcccgggttcatgccattctcctgcctcagcctcccgaatagctgggactacaggtgcctgccaccgcgcccggctaatttttttgtatttttagtagagatggggtttcaccgggctagccaggatggtctcgatctcctgacctcgtgatccgcccgcctcggcctcccaaagtgctgggattacaggcttgagccaccgcgcccggccagttgcattggtcttatgcattaataagtttcatataatatctttctctcttttggtttttccctcataaaccttctttcaagtgcatacattgtacaaatttcagatgtccaagagttcaaaactctttgaaaacttccaaaaatgtttttgctattccctctttttgtaaggaatttagattatatgtagatatttttctttgttttattgaaatatatgtaaatcatattaacagctaaataaaccttttgtcattttttctgactccagattatctttatctagtacttcagatttattactttgtttttgcttccaaaatgtttatttttttcatttttagtcctttagacagatttgtttagataaaagctcattttaatagcatacagaagct

SEQ ID NO: 195757 - DNA, 1000 bp, Homo Sapiens
tgagctgaaaagtatctgtatatatacaaagtccatggatgaaactgtaatcaggtttaaaaattaatatggcccttcaatccctttacgagtcccttgatcactgatctaatctgtttggtcagctttgaaaacaatggctgagggtagttctggtttaaaatggcacctgattaacagcctttaatatagcatctctcaggctgggtgcggtggctcacgcctgtaatcccagcacttcgggaggccgaggtgggcggatcacgaggtcaggagatagagaccatcctggctaacatagtgaaaccccgtttctactaaaaatacaaaaaattagctgggcgtgatggcgggcgcctgtagtcccagctattcaggaggctgaggcaggagaatggcgtgaacccgggaggcggagcttgcagtgagccgagattgcgccactgcactccagcctgggcgacagagcgagactctgtctcaaaaaacaaaaacaaaaacaaaaaaaaaaaccagcatctctcaacttttcaataaaatatctaggaagccatggcagggagtggtgaggagaaagctcataaccagcctcaaaactaaatctaatggacagtgctgacccagaatttcagaggaatctttaatgcagatgaatgatggttaacttcaattcatgtggctcatgaaacagagcttacctgaaaactcaagaccattcagacatcaccactgtttagctcttcactcaaagacccagctgtccctctgctgtgggtcctgtgaaccaatccatattgattctcctcctccttctttgttatttgtttgcatctatttaaagacagcagaaatcccccagaagttaactagagagtaaatagtggagttggggaggtgcatgtacgtgtatagacattaaggtaaggaaccacagtagtacccctatcctgggtcatataagccctacaagtaaagagctgctagagtgggtatggagaga

SEQ ID NO: 195758 - DNA, 1000 bp, Homo Sapiens
ctgatgtcaccctcagaccctctgcttttgagccccaggctacagagtaaaagtctgatggtaggatgtgaggtgagggaccttccttgacccggcacccacatgaggcaggactgagaacaccctgaggactgcccgggtggctggggtgctgaagccaggcttggcccctccacaggccatgcatgacaaggaccaccctgtctctgagctttgccttggccttgccgtgacattttcaggtgtgtttcagcttagattctgctctggggtttcccgtgtaagaacagggatgacgtctaagcccttgtctggcatttgtcaggaatattgggagaggcaatgtggcagtgtgagaaacaagctcacccatccaaacctgaagaatggactcagaggcacgagcagtgaaagtgagacttttttttttttttttttgagacggagtctcgctctgtcgcccaggctggagtgcagaggcgccatctcggctcactgcaagctccgcctcccgggttcacgccattctcctgcctcagcctcccgagtagctgggactacaggtgcccaccaccacacctggctaattttttgtatttttagtagagacggggtttcaccgtgttagccaggatggtctggatctcctgacctggtgatccgcccgcctccgcctcccaaagtgctgggattacaggcgtgagccaccatgcccgggaaagtgagacttttaatagtggtcttgcgagattggtgtctggtggataggcgcactcagggcagtcacagcaagtaacttatgccctagcacacaagtccctcctcctcattggtcgagtactatggggttacaatcttccaggacattgcctaagtttcattatccaccttataaggttataccccgtcgccttccccgcttaagtttcaattttccaataacgaaactttcttcccttttatgggctgaccctttttctacattctgtctgcttattgt

SEQ ID NO: 195759 - DNA, 1000 bp, Homo Sapiens
atgtcatctgcttttgaatttgtttatttcatggtcctgaccccgtgtggcagttccatgactgcctctcatagaggtgaatgtatctgccatagattggcatttagactggactgacttaagtcagcccaaagtttcataattgcatcaagtactcgttctaagggaaacccattgggtagcttgaattatgttggttgaaaagattagcatgcagatgattcattctttgatttactattgacatatgaattgactttcccttcagctgatcaattgcaatgcatcctcaaactgtttgagatctgagaaggaaaattccagttgactgtggaacttgttatggttgtgccgttatgtagaatatttcgttagctggaagataatctaggttttaaatctcagagatcatctaattcaacaccagttggcattcagctattgagtacagtttttattaaggcttttgaaaaagtatacttattgaaattagggaaaatttgattatttaaaacctgggatttccagaggtgagcagggtagggtttgcatgagaaagacgcctgtttgcttaaaagaatataagtagttgttggtcacatcctcctgacaccatcaaggttgtctgaaataaagattaaagcagcttctctatgctagggcttctacttggtttggaaaaagtgttttccagaagtattataatctcacagtgggcatttctgtctttttcactcaatttacttgaaggatgcttgatttaattgctggtaccttcagatatgcaagtagtacagataggttagcaccatgctttgtattttatttaaaagatgacaaagtaagctgtacacatttgaggagaaatggtaaatcaaaatttcatgctataatacaaattatttgaggggccacatttcttttcattctagccttcaaagctgtgcctgttgtgtctgtgtccaaagcaagctatcttcttagggaaggggaagaattc

SEQ ID NO: 195760 - DNA, 1000 bp, Homo Sapiens
ctgtcctaaatcaattttctcaggtatactgacagtatttttgaatgaactacataatattcgaaatgatgaaagaaaataacttacttttcccctcttaatctgtaggcagtgttttgatttcatcatcattgcccatgactcaggagagtcattggttaacaatggtttaatttgaccatgcttagttcataaaggttaccagtagacatccattaggtcatggatgagacctcttatattatatttttaataattttattccatcattttaaacattaggagaagtcgtaagtcattgaggaagcacatgtagctcaagtatcatataatacaactttgatctcaggatttaatcttaaccatcaccatattactgtacaaagacaattgtaaaaactcttgacacttgattgttctgtacataaagatagctgagcaacttccccaggtgtggaatttggctcacatcagagccattgcaagaaatgttcttaggtccacaacggcaactggtcaaataacacgtgaccaaagggcactgtagctaaagaagtttggtgaaaaggaggaggatgtgcaaggttggaaaagaaaaggaaggtaataaagttttaaggtcagctggtttcatggtcatctttgtcattaggtggaaatgttaggagtgcagtattagaaggaaaagatgtgtacactagttattaagtatagtagcactgtgtagagcttgtgaaacactgaaatgaaacatttttgctatgttaattattactttaaaaattcattataaatctcatgcaaaagacatactaaatttaagttttcattggtactatttgtttagtggtttgacataaaactgtgtattatagtcagtaatattcataaggtacatagtatttagcaaaacttcatctttactttgtttttaaatgtacttgaacatggcttaatacatctacagttctttgttttttttttaacccttaaggaattc

SEQ ID NO: 195761 - DNA, 1000 bp, Homo Sapiens
acagctttttattttaaaaaataagtaacgatatctatttctgccttattgtcaatggtgcaattagtttatgagcatgcaattacttttctcttcacaggctttgattctgctgtaatagtctccatgttgaatctttccctgcatgaattcatcctgcatgtttctgcagatccttctccttgtcacaccatactacaaattatcccttggctcataaaacctgagcagttccctaaattccttagctagacacatgattgtccacagcagagcccttacttgtctctctctatatcccattagtcacctgccctctgctccattcaaacgtatcaacctaaagtccagaaggagcgccgtgtgacgggaagacaccagccttgtggccagttgaatctgggcttgacttcctgcatggcatttcctagctttatgtccttgaactaccctcagcaacgctcttggtatcagtaccttctctctggtctgagtttctgccaataatcttattactctgtttccagattttgccacaatcccaagccctctgctcaacattcttgcccactgcccctgagctattctcacatgccctgatcaccatcttcactgacacctccaaggatttttcctctccttttacaaggccaagtcaacccagccaaatcagttacgctcactggatggatccttcacgttgtcctcacaaagacaggtctgaagactcccagaccctgcgaataggctttctctagttccttcccagtggctgactgaatcatgtccccgtcaggggttaaagctctggattgcatgggtgtggccaggagaaaccatgggatgcacactaaaaattcccatcttggagatactcctccgccctgggatcacagcatacacaacagagctcagctccagccgaacctgagctagacaatctgccttgacaggccccacgcccactgccgggtgtgtgtctcagccaacctgggaattc

SEQ ID NO: 195762 - DNA, 1000 bp, Homo Sapiens
agaggacttcgtgcaaacctccctcctctctcagctagagaccatcacctcctaacatacttgcctgcttctttctgtcccactggggtctctattcaacacaactagattgatcctttaaaaatgtcagtcattcccttgctcaaagttgttcagtggcttcccattttactcagagtaaaagccaaagtgtttaccatggcttctaagcagtggtatgctggtaaatatttaagaactgagacactgaagtataaatatatattaatacttaaatttgttgtaatttttaatgagataaatgatgtatatacagttaccaaatgacaaaagatgttataacatgtagatgtttataacaactttattcctaattgccaaaacttggaagcaacacagatgtccttcagtaggtgaatgaatacataaattgtggtacatccagacaatggaatattatttagtgctaaaaagaaatgagctatcaagccatgaaaataaatagaggaaacataaatgcatactactaagtgaaagaagctcatctgaaaatactacatgatgtatgatttcaactgtgtgacaatcttgaaaaagttaaactatggaaccagtgaaaagatctgtggtttccaggcgtcaggggtgagggagggatgagtgggcagagtatagacaatttttagggcagtgaaactattctgtatcatactatgatgatgaatacatttgtcaaaacccatagaatgtataacaccaagagtgaatcctaatgtaaactatggatcttgggtggtaattatgtgccaatgtaggttcatctactggaacaaatataccactttgggggatgctgataatgggggagtctatgcatgggaagggccagagagcaaatggacactgtactttctgttcaatttttctgtgaacctaaaactgttctaaaaagcaaactctattaaaagtggatatatacaatactccttattgtgaattc

SEQ ID NO: 195763 - DNA, 1000 bp, Homo Sapiens; identical to SEQ ID NO: 114927

SEQ ID NO: 195764 - DNA, 1000 bp, Homo Sapiens
agccataccacatggcatgtttaggtggctatctctgctgctcccagcttccctgttctgccacaggtagccctgccagaccagaccaggtcctgagacaggacacagaaacaggtccaagggccaggcgcggtggctcacacctgtaatcccagcacttttggaggccaaggcgggcggatcaagaggtcaggagatcaagaccatcctggctaacacggtgaaaccccatctctactaaaaatacaaaaaaaaaattagccgggcatggtggcgggcacctgtagtcccagctattcgggaggctgaggcaggagaatggcatgaagccgggaggcaacgcttgcagtgagctgagatcgcaccactgcactctagcctgggcgacagagtgagactctgtctcgaaaaaaaaaaaaaaataggtccaaagaggagttggcgtcttgtactctcaggctcgtggcagagacactgggatgcaggtagtgaccaaaacattcactcaacaagcattagcagtgtggcctctgggtctccagcagggtgtccaagcccatataaaatgcaagtctaactatgtatgtcccaccctggctgacagggcaaagctctagctcattaggacacagcaaagccaggaagctcagccttcatgatctgaccccagcctggctctccagcctcaccctccctgctccccacctcacacactgtgccaggctcaaggaatgcaatagaaagcaaacagatccccctcataaagcccagcagggaaatctgccctctacccatcccatctgccctcctgcatttcccccttctttggcccccactaactcccaccccacacttcagatcaagagcctccttttccaggaaggcttctctgacaggtccttctccccactctgccgagttaggtgttctcacagccctctgggggcctctattcttgtactgaaatggtccatttctgtggccgtctcctccatttctc

SEQ ID NO: 195765 - DNA, 1000 bp, Homo Sapiens
tccatttggccgttcatctgtatcttttgtaatattctttaaaacaaatgagtaaatgttaagtgttttcctgagttctgtgagccatccagcaaattggacctgaggagggtgtcaaggatacctagatttagagccagtcagtcagaaactcaggccacatcctgtgcttgtgactggcattggaagtgggagacagtcttgtcaggctgagccctgaccttttgggatctgatggtatctccaggtagatagtatcggaattgaattgagttagaggacacttagctgctgacctctggagaattcactgcagaatcgattgcttgcttggcatgtggggaaaaatccctacacatttggtcacaaaagcattttgttgtgagagtatagtatgggagaaacagattttggtgttttttttcctattcaatcttttgcattatagcttattctttttgtatgttgttaaggaaatctttgcctagtccaaggccacaaaggttgccttaatgaattcttctagaaattttataattttaggttttacatttaggtcggtaatgtatttctatttaacttttttttcctttttttttttaagagatggtcttgctctatcacccaggctggagtgcagtggcaccatcatagttcactgtagtcttaaactcctgggctcaaaatcctcttgcctcagcctcacagctagctggaaccacaggtgaatgccaccatgcctggccaattaaaaaaaattttgtagagatggggtttcaccctgttgctcagacttgtcttgatctcctggccttaagtgatcctctagtcttggcctcctgggctgctgggattacaggcatgagccacagtatccagcctgtttttatataacttttatacatggtgtgagatataggttgaggttttttttttcttataaatgcccaattattttagaaccatttatttaaataagtatcctttttccattgaattc

SEQ ID NO: 195766 - DNA, 1000 bp, Homo Sapiens
tccagcctgggtgacagagcaagactccatctcaaataaaaaataaaactaccttttaccacaatttctatgctctccccctttcaatcaaaatgaaaacaaggataattaggatatgaaatagacaaattagtagcagacccagaaataatagaaagaaatcctccataagtcagctctggactataaactcctttagagcaggggtacctcacatttattctgtatttcaaatacctactatggggtttggtctatttaatgcaagtgctaaactatttacgactgctaaattaattacatcaacatctgggcaatcaacagtggatatgttaagacaagaacctccacagaacagaacccagtctttttttttttttttttgagatggagtctcgctctgtcgcccaggctggagtgcagtggtacagtctcagctcactgcaacctccacctcctaggttcaagcgattctcctgcctcagcctcccgagtagctgggactacaggcgcccgccaccatgcctggctaatttttgtatttttagtagagacagggtttcgccacgttggccaggctggtctcaaacacctgaccttgtgatccacccacctcagcctcccaaagtgctgggatttacaggtgtgagccactgtgcccggctgattgtcttttatggaagatgaacagtagctgttgtggcttcccaactgaccccagcagaagtaatatttagagcctctagagcacatctgtttccactccgcctacaagctatcagcacctcctgatggggtgaggcatggcattccttttattgctaacgcagagcctggcatataggaggctcttagtgaggttctgctaaattagtgaataaatgaaggaaaactgtgccttgtacctgtaagaagggacagaacatccttttgccagtggtgtatgggattcactctgattgtactattagcatgctcatctctttcaaagaggagagcc

SEQ ID NO: 195767 - DNA, 1000 bp, Homo Sapiens
cctcaagtctaatggaattgttggcttttagattccctagggatgaagtccaaaagaaagataaaattacttgtctgaaaatttggtatccaacttactgagaaatcaacaacatcccttggtggaagccaaaggaagtgcccttgtgtagtagacagagcatgagttacatattatcctataattatccatcactaaatgtgcaataacatataaacaggcagcatacatttcattacagtagtgcctctagtcaccaaaagttgaaatcagtcaaactatttaatggactttaaaccatgacaattcttagaatagaataccatgcagctatttaaagggatctggtaggtatgtattacttgacacagaaagatattcaagaagaattttaaaaagcaagttctagaacagttctcatttttgtgtaaaaaatttatatgtatgtctcttggtttggtagcctatgcgtagaaaatatagaaatatatactctgtcttattaacatggttatcttgtgggggtaggattatgaagaactttaacttttaactctgttctctatctctttaagtttgaatgggtttctattaatatcaagaacttttgttgtaattagacaaatacgtttttcttttttctttcttcttttctctcactctctctctcttttttttttttttttgtagaggctaggtctcactctgttgtccaggctggagtgcagtgatgtgattatggctcactgcagctttaaactcctgggctcaagcaatcctcccacctcagcctcatgattaactgggactgccaccatgcctggctaagtttttaattttttgtagagatgaggtcgtgctatgttgcccagactggtctcaaactcctggtctcaagtgatcctcctgcctcaggctccccaaggaacgggattaccggcatttttcttttaaagaaagagtacaggctttggaggttaacagacttgtgtttgaattc

SEQ ID NO: 195768 - DNA, 1000 bp, Homo Sapiens
cacagctacaaatgccagaggcatatttttctgacttttacactggcaatgaacatcaccttcagacaaaacaccaaattctgcctgagtagagttgctgtctactgaaactaaaaaagaaaattttaacaattgtataatattgagcaaatcatttaacttttctgaggctcaacaaccttgggagcaaaataaagaaacaatgttctaggatcaacaacactgttgaacatgtggtcattcagcagagtagtgtcagcattatggcaattagaaaacacttccacagcaactgggccgagcatatgataaatatgctcaccttgtccaccctgtacatatatactggaaattaaacatctggtctttcgtcatcaaaagtttgaaaagtactaaactaaaaaaatctatgtaatctgttgtctgctctaaatagtgccttactcctttttactaaatgctgccttaagttatatttaagggggcctgcctgaatgctacaagtcctcctgtcatccaactcttcttgactgacaccttcaaaattcagtagacactaccaaagagatgctcagaagttgtctctatcttggaaaaagtccaagagctggaaagaaattctagactgaaaatcataataatggacatagcagggaggaaatctgccttggaaatggtccaatcagttggaacaaatggcaactgtttcatttatgtaatatatattaaagacaatgtcctaaaaaattatctttactacatgaactcaaacaatctaaacgtgcagttctgtgatttcaggatcaatatattacagaaaataagcaaatttccacatgactagatgtggtattctagccacttaactattttagaaaagccagaatgagcttatggatatatgccaaacatacttaacaaaataaaagatttttttaattttttaaagcttttgaagatacctatagctcatatggtataaaagaactcctaagaattc

SEQ ID NO: 195769 - DNA, 1000 bp, Homo Sapiens
ctggcctggcaaggtggctctggcctgtaatcccagtgccttgggagatacaggcaggagaatcacgtgaggccatgagttcaatactatcctgggcaacaaaaggagacccccatctctattaaacagccgggcgtggtggtgcgcgtctgtcgtcccaactactggagaggcaggctgaggcgggagggtcccttgagcccaggagttcaagattatagtgagctatgatcacagcactgccctccaggctgggcagtgagaccctgtctcaaaacaataaattaagtaacctagactatgtatgtgaaaataatatttccaaccctagcatgctgacttcatctgagcttacagatgcattttcatacagtcctccccaagggatcagttcctgtgagagccaaggatggcaccactcattgaaatcctgaccatgggaaggcgtcatttgggattccggaatgggtggctgaagcagtttacagaatcgcgttctggtgagctttaagaatggaacaggcgccgggtgcggtggctcacggctgtaatcccagcactttgggaggccgaggcagccagatcacttgaggtcaggaggtcgagatcagcctggccaacatggtgaagccccgactttactaaaaatacaaaaattagccaggtgtgatggcgcgtgcctgtaatcccagctactagggaggctgaggcaggagaatcacttgaactgggatggtggaggttgcagtgagccgagatcatgctactacactccagcctgggcgacagagtgagactcagtctcaaaaaaaaagaaaataaaaagaaacagggacatcttcctgaggaagtctcgggctgctcttcctgaaggtgaggctggttgcatagtctttcaaggtccctcacaagctgaggctcctgtaagttttctcttttcagctagtcttttcaaacgaacacacctccacctcgctttcctccttccaaatgaagagct

SEQ ID NO: 195770 - DNA, 1000 bp, Homo Sapiens
ctgacagatttctgcatggtcaatggagcttagagtatataaaatacaagtctgggagagtttccttatagttcaaatatataaatttaatgttcaaaagaatgtaattgtttcaagcaacatactagtagacaagctggaactcactgatttcatttcattagtctcaaataacaaagggtacttcatagcatcaaaagccagacctcacaataacttatgttttagtatcttacagtatctcattatataaataataaaatgactagggttttggtgagaaggaagagagaagagccacatggtattcaaagaatgccaggaaaccacaaatactgcattcttttgaacattaaatatacttgaactataatggaaactctcccagacttacattttatataaatacactaagctccattcactgtgaagaaaactgtcgtcatacggaagaaaataagttgattatttatcaggcaaaatttataacacaaagtgctaaatcaggcacattgcattaaacattatactgactataaacaaggatagaaattacggaagtgcatagctttggaaattgagtgaaaataacagcataattcaactttaattggatgcctatagatgaaacaataattgactcttaactgtaactccaagatattttatgactataacattttctaagtaatctacttgaaaaatacctcattgactcatcaaatcctatctttaaaatgttaccctcgttccaagaaaatcacatgcatacactagaatgaaatgacttgtcaaatataatttgaatccagtaaaacaaaaaaagcattaatctgtactttctcattaatagcaagataattttccaagtgaaacacacacaatacaatacacatttgttgagactccccaatggctcccacttgtctttccaaccttcatatccttccacaggcctttgcagaggaatcccttccgactatcagtctctgaagaattc

SEQ ID NO: 195771 - DNA, 1000 bp, Homo Sapiens
caggggaggagcccaccagtcaaaccagcattccctagtccccgcctgatcattgaacagacttgagggggcgcagcatcttttacctggtctcagaatttctgccagtcttggcatgttgggggcttgggaggttgcattttgggttttgttttatggcttaatctggacctcaattcagtcaagtcaatgagagcagggacagtccccagtcaccatctcaggaccatggcaaaatgtaatgagctttttcaggaatttaaagtactcacagaagggccttctgcaaaaatgaagcatgacccaatgagtgtagcccagcgcagtgagggtggacaacttcaaggccattgtttttcagggggctgtggcagccaagagttgctgggccctgtacaaccgtcaaagtactcccaggaatgccactggtctttccacagttgtccaggggtggagaatccactgagggtcaatgactctgttacagtcatgtcagtaccttaaaggtttgtggtggggggctgtggaggagttggggagggattatatctgtagtgtgtgcgtgtatgtgatgtgcatgtgcatgtatgtaatgtgtgtgtagatgtgtgtgatgtgcaatgtttgtgcatatgcgtgtgcttgtacctgtatgtgatgtgtatgcatggcatgtatgcatatatataatgtgtgtgtgtacgtgtgtgcctgtgtgtgtgtgtatgacacaccagctgatcaatgccagaacaagaagaccaaggaagattccagagataagactgtcctacatctctgattgatgggcatctttgaagacgtaggctagcatctagaggcttcgagaggaagctctgcaatttcaattcctgtctctgctacttcggagctacgttaccttgggcaagatgtttaatttcagcaagacccagtttttctcgtctctgtagaggggcaataaaaggacctacctgtgggtttcaggaattagtgaatt

SEQ ID NO: 195772 - DNA, 1000 bp, Homo Sapiens
atctttgaagttgctgtctttatgtgtgttttttttcttttatctcctttgatgcccttgggggtttgattatggtataaggtgggtttagtcaacttgctttgattctagtccactcttggatcttggaggagccccttctgattactgtctctatatccacgttttgttgttgggtgttctggtacatggggctccctcaggcaggggccacagttggccagctggctgtatgctttctgggttggccttaatttgctgtctgagtgctttctggctgggagaagacagggttgtgcctgcccacagagttcaggcagaagcaggactactgggcttgaagctctagcaggcctggctggcctggctatgagaggcagggatgggtggagtcacctactctgccatttgggtgttcttcctaggacgacaggaggctgtatctgccagctaagttcagacagaagtgggaccactgggctggaaattctagcaggtgttgcccacctggctaccagcagccagggggtgggtggggtcacccatcctgccacttgggcatttcccaggacagtgggaggctgcacctgctggctgaattcagacagaagtcggactgctgggctggaagctctagcaggcattgcttacctggctatcagtggtaggggtgggtaaggttgcctaccctgtcatccaggtgattcccaggataacaggaggctgtagctgtcagctgagtttgcacagaagtgggactgttgggccagaagctggtgccaagctccatctggcgaggggcaggtagagcaatcttactgctcccaggcaccatgactgtggtctctattgaggctatggcactggtactggtctgctctggggtctcaggcctggagaggtccccttggactcaagagttgcccctgcgaaatgtccaggtggttctctgccttagtcttgaagtgcagtggggggtgtgggaaggccaggagaattc

SEQ ID NO: 195773 - DNA, 1000 bp, Homo Sapiens
gagggatctggcttctcactgtccggatgtggtgatttggtgattttcagatcccggatactttctgggaggcctgatggtttgtttcctgagaaaggaattcagataagacaaatgtaactttctcaagttttaagactggaaggatcaatttctatgtttattcaaagagatcagaaacatcagctctgtgggacaattgggttggtttcatagtcacatggtctgtatatttcccagtggtattcaagccagcaacttatagaaaactgcatgatcaagtgtaaactcagcagatttacaaagcacacacttgaccacagataatttttctcaacctaacattcagacccataagcctatttttccaccttgctttaaaattttcagtgcattgtaaaatatcagaaaaggattgccccatattggtcttaattaatccatgctgaagtactctcttttagtatcacatttccaatttgtttatattggtccttatcatgtgggaaaaaattacacaacacagatatgctctgtactaccatttgcaaaaacattccgtagacatattagaagttggcatttgtgtgtgtgtgtgtgtgtgtgtgtgtgtgtgtgtgtgtgtatgcatggctgtgttttttttctgttttaaggaagactatgtcttggttgtgtgagaacttctaagcttcaaggccaaacttcagttttcacttccttcacagatgtctgactacgcttataaagaatttccagaatttgttgggcactgtggctgacgcctgtaatcccagcactttgggaggctgatgcaagtggatcacttgaggtcaggagttcgagaccagcctggctaacgcggtgaaaccccgtctctactaaaaatacaaaaattagccaggcgtggtggcgggcgcctgtaatcccagctacttgagaggttgaggcaggagaatcacttgaacccaggaggcagaggttgcagcgagccgagatc

SEQ ID NO: 195774 - DNA, 1000 bp, Homo Sapiens
aaaccctatctctactaaaaatacaaaaattagccaggcgtcgtggcgggcgcctgtggtcccagctactcgggaggctgaggcaggagaatggcgcgaacccggaaggcggagcttgcagtgagccgagattgcgccactgcactccagcctgggcgacagagagagactccgtctcaaaaaaaaaaaagaaagaaactacagtaaatcccaacatgcaataatacatatatagcatatctataaacatatatatctacacgtgcacttacacaaacttacccttactcatttttttaactcaccactgtactaatgaggacacatacttacccttactatgcataacgcagttttctattctgttctattttttttaaaaaaaggtaaaactaaactgattttataatgcaaggaatttagtagcatctgttcaaaaacaccgtggtgagggtatccgaatccacaggataaaaacgacacattttacaggagagtgcattttaagacctttattttaaaatacttaaaataactatagcgtaaacctcaacatttcatggaaacatagaacttccagacattgatcacttctggctggctgcctggggcttccatctgtagatccccgaggacaagaatgcacaccccagcccctcatcggagtgcttccgtgggaaagctggagggagtcgctcttgggttgggtgttccaagtcgactccagtcacctctaaaccttcctacgctggaatacaaggcctgccactcagcttcccctggcttcattcctccccaccgatcactggcaaagggcgaagggccatgcccggcctctgcaggtccccactgccaaacagcctgggcagaataggggcgggttccccggcgcggcggagtctctgctaactcggcaagtgccaagccctccagcagccaccacgccgggcctgcctgcaggctggtccctcaacggcacctgcgttcccggccgggcttc

SEQ ID NO: 195775 - DNA, 1000 bp, Homo Sapiens
agctacttttttgtatttttagtagaggcagggtttcaccgtgttagccaggatggtcccgatctcctgacctcgtgatctgcctgccttggcctctcaaagcgctgggaatacaggcgtgagccactgcgcccagccgtctctttaaaagagtaatgttttcacagattttgttgttatttttgttggtagagtaaaatgacattctcttgcagctttctacatttttagcgaaaagggagacaaccagtatcattttatatgagaaatatgagacttggagaggccaagtaacttgccgtgtatcgtaatctattaaatgttaaggccaacatttaagctcagatttttctgaaataaaagcctattgtcttaaacatcacactgcaatatatcttgtgtaatcttctcatcaaaagtacgtatttgaggtgtctaattaattctagtcagacccaactgttttcctttttattccaaatgagcactggaagcaatgttaaaactattcaacgagtcaatacattttctatcctaagtgcatctagagtacaagattttttttcttcttcaggtgagtatgcctagaaaatctaagcccttctctgatacctcagccattttggaaagtaaatgctcagcacttttgccattattaaataggcttgggtaactctaaaaatttctactagcgctgccttgtaaaaatgcacaggcaagcccaatgaggacatcatgtgatcacaggagcttgagcttaaaaagagaggacagcttcagggaagaagaattctgcatcaaattggggaaggcaatggagaggcaactcggaacagatggcacaacagaaagtagcttagtaggaactgatattgttaccagagaaagtatcaaaatcaaaggcagaggcaaagatagaagctagagcacagagaatggtcaagaaaggaggacagaattaggcttttgaaagaggtggaaaagtggtttggaagagatc

SEQ ID NO: 195776 - DNA, 1000 bp, Homo Sapiens
atgatgccactgtactgcaacctgggacagagtgagactccatctgcaaaaaaaaaaaaaaaaaaaaaaaaaaaaaaaaaaaaaaaagaagcaaaatctgaatttcactcatcttgagtatgaactggccctagtaacttgtttctaactaacagaatgcaacagaagtgatgctgtatgacttccagggcttagttagaataggtaatacagcttctaactggctttctctcaggaaggttctccgtggaaccaaggttctatgctgtgtgagaaagccctggccacgtcaaccaccaaacatgtgagtgaggaagccttctagatgattccaccctaaccaccatctggctagagctggatgagagacctgagggagagctgcctagctgagtccagtcaatccccagaattgtgagagaagatgatatatgattgttgtttcatctcactaagtttgggatggtttgttacacagcggttgataactagaccagagacctttcctagaaacgctggagaacacgtgccaggatggtcctggacatctccattgtttgctgcttgcttctctactgtgcccattgcctgtgctttcaccaaaccccctattaaccagacattgtcagctaccagaagtttcctgtcttaggatcttgacacttttgagactctttgaagttacgagacatgatggacttactatcaaaaacttggcaagcacagttacatcagcaagtgttactttgttcaagtaagaggggaaatagtgcagcatggcagttaaccctgtgctctctaagcttttactgaatttcagtgggtcattctagagacttggtagccacatgcgtgtcagtttgttgatattcagtattgattattctcataggagctgtatataattgttttgagcttaaaacaaagaaaatgattagtttatggttctaatcttttggatttttttttttttttttagacggtgtttcacttttgtcgc

SEQ ID NO: 195777 - DNA, 1000 bp, Homo Sapiens
ctcatgacctcatggcctaaataaacaaacatgtaacttgcaatgacagatatattggactggcattggtcttttgataacccaattttaaagcagtagtataaaaaaatgcttaatgagaaaaactagtgtaaattaagtatttgatattcagccaaactgtccctccagaaccaagcaagactacaggaaaatagataataacaagcaagaacttaggtaaatttgtatgcagtaaccttcttgggtaatctattagaatatgaactttatatttttaataacatcatttaaaagaagcctgggaccatttttggaaaattctttttaattcaaacattccaagcatattgaactaatggaaaatttaatttcctgagaaatgtatgcaccaatattggtggatgtacttgagaaaaataattaacactatattcccaatagggttttttctttatttgggaaacattaataaattaataaatttattctggggattaaagggacttgaaaccttcaaagggaaattcaccaagaatcttgaaaattattcaagtataaatgagtatggaggggaaaattatgaggcataaaacacctgtcctcaacaggtaaaactaatcagataagaagtttaaaaatttactatttggaaaacaataacttggcatcaaatcagtgtggctaaaggattaaccaaggagatctctataaaacaaacaaaaactcttaaacagaaatagtacttcttgaaaaacaaaactacaatattcagaccaaatttgatttgtacctcctccaagcttgaaggtttgtaaagaaagctggtgccttatgtcatcccagatttgcaaccaggtagcaccatggaaacatgctgacttagtagttaaaacttcttctccatcaaatgatggcagtaatcccacaccccgaaaatacaaagacacaaggagcattatctttattaatttgcagatattaatctgcaaaccatttg

SEQ ID NO: 195778 - DNA, 1000 bp, Homo Sapiens
gtactgtttactttgttcttcctcccccaatcactgattattagatccttaaagtacaagcaacttattcatatttgtatcataatgactagaatagtacttggaacaaaggagacactcactaaatgtttgctgaattaatgaataaagatataaatgaaaggcggtatgtgttccatgttttcttcaagaaaatatggccaccaaaatgtgtatgaactaagtattctccaatctgcccaatggaaaaataaataaataacagctaagagtttgtcataaatttcagggcaatcctaatgaatctaggaaagtcaattgatcaagaggctacatcatggccttttgatttgacttacccttatttgctcctacgataataccaaaaaagcatctgtccatacagtgagaatgtaagtcaacacacaattggctcagggtaagcagattacaactctattaaaataaaagaattataatcaaaatcctgcttccgtatatgatttaatcattgcacactgattaaataaatgacaataattataaagaaaaatctccatccattttgagtgctcctgagaagctagagactactcagatctctgatttgaggtaatattctcaatgtctcaaattaaatgcaaatattctcatggaaaaaaaactacaacaatctttttttttctctaaattattaatatttatctttgaggttgagattctcaggtttttgtagtacatcatgggagtgatataaaaggagtccttaactgcaaatcaaaattttagccttaaatccaaagcttgctttactatatagctatgctctaaatcaccaaattcagaaatcctttaaaatagacacttgaatgtggtttcaatgtaagcactctcttagcagactcactcttcaaagtccaaaatgaaagaaaaattatatgctcagcagtttatttaattaaaaggaatggaactacagagtgataagtatagaaaagtt

SEQ ID NO: 195779 - DNA, 1000 bp, Homo Sapiens
agacgggatttcactgtgttagcctggatggtcttgatctcctgacctcgtgatctgcctgcctcggcctcctgaagtgctaggattacaggcgtgagccactgcgcctggcccagactttctataataagatactctttatacgtattaatctgttctcatgctgctaataaagatatacccgagactgggtaatttataaaggaaagaggtttaattgactcacagttccacatggctggggaggcctcacaatcatggcagaaggcaaaggaggagtaaagtcatatcttacatggtggcaggcaagagtgtgtgcagggaaactgtgctttataaaaccattagatctcatgagacttattcactatcaggacaacagcacagggaagacctacccgcatgattcagttaactcccaccaggtccctcccatggcacatgggaattatgggagctacaattcaagatgagatgggtggggacacacccaaagcatatcattataaaaagtttaaaaaatagtatactgagtttatgaatattcacatttgtcatcaaagtataaaatatgcatgtgaataataatattgggggaaccagcccccaatatttcaacgtaggttcttttctattttccctaagtgttggccagtctgagaaataaagaggaagagtacaaagagagaaattttacagctgggcctctgggggcgacatcacatatcagcagcttccgtgatgcccacctgagccgcaaaaccagcaagtttttattagggattttaaaaggggaggggtgtacgaataaggagtaggtcacagagattacatgcttcaaagggcaataagagatcacaagggcagagcaacatcacaaggcaagggcgaaattagaattactgatgagggtccatgtcctgctgggcatgcattgtcttgataaacatcttaacaggaaacagggttcaagagcagacaacctgtctgattagaattc

SEQ ID NO: 195780 - DNA, 1000 bp, Homo Sapiens
ctgatgtagaaatctatagaaattgtttatatatccttaaactgttataaactatcagtaacaactggaaatgtgacatttccatgaaatgaggcaatttatgtttgccagaaaacacattaaaatattttgtaatggtcaattttgtgaactagaaacagctgtgtttggtgaactgtttgttagaatctattttttaaacttaaaaaagttttccttctactttgcttaggtatcaaagtttggtatcaaatgaaaaatttaaaattatactttgttatgtatggttctatctgctttttaaaaaaccaagataagctgaagaactgtgtctctaaatatcatacaaaacagttttcttggaaaactgttaatttctgaatattcccacccttttccaaggaaattccgggataatctgttatgaaattatgatgggtaatagctatttctgttacaagtcaattatagcatttacagagatttataaggttgctaactggttcacattagtacataaactaaaagattctgaggctctaactttagaacttttaaatgtaacactttattatcgggggaaccagcccccagtatttcaatgtaggttcttttctattttccctaagtgtcagctggtctgagaaataaacagaaagagtacaaaagaaagaaattttacagttgggtctccgggggtgacatcacatgtcggcaagttctgtgatgccccctgagccgcaaaaccagcaaaaagaggagggagtgtatgaatagggtgtgggtcacagagatcacatgcttcaaaggtaataaaatatcaaagggcagagaggcagattgagatcacaagggcagagaggcagagagagatcacaagtccagggcgaaactagaattactgatgaaggtccatgtcctgctgggcacacattgtcattgataaacatcttaacaggaaacagggttcaagagcagacaactggtctgactagaattc

SEQ ID NO: 195781 - DNA, 1000 bp, Homo Sapiens
tctaaagtatacatggaaaaattagcatggaagaatagttaagaaaatcatgagaacaagattgcagtgatagaaaccatgagaaaggacagcaataagggtctttaatatctagtcctgagagatattcaatatattataaggcctttattactaaaatattggctcattaatattaggttggtacagaaatgcaaacttctatgtgcaaaacttttaatgacaaaagccacaattacttttgcatcaatctaatatattgacttagtggttgatggacaaattattagaagataattgaaagttgagaaatagattcagttacatctaaaattaagtatacgatgatgttcatacctgaaagctctggggaaaatacagttttttaaaaaataaattatattggaaaaacttaactgacatttgggaaaataataaaagtgggtctagatctcaacatataccacaacagacttcaaattaaatagagagaaaagaagaaagaaagaaagagcaagcaagacatatgaacaatagaaataaaagggatgaattattttttaatggttatgaggagagatggaaactttggaatcaagctctatatgcaataaataaaaagattgatacattatgctgtattaaacataaaattttttatggaaaaacatcacaagcaaagtcaaaaaccttatgtcaaactgggtatcccaatcccttagtgtagtctcctcttttacttggttctgaacttggccatgtgactaactttggccagtttggtaaagtaatacaagcagaagcttgggaagtgcttgtgacttgatgacagtgacaggaggcagccaaatgcctaggcagatgggacaggtacctggtgaaaccccgcctctaagatgaagacagtttaaagcctgaaagccaagctacaagttaaatcctcggactggatgagaacttgtcttcctgtttggcccacttttctctgattagtccccac

SEQ ID NO: 195782 - DNA, 1000 bp, Homo Sapiens
tcctttctcacattgctataaagaaatacctgagactgggtaatttataaagaggtttaattgactcatggttctacaggatgtgcaggaaacatagtggcttctgcttttggagaggcctcaggaagcttccagtcatgttggaggcaaaggggagcaagcatcttacatggtagaagcaggagcaagatagagaaagaaagagtgggggagggggagggaaggaatgagggaaccagggaaggagcgctctgcacacttctaaacaaccagatctctttaaatgaccagatctcatgagaacttcctcactgtcgcaagggcggtatcaagagaggtggtgctaaaccatccgtgagaaacccacctcatgatctagttacctccaggccctacctccagcattggggattacagtttgacctgagatttgggctgggaagcatacccaaactgtaccaccaaagatgcttcttcacagtaaagcccaacaacggaagttttcttcaggataagcccatttttcattgccttacaaatgaccatcagttctggttgtttcccttgtttttattttatccattaggaggatggggagaagaatgcccatggctccttaccttgctggcagagcagggtaaccgaagatgagggctctgtggtgtggtgctgcctgtgtgcagcttgtgcccagggccctacacagaggaattgctggtttgtgcaagtgagggaccctgcgtcttccttatagctacagagcccatggctgtgggcagctcctggctcttaacaccgaagaattcatggattcttgctgcttcaagtgaggtcgtgctgggtggtgaatgttttcttaactgttctctttatgctagtttaaaagttcaaggctttttggccctttgactttactggttacttctgcttatcaggatgataagaaaattaaaatgtattccccctgttacaccaccctcacccccccccaccccgttta

SEQ ID NO: 195783 - DNA, 1000 bp, Homo Sapiens
gaattctctgtattttttgcttaatttgtctgtaaaactaaaactgttctaaaaagactttattatctaaaattcttcagtttttatgtcttcgaaaatgtttttggctcctccttttctctcctctcttttggagaccagctacacatatatttaactgtctgaagttgtcctataattcacttatgttctgtttttttttggtcttttttatttttcatagtttttatcgctatgtcttcagtgttactgaccctttctttagcaaagtccgttctgctattaattttatccagtgaatttttttacctcatcaattgtagtttttatctgtagatgttcaatttgggtcttttaaatattttccatgtctgtacttactgtgttcagtctttcctctagtttcttgaacatatgaatgcaatcataataacttttaaaatctgtgtctacttattttataatttatcatttatgagtcagtttcaattgattgattttactctcattatgtttgtatctttctgcttctttccatttcctataatttttaatgggatcgcagacacggtaaattttatgttattgcatagtacatacttctgtatttctaaaatatttttgagccttgttctgcatgtggttaggttacttgaaaacaaattgaacctttttggttttgctttcaagctttttttaggtgagaccagagctgtgtttagtcaggggttatatttctctactattgaggcaatagcattatttatattctaacagactgatgccccctgatatatgaggaattcccctttggctgttgaaaacaggcactgctgtcagattggtgtgagacttgggggcactgttctttatcatcctttctgatggttctttccctggtctctaggactttcctcatctgcatgggctgattcatactcagctgaatactggaggggaaaactgtagatctctggaattttctctctgtacaactgtc

SEQ ID NO: 195784 - DNA, 1000 bp, Homo Sapiens
acttctacatatcaaccttattaaaggtccactgtgtcccattaactctgctcaagaaagaactgggccagaggccaatgttctccccagtgcctagcacaaggtttggcacatagcaggtgtttaacaaatattggtagagtgcatgaatgagtaaaggtttgtttcaccttcagcagttggagaaatggataagagtggagagttaatggtttgtcctgtaattcatatagagtggggcaagacaaagtcatggagcaaaaaagaacaggatctggcctccaaagaaacacacccaggctcagaaatgtaggatccctgggctcgtatttttcatctgtaaaaagtacgcacatacatactacactgccttgtatacctccgattaagcgatgcatgtaaaatactcagctcagtgtggcctgagatttaaaggtttcttgaactgctttggaaggctctttgggcgagatcatgttttcctgaaagacatgcaacggttacccaagagcaggggaaccagtgggtgggagagactcacttttctgtgtacttcacggttgtttgaatgtttagccatgtgtattattgcttttaaacatgattcacaaagtaaaaagaaacaaaaagcatccttatggttgaagatctgaactacctcggaatctctttattcaggtgttccttaactctaggatgcaggttccgtagtgggcggaccttccagcaaccagagtttggagaagcgaaggggacactggtggatctccaccatgaaaattggcgctttgggaatgtccaaaatttccagggcaaccgtccgtcgcccctccccgaccccgcctccttttaaaggagaaacggagtcccaaagaggcatgcagcaaggtgcagcggtagcccgggtttccttcggcttttgcggccttagcattatgtctaggtttgaactgtgttcagtctcttttacctccccctattcgatacgcagagcgaattc

SEQ ID NO: 195785 - DNA, 1000 bp, Homo Sapiens
cagcagctagagtaagttttaacaatccatgcagtaggatctcgcccatttgggagaatttctagactatttccacccaccttcaaaggacaaggagtttttcaggggcgtgtgcaggaccatggggcagagttcgggaagtcgtctcacaattttgcagacctttctttttcttagagtcctgatcctgttctgtaatcattagcattttgggcctaagccttttcaagctggcagaacaaaagcgaccactgcggccaaggagaaaaggtcggaagaaggtgacagcccaaaacctgtctgatggagacataaagctgctggtgaacattgtgcgagcttacgacattccagtgaggaagccggcagtgaggtgagagccctcccaacagcccgagatgcagtgtgcagcatcccagccaagtcaatcgctcctttacagcatactcactctcattcttaacgtggttattgttcagcaggggactgagggttcttgcaaagccaaggccctactgtttgcaagtaatacattccaattccatcaattcaggctaaagaggggatttattaagaacatctcaaataactcggacaagaggtatagctgaattacaagggagactgcagggataagatagttctcctgaggccccgtggtctctcacttgcctcactctgagtttgcttcatttttctccatgtgatggaagtggcccatgcagctagagtaccaccaattaagcgtcattttctccagagaagtctgaaggtgctaacttggccaggtgttgatccatggtctaatcgccgatagccagagagacagggtcagaagcaccagccccagagataggaacagatctcagagaagtgggtatgagctggggagagtcacaaaaggtgtctgtccaaggttctgaaacatatgtgctgtgaacataaaaacgtggcttccctttcttctgttcggagaaatgtgttatgactactagaattc

SEQ ID NO: 195786 - DNA, 1000 bp, Homo Sapiens
gattagatcccattagcattaatgggagttgcctgaacaagtgctccatgaagtaatgaaaatatcatcttagtatgcttttttgtgtaatgctttatttcagagaaaattcttttcttaacctcagctattgtaggtgccacatcatttgttgtactgtcagattttttaatagtattaacaaaatgaaatagaaatagtcataagagcataaagataaaggagagttgggaagaatagatcaaagcatggataatttagcaatctcctccaagtgcagagccaatctcacatgtagctggagttagaagctgcctctatagagggattttaggttcgttcagcactcatcatctcaccaccctgccacccccactccacgccataaccaataattacaggttctgcttgctctagtgccttttttttggttttaaaactggagttaattttctcttcttttttaaggtttgaatatccctagaaggacagtgtattttcaagatagcttagtgaggcatgcagtgaatagaattattatttctattttaccaatgggggaaaaaaatgaggtagcacaacattcagcggtaagtcagaaattgaccagagattgttatctcttagcccagtgatcagaataaaatggttggaattgcccatcaccccatttcatattttgctttaaataaggagacccacaagaagtggtcaaaggaaagatgcagaattaatcatgttcagttggccaaatatcattgcaggctgatatacctgcaaatttttctaaatagtgcttgatgttatttgattccattttatgtgaagaaacaggaaatggttttacaagccagcactttgtagtcaaccacagaaggctcaggctgtttgtattcacacatgctcttctaggtctccagggagtcatttcaggataaaacatgccttcatagctccctgcctctagagcaagaacagtttgcctttatgtttgtggatc

SEQ ID NO: 195787 - DNA, 1000 bp, Homo Sapiens
tattaacaagagatttatatttggcatcatgcattgcatttaattatctttttgatgtccttcaatcaaaaccagtttttcagtgtttctttgactttcaaccttgacactttggaagattaccagccaattattttgtagaatatttctctacgtggatttgtttgatgtttctcacagttagatgtcagttatacatttttggcaaggatgcatatcggtgatgttgtgttcttattgcatcctatcaagtgatagatgatttcaatttgtttcataactggtaactttgatcatttcagtaagaaggagtctattgggcaccttcactgtaaagtttctctttttttcctttgtaattaaaaagcattttatcgggaggtattttgagagtatgtaaatattccatgccacttagactttcatccgctagttttagtatctgtggatgtttcctgattgattatttcttttgtggtccgttatgttcactacatttatatgtcatcattctgctacagagaaaatctctttttttcagttatttattattcaaaaaatttatatcaggatgaatttataggttttattttattcaataagttcttttttagtattattaaattcaatgctcatattttctcagattttgtcagtgggggcctcttcaagctgacgtaagtgacattttgataaagctcccatctttgagcacttcctttttttctgtcataagattcaggctcatctgtaatttccttgccccagtcctagaatcagtcatttctcaagaatccctggatcccttcagtggaaaatggcatttgatatttggaaaccaagttttaagtgctaggtatgcttgtttctaatgagatatttatttttctttacttttttctcttggagataggggtctccctgtgttgcctagggtgatcttgaactcctgggctcgggtgatcctcttttttctctcttttcagcctttcacgtagct

SEQ ID NO: 195788 - DNA, 1000 bp, Homo Sapiens
attcctaatggtactctcctatatactggtgaggtataatttctcaactagcctcactgttcctaatgaaatgtcacgctccagctatcacgtattaactgagactatgttaggctctgagggatgcaaagactgagtccccatcctcacagagcttgtggctgagttgggaaggcagacattaaacatttctgttcacacaagaaatacttgttttcaacatataagggagagctcatctagttgtgaaaattaggggagtcttccagaaggaagtaatcattaagatgcagtctgaaggatgagtcagagttagctttggaaagcggggatgaaagaaaatcacatgtacagagggaaaagcatgtatgtgcaagggcctgtggcagaaagacccaatgtgctgaaattttgaaggccagcttgactggaatatagacaatgaaagggagcctggcacaggatgtggcccagaccacacaagactttgtagccatgataatgatttttacttttagcttaagagcaaagggaagccacaagtcaagagaatgacatgatgaactttgattttgattctgacttctgcgtgcagaatgaattgtagaggagcaagagtggaagcaggaacagctggaaggcttttgcagttgtccaggtgggaattgatggcagcttagaccagctttgtggtggtgaaaatgaagagaagaaccccacaggtaccccctgctctgctcaagcccatttccttactagatcctgacaccagagtgtgctcacgaatttgcagtgaatggaagcttgtccacacttcagggctctgctggagtctcctcttccaggaagccgtctccagacaatgccagtcctctgagatctttcagaagttgtacgtctcttctgcgttttccattctcacacctgatgcttctctatggcttggctgctctctggtccactcctggagatgccttcatttctcctgttgtcttgcttt

SEQ ID NO: 195789 - DNA, 1000 bp, Homo Sapiens
aaacaagcaaacaaacacaacagcatcttgcttccaagatggccaaataggaacagctccagtctatagctccaggtgtgagcaacacagaagatgggtgatttctgcatttccaactgaggtaccgggttcatctcactggggcttgtcagacagtgggtgcagcccacggagcatgagccaaagcagggaggggcatcacctcacctgggaagtgcaaggggttggggaagtccctttcctagccaagggaagctgtgacagatggtacctggaaaatcgggacactcccaccatgacactgcacttttccaacagccttagcaaatggcacaccaggagattatatcccatgcatggctcagagggtcccacgcccacagaacctcgctcactgctagcacagcagtctgagagcaaactgcaaggtggcgcgaggctgggagaggggcctccaccattgctgaggcttgagtaggtaaacaaggaggctaggaagctcgaactgggtggagcccactgcagcttaagcagggctgcctgcctctctaaactccacttcttggggcagggcatagctgaacaaaaggcagcagaaacttctgcagacttaaacgtccctgtctgacagctttgaagagagtagtggttctcccagcacggaatttgagatctgagaaaggacagactgcctcctcaagtgggtccctgacccccacgtagcctaattgggaggcacctccgagtaggggctgactgacacctcatatggccaggtggccgggtgaccctctgagatgaagcttccagaggaaggatcaggcagcaacatttgccattctgcagcctccgctgcaaaaggggtctggagtggacctccagcaaactacaacagacctgcagctgagggtcctgactgttagaaggaaagctaacaaacagaaaggacatccacaccaaaaccccatctgtacgtcaccatcatcaaagaccaaaggta

SEQ ID NO: 195790 - DNA, 1000 bp, Homo Sapiens
gccaaatgcctgaagatccaaggcttctgggactccatgtgtgcctgagtaatagctcttccaaagctccatgtaactctgtgtgacaatctgaaggccttggtgggatgaactcatgaggggatcttctgagcccaggattgcaaaagtccacggaagaagtatgcgtcctggccggaagcagtggctcatgcctgtaatcccagcactttgggaggccgaggtgtgaggatcacaaggtcaggagatcgagatcatcctggctaaaaaggtgaaaccccgtctctactaaaaatacaaaaaattagccaggcatggtggcaggcgcctgtagtcccagctacttgggaggctgaggcaggagaatgacgtgaacctgggaggcaaaaaaggagtatgggtccctggggtctctcactcactatttctacatggtagggaagccatctctggcccaatgtccctcctggatgggagggcttcctgtcctgcttacctccattctctgtgggtggagttgtttccttgattaatcccaatgtgtccacctggatgtttcagatgatctagtatttactcacactttttctccctgtgaaatcagcacacactagttgcttctagtcagccagattgagaagcaacccaagttcttccacttattaagcaactcatttttttttcctggctttcagtttacatattgataaaacatatttatttaaatgttgttgaaagaatatactaagataatttaagaggcctagtatatttttcttcctttttctcaactgttagatattattaaagaaataaactgaagttgtttatacaacaaagaatgaaatgtgtataactagacagtctacattaataaaccacctcaaaaattcctaaacatattcttttcagctgtctttaaatccccatctgttagcagtggtgaatccatatgggtctgcagcaaacttgattctggcctcctagaaggaaagaattc

SEQ ID NO: 195791 - DNA, 1000 bp, Homo Sapiens
aaagccatcatcacttggattcaactctcatgactgtgaaaagcacttcaagttcagctctcaagactatgaaagcagaacccaggggacccgcggtggattcagctgccttttctctaattttccaaccacgtgttcacacaagacgtagcagtaaacagcatgaggaaaatcaagcagggaaaccttgcctccccatcaagttgctataactccctctcctgcctgtcactattaacctctggaaagagtggcctgtaattgctatctagtactcattcccatgcagtctgcaacatgcagtggcctgtcttccatctccaccactcaaaaaagatcaacactgatggatgctgtgctcaagaatgatgccaatcttcaccattccctacctgtttgctacttttgacatcgttgaatgaatgaccttcatcccaaaaactttccccttctttcaccctctgggatacctctcctctatttttcctcctacaactctgactccacctcttccttccctggctcctcttcctccaccagctccttgccatttcctctaagtccatcctaggtttcatattgtctccctctttaccatctctccttcagtatttggagcaacttccacctagtatcctaacgacctaatctacatgttcaatccacacctgtgagctctacgcctcctgttctaattgcctactggatgctgacatacatatttagcaaatatctccagctcaacatgcctcaaattatacaaactgtttccctaaaacctgtttctcttcttgtcttcccagccccatggcacccaggctggaagtgcagagtcatcattagctattctctctctctgtctgtctccaagttcagtctgtcttatttcttacaaaaccaatcgtctatctctctcctcttcattcccactgccttcctagctgtctccttgacggcaggaacttcctcttttttccaatccacattgctgccagaattc

SEQ ID NO: 195792 - DNA, 1000 bp, Homo Sapiens
cccatctctaattaaaaaaaaaatacaaaaaattagctgggcgtggtggcgggcgcctgtagtcccagctacttgggaggctgaggcaagagaatggcgtgaactcaggaggcggagcttccagtgagccaagatcacaccactgtactccagcctgggcaacagagcgagactccatctcaaaaaaaaaaaaaaaaaaatggtaactagactataacaccattttttacctattgtattggcaaaaaagcccaaaattttaataatttactgtgttataaagatgttggcaaacaggcagcctcatgcattgctggtgggaatgtaatttggttcaattctattgagggcaatttggcaaaaaaaattaaaatttataaatgtacaaactctttgtcccagcaattcaacttctgggattctaagagatatactcacaaacatgtggactgaacttcctcaacatgataaagggcatgaaaaactcacagtttatatcatactcagtgatgaagactaaaagctctccaagatctggtactgatattcaacattgcactagaagttctagccacagcaattaggcaagaaaaagaaataaaaagggaagaaggaagggtaggaaagggaaaaaggaggggaaaggaagggaagggggaaaggaagggaaatgggaaaaggaaagacaaaaaggagaaagaagaagaagaaagaaaatactatttgtagacaacatgttcctagatacagaaaaccccaaagaacaaacaaagttactacagctattaaatgaattcagaaaaattgtagagtacaaaatcagtagtacataaaaatcagttgtgtttctatgtatcagtgatacggtttggctgtgtccccacccagatctcatcttgaattgtagttcccataatccccacatgtcatgggagggacccagtgggaggtaattgaatcataggggtagttacccccatgctgctgttcttgtgaattc

SEQ ID NO: 195793 - DNA, 1000 bp, Homo Sapiens
ggaaaagcagccttttcgagaaatggtgttggagaaacttgatttccacatgcagaagaatgaaggtggactctatgtcacaccaggtgcaaaaattaacacaaactgggtcaaagacctaaccccaagtgctgaaagtataatatgcctaaaagaaaacattggtcacactttcatgacatcagattgggcaatgctttctgggatatgacaccaaaagcataggcaacaaaagaaaattagattccttggatgacatctaaatgacagacacttttgtgcatcagcaaacactgtgaactgagtgaaaagataacccatggattaggaaaaatatttgcaaatcatatctctgaaaagaggctgatatgcatcatgtacaaagaacagctagaactgaacaacaagaaacccaaagcatcccattcacaatggtcagaagactcgagtagacgtgtccctaaagaagatatagcgatggccaataagcatctaaaatgatgttcaaaatcactaatcatagggaagcgcaaatcaaaccaagaatgtgataccacacatttggatggatatgataaacaaacaagcattggtgaaactagagggaagtaggaatgctcgaatctgattggagggaatgtaaaaccgtgatggaaccgggaaaatagtatggcgtgtaccggaaaaagtagaaacaggattagcggatgttcccgcagttgcgcttgtgggtacctgccaaaaagaattagaagccaggagtggaagagagatttgtacacccaaattcttggcagcattattcacaacagccaaaacgtggaagcaacccaagggttcgtggacagatgaatgaaaaagcacactgcagttcattcatgcgatggaagactattcagccttaaaaaggcaggcacttccggccggtgcggtggctcacgcctgtaatcccagcatcttggaagaccgaggtgggcggatcacctgaggtcaggaattc

SEQ ID NO: 195794 - DNA, 1000 bp, Homo Sapiens
gtaaagtgagtttttttgtaggcagcatatagttggatcatgtaaaaaatctattcagccagtctatatcttttaagtggggaatttaatccatttacattcaaggttgttattgataggtgaggatttattcttatcattttctatattgttttctgattgttttgtacatcctttgttcctttcttcctcttatttttattgcagtttggtgattttctatagtggtaacagttgattctaacagttgactcctttctctttctcatttgtgcatctcctctaccagtgagttttacacacttttgtgtgttttcatgatggtagatatcattttttcatttccagatgtaggactcctttaaacatttattgtagggccagcatagtggtgattaattcccttagtttttgcttttttgggagaaactttatttcttcctcatttctgcaggatagctttgctgggtatagtattcttggttggcaattttttttttctaccagaaaagaaactgtatcatcccattctctcctggactacaaggttgtctgcagagaaatctgcttcagtcttgtatatgatgacacttttctcttactgtttttagaattcttttgtctttgacttaagatagtttgactacaatgtaccttagaggggatctttttgagttgaatctatttggggacctttgagcttcttgggtctggatgttcatatttgttcccagacttgggaagttttcagctattatttaattaaacaaattttctacaccttttatcttctccttctggtattctcataaaatgcatatttgtttacttaatgctatcatataaatcttgtaggttttctacattctttttcattttaacttctttttctggataatttcaaatgacctatcttcaagttaagggattctttcttctgcttgatcaagtctgctgttgaaacactctattgtatttttttatttcactcattgaattc

SEQ ID NO: 195795 - DNA, 1000 bp, Homo Sapiens
tgaaatcatcatgacctcagctgttagaggtgataaaacaagaattaacttctttgttgaggagctgtaggctctgttttctggagagatggacacgaaggtctattttgaaatagaaagcaaaatggaattctcttcctctctcttcctccaactctctctgtctccccctcttaccccactccctccgtccttcctagatgtgcaacagatatgtattttttggattgacagataaataaggagatagataacagtaatttttccttaatggattagacatttcttgctcatgcttttgagttttctttagctgcccataaagtctctgctagcaacactattcatgcacttagtgattgccttatatatagtcttatataataaactggagactacaatgcaccaccttcagtaatgactataacatctagacagaacatcattaaggagatagaggacttaaacgatactataaatcaactaaacttaacacccacatatggaacactccacccaacaatagcagagtacatattatcctcaagagcccatgtaacattctaaagattaactaaatgttaggctacaaaacaagttgtgatacatttttttaaattagaacaatacaaaatattttctctcaccacaatggaagaaagctagaaatcaataacagaaagaaagttggaaagttcacttttaaataatcaatgggttaaagcagaaatcacaagggaaaatagtcattactttgagatgaatgataataaaaacacagcataccaaaacttatgggatgaacaaaagcaatagttactgctataaatagctgtgaatgcctacattaaaaaataatcttaaatcaatagttatcttcgtgcaccaacacacccggctaatttttgtagttttagtagagacggggtttcaccatgttggccagagtgttctcaaactcttgacctcaggtgatccgcctgaattccttgaggaattc

SEQ ID NO: 195796 - DNA, 1000 bp, Homo Sapiens
actgcactccagcctgggtgacagagcaagactctgtctcaaaaaaaaaaaaaaaaattcagattggtatttaaaataataaaatgtttttgactatttgtatttaaaaataaaatgtagtgaataaaatactaatagacatatatgcaactaaacggagaatgggctcgctactaaacttggacaagccaaaagcggtagttggcctggagaatatgaggaaaaatgatctagacagggaagtctagtacttgaaaaataatgtatttgcaatttgtaatttagttattacatgcttaacaatagaaattttcttgggtgggaggacggagaggattgggaaaaacaactaatgggtactgggcttaatacttgggtgatgcaataatctgtacaacaaacccccatgacacaaatttacctgtataacaaacctgtgcatgtacccctgaacttaaaatgaaagttaaattttaaaaaattgaaattataaaaaggaaaaaaaagaaattttaaaattcttattcaaaagtcctgataaagacaaagatacttgattttagctgtggggtaatttagcaaataaataatgactgcctagttaataacctgttcagttagctggttaggtggttttatgcacatcagcaagtatgtttaaagatcaaagagcctaattgcttaataaaaagcagagtttgatgtttgctaaatgtttagaaaatgtgtggctgagattagagtttgctacatcatatactgattctaatgcttgaatagtccctctcataaattgacccagtgtcctgttctttttagcagaatatatttttatttttgtttaaacgttttgattgggcaatagtagttgagatagttgatcagctaattgtagttgaaagattataaatatttaccaaaagtaatgattagagataaatgctgaagagtttgtcatctgttttgtttattagaatagttttgggttttaggtgaattc

SEQ ID NO: 195797 - DNA, 1000 bp, Homo Sapiens
ttctgagactcagaacaggatggcctaagatcttttctatataggggaggaaaaaaatgtttttctgttttctgaatgtccaaggcagccagaacatgacaaaattttatatatatatatatatattttggcaatgcctagatgagtattagtaacatactagttgcaagggtagctttagagacagagaacttgggtttgaatcaggttgaagcaggttaagttccccatgcctcaattttccccatctgtaaaatagaaataacagtaatttttttatcatgaatttactataaaaataaattaaataaaaattaatatgtgtaaagtactttagtctggcatgtagaaagtacttaatgaggaagctataataataataataataacaattagttaacattaccaaactggttattcagagtttaatcctctggaactctatgcttagctctaatctcaaggagtccagggaagcagactaatcctcactattaaattttgtattgattctcggatgttttcaaagaatcctacatccacatatctcaaaggagtgctattgatttgatcattttatgaaattcttacccttttgctttcagaattctagctagatgacaaaaaggaaataactcacacatgtaaattaatcaaactattttggaactcaaacattgcttgtggaagacttgcagattgagccaagccctgttctttattaactctggataatttgctttctttgtttgatccctggcctttaagtgaatgtcaatctcttgcttttttcctgaagacctatgaggcttgctgactaaatttcatggaaattctttgagattcttagctagaagaggctgtaaaggccaagtgctataggtactaacgtctcattgctaacactgatattttaccttgatagtaacttccaacttgacataaaagcttgtaagcaccagatctttgcctctccccatggttgtatgtgtttgaattc

SEQ ID NO: 195798 - DNA, 1000 bp, Homo Sapiens
ttagcatgtcactaaaggaactagaaagcataggaattagaaagcatgacacctaaattttaaaaacccaaatataaagttatggtagaaatgaacacttagtcaacaaactgaaaaacatccaaatgatctggacaatataacaggaaatggttccattcaatgtaagtatttattgggggccacttaggtactaaacactaaagagaattcagtaacagcatgacacatgaggacacagactgtattttaaggattcagagtaacattaaattatataatatctactaccagcactgtaaagcaaagataaatcaattccaaagcagccatttcaaactaaaaaacccaaaaacatttataaagcaattatatgtaaattatcatatatttaatagtttttccatggaaaatcaagcacatgccaatacaacaaatattaggcttcataaaatcagaaattataagcaacagatccctaaagatattttatacaaaaactttttcttcttctttggaaagaaaaaaattatacttcacacaggttggtttatatatgtaaacttaataaagtttacattaccttacaaagttcttattaaataagggatatcaaactgagtcgaaaatcattaaattcatcaccttttcatatttttacagatctgaatatacctcgatttatattctaactctaaaaacatacctaaatacattacagtgaagtacatatgaagtaactgtgataacatttacctctttttgttgaagttgatttcggtaacttgtagattgctgctttatttgaatctctgatgcttcatgtttctcttctagatcagtacaaagtttcttaagcctttcattctagaaaaaaaaagtattttcaacaaaaagactgcaagtaaaacatgtaattagttatgtgcacagcattatgaaaaacgtactgctttccccccccaaaaatgtcaaatataaaaggtctcggacagaattc

SEQ ID NO: 195799 - DNA, 1000 bp, Homo Sapiens
ctcagcctcccaagtagctgggattatagacatgcaccaccatgcctggctaatttttgtatttttagtagagagtattttgtattttagtttcgccatgttggccaggctggtctggaactcctggcctcatgtgatccacccgcctcagcctcgcaaagtgctgggattacatatgtgagccactgtgcctgtcctaagcactgtgctttttaatccccaacttgtgaaatggaaaacatttccctccatttaacaaccatgggaaactcagaattaggtgtttaaccagcatcatatggctagtgggataaaatacagatctattttgagaagtatacattcacctcagtacactgatttttcacttttttgaccattgtttcattctacatgtctgtagattatgtcccttatgtcaatgctgttgattcaaggtggagttcatatggcaacgaggccacatcatcagcacactatgttgaaaggtaacgttcttcttaattctatatgattctccattctcagacttgtatgtatcttaagggtacacattctacccccagttcatgaaatgtgctttgcttgttgtctgagctatataacaaatttctgaaaaatatttgcatttaaatttggaacgatgagtgaagttttcagggttgatctgtcacataaaacatatggttattactgcttttgttgcttcattcacttcacttttattacaataaacatatttctctttaaagggacagattcattgttactgatttatctggtcatagaaagcattccagtactggggaccttttgagccttgaacttcagcaggtaggctctgtaactcagctataaatttttgagaaatagaatgacagttgaaagctatagttggaagctaacttttctttttttccctcctcatataggccaagagcaactcattacttcttcagagagaggccaatgctttggccatgcaacagaagtggaattc

SEQ ID NO: 195800 - DNA, 1000 bp, Homo Sapiens
ttttttcataccccagtggagcctggaacccactgagacagaatcattcactctgctggaaagggggctgaagccagggagccaagtggtcttgctcagtgggtccaatccccacagagcccagcaagctaagacccactggctggaaattcttgctgccagcacagcagtctgaagtggaccccagatgctcaagcttggtgaggggaggtgcatccgccattactgaggcttgagtaggtgattttcccctcacagtgtaaacaaagccctgggggaagttcggactgggcggagcccaccacagtgcagcaaagccagtgcagcaaagccactgcagccggactgcctctctagattcctcctctctgggcagggcatctctgaaagaaaggcagcagccccagtcaggggcttatagataaaactcttatctccctgggacagagcacctgggggaaagggtggctgtggtcacggcttcaggagacttaaacattcctgccagccagctctgaaaagagcagtggatctcccagcacagtgctcgagctcttctgagggaaagactgccttttcaagtgggtccctgacccccatgcctcctgactgggagacaactcctagcaggggttgataggcacctcatacaggacagctcagctggcatctggtgcgtgcccctctgggatgaagcttccagaggaaggagcaggcagcaatctttgcttttcttcagcctttgctggtgatacccaggcaaggaagaaatggataaattcctggacacatacaccctcccaagactaaaccaggaagaaatcagattcctgaatagaccaataacaggttctgaaactgaggcagtaattaatagcctacccaaccaaaacaagcccatgtccagacaaatgcactgccgaattctaccagaggtacgaagaggagctggtaccattccttctgaaattattccaaacaatagaaaaagaaggaattc

SEQ ID NO: 195801 - DNA, 1000 bp, Homo Sapiens
atctctactgattttctgtttattctaccaattactgagtgaagagtgttgatatttccagctgtaattttggatttgtctatttctccttgcaatcccatcagtttttgttttatgtatttttaagctctgttattcgaagcttaaacatttaggatttttatatccttttggctaattgacccttttcataatgaaatagccattttatccctgttaatattctttgctctaaaatacattttatgtgatattcgtatagtcactccacctttaaaaaattattgttaacatggcatacattttcccatccctttacttttattacatgtgtgtctatattaaatgtacttcttttgtaggcagaatataatagtatcatgatttttaatccaatccaacaatctgattttatttgggatatatagaacatttgcatttaatgtgattattgatatgctatttgtttctgtcttctttgggactgagtattttctgtgatttcaatagaattatattttctataacccaatagaacttctaaaacaacaaaacaaagatttatagctaacaattaacaattgttagataacaatataataaagaattatattatcttttttgttttaggagttatattagagttatagtgtatatggttgacttatacaagctatcttcaagtgacattatatcaccttacgtatagcaagagaaaatcttcacagtagtatacttcccttcctggcctacatgctattgtatatatcttacttttacatatgttataaactccacaattcattgtgattattttgtttgaaatattatctattaaaagatataaagaggaaaataacatatttacctatgtagttaatgtttctgatgctcctcattcctttttgaagacccatatttccgtccggtatcattttccttctgcctgaaggacttcctttaatatttgttgtagtgcaggtctactggtggtgaattc

SEQ ID NO: 195802 - DNA, 1000 bp, Homo Sapiens
tcagatctcagtcacctgaacattaatttcaaaccaaaagagagttacagaaagagataattaaatgtttgccagtgacttgtaattgcctcattctatggattctgtttttaatttctctgtggtgtttactgtttgtaatttcaccccccacatcttgtctgtcttcatttctggtcactgctcctctctttttccctctgcttctctggccattccttagctgtgtcttttactgctcttcaactaccacccattcacttgcccccaaatcgagacctccaaaccaccacccaccctaagctaaaacagagaaatctagctctgtgctacttacgggtgtcctcctgccacctcacactggtcatttctaaaacagaacctgtcatttctctctctcctgtatttcccttcagtctctgggacactttctatccaagtggtcaaaccagaaacttgagacgtatggtaaatgcttccaccttctgtgccagtacctcatggcagtacttgctttcatcttggtaatatttctcacatctacctcttttttctgaaacaagatttagctctgttgtccaggctggagtgcattggcacaatcattcacagctcactgcagcctccaccttctgggctcaagtgatcctcccaccccagcctcccgagtagctgggaaaacagctgcccaccaccacacccagctaaactttttaattttttgtagagatggggtctcactctactacctgggctttctcacttggaaaattgaactccttgaactcctgggctcaagtgatcctccctctaggcctcccaaagcgttgggattacagatgtgaaccaccgcacctggcctcacatctacctcttgcttctcattttcctttttaaaagtgagaagagtcagacttgtatagcataaaaagcagagagctgagtatatgattttagtattttattgtgagagtagtgtttgtgaagtagattctaagcg

SEQ ID NO: 195803 - DNA, 1000 bp, Homo Sapiens
tcagggggcagaggttgcagagctgagattgtgccactgcactccagcctgggtgacagagcgagactccgtctcagaaaaaaaaaaaaaaaagtccattccacaggctggagacacaggtgagtcaccgggacctgtgcctctgaagggcttaccagcagcacaggcccgacatgacagcagaagccaccaaatggggaggacggacagggcaggatcctgggggaggccctcggcgtggggtcttacaagggagacaggaattgccagatggacaagcacagagtgggcacccggaagagggaggaggacgttctgaacgaggagccagctcatgggcactaaagctggcagggggtgggctgggagcaggagatgagacaggatcagggagaggcgcgccctcgggggtctggctgccacactcaggggcttggggctgtgtgtgagttgggggtcctgctggcggttccaggcagggagtgctcccatgatccaagctgcgtgctggctgtgcagacggcagcttggagaggaggagcctggggtgaaacggcccagtcacaccagatggacaccagggccgagacagagctgagcgctgggcaggcgggaatgtggcaagggcttgtggaaggggtgggacacatgaggaggacgttcaggctcctttccaaacctttacttaccagatttttctcatggactcaacagactggagaaagagacaagtgaagagtccctgggtactggggctcctggccttccacccgcccccaagtatctgaagatctctgggtactggtactcccggccgttcacccaccccctcccccaacagtatctccagggctcccagctaaaatcaggggaaagtggtgctgcagcccccaaaacgtggctcagtagaggttcaggttctatggaagcgcaacaggagtctgattggtcctgttcattacaggaggtcaggaggacagggctgcagtgagctgtgatc

SEQ ID NO: 195804 - DNA, 1000 bp, Homo Sapiens
tttcatttcaccttggtggagtcaaccaggatagtacctgctccaacagcctccaagggtcttggaggtgtgtcctgctgtggccagtgggtgctgagaagcagataggtagaccctccttcactccctctcttcttcccctcggcctattttctgttccagttatgtgagatgttctgaatctttttcattttgatcctctgatccagcatcttgtaccttgcaggatgctcatcagttttctttgagactgaaggtgcataggagctagatgcgtaagcagggcgtttaaaatgacgcaaaggaggcttgatgactggcggccatggaaaggaagacagacaacggttagcctcacccacgacatgccacaacctaaatattgtgagcaacttcctctagacctgtttgtttcctccaagaccaggaaagaagcagtttggattctccctggaaaccttatggcagatagatgaataagcacgttaccaccttggtcattcagttaaaataaataaatggaagaaatttctagagatacagtgataactgcagtacataaaggtcctttgacaatgaatggatggggttaagggagtgagaggaagcattggggtcatttctgggaacagcaaagcaaacaaggtgaacacaggtatatcattaacagcatttagcattgtatgtaagcttttagtgtttggaaagtggcactcaatccccaagggatacttaaaagtgcatcattaagaaaatatttataaaacacatataaagatcttgtattcaaaatataaaaagaattcttaaagctcaagaaaaagaaacaacccaattttaaaatgggcaaaacatctgaacagacttcacaccaaggaagatgtatgtgtcaaataagcataggaaaaaatgctcaacaattagagaatttcaaattaaaacaactatatgctactacacacctccacaatgctaaaatctaaaaaacttgacaacacca

SEQ ID NO: 195805 - DNA, 1000 bp, Homo Sapiens
ggacattttgactaatacagattaagaattgtgagcttcagtagggtatgcttagaaatatgtgtaggaaggcaagactgaaaaaatcacgacttaccatttcttcagaaaatagaaataggaggtaagagaaaccatcccctggattttatttaatctagtattatgactagtgtgttttgttgtaacagttactttctattttaatttataaaacaaaagtaaagagtttattgttttactcttgctattaaaaagaattccagaataatgagactaaaagactttttaaaaaatacaaattccattgctgattgatcacagagttgctggcggcgctttcttagtgtgtgttgggatgtgtggtgtgcattgcagaaatctttggggtgtcagtgtggcttactctgagctcagttgtaccgttaatgcaaaaaaacatgacagccagcaccaagaagtgctttgctgtagaaataacagtattttttttaaaaagtaacgttgagttattgtggtagttatgatattactagagttgaattttcatacttggttttaaaaataatcagtatcagtttgttttggaatgcctgactgtgacttctcaatttgtttatttgatggtgctgtaggcataaagctattgggaggttttgttcttgttaatattgtttcatggaatgttaataaagtaaagcaaagctgtgtgctgtgataatgttaattggtatcctgaataagccatcttgttatcagctgctctctaccctttcttctttccttttttgcttattacggatcttaattaagcactagatattgtgtagatgaattaagacgctgagtctcgagatcataggctagttgcctgaagaagaagagaaaaaaggacaagaatttgtaagttttcatctagtgcttaactacttgaaaaaaaggaatagagaggaaggagttctgtgtttctgagacaggagggagccccagagcacctgtc

SEQ ID NO: 195806 - DNA, 1000 bp, Homo Sapiens
ttttatgatccaactcatagatactgagttagtacaaaattcaaaatgaaaccaagacattaaaaatgtagggatcatgtaactattttatactatgtgtatctttctctgatttacttttatctcattttctcatttcttatcctacaagttgcattctgaactttattataattacgaatttggtccatatgattttttaaaaatgtttttaatgattatacctagacttataagtttggtaagatataaattctgttagtgaatagtcactagtcaccatttcagaccatgtaggtattatcagataatgaacatgtttatggtgctatataagtattaattaaataacaaaaactctattgaccaccaatggtaaacgtaattgaattagcagagcagtaaaataaatgtagacaaaataaatatagacaagcgcatatgagaaagcttgtgtaatgttttagattaataggcatgcagaattcttcacattttttattacgtagtccctagatgaattcaaagtaattggggtggttaattttatttacacagagccgttcacagcgcattaaataatagagataattgaacaagaattgtcaagtgtgtactgatatcagacatattacagaagggaatgtgcataaaacttcatttctatgcagccattgtttatggtaattaagtacacagatttatcccttggttgccttccaagcttatggcaactgctattgttgtgctccattaatatgtaatcaggaaatagtttaattttctaatctgcagtttgagaattcactttctaacaactcttaattactgcattgccctgatgatgctcatggttatgaaaattgaaccaataaactcagcggaagaagccagaggggattataattccagaggtggtgcttacttaataaacttgttatgccttcaccagagggagctcagtgtccttcaaaagcatttaattttatagtttagaatt

SEQ ID NO: 195807 - DNA, 1000 bp, Homo Sapiens
tacacaatcatgtggtttttcatcttaaggtaggggcagaatagtagcaggatttagatgatcacactcagagtttataatatgaggtgcagaaagcagtcagacttcataagagggcagcctgctaactgaataatgctgagtgtggtatgaacttagaagtacttctatagaatgtggaacaaagacagtgaggggagtttccatcactatttatttggttgctttactagcagggcagttgcttttatcactctcatgaaagatgatagtcctccagccactggatccaactgcagactatagtatcctgtagatctattatgatccccaagttttagaatcagaatacctcgggtattaaaaaaatgtaaacaatattataatttgaatgtcctaaggccagggcatctataaaatcctttttaattgcttctagtgttaactgattttcctctgtccattccagaggccctggcttgtcttattttaaaagaatatatatagtctgagtttttttttaatggaatccaatttctttattattttgccagccccagaaatcctcttagttgtttcttagttttggaacaggaaagtttcattaatgtttcttctatctacattaatgaaaaggtctttatttgatattgggtgacctaaatttaaaactaaagtttttcctttgagaccttgtatccctttaaagtcaaatgttgtaacaagtgaatcccatctcttatagaggcttgcttatcttctgaacagaaaagtaaatcatccatatattgtattaaagtggatttttttaaaagtcaacattcaagaagtcttttttcaatacttgtaagaaataagttgggctcttcgtgtatccccaaggcgtgaccattcgtatttattgtctgtctttccaagtgaaggaaaagaggaactgactgtttttatcaacagaaatgctaaagaacacatcatataaatctgtaatagtaaagaattc

SEQ ID NO: 195808 - DNA, 1000 bp, Homo Sapiens
cttagctataaggttctatatacaagtaacacacgattatattgtccttgacaataacagataaggctgcgctcccttgagaatgacagataaggcgcaggtcccttttgacctaaccccaggcacttctcccttgcctggcagtgactactggtaaaattggcagagctacttattttacaaaatctcccagacactcgcctaagggccagatgatccccattttagaaaaggaaaacaaaactgttcaacaacttgcctaaggtcacaaggcaagcttgtggccagttccaattctcagtgcttgcttcagactaggagaggttttgctgaaaatcaatttgcaagtcatcctattaaacacaaatctgttttttgccaaaaaagatcgctgtgggggaagatgttatcttgtttgttttgatcaagaaaagaaagggccttatctcaatgaaatgtcccattcgtggtaggatgtaagggtacttttgaccgcagatttcagcttaaaataaaacgaccttatatcctcatttagcagccaatcatggcctttgaatcggggaaacctcattgaccagcagtttccccaaatcatacatttctgcacacagcttctatctaggcgtaggagagaacggaagcactcagaccacccagagccagaaaaggacaaaaaaagcactttgaattttttaaggaaaaaaaaaaaaaagagtgagattcaaaagcaatataattacacaaggtaagaaccggggaaaagagacatgttttcaaaagcacaaacccagtaacaaactctcacgcctggagaaaaaagaggcatggcagctggtgcgcctcttgcttgaacctacctgcgttcaggcccagcagcagcggcagcagcagcaaccaccgcgggacgggagagcgccgcagtgccagctccatgacaagtaccgcacggcagcatcagcaacaggctggacccggcgccccatcacgtgacggaggc

SEQ ID NO: 195809 - DNA, 1000 bp, Homo Sapiens
actgagttaataaagataatcaaataatccatcagtgatttttattgtgtttctccattataaaaccagtgcgtactcattataaacattttgggagtgtcaaaaaaaatagaaagaaaaaaattgacctttgagttatttctcagtgcagctactatgcaccattttgtctttttcctttaagtttttttttcttcccttctaaatgcttgggttgtttggtttacataattatcagtatattgtaaataaaacttagtaccacttttcacttactttgtaacatgtaactttttttttttacatgctataaggtctctaaaatttacatttcatgattataatccactcattgaatataccacacttaatataaacaaggctttagagttggatatttagttgttttgtacttttcacacctgatcaataacattttgatgaaaatgtgcttcaagtttttctaaaaattcaaataatttatataagatgattttccaggagtgctgctactaaatgaaagatcacatgtacttttcagctcttctgtcataaaaccaatttaagtgttttgttttgttttgtttttgttttagagtaccaacaatttgtctggttatctgctaggctgactcaagaatcttcattctagtgagatcgctaaaaacaatatgaaatatcataaagtgctggtgatgaggaatattaggaacctgcgtcacgtatcatgatgaatcagactttctgcatcacgtatcgtgatgattcatgactttcagagctggaaggaccctcagaaaagcatccagtcttggcccaaagctgcagatgggcaaagcattttacagcaggcagcaaaggccaggacaaagcatgtattgagtaaatggcagagcagttttcagatctctaaaatcatcacctcttggtcatttctagcataaaagttctatggtaccaagactagtcctctggctctatctgcttagacctggaattc

SEQ ID NO: 195810 - DNA, 1000 bp, Homo Sapiens
tgggtacagacaaacctagagagagaccttatgaaatgaggaaacaagaaagcatgtctatgtacttggaggaaaagggagggagtcaaaggaccaggtgatgagcattatgtaacagtatgtttgttagaacaagaatcacagaggaggttaaatcaaccagagactagttctgctggtgaaatctcagcaagagaatcactcctactactaagatcctagaaaaactgaagtagagtgctgatgttactgaagctgaagaagttaagaacaatgaggccatgttggatgggccaacatgaatgtgaatgaagataaagttttcaaaggactcagctctctttatttcatctttctctgtggcaaagttaaagaaaggccagtataattagatgacctgatgtcaaaagagaataagttatctattgatggtgataatgtttaaaattttctctgagttgggaaggcctaggttcctatcctgataagttcacttcttagatgtataccattgaagttacaagttacttaacttctctagacaacatttgatcaataaaagtacctacttcagaagattattgtaaagattacttgagatgatgcatataaagcgttaaacagtgcctggcacacgattgataataagtattagttactcttaccaaaaatggtcaagttgtagcagtacaggtcaagtcctatgccaactgcccctttttgcctagtgggttacaagagccaaagagatagaaaaaagtatagatgactgtaggagaagccctgtatctggggaaagaaagcttttagttaaggtgaaacacctgaataagcgcttggcaaatataaaataatttgcacccaaaggggcagaaatccatgagtataatggaatgattattgccctaaaaactctcaaacctaaataatgcatctctctttaaataacttctgacagtagtgcgtggaaaaagtagagttaaaacataaataaaaccaa

SEQ ID NO: 195811 - DNA, 1000 bp, Homo Sapiens
taacgaaaggaagcctatctacggcatagcagcagggagaggaatttaaagttttgatagaattaaaaatgctcaggaaaattgagattgttttcctttctccatgtgtgacttctaaattgaatttcttttaggcggtatgtgattgttttacccaggacagaacatggaggggtaagtgtgtttaggcttctgacacttctttgtatgattgctaatgtgagtcccttggaaaatctactcttctagcatgagtcctgtactgtcttttccctcctcctcccaccacttctccttgctgcacaggtagcaaccctcctgctattagcaagatgtctattacagtgtcattaaaaaagccatagtcagtgcgaggaatgactcatgtcatggaggacttaataattcactgtaataaaagtataaagttttatgataaaccactctcaggggagttaaatataatccttagcgggtcatacactgactacaaagcttacatttgtaatggtaatttgaatttactacatcgcctttagtttttaagcgtttgtgtgtcattagaccttataaattgatttatatgtttcaactccagtgtaattctgcataaaggtacaataaattttatggattggagatatggcatctaaaacattttaataaaattattattctaaattcacttaaatggcattgatgaaaagcggcagcaatgatgccaacatttcagaacttttatgaattggatgaggtgggagtgacagctgcaggtgagggtgttgctgggtgtcattctccacctccccctccttagtttgtcagcaaacaggaacctctggggctgctcttgaaagggtgcccactgccatgaggaggcctgctgtgtggggacatcaaagctttgggtgatgtgctgctgatgagtttgcaggagaaaggagcaggccgcatccctcagaagggacttttctattactggtggaacgcaacagaattc

SEQ ID NO: 195812 - DNA, 1000 bp, Homo Sapiens
gaatgcacgtattgttccttttattcaagatcccattgttttcaggaagcttcgaaatgggcagggtaatacagtcactctcgtttattcagacagaagtgcaatattaaaagcttacctgaaattctgtactgcgtcaaggggcgaagttaatacagaactgaaattaaaatgcagaaaaatattatcataaagagcaaagaaggcattccacaaggcaacctgagaagagcttgaacaaactatgttccttttttagacgtggttgtacatccacataaagccacctgctcccacctctttcttcacatctgtgtctcccaatgctgggggcagttcccttggtaaagctgagtttacgtctttgtttaccatcccgcatcctctctatcctgctgaggcttagcaaccgtgatgggattaggggctctgaggcctcaagtggatggaggagttctgggccgagtggaacttcaaccatcatccctaccccagatctgctatttgaactctgggcacaaaggcggcagaggggtcccccatcactgtggctctccagctccaggtagaaaagccccgcagccatgactaaaggccacggtgaatgcccgatgagggacctgtgatggatttaaaaggtaaaaagcagtttgctggatttcatactctcgagaaagagctcatcgtgaccatcgttctagatggccataccttcagaaaaatccaagtctgctttattttgcttaatctattcattaaagtttcctttcaagtactgaatgacagtcctattttaaattccctttttgatcttaatttgcagggaatttaaatgtcttttgtattgtgattcttttcttaagtaaactgaggacggatgctcacactgcccatggctggactgttgctttgctaataaccaaagacaccccgtgcctactccgtctgatactgacaatactgcggcaaatagaatcattttgtgcttttgaatgaattc

SEQ ID NO: 195813 - DNA, 1000 bp, Homo Sapiens
caggctggtcttgaactcctgacctcaagtgatccacccgccttggcctcccaaagtgctgggattacttgcctgagccactgtgttttttttgtttgtttgtttgtttgttttttgagatagggtttcactatcacctaggctggagtgcagtggcactatcacatctcactgtagcctcgagctcccaggctcaagcaatcctcccacctcagcctcctgaaaagctaggaccacaggcatgtaccaccatgcctggctaatttttttaaaatttttgtagagatggggtcttactatgttacccaggcttttttccgccccccagagacagagtctcgctctgttgcccaggctggagtacagtggcacaatctcagctcactaaaacctctgcctcctagttcaagcagttcttatgcctcagccacctgagtagctggtattggaggcatgcgccgccacacttggctaattttggtattttcagcagagatggggtttcaccatgttgaccgggctggtctcgaactcctgacctcaagtgatctgccaacctcagcctcccaaagtgctgggatttcaggcgtgagctaccacacccgaccttgtataggtaattcttaaagtggtataaaaatatgcaacaataattccccaagatgaagttaaatgaaaacaaaatcagtcttcatgtgcattgttttgtagggatgggggtctcactatgttacccagggtggtctcaaactcctggccttaagcaatcctcccactttgacctcccaaagtgctgagattactgtgagacaccacacctggccaaaaaaaaaaaaaaaaaaaaaatcagtcttgttttgcaatgaagggtattggatgatgcacaattgtgtcatgtaaaatggattcacttatttacaagttctctaggtatccagctatccatgagagaaactggtgagtggttaattgattttatatcatctttgctacagaattc

SEQ ID NO: 195814 - DNA, 1000 bp, Homo Sapiens
atgcattggtttttccagtgtaaattggaggttctcttatccctcactttcagacataggggatttcttttgcctcacaaatatgtttttacaaacacgtatgctcaaatataatttttattatgtatcataaagtcttatcttgtcactgtttttatctgagatggagtttcgctgttgttccccaggctggagtgcaatggcgcgttctcggctcactgcaacctccgcctcctgggttcaagtgattctcctgcctcagcctcctgagtagctgggattacaggcatgtgccaccatgtccagctaattttgtgtttttagtagagacggagtttcaccatgttggtctggctggtctcgatctcctgacctcaagtgatccacccaccttggcctcccaaagtggtgggattacaggtgtgagccaccatgcctggccttgtcacagttttaccatcaactacaaagagaagttcactaatttattcatctaatgtttattgaacacctattgtgtgctgggccctgcccaacaataataatgttgcacaaaacagagaacaaagtaatagggtggaatatgcattgtaaacattttgtgggttaatttatcttaaatatataagctaccaatttagttcttgtttcatgattttataatttaacaggcttataaatattttttattactttaatcactttttttttattgcaataggttttgggggaacagatggtgtttggtacatgagtaagttctttagtggtgatttctgagattttggtgcacccatcacctgagcggtgtacactatacccaaagtatagtcttttatccctcaccctctcccaccctttcccctgagtccccaaagtctaatgtatcattcttatcaacaggcttatattaaatccttcacaattttcatgagacttttccttgattatagccatgagtaaactaaacttttgtgttgcatatggagaaattaagctt

SEQ ID NO: 195815 - DNA, 1000 bp, Homo Sapiens
atctggtgtgcagactccacaggcagggggagaaaccaagcccttttctctctcagctaggggtgcagcacagggcaagttttcaagcccatcacactgtctgcctgcaaacaaactcagggctgttggggggtacacattgggagtgagaccaacccttctgcttgtatgggagctgggtgaggcctgtgactgctggctttcccctacttccctaacaacctgcatgactcagcagaggcagccataatcctcctaggtacacaactccagtgacctgggaatctcacacccatcccccacagcagccacagcaagacccacccaaggacagtctgagctcagacatgcctagccctgcccccacctgatggtccttccctattcactctggtagtggaagacaaaggacatttaatcttgggagttctagggccctgcccaccgccaatccctctccacattactacagctgatgctttctggaaagtgccacctcctggtaggaggccaaccagcacaaaaatagagcataaaccaccaaagctaaggaccctcatggagtccactgcaccctccatcacctccaccggaacaggcactggtatccatagctgagagacccatagacggttcacatcacaggactctgtgcagacaaccctcagtaccagccgggagctgggtagacttgctgggtggctagacccagaagaaagacaacaatcactgcagttcagctcacaggaagccacatccatagggaaagggggagagtactacatcaagggaacattccatgggacaaaagaaactgaacaacagccttcagccccaaactttccttctgacagagcctacccaaatgagacggaaccagaaaagcaaccctggtaacatgacaaaacaaggctcttcaacacccccaaaaaatcacactagttcaccagcaatggatccaaaccaagaagaaatctctgatttacctgaaaaagaattc

SEQ ID NO: 195816 - DNA, 1000 bp, Homo Sapiens
actacttccagagaagtacaactatcattcctgtctactctccactactttgtcagagcttttaaacattttactagcttgcaattttactgcgtggaagacttgcaagtcatctgcaagggtgaggtttccctgtgtgctcactcattttaggtcatggagaagtattcatttgtcctgatggttggttttggtctccgggtttcctgtctagacccgctaaatgcctactggtctcatggctgcattttgaagtcatcaggttagacttggggcatgtttgaagtaggatctgaatccaggggaggcaatggcttcctgacaagggtagtttctcaaaacctgggattttcactcctgcaagttaggagtgggcatgatgagaatataaaatcatgaagcaactcaaatcagacttacttagtatactagaacaaggagggtatcccttgatgttggcagggacaaagaaagtgaattttctgtttaaatatcattaaggaagtgtgtggaagtcagtcacgaaggggtggtgcagactaaaacaccaaaaggttcaaatgagctctgagtcaatcaatgcgtgattaataagtaaggaatcacttcagggaattaggggtgtttcttttattaaaaaaaattaaaaatagaactatcatacaatccagcaatcttactactgggtatatatccaaaggaaataaaatgagtatgcggaagagatatctgcacccccccaccccgtttattgccgcactattcataatagccaagatgtagaacaaacctaagtgtccaacagtgaatgaatgggtgaagaagatgtggtgcatatacacaatggaatactattcagctatataaaagaaggaaatgttgttctttgtgacaacatgaatgaatctggaggacgctatgctaaatgaaataaaccaggtacacaaggacaaatactgcatgatctcccttgcatgtggaatctaaccaagttgaattc

SEQ ID NO: 195817 - DNA, 1000 bp, Homo Sapiens
cttcataccctattccttagaggcaaccattttcacctctcctttttttaaagctgtttgtttttaattcatacttctgaataaaatgcttaagttgctattttctgggtttttccactttagacatcagtttcagagtttacactatggaagatgctactgtagctctgttacacccaccctccttcccctcaccccccaaacacttcccttcccctcaccctgtcaacagtgttgctatcatttttggctaaacaccaaactatacacagcaacacataactgaatcagagtatgtcatgatcttatttcctttcttcaattttctgtttttttctgaagttattaattgcctatctttttcttttccttggttttctatgtatctatcaccaattcttcccctaaaaatctcacaaaactaaattcttctcaccatggtgaaaatcccaactatattttcctagagacatacctcctagtgccttctttgttcctgctcctatttagactggctgctctctaggtctcctgcatagttgctttcgtagagctttccttcctgtgggaattgttttcaccatcctcctgtgtcagagaccctgtttcctggattctgtatctctttatttatttcctccctcattctggagaagcatatccttcagtaacttcccgagaaagtacgttaaggcaggtgaatattttgtgattttgcagacctcaaaatgagtttagttcaccctcacacttgaatgacagtttgggcataaaattgtgggttggaaatcacttctcctcaaaattctgaagctattacccattatcttctagctttattgtggcaaaaagtcctctgctactcaaatccctatactttgtatgtttagactccaccatccatgccccaccccattcaagaagcttttaggaatttttatccccattgttctgaaattttataacaatttgccatcatgtgaatctttttattacactg

SEQ ID NO: 195818 - DNA, 1000 bp, Homo Sapiens
caactggccttaagataaggagattatcctggactatccaagtgggcccaatgtaatcacaagagttttttaaagtgggagaaggaggtagaagaggccagagtgttgtgatgtgaaaaagactacatgcaaccatggttgacttcaaagatagaggaaggggaccataagccataagccaaggaatggaaaagggaaggaaacaaatcctacccagagcccacagaaaggaacacagctctgccaattccttggttttagcctggtgagacctgtgttcgacttctgatgtacagagctgtaagacaataaatttgccttacaacaacaaatgtgttgtaatttgtcacagcagcaaaagaaaaccaatattccctctcgactccttgtaagtgtggatacatggattcttttataagtacattataatctatctctatcactattcatttttgcattcaaattgtcttaaacttggccctcaagagcccttttaagctcttagtgacatgtccctaatcagtttttgagtatttcccttttttgacattgcaagatattctaagcctattttgtgattcccacacatgattctgcagtgtttcttatgatgatactgcaaagacaaagtaatagtgactgatcactgggataacactgttacttggctttgaaagtttgcccacaagaatgaaaaggacgaagtgattgacattttaaatgttaatcctcctgtgtctgctttgcatggtgttcctgccagtgctgagtaagtagcagcagagatttatgaatatcttcacataaacttgaaagagaaattgttgtctttgactacagaggctgaatattgttctagagtctgtccatgagtgtctgtatcattcagaattgttcaattcagaaactgttcaatatgaagtcctctaaaaaaattcttcagcagaattcttagctaactttttcagttagtagtggtgcatagaaagagattgaattc

SEQ ID NO: 195819 - DNA, 1000 bp, Homo Sapiens
gaatggcgtgaacccgggaggcggagcttgcagtgagccgagatcgtgccactgcactccagcctgggcgacagagcgagactccctctcaaaaacaaacgaacaaaaacattcagacaatccctggcatgtcttagcaggcgataaatgttagttttataaatttatttatttaaccaaaatggactcattctacatatgtatttctatcatttttttccttattattatctggacatttttttctaggcaggcctgtaaggatctttctttctttctctttccttccttcttttttttcttttttttttttttttttttttgagacagggtcttgctctgtcactcgggttggagtgcagtagcacgatctcagctaactgcagcctccatctcctgggctcaagctatctcctcccacctcagcctcctgaatagctgggaacacatgccaccacgcccgactaattttttgtagagacagggtttcaccatgttgcccagtcttttctcactcctgagctcaagccatcctcctgcctcagcctcccaaagtgctggaattataggcatgagccactgcgcctgggcaactgttctttctaatagccccctagtctgcatccttcagggacttcttaaagtaaaaacgtccagccaggcgcagtggctcacgcctgtaatcccagcactttgggaggccgaggtgggtggatcacgaggtcaggagatcaagaccaccctggccaatatggtgaaaccccgtctctactaaaaatacaaaaattagccgggcatggtgacacgtgcctgtaatctcagctactcggaggctgaggcaagagaatcactggaaccagggagctggaggttgcagtgagctgagattgcaccactgcactccaacctggtgacagagcgagactccgtctcaaaaaaaaaaaaaaaaaaaaaaaaaaaaaaaaaaagaactccaagacttcaaggttcccctgaagct

SEQ ID NO: 195820 - DNA, 1000 bp, Homo Sapiens
tttatctctggtgccttgatgacattagagcttatatttaaagcatgagtgatgagaagagaccaaagctgagaccttggctctgtcccatccatagagctctctcctcctctgcatcgaaggctctagaagccagtcctgcattgtctggtgggagcccgagctggtcagagccatgagtaaaacatctctgccctccagttgactctccagtcactgggatctcctattctctcaagagctcatcagaaatcctcaggggggcaagaaataaacatttaaaaaaagaaaagaaaaccttgtggaggggccaggcgcagtggctcatgcctgtaacctcagcactttgggaggccaaggtgagcagatcgctcaagctcaggagtttgagacaagcctgagcaacatggcaaaaccccgtctctactaaaaatccaaaatttaggcaggcgtggtggtgggcaactgttgtcccagctacttgggaggttgaggtgtgaggattgcttgagtccagcaggtggaggttgcagtgagcagagatggcgccactgcactccagcctgggcaacagagcaagactctgtctcaaaaaaaaaggaaagaaaaaaaaagaaaccctcaggggcttgggcactggggctcctccatgtctgtcctctctatattcgctggttagctgccttgtgtcggctctggctcagacaccccaagggggcctctttctctgtgtgaatttcaggttcctcatcaggccattcagttcccagtactgttctaggagaaatcatctgagtgtagccatttctgggtttgggagaccaagactctaccattgggtaccctttgaagaaccctctagaagcccgattctagagggtaccatttctgcaccatttcttatcatccgtgtcctcatgcaagctgtttatccccttaaatcttagtatcttcatctgtaacatggggatcataatagtactatcctcataggattatt

SEQ ID NO: 195821 - DNA, 1000 bp, Homo Sapiens
ggagtgactagcggacttttatgatatgggattagagattaagtgaacacagccttgctaaaggcataatcaggttggtttatggtctttcatggaccttaattaagaggtttgttaggctaagaaggattgggggagttaagaactaaaaaatgtcaccactgagttagaaactgttagaaggctagtgctggatatctggttaagctcgtccgatacactgcagcaagactaaaagacaaaaagaaaaaggtgtgtatctatgcaaatttcgctaatatggagatagaatttcactaatacggacatagggactgagagaatcatttgacttattataaactttaaaacataattgggttctaattcataaagaatgtcatttccattagacctgtattacaaaaaagaaaaaaaaagtcatcctaaatcttaacgtacacacgctttatcaaaagaatttccgtacccagaaatcaaaggcacttcaaaagtctcatttcgtatcttgagtttgttttaacatattcctcccgcaaaaacgctctggaaatcaaagaaaacttttttaaaatttaattcaataaaaatgacaccgactggctgaattatgatgggttctgagtggcggttgaaataacacatttttcctctatttcctcttttttttttttttttttttttttggttgcgaagaggtgttcttttccgggccacctccaccctcccgcactccccagttctacctttccaaggcaggggaaggtgcatcctcgccaggctcctgcccgcgccttccgagtacccctggcccgcagccggtgacacggcgcgcggaacatccgtgaacgagttgggttacatctctgtccccgcgaagctgcagatcgctgaccgccccgcgcacccccgcctgcctgcacactgtcaaccgcacttaggggaaatttttggaacagaagctccgcccatcctgctcccactgcctccactaaccgac

SEQ ID NO: 195822 - DNA, 1000 bp, Homo Sapiens
cttttccaagacaggtgaatatgtctatgagtctgaagacaggaggtatactaatctgtactagttatctactgatggataacaaattaccccaatttagtgccttaaaagaacacacatttatgatattacagtttttatgggtcaggaatctgggagcaacctagctgagtggttctggctcagggcctcttgagtttgcaatcatctcaaggttggacccggggaggatccacttccaacctcacttgtgtggctgcccaagtgtcctcacaacatggcagctggcttccctctctccagggctgccttacaagtaatgagggagggagtaaatgagagagggaaacagggagagaaagaacatcaaagatgaaactacggtctttttttttttttgagacggagtctcgctctgtcacccagctggagtactgtggtgagatctcggctcactgcaagctctgcctcccccgttcacgccattctcctgcctcggtctcccgagtagctgggactacaggtgcccgccaccaagcccggctaatttctttttgtatttttagtagagacagggtttcaccatgttagccaggatgatctcgatctcctaaccttgtgatccgcccgccttggcctcccaaagtgctgggattacaggcatgaaccaccttccccgggccatgaaactacagtcgttttataacctaatctcagaagtgatatagcatcacttctgccatattgtttcatagaagcaagccactaagttcagtgtatactcaaggggagggaaacgaagcctcattagttgaggggagaggtatcaaagaatccatagataggacacatctttaaaaccacaatatcacaaccagattattaacttacctaacgcataaatcatcactaccttttcttctctactgccagttcaaaaaccttttatctttacaaattctccaaagtgagtataaaccctcagcttgataatgaattc

SEQ ID NO: 195823 - DNA, 1000 bp, Homo Sapiens
ctcaggctggagtgtagtgataggatcgaggaggcactatagcctcgacctcctgggctcaagagattctcccatctcagcctcctgagtagctgagactacaggcacatgccaccacacccggctaattttttaaattttttgtagggatggggtctcactacgttgcccaggctggtctcgaactcctgtcctttagtgaccctcctgccctggcttcccaaagcactgccttatatctatgtttgaagccctagtccagggaccacaggccagggaaggcacagcaagggagcaggaaagcttctaaaggtacactcagcacacgtgggttctcctcactgccaccagtgacagacagctttggtttcattttctgaagtcctgtgttcaaaatgaaaccaaatccagatgccgaaagagaaaaggaaatctgctggttgacaagcatccaccttgtgggctgttctcctggagggctgggcaccaggctcacaggaagccaggcagtgcgaaaccctgaggggctcagagtgctcggtaggatgggaccaggctctgaccccagacctgctgcatgaccttgggcaagtgacctgtcctcttgggacctcatttgccccaactgcaaagtgatctctggacatctcgtacctcacagagcagccagacatgcagagccaagggcaaaatgccaggcatggagtcggtgcttggcacaatgacctcttgtcacagggcggatggaccagccctatatccacagcttactaaaccacagccacagccagatgtgtggaaacattctcctccctatcttggcagatcctcgtaccccaaatgtgaggggcccagccagcatctgggggaagtcaagatcctggtggcttatggcacttagcttttcagtttctctttccggctttggtggcgccttgctgggaaaagtagctcctggccagggtgtgtaatcgtgaaactagcctctgccccggaattc

SEQ ID NO: 195824 - DNA, 1000 bp, Homo Sapiens
gtcattggtcaatgattttttggatatgaaaccaaaaacctatgcaactaaagcaaaaataagtttaaaaataagcaaaaaataagtttaaaataagcttaaaataagcaaaaataagtttaaaataagcaaaaaataagcaaaaataagtttaataaactaaaaaccttctgtacaacaaaggaaacaatcagcagagtgaagagacaggcaatggaatgggggagaatatttgcaaactatacatctgaaaagtggtcaatatctaaaatatatatggaatgcaactcaatagcaagcaaatgaataacttgatttaaaaatgagcaaaggatctgaatagacatttttccaaagaagacatacaggtggccaactggtatatgaacagatgttcaacatcatttatcaggaaaatgtaaatcaaaaccactatgagatgtcacctcacatctgtcagaataactgttatcaaaaaaacagaaaatcaagtgttggcaaggatgtagagaaatgggaaccctgtttattattggtgggaatataaattagtatagccattatggaaaacagtatggaggttcctcaaaaaactgaaactagaactaccatgtgaccctgcagtcccacatctagttatgcattcaaaggaaaggaaatcagtatctcaaagagatatctgcactcccatgtttattgcagcattattcacaatggctgagatatggaaacaaccttagtgtccatcgatagatgagtaaagaaattgtgttgtgtatatatgtgtgtgtatatacgtatatatgtgtgtatatgtatgtacgcacatattctctacatagtagaataatactcagctatagaaatgaagaaaatcttgccatttatgacaacagggattaatctggaggacattgttctaagtgaaataagccaaacacagaaaggcaaatactatatgacttcatttatatgtagaattgttttttaagttgaattc

SEQ ID NO: 195825 - DNA, 1000 bp, Homo Sapiens
ttccagctactcaggaggctgaggcagcagaatagcttgaacccgggaggtggaggttgcagtgagtggagatcacgccactgcactccagcctgggcgagagactgagactccatctcaaacaaaaaacaaacaaacaaacaaaacaaaaaacaatgtcagtcatattggacttgggacccatgctaatgacctcattttatcttaattccctttctccatctccaagtacagtcacattccaaggaatggggggttaggacgtcaacataaaatttggtggtggggcacaatttggctcatcacaatgggtaaaatggggcattaagctcacatcctgaatctaaaacccacaagaggctggagtactttgctttccctggttcatgatcaccgtgctaactggagtgtggtcaccttgaaattggcttagaggaagatttatgatatcctcccaagtcaagggctcaggctctaaacaccggcttaaataagagctgagtgaaagtccacaaatcttgttacatcaacttctgctggactttgttggacagatgctgaagtcctctgtggagaaacaccttagcaacttgtcaaagtagttcatttctagagatctcatgaccaatgagcaattattccagattccctgtgggttgaaatattctgaattttatgctgcattatcattataactgggtgatctctggcttagcatcacgtttgtgacctcctggcttctaaatgtttagtgcccacctggcctctaccaccaaaagatcctattattcccaccaagctcatggaatccaatttcctcgtggcattttctccatcctacaatggacagcagccacagggctcttcaccgatccagaagcctcttcaccttacagtgttggtgaggcaagtctcccatgggtcctctgggagtatgtttaagggtacctgggcagtttgcctgcatagaccgatgtctacattcacgtttccttaagct

SEQ ID NO: 195826 - DNA, 1000 bp, Homo Sapiens
cctgtgttatagcttgtatctgcattcggcagttctcaagctcttgtcctgcatccaagaagaatgaggaaatgctgacaattgaagggtgaagatgggaggagaatttttttgagcgacagaacagctctcagcaaagaggagatgtgggggtgtggtttatctttcagtgtggctggatccggggctttttatggactcagaatggggaatgtgtgctgattggattgtgagtgtgcaaaaaaggttaaagcgaagacaccactcaaaggtgggtccaacagtatagaaaaccaattaggaaagggtaggtatatgcaaactaggtggagggtggggatcaatctgaggaaagcacgccaaatagaagacagattctctgtccagtccctggatttgacttgtagctttgctttcaggctttaaactgtctttggcttggaggtggggtttcaccagggacctgcccctatctgcctaggcatttgtctgcctcttgccactatcaatatcaatcagaaggcttccctgaccctgctgtagctgggttgagccccctcggccactgcctctgttactgcacttcaccactggactctccttgtcttcttgtctgactcttgaacgctgagctccttgaggacaggagccattttcattcatcctaatgtctctggcacaattctgggaacatgatgatgctcagtactcagttggtggaaaaaataagccaggaatctctcttaactccatctcctgtacacccagtatacagccacagaagtggcttgaatggatgttttttttcgctgtcaggtcagatgattgagaaatatttatgatgtgccaagcatggtgggagacacgggacactgcaggtaacaacacagaccccatccttgtgctccgagaggaggaggaaagctgtgttaagatatcatgaaggctgggcatggcggctcatgcctataattccaacacttcgggaggtgggcggatc

SEQ ID NO: 195827 - DNA, 1000 bp, Homo Sapiens
caataaaaatttacatttataaagtgctaactattgccaggtactctgataagtaagagtataaaaaaattaagcaagtaagcctggtctgtatctcaggaagaccagagtccaggaagagaaaacattaaaagaattaacatacactgtgacctaatagctctaacagatacacacatcagatattttgggagtgagtttacaaataaagagaaaaggtgtttactaagatgtaactcaaacttttctctcacaagaaagaacatgaaatacgacattctgcttgacaagcaagtgcactgctctcctgtacaatctgataactctagttacctatttaccattttatatcattaaggcaatgacagatgactcttagaaaaaaaataatatgggcttagagtctaaatactgaaattaggtagcttagtcaaattaacctatgtgggtcttaattggtcttaatttcctcctatataaaagaaagataccaaactactttgctgggttactataaagtttaaatgaggctaaaactattattgtaatggaaatctaatatatgaaatacttcaataaatcaggaagtagctgtttacttatttaagaatttattatggaatctgactgaatttcttttaaaaatatattttacaaggaagcaactcttgggaaacataagtacactttgtgttcattaaatatgagacccccaggccagctattgagaccaaagtcactactgatcaattgtgagactaaatagactattctactgaaccgcctgaaccactggacgctgaggtctccagaccagagtgatcacagtagacattacagggagagagaaggggacatcaggtaaggtctctgaaattcaaacaactgagtggtcagaagtagggcactgacaaggtcgccactgaatctgtgtttcttttttttgatttcttagaaacagggtcttccttcctatgttgcccaggctagacttgaattc

SEQ ID NO: 195828 - DNA, 1000 bp, Homo Sapiens
ccatgttgatacatagatgtggttcatggtcttcttttttctcctttttgttaactgctgtatacaattccattgacttttttttgaggcagggtctcgctctgttacccaggctggagtgcagtggcacgatctcggctcattgcaacttccacctcccaggctcaagcaatcttcccacctcagcctcccaagtagctaggactacaggtacatgcctggctaatttttgtattttttatagagtcagggttttgccaagttgcccagcctggtcttgaactcctgagcgcaagtgagccacctgccttggcctcccaaattgctgggattacaggcgtgagccactgtgccagcccccattgtctaaataagccatcgtttctctagtcatatacagttaggtcacttccattttttcattagtataaagagtgccatatgaatattgatcctccttgagtgctgtggaaggaagcctctaagatgccgccactggtccccacatcctggtcttcacacccttgtgtaatcccttccctcgggtgttggctggacttaactgacttgattctaacaaatagaacacagcaggaggaatgggacatcacttctgacatcaggttataaaaagactgcagctgccagcttgggtgttctctgttgccctcttggattgccagccctggagggagccagatgccatgtctcaaggcagtcctgtggagaggcaggcctaggtgacaagggaccaaggcctgccaacagccatgtgagtgagcttggaagcagatctccatccgctccccactcccagctgagccttcggatgagactgctgccctgaaaacagcaaaggggaacctcatgagagaccttgagccagattcccagcccagagaaattgtgagataatgtttgttgttttcggctgctgacttttggagggtcatttgttacacggtaacagataaccaatacgagcacaccctgagaattc

SEQ ID NO: 195829 - DNA, 1000 bp, Homo Sapiens
agccaccacgcccagcctaggggttcttaatgaactatttctgttttcaagatatattcttactcccttatcaggaatcagattagttcttaaatttaaaatatactattaactagaataaaagggagagttatagttttaaaattttatggtaataaatacatgaaaaattaactttttaaaaggttacctattcagagactcttgctataacttttgttcattaagtctatcagaatactaatgctaataatagctaatgtttgttaagcagttgtatgccagacactatactaagccccatgtgttagtagataacaagttagtgagataacaagttccatgtgttatctcactgaatctgcactgctaccttatgaggtagcttctattattattcacagacaaggaaactgaaagtcagggagattaaattttcccaagcacacacagctattgaagtgtcagagtcaggactggaactcagtctgatttcaaagcctgcttttaaagccacttggctgaactttctcaatataattttttttttcaggcatgaatagcaattcacaatgcatattataaaatctatgagtctattaccgaaacgtgtgctgtaatttatagaggtacctttaatcttaatggcactttatcaactcaatcatgacaaatttgacttgggcaccaattgccatctacttcactaatttataaatttctgctctgtaagtatttattaaggtattaaataatgctttggtattttctttctaggaactaaaggaagacaaattctaggaaacaaggattaaatctggtcctggtggttgtatgggataaacatggatttctttctagtttgtcttatatcagttttattataatattattcttcaggactttaaaaacaatcttactttaaaagtgtgaactatattcaatacctgtcctatgagatttaaaatatatagttctcaagcaaatataagtggaattc

SEQ ID NO: 195830 - DNA, 1000 bp, Homo Sapiens
tgccaaatattagtacagaaaatgtggtgcccaaagtaggttttgaaagtctaatacaatagtatattattataagatatgggaagtagtgttcagttgcctgggtttggatcactattgatccccttagcggccatgtgtttggaaaagaaacccatcctttatgcacctcagttcgttcatctgtaacataggaaacatgagaccacccacctcatgaggttgcctgaggactacatgggttattaaatacaaagcctctagaatagtgcctggcccacagtcagcactaaatcaaagttcactgctatggtggtggttgttatataaactgcacagggaatggcacttggttttgaaacctagctgccttatatttttgtttttatacttttccatacttttcaaatttgctttaaccacttttattataaaaacaataggcttctagaaaagatctataccatacatttgtaatttttgtaaagaaaaattcacatagagacatgtaactgtcctctccagactcatttctttctcacaaatctcacaatctagccataattaatttctctgtagcctttctccatatctcactctatgcatctcttcatctgtatcatttgtaatattctttatgataaaccagtgaaagtgaatgtttccctgagctctgtgagttgctctagcaaattaatctaacccaaggagtgagctgtgggaacccatatttacagccattcagtgagaagcacaggcaaaataacttggggcttgtgatcggcatcagaagtaggactcaggatgggaacagtggctcacgcctgtaatcccaacactttgcgaagccgaggcgggcggatcacttgaggtcaggaattcgagaccagcctggccaacatggcaaaaccccatctctatgaaaaataccaaaattagccaggcatggtggtgggtgcctgtaatcccagctactcaagaggctgaggcacgagaattc

SEQ ID NO: 195831 - DNA, 1000 bp, Homo Sapiens
agtgcctcccgtgtgactgggccagggcttgatcttcacctcctctgtcatagatggtctgcaggacaatgatgattcattcttcaacacatgcgtcagagcctgggacacacgacgctcaaagaatgtgacttcctttttaggccccaggccctcgacctccacgacccactgctctggggctctgattctgcatctccctttttccacgtggtccctgtactctgctctgggggtctccagccaggccctgccctcctcccagccgcctgggagattcttcactcccgtttctcagacagccccaaaagcacccattctgagttcaagcaggacaccatacagaaagagctgtctttggagttaggcagacgtgggttcaggttctggctctgtttccacttgctggcattgccccttgggcaattagatccctaacctctctgaccttccatggtgtcacctgtaaaagagaggagaatgatagtaatagggattgttgtgaaaaagaaatgcaactgcgcctgtaaggtaccagtcataatcctaacaaaagccaagcaccttgtatggattatctcatttaatcctcaaagcaactctgcccattgtacaggtgaagaaatgagacttcagcagcttctcctggtagaggctggattctcacctgggcggttcggccccaggacctccattcacaatgactgcactgtcattcccacatctaggtaacacttccaatgagagaagtgcttcctttttctgtcctattgggctttatgtcactgacgtcgcagacccttcctgggtcccagtcatgccccaccaggtccaggcagtgctcggtggcagaagcctgggcagagtgcggagggcagatgggaccggctcccgccgcacttccagcgtcttccggcctctgtggcctggctccaggctctgccttgaaggagcagggcgctcttggttgctggcctgcactggccccatgctggaattc

SEQ ID NO: 195832 - DNA, 1000 bp, Homo Sapiens
cttacattagaaaaaatagtgggttcaaatcaatagcctaagcttctacctaaactggaaaaaagggaagaaaatacaccaagatcaagatgaaggaaagaaataataggaaaatctccaaatgctttaaaatttaaagacccctttaaatgggtcaaagagaccccaggaaaattaaaaaatacattgaaccgaatggaaataaaaatacaacatatcaaaacatgggacatagctaatgtcatgctagaagggaaatttataatactaaatatttgtactagaaaagacaaaaagtcccaatttaataatctgtttgcaccccaagaaattataaaaagaaatgacaagtatgtgacatgatggatttgttaattagtgtgagttaaacatcccacaatgtagacatatatcaaagcatcacattgtaccccatagatatgatatatacaattatatttgtcaaaaaaagaattaaaaaaaaaagaaatccaaagcaagcagaaagatagaaattagagcagaaatcaataacattggcaattaaaaaatacagaatgatcaatcaaaagctggttctgagacatgaccaataagaatgacaaactagcaagactaacagggaaagaaaacacaaactaccagtatctgggaagaaacaaatatcactacagaccccacaggcatttaagggatttgaataaaggaatagtatgaataattataccaacaaaaatttgatagctcagatgaaatggaccaattcctggaaaaatcacaaattaccaaaactaactcaagatgaaataataaaaatgcaagagataaatagttgtgacaagagtccatatgacctgcaaaacctaaattttttaccatctggctctttacagaaaagtttgcctactcttgaaataaatatctgaatagtcttactaaagaaattgaattcatagctaaaaaggaatctccagacccagatggtttcactagagaattc

SEQ ID NO: 195833 - DNA, 1000 bp, Homo Sapiens
aaaggccattccaacattctatcaatccagctgcttcaggatgatggagaacatggtaaggccagtgaattccatgagcatgagcccactgctgcacttctttagccataaagtgagtgccttggtcagaggcaatgctgtgtggaataccacgatgggggacagggcattctgtgagtccacgaatggtagtcttggaagaagctttgcatgcaggataggcaaatccatatttggagtaagtgtctattccagtgaggacaaacctcttccctttctgtgatggaggtggtccaatataatcaacctgccaacaggtagatggctgattaccctgagaaatagtgccatatgagggctcagtgttggtctctgctctaggcactcagcagtggctgtggacaggtcagccttggtgagtggaagtccatgttgctcagcccatgtgtaacctccatccctggcaccatggccactttgttcatgggccctctgggggatgacaggagtgacaggggaaagaggctgagtgatattcacagaatgggtcatcctatccacttgatttttaaaaatcctcctctgctgaggtcacccatttgtgagcactcacatgggatatcaatatcttcacggtttttgatgactcagagcgttccatccacatacctctcccttaaagttctttgtcaccaattttccgatcatgcttcttccaagtccctgaccatccagccaaaccatgggctacagaccgttaattcgcatataattgtacatctgtctatctttccttccatgtaaagtgcacgaccaggtgcactgcttgaagttctcccactgagaaggcttcccttcaccactctccttcagtgatgtcctagaaagggctgtagtgctacagctgtccactttcaggtgatgcctgcatatcgtgcagaaccatcaatgaaccaggcccttgtcttcttttcctctgtcaattgatcacagggaattc

SEQ ID NO: 195834 - DNA, 1000 bp, Homo Sapiens
taaaacctcctattcttaaagtttttgtctgtgaccaagatcttggtcaatttttgtaaatgttctatggacataagatgactttatcttctagtgaagaaatgttctccattatttttacttactgtgtgtttcactgctccattttgaaagaagtttttgaaatctcatattgtatttttttaagtttttgcatttttatgagttgttgaattattcagctgtcatgtggcttggtatatacatgttcatgactatcaatacatcattgtgaagtgtgcctttttgttacttaagtcctctttatcttggttaagtttaaatttaagtctcactgtcttactaatattttcactcctttttgtttgcatcagcctagtatttctttgccactgcttttttttcaactttacatattttttacaaacacatagctatttttactccactctgatggtctctctttcagtgagagaattcagtaaatgttgtgacagatagacttgattatattcttcctgtttttattctgttcataacttctcacactttgtttccttctcttattttcgctagtttgaccaagttacttgctaatcatttcattgttctctttgtggttagagattttacttcattgttctattccattacagtccttttcccagctctcttaactaaatatatatgactctactcttaatttaaaacagaacatcaactactccctctgccaagacacaccgtttttaccaaggcactccaattttccccaacttccccctcttccctgtcataagatgagacctttagagtacttttttctcttctcctctctacagtgagacctttgaacatttttacccctttctctcccaagccccaactactggagaagctaagttatttattatgtaccagaactttccttgagtatgctcttgggtttcaaaagttcttagcacttacacagcctattcttagtcattagatagaattc

SEQ ID NO: 195835 - DNA, 1000 bp, Homo Sapiens
caaaagtttgagaccagcctggctaacatgttgaaaccccatctctactaaaaatacaaaaattatctgggcaaggtggcaggcatctgtaatcccagctactcaggaggctgaggtgggagaatcttttgaacctgggaggcggaggttgcagtgagccaagaacgtgccactgcactccagcctgggcgacacagcaagactctgtctcaaaaaaaaaaaaaaaaaaaaaaatagaaaggggtcatactggggaaaaggaacaaacacagacgcactgaaaagaatccaaatggttaagaatatgacaaagagaatcagagactacgaagatttaattcaggagggtggggatagaaataatttgacactgctcttcagctaaatttattctttacttgaaaacttctgtctggccaggcacagtggcccacgcctgtcatctcggcactttgggcagccgaggcagatggatagcttgagcccaggagttcaagacaagcctgggaaacatgatgaaactccatctctacaaaaaatgcaaaaattaactaggtgcggtggtgcgcacctatattccagctactcgcagatggggagctgaagtgggagaatcacttgagcctgggaggttgagtctgcggtggggccagggttcggtaagccgaggtcacaccactgcactccagcctgggcggcagagccaaactcttgtctctaaaaaaagactttttaatagaattttcatgttggcttgctgccctctggtggaattattagggtttatcacaaacactgtggaattcactctggcaatgaccactaacacaaaataccgatggttcttgggcataactctccccctggggagttagatctttgacttcatggcgtcaggaatttgttattggcctggacaacagaaacatgtctggaaaatccccaaatatttggaaatgaaataacacaactctaaataatccatgggtcaaaaaagaaa

SEQ ID NO: 195836 - DNA, 1000 bp, Homo Sapiens
tagagacagcaaaaaaatatgaaatagaggaaagaaaaaacatgaacattagaaattcaagccacgaggtccacaacccaactaacaaaagttttaggaagagaaaacaaaaactgaaaaatagtgtagcagatttcccattaataaagaaaatgaattttcagaataaaaagacccacggagaacccatatggcaaaaaaaaagggtggggaggcatgaaggtacatcataaaacatgaaatcaatgggataaaaataataaattaaaggcgtctagacagagaaatcatgtggcctgtgcaggtgggagaatcggaatgccctcagccttctcaatggcgacattgaagaagaccatagatagaatacacctgttgaattctgaagggaaagtcatttccaaactaccaatcaagtatgattgataaaataaagatattttctcacatgcaaaatctcaaaaccttgatttcctgttcaccttttcttggagaataaaccaggaaaaagaaaaatgaggactttgttaaaacagtgatcaacacaggaaagaagcaaatagaatccccaggatgaccacaaagggaggtctgaggaatcttgggaacatgatgtctacatcagagctgaagaatgaagactccaagaggaaggtcttctagaaataaaagagggttggctgggcacggtgtatcatgcctgtaatcccagcactctggaagacagaagcaggcggatcacttgaggtcgggagtttgaggtcggcttagccaacatggtgaaactccatctctactaaaaatacaaaaattagccaggcatgttggtgcataattgtagtcccagctacttgggaggctgaggtaggagaatcgtttgaacccaggaggcggaggctgcaagtgagccgagattgcaccactgcactccagcctgggagacagagcaagactctgtctcaaaaaaataaaaggattgatagattatttgatggaattc

SEQ ID NO: 195837 - DNA, 1000 bp, Homo Sapiens
cccatggtcatttctcatggcagtgatatttacatggctgggtatggagcgcaccccattcttccccttcacccgccactcccaccctccccgcttttgagctgcctgaggatgggtggtttgcaactcctcccacaaagacttctgtcactggtttcatctctgaattactgtggttaatagacacttctaagtaatttcatgtactatgtgtggttttaaccaactttaagctttaaaggccaatcatccagggacatctccagatggaggggggaaaaaatcaagcttgttgccttcccaacctgcagccactggaggcataaccatgagtctgtctataggcattgctggtctcattagatagagtcagaggagtttggagccaggtaagtatgacagcaggttcttagaggtcataaaatagggttttaaattttcccctcaagtctttctcaacaccaagcacaattctcagcaggagtttaataaatcctcggatcttctaacagttagaagatgtcattttgaggaaccctccaaaagaagcgtgtagatatgggccagggagcttgaaaactttgcagttagcatggcaggagctgacttaccctgagctggaaagagaccacttgtgaattcatcaattacaacaggggccaggaaagagaaggtggtggccagtccaagtctctctccactactagagtacagataagttccacagcaccacagattgaccatagaacagtggtgatcagtgatttaagtacattaaaaggatgttgtaagaatctttaggtatgttgtaagaatctttatcatacagagaattttccttatctaaaccactggatttatccgaccttcattccccatagtgctccatccctgatgtctactcagttttcagccaaatcaagctcaggataaagaagaggtttggatggaagtaagctggatattcaggctcctgcagtaatactcaattattgaattc

SEQ ID NO: 195838 - DNA, 1000 bp, Homo Sapiens
gagctgcctgcggttggagctctctctaggccctgtacttggtgcctgaagggatttaagtcttcaactctcagatatggagagagatcaaaccaagtttgaatgtgacttctccacttactccctatgtaaacttagaaagatgtttaactttcttctatttctcagctatagaaaggaatagaggaaggaaggaaggagacagggagggaggaaagaaagagagagagagggaggaaggaaaggagagagggagggaaaacggagggaagaagggagtttcgtagaaaagaaactaaagaaagcaggggagagagatggaggagaagggaggaagggaagaaagaaggaagggaagaaaaaagaaagaaacaaagaaagggacagtgattaaatcctgctttttgacagtgggaataactgagttgaagtacagggaagcattcagcggggcctgggccacagggcggcctctattgcttgtctggaggtcaaaacaaatccccaacaccacagctgtgggttttagtctgtgggcctatgtcctgccagtgctgtttggcatagaaatgcctcagtgtgatcctgactctctgagagcctggcatttcccaccatggtgcttgtgactatgctacttttgttttgttttgttttgttttgtcttagaacagatacaatctattaaggccttgcaaaagtaataaatctgctctaaagtcccctaattagatgaaaaaagaagcctggtgcagctgatctgtgtggagatgcacgactttataccttttaagtccagaggcctgagtgacaagagcaggaaagggagggaaactggttgtctgagaacgttttatgggccagctaaaacataaaagaggtcactggcatcaagtgcttgctttgcacataaaatacacagtacggttgttgcccacatgtttgataaaacgtggctattcactaacttggattttttccaaattaaatttctgaattc

SEQ ID NO: 195839 - DNA, 1000 bp, Homo Sapiens
ctaatacatcccttcattctattaggtctgctcgtccttaccttactttttgcagcaggactttaccaagtcacccccaccacttaggccgagtcccaaaaaactagtcatccctactatcttctgtctggtcatactcctattctccattctcaactacttataaatgccctactcttgtttacaccactggtttacactgtttcttcaagccatcacagctgatatctcttggtgctatccccaaactgccactcttaactccctcttagagtggatagatgatctttgctggcaaggcaccctccaatacttccaccctgatgaagttctattctttattttatactcactcttattctcattcccattcttatgccaccctctacctctccccagctatctccaccacactatcaaccttacccattctctcctagccgcttctaatacctccttagtgaacaactgctggctttgcatttccctttcttccagtgcctacacagctgtccccgccttacaggcagactgggcaacatctcccatctccctacacctccgaacttcctttaacagccctcacctttaccctcctgaagaactcatttactttctagacaggtccagcaagacttccccagacatttcacatcagcaagctgctgccctccttcgcacttatttaaaaaacctttctccttatattaactctactccccccatattcagacctctcacaacacaaactactattcctgtggccactcctttatgtatctctcggcaaagacccactggaattcccctaggtaaccttttaccttctcaatgttcatttactcctcatctccgaagcccaactacacacatcactgaaacaattggagccttcccgctccatgttacagacaagccctctatcaatactgacaaacttaaaaacattagcagtaattattgcttaggaagacacttaccctgtatttcactccatcct

SEQ ID NO: 195840 - DNA, 1000 bp, Homo Sapiens
taattttgtcatgcgtgttaagtatacactgtagctacttaaaacctagtaatagtatatgtgctagcattagactagagaaggaaaaaactatagtcaagaaagtaaagttttgttaagtttacaactgcgctgtgacaagaaacttttatattttctaggattgactttgctaaaatatcagtagcaatccgaaattttttggccctggatcctacagctttagcatctttctgtgagtaagcagtttaacatgataactgtgtaatacttcagttataccataattttgaaccaggataaatataattttttttaaaagttgtattactgctccttataaacattacctatagatgttcagtgaatttgtaattagaaacataaaaggcataatattgatagaattattttttcaattgaggttcatctaaataactttgaaaagcttaatttattgtactatattacttactttttaacttttgtattttctacttgacattaaacagattcagcgggtatggccttttaataacaaacaatattttatatctttctgatcatttggaatgcattttgttctaagttttgagaatattaataaaactagttttaggaccttgagcaagtcatttaacttttaaaaagatgttctaggttcttgtcagttctaatgatgaaatagtgaacgtctcaaaagatccttctgcacctattgttctcaaaaatttatataaggatgtctggcctattgaaatatatttatttggtcaaataaatttcttttatatcatcagtcatgaaagtatagattattttcgatattaatctataaattcaaaataaaccaggttgttaaaaattattagtaatttcatttgtctttttctcagtgtactttactgctcttatactatctctgagtcagcaaatgacaagtgacagaatccacctttacacaccttcttctgttaatggtagcctctggtaagaattc

SEQ ID NO: 195841 - DNA, 1000 bp, Homo Sapiens
ataaactgggcttcataagtttgctgatgaaccccacatacaaactacaaacaggagggaaagccctcaccccctcatttacctgtacatccagttctatgggacctaacaaataacctgtattgacaagatgtttcatcctcagtcataccagttcaagctatttcctaataagccagtcatgcctgttaaataatccaacttggggtggaagcagagtgccaattttattcacaacccacttgaagggatatggccatgtttaatgatacagaaaatagtggtccatagtcatcagcctacagtttaaccaataccattagcccaataaagagaaagtgagcaatgatccatggagaaggatgaggtacacaatgtgcatatgagtggtctccagtatggagtgcgtaactgactagtctggctctcttaactgtttccttgggaaaatctgtcctagaaaatgataggagagaaaacagcaggcatcattacgcatcattctccacagccctctaacattctagtgtccagaagcaatgggcagagctcattccaatggtctaagaatagtctctactctatctccttgatatccaaggtctttaccccaaccttaatgatcacaagatgcaagggacatggaaatttacctgtccttatcaaattattgtgggccctaaactaggggcttcagagtgatatagctagtcataaaaatgtgaactttaccctaggtgaaactgttccttagatgtgattggacctgttaggctcaggctggcaagatggagaataggagacctgagaatatggtacttctgtagttttaaaagaaaggaatgtctacatatggtggcccagaaaaggcatccttatagcaatttttaaaaatgcacacatatttcaacttaagttgaagtaagctatgtgcaccaatttctagaaaatttttaaactcagtcttctgggggaacaaaaacctaagaattctgaattc

SEQ ID NO: 195842 - DNA, 1000 bp, Homo Sapiens
cctgcatcctgcatttacatttatttctctcaaatgtcacttctatttagaaatgtgttccctgcaggatcaagttcagacttcttaatctgaactagtcaaatttaaatctccaaataccttccccataattcttcccactcaaattggtctgtatatgctgccaacctggctctgtctgctacttgctgttggatattatcattattattttctcctaccagatagtctcctcacctatccaaatcttttcctccttagggagtccacttaaatcttacatcctgtgtgaagccagaccacctcagctagaaaagagctctctcccgacaattctgttgtaacactcatcaaatatttattatctggtactatcttattttcttagatttcttagctcattggatattagatctaatccagatcattagagctgtcccttttggagcttagacttcttaaatctttaacctccctttgggcagaggctgttgtatactactatttatctttttttagtacttttggtttaattcaagtggcatttgttgaaagctgttcaatgaacagctgtttgaccagttgttaattgaggtcattgtattgaaattttctttttcaactggctgcttaatatttatatataagtgatgttctagctttattcttagctttactactgactcacataacctcttgaagataccctgtttaactaccccgtattgtggtttattcatgctagaaaatgagcgtacaaagtctgctggtggtatagcagtggaacgaattcattttgtaaagatccttgaggtccttggagcttatctatatttatttgtcagtgtttgccaaactttgagttctttctttttagaaagctttttgacaagtcacaaaaaaggaaggaatgattaaatagagtctaatttaagagtgttatactctattgtgtaacaatggagttgatgaattgtgcatgttaatggtgaaagaattc

SEQ ID NO: 195843 - DNA, 1000 bp, Homo Sapiens
caagtgagcaaataattgattttattttattttatttgtattacttatttatttttgagatggagttttgctcctgttgcccaggctagagtgcaatggtgtgatctcggctcgctgcaacctccgcctcctgggttcaagcgattctcctgccgcagcctcccaggtagctgggattacaggagcccgccaccacatccagctaattttttgtatttttagtagagatggggtttcaccatgttggtcaggctgatcttggaactcctgacctcaggtgatccacccacctcagcctcccaaagtgctgggattacaggcgtgagccactgtgcccggccattttttttttattatttttcagagatggagtctcacagtgtcacccccaagctggagtgcagtggcatgatcatacctcactgcagcctcaaacttctggcctcaagcaatcctcctgtctcagccttctgagtacctgggactacagggatgtgccaccgtgtttggctaatacttttaatttttgtagagaaagggtcttgctttgttgcataatctagcaaataaattttaaaaataatttctgtcacaccagaaggctacgctataatatccattcattggcaaacatttttgagctcctactatgtgccaggtactacataaaagaaatagaggccaggcacagtggctcacaactgtaatcccagcactatgggaggccaaggcagacggatcacttcaggtcaggaatttgagatcagcctagccaacatggcgaaaccatctactaaaaatagaaaaattagccaaacatggtggtgcatgcctgtattcccagctactctggaggctgcggcagaagaattgcttgaacctgggaggtggaggttgcagtgagttaagatcacaccactgtactccagcctgggagacaggctcaaaaaaaaaaagaaaaagaaaaaaaagaaatagagtctttgtcctcaaggaattc

SEQ ID NO: 195844 - DNA, 1000 bp, Homo Sapiens
acaatgctgtttaagacagaataaaagtctgttttagtctgttgaggctgctgtaataaaataccatagaccgggtagcttatgaacaacgggagtttatttctcacagttgtggtggctgggaagtctgagatcgtggtgccagcatggtgccagaaaccgtggtcgggttctggtgagggctctcttccaggttgcagacagccaccttcttgctgtgtcctcacatggaggaaggagcaaacaagctctcaggggcctcttttataagcacagcagtcccattcatgagagtcctgccttcatgatctaagcacctcccaaaggccccacctcctgataccatcaccttaggcgctaggatttcaacatatgaatttggggagaacacagagattcagaccatagcaaaatttgtaatcaggggaaaatttaataaaatatgtgcaaaatctttacacactgaaaactataaaaacattctgcgacaagttagagaagacctaaagaaaagagctataccacattcatgggttaaaagatctgatattggtaagatgtcagttctcaaatagatctcaaggttcagtgcaatcccaatctaaataccagcaggtagatatgacactaaaagcatgaacaacaaaagaaaataaataaataaattgtactttatcaaattaaaaaacttttgtgcatcaaaggacattgtcaaagaaatgagaagataacctacagaatgagagaaagtatttgcaaatcatacatctgataagggactggtatctagaatctacaaagaattcttataactcagcaacaggaaaacaaacaacccaatttaaaaataggcaaaggacttgaatagacatttctctaaagaagacatacagatggccaataagcacatgaaaaggtgctcaacatagtagggaaatacaaattagaacaacaaggagataccatttcatacctaccagcatggctataatagtaattt

SEQ ID NO: 195845 - DNA, 1000 bp, Homo Sapiens
tgaatacccagccaaagtaagctttttagaactgctcttgacccagaaggcacatttcaatataggctgactaaatggagaccctctttcaggccctagactacttggccattggcatccatgaacttgctgcaatcagtgagagaagaatcgagcggctctgcaatccctccctcagtgagctgcctgccttcctggtggctgaaggtggtctgaactctgggttcatgatagctcactgcacggcagcagcccttggtaaggacactgcccctttcccagaacacacgcccgtccatctaagggtctttccatttcacctagaagtatcaaatgtggtctgtgagtgagatctaacttttcaccacttttatctgcatcctagttctctcagtgcaaaggtaacaggttaactctaatatttttcagaaaaaaatagtttaaaaacttcgatactgttatgctgaaatataataatacaataataaggctgtaatggacaatttctctgtggaaagcaatttgacattgcatgtgaacttcatctctatagcttttttccaaatctatttgaagactattggaaaaagactaagatggttatagttaatggtgaaacttgaaccaacctataattaaactttgaacttttaaacctataattaaactttggattcatttcactagatataacaaccactaaaaacataaagatgttattgcaacattaaaaaaatgcttataagaatcaggataccctctgtgaagattgagcttcaatatagtttatttctgactcaagattgtaagagacagattaacacatcagaacagtgcctggcactaagtaagtactaagggcctcatttatgttcattcacttaattgcacaattgtcacctgaggtaagtgctattattgttatctatagatgaatatctgaagatctgagagttaagtgacttgcccaatattgcacagctagcaagatgtaaagcag

SEQ ID NO: 195846 - DNA, 1000 bp, Homo Sapiens
tacaggcatgtgccaccacgcctggctacttttgtatttttagtagagacagggtttctccatgttgatcaagctggtctcacctcaggtgatccacccacctcagcctcccaaagtgttgggcgtgagccaccgcacccagtcaagagtggtttttacatctttaaacggttggggggaaaatcaaaagaatatctcatgatacatgaagattatgtgaaattcaaatttcagggcccataaataaagttttcctggaatatagctgtacctaaacctattgggacaaagtcacatacagtgtggctgctttcccactacaatggcagagttgagtagttgtggcagacacgtacctggcactctcatccctttgtgctgctgctcagtgcactacaagttggagtgctgcaattataattcagcagtattttggccaggcgtggtggcacacgcctgtaatcccagcactttgggaggctgaggtgggcagatcacaaggtcaggagttcgagaccagcctgatcaacatggtgaaaccccatctctactaaaaatacaaaaattagccaggtgtggtggtgggtgcctgtagtcccagctactcaggaggccgaggtagaggaatcacttgaacctgggaggcggaggttgccgtgagccgagatcatgccactgcactccagcctggcgacagagcaagactccttctcaaaaaaaaaaaaaaaaaaaattgccaatgcacgttcttgtatcaaaagaagaaaagtataattttctttttttgagacagggtctcgctgtctcaatgcccaagctggagtgccgtggtgtttaatcacagctaactgcagccttgacctcctgggctcaagcaattctcctacctcagcctcctgagtagctggggccactatgcacagctaatttttaaaaattttttgtggaaatggggtcttgctatgttgcccaggctggtctcaaactcctgacctcaagt

SEQ ID NO: 195847 - DNA, 1000 bp, Homo Sapiens
cacttgaacccaggaggtggaggttgtagtgagctgaggttgcaccactgcactccagcctgggcaacaagagcaaaactctgtctcagaaaaaaaaaaaaaaaattacttgtatttgcatgaaaatcactgagtttcaaatctgaagtgttcttcagagttctaacgtgtaagaacacagagtactatgatatttccccaagagtattctgtgagtcccagctaaatgccctatatcccaagtgtgctttgtggtttaaagagttagagaaatgctgcagaaaccttccctgcagcatactaaagtctcagagatgtcctgcagggagaaaacccagccgactttattcagcaagggatctctttctgtttctctctctctctctccccctttctctgtctctgtgtgtgtgtctttcctttctctctctctccccctccttcactccgtccatatccctccctctccctctctgtccctctttcccttttcctttctctttcttcccccactcttcctccctccctctccctctccacttttttacctcccctccccctccccctcctctctctcttcccctcttcctcacaccctccctctgtggcccaccgcctattagcactatgcaaagcacattctgggaaatctgggtcctagccagtaggacagctgtagtagctatggtgaaatttcacatttctgggccctgcctgtttcctcctttgtcaacagcaggtttccaggtgctaggaattgtcatcactcacactcccttcctcaagggtttgctttagaactaagattcaaggattatcgatgtttttaatataagaataagctgtagaatgccaaacaacagcagataggaggagagagaagactaaaactataactgacaaatacattagactaatgaatgcaaagaaaacctagaaactgggaggttattagtggacattggtcatgacttgtggccaccaaccatggtttgaattc

SEQ ID NO: 195848 - DNA, 1000 bp, Homo Sapiens
gcaattgtaagtattcatgcaaaagtgtgtttgtagtctaatatttcaaaactttgaaagttacttatttatggtaaattcacaggagaagaattattgggtctaatatttaaacatttgaataatattaatatatattgaaaattgtcattcagagatataatatcaacatacacttttcttatgagcatatgaaagtgtttatttatttgtacctttgcctaaatagagtgtgtgtgtgtgtgtgtgtgtatgtgtatgttctttcaaactttatcaattgttcatatggatttcaataaacattaaggggctgctactgtggacagtataatgtctgtgagtacattagagaaatattttacagagtgtgagaatgcaaagtaaggaccagtgataataaagttctaggtgtgcccttgtacactctttttttctttcaaaataacttaagaattaaaatgagatggagcaaataaatatattgatgttattttatatgtaggacaaggtagtgtgaaaaaatgagatggatagaatggacataggaaaggcataaaaaaagatcgaagtttaccaactttttaatggaaaaacacactaaccatctataagattcagttttccatttgttaaatgaggctattaagcctatttgtgtttacgagtgaagataatgtgtaaatacagcagatagtgtgtaaccttagtgcattttcctcagcaaaatttaatccacgattggaaactccaacatttgtgatttttttctagaagtagaaaatcccttcagataaagtttgatgaaagtagatagagagctagaaaaaaaattggtccatttgttttcaaaaggctagatgtgacttattccaaatcagacaacaacaaaaaagaaatggtggaggagaggagggattgttaatgtgaaagcagtgtctagtttatcctcaaactgaataaacatgttttgtattcaacatgcttattcagagaattc

SEQ ID NO: 195849 - DNA, 1000 bp, Homo Sapiens
taacataaatatactattttacttacactaagtggctaacatagaaatatattatgatgtgtgactttagatttaaacaagataaaatacaaagatgatatcttatgctatcaatcaaagctatcattgagcaaaggatgatgagtgatctatgagcttctcctcatcagtctggaatgactctaggaggccagtttgttttaatgtctttgaaatgaccttattttagcatatttttaaatataaatattttagcatattttatttaacatgaatattttagcataatttactgaatatgaatattcatgttgaattaagtagtatttattatctaatcctttatttttctcttttattcattttttaattctcagttgaaacttaatttttatcatgttaatgaaaatttgtcttataaatagtaattcagtatgacttactaatgaccacacaaatcagatcagtattggatctaatactggatcagtatactgaagcaatgcatcatagaaacctggtcaggaatgtcaatgtcaaagcattcctagaagaaaggatagtttatagattgcttctttctgaaaagataaataagaatccagagacatagtttataaattttatctgtgtgtaatggtgagtaaagcagttttttctgtttttttttttttttttaccatgtttgtgtaatcttctttcagactttttgtttatgaaaaaaagacttataaccagaaatatataataaccaacagtttgaagtattcctaagactatttttcaactttgtttttaaaattacaaaataaaataaaatttaaattaaaaaatatggaagtagctaattaaattagtattaagggaggatacagaactgtaaatgcacggaataggctaagactgcaagaaaatgttccaaaatatgagggcagtatgttgacttgtctcttctactttttctttatatatgttggaacattgtctttataatgaattc

SEQ ID NO: 195850 - DNA, 1000 bp, Homo Sapiens
gctttttttcctaatataaaagttaataatttgtcaactagtaacctctgtgtcaggtagtgtgctgagtgtttaaatagaagttagggaataaaaatagtttctattctcaggaagtttatggactagtcagtaaaaaatacatcagtaattaaaactcagtaaattaaaacttttgtttatggttataacagaatatcagaccaaatctctgatgagactactgtaaaaactgtttaaaatacaaaaacaaatatctttgatggcactggggactaaccaaggcagccaggtcaaatttggcaggagccaaaattgtagagaaaaatcctattgagttgagcccgtatgtacccctgcttttttcccttagggtggtggctaactctacacatggggtggagaccagacaaagcagtggtccagagtttgtttcataaccactgagtagtgggagtaaaacttgaattgagggattctaaggcagccaagatttgagggtccaagatcctaggaaaaagacaacctcaagagtaatgaactcagtcaacatggtggcacatgcctctagtcccagctactcaggaggctgaggcaggaggattgcttgagcctaacagttcaagattacagtgagctttgatcacaccactacactccagcctgggcaacacagtgagaccctatctctttgggaaaatagagagagagaaagagggtagtaaactcaatatttgacttagcttttgctgttaaggtatttttcaaagtcagaaggagaaattcagtagaaagctattacccaagcctaaaaaacgtaagcacagtttttgttctcacaggagtaggttgacaaaaaattagatttcaaggccagccaaagaggaatgacaatgggaaatactccaggccttcggctgagacctcagaagaattatgacctacaaataaaggttgaccagaagttatcagcttgaaatccagcttcaaaactttgatt

SEQ ID NO: 195851 - DNA, 1000 bp, Homo Sapiens
caggctgctctcaaactcctggcctcaagtgatcctcctgcctcagcctcccaccttggcctcccaaagtgttgggtttgcgggcgtgagccaccctgcccagcccgagtcttaacaatgtcatgaaaaaaaacagaaagaatgaggcaaggggagactatcacagattaaaagagacgaaggattataaccaaatgcaatgtataaatcttgattggatctcagatcacaaaaaaggagctacaaaggacattttggaggcactttggaaaatttgaagtggactctattttagatgttatatttaataaatctctttttattattaacaaaatcatgtcgtaatgtcagaaaatatcctgttctttggagatattatggggggaagtgttttaggtgcagcttacttcaaaatgctttttagaaaaatatgtatacacaaatacaaataaaacaatatgtattcccaaatttcctattcctttatctcttattgaccataaagaaattttacaatttggttatattacagaaccagatttcttccctcttgatacgacataaagaaaatttgttctgacaataaactaaaaatactgtgaagctaagtcttatttaatgctaagcttgagtgaggggaatgctgatctggggtgttcggggactatgtgccatggcttctactcaccttcccgagagcagtcagcagatggaagtctatggtatctctgtatcggaggatttgaagaattccatccaagtatacctggtctttactaaaacaccctggaggaaccagaatagtgtttactttctgatgttcagaaaaattactaagtagatatcaacccattccatttactgtaggaatcagtcctgtattaaaaatattctagtttgccaacatttatttttatttttatttaactatcttcattacataaaatgtcaggtcttgggaagtgccaggatggtatgcagactagacccttaagaattc

SEQ ID NO: 195852 - DNA, 1000 bp, Homo Sapiens
gactgacagtggcacctaccataagactattgtgagggttgagtgagttagtacatgtaaagtgatttgaacacttttgatcagtgcttataaaaagtaagtactcatatcattaaaaattcttaagacccaggagaggattttgagtatggaatattaattatccatcagttatccttattttgctgcatgactttcagtctaccccactctactgccttttcccctcctcctaaaccatattcagtctctcccttcctaaaataacctcttttgtgcttggatactaccccgattatctctttccctttgtttcataattccttaaaatgaagagtccatatttcttgcctctgcttttcacttctattcatctcttgattcccattaccatctggcttccggtcccctgaaattgtttactaaaatcatcaggatcctctaataatcaaatccaacaaacggttttgcttcttgctaggccttcctatggcattttgctctgttggcccttaccactgttagcatctcttcctctttcctgaacacacccccttagcttctaagatacatgctctgatttcttggttctcctatctggctgctgcttttaagccttttctgtcagttcctcttcactactcatacctcagctgttgctgttcccaggactttgctttactttgtgcattctctacagataagctcaaacataaccatagtttccattcttacccaaattcgtatctcaagactcatcagtttcctaaaatgatattctgaatctcttctttactcctggcacctctgattcaaatttaacctatctaggtctaattcttgatctcatttggcgcttgttctgttttcccactttggctaatgtaatcagctttcacccagttgcctaaactagaagataccatttttacttctgacctttccatcactacagaccccttattgatatgcaagtcttgtctttgcttttcatgaattc

SEQ ID NO: 195853 - DNA, 1000 bp, Homo Sapiens
tggaagaggctcggctgtaaggcagctcagctgatggcaatggctgaaagtgctgaagccactccaaggatggattcttcctgaggactgcaacccagaggaaggtacagctgaggagggtaccgaggctcctgtgacacggactctgactcaggcgcactgcttcaaccctgcactccacagttccaccctccaatcccttcagtctcaagttgggtttctgtcttgaaaccaaaagggtcctggtttaagaacccagtccactctgacacctttaagccaccctggtcacagtgtgtggtccagacaagacatatggtcatcacaggtgggtttctattttccagagaccctcttctcacagctgactgactctcacacagtgaagaccccgggagcaaggccaggtcctgcccactcataaagttattctttataaaaattacttatgtcaatatatcagattaatagaaaatgacctctttactcagagcaggagacttctctggtacaatgacttcttctcagtcaggtgaaaagatttatgtaaacacctggccaagaatgtgttgactctgtgatgtggactaggtacagtgtctttcccaagatgttgcagaacttgctaccccaagtgtggtcctgggcccggcatcagtatcacctgggaatttgttagagatgcaaactctcaaaccataccccggcccaattacatccaagtgtctgaagtggggccccgcagcttgggcaccatgcttctgaggcagtgggtctcagcctcggcagcacaggctaccgatatctcagagatcctagggtgtggcctcaattttgacatttttcaaagttccctttgtgattctaacgtacaaccaggattgagaagccagctctatgttattttcctactgaatctttatcccccacactcccaggagctggggtaaacaagccagtggtatcgccagctgcacccattttctgcactcgggaattc

SEQ ID NO: 195854 - DNA, 1000 bp, Homo Sapiens
tcctgtgtcagagattaaatcaaccaagatgcctgccatgccaactttatttctgaaacaacgtgttttcaacagaaatcaaaatacatgttaatccttcccttctgacaggctaatatgagccttgcaaatcacagtggagagctacctagaggacgttaagtagcagaagccgtgtctgcacggcttatctgttggagaagtctgcggccatcccttgatttggaagttttctgcctggacttgtggcttgggtctgcagaatcaggttcagactggactgtttttatcagaaaagacttggctattgtgttttggctaaaacaatgcagaggttgtgtctttgagaagagtaataacaggttagcagacagccgtccagttcaacacctattctcctttctttgggtaacagcaccctgatttactattctcctttctttgggtaacagcatcctgatttactattctcctttctttgggtaacagcaccctaatttactctgagtaaccatcatccttcaaccactcttattccatgaggttctgtgtgggggactccatccccagcccctaaggctgggctctgggctaaccaatcagagccatccacctccttccttggccatcgaaattggttccaaggtgaggcaatgtccaaagtgggatgatggtgtgaattttgacccttggctggaactcctgagaaagggaagctcctcttttgctggggtggctagcttagcactgccgaaattcatcactgtgacctgatcacctgagattgatgcccactcagagtaaagcagagatgagagacagagacagattcctgatgatattgttggagcacctgaataaagccctgcttgaaattagaagccctcctggacttgtttgcatgattagattctattcttttccattgagaatgagctggctttccgttacctgaaattgaaatagtcctgattaattcagtggtccagctggtgaattc

SEQ ID NO: 195855 - DNA, 1000 bp, Homo Sapiens
gaagaagaaccatcatggggaaaagacaatttcttttggtccctgctccaaaaggagacaagaccccaccccgtaattcctcataagaaagctgagaccacacagcaatgatggctgaaggttgagcgcgggtttgatgacaactacagggacctacaacatccaaaaagaaaaccaaacgctaatactcagactctctccctagaaaccaggggtccttccacttcacaagggaggctatgtctgccacctctttgtttatcccccaccttgctaccaaatgcaagaaccagacaagaagtctcttcctgatggtcctctctttcctcactcctggtctgaagtcctcactgttgagctcttgtaagaaaatgtttttttaaaaatcagataacatcgtaatagtttctgcagagataggcatcgttctttgtgaagccagcctttgacatgcttagcgtctcatctgtgatatgtgtctctggatgactgtactacctcaggacagtgagggagggtcttatcctaatttcagcatgaattaacttgccccccacaaggggctcctcccacagtgggagttacctcaaaggccagcccaaagacctgtccttggaactgccaagagtttagaaacactggagtcgagttgcaagccaccctgctaatacttcctatttctcaactacagaatggccagttgcccccacagctgcaaggagatagcaaccagatcattagattggatcccaaagaacattccaatccattctccagcaggctttcattgaacaccctcacctcctgctacatcctgggaggaccctggcccagataaacccactttagtagaaagaaagaacacaacagaaatagcacaatgtgattcataatcaaagactgactcagaaaaggagacttcagttagcaggaaacgtgtcataaggccatattctggagtacatttgctctgggaatttgtaacacaatcttagaattc

SEQ ID NO: 195856 - DNA, 1000 bp, Homo Sapiens
ggcagcttcaagcatcctgagaatctgatcataatccaaaacaggagtgttgagggccttggtgttagccccctaaataactagttatgcaatgtcttaccctgcagttcagcacaggtgctcactgggtgttgtcccactcctaagactcagacacaggccatgaataactgccctgcacctcatgagaaagcactttaatttaaggctcaaggcatctttataatgggtaaaaataaataagcaaaaacgttaaccagcaattcatcttaaactcaattagtgctcagttgaagaacaatgtttatgcaagcaacatccttctcactttctttagcatctgcagggagctgatccaaaagaggagacagaaaaggtgaggtttggggtcgtcgctttctctttgcagtctgctcttgagatgagagatcaagaggcaaacagccatgtgacaaagctgcttttctccatttaaatagagagtcaaattgaaatacagcaattgggctaaatttgctggttagctaatcgaaggacttggctggacaacaggaagctattttcaccagtgtctaatggagcctgcctcaggcaaagcccaagcaaatcacattagtgggtggcatttaatccacagctttaaataaacatgtcaagcaagtcagttccaaacatgtgaccttgaggagacacggtgggggaaaagcagaaagaaatagagtttcttttctggaaaactctttcaccaacaggattgggagaaaatggctacaaatttttaataatcatgctactgttggtttttctaatgcctgttcaaatttatccatactttgccaaacatggggtgaaaacaaagccttttacaaatccttctgtagttacaaggaatgaccctcccatatggaaggtctcctaaactacatggagtaactcctggggtgctgctttcttgcacctaagttctgcctgtccttggtggggaggggatggtgaattc

SEQ ID NO: 195857 - DNA, 1000 bp, Homo Sapiens
ccaaaattcaaatttatgttgaaacctaatcaccaaagtgatagtattagaaaatgggaactttgggaggtaattaggttataaaggaggcttgagagagcccttttgctctttctgccctgtgcagacacagtgagaaggtgccatctgtgaagcagagaccccttgcccaacacctaagctgctggcaccttggtcttggttttcccaggctccagagctgtgagaaatacatttctattaattggcaatcactcagttaaggtattttgttatagcagcccaggtataacattttggttcccctgagatggagcagaggcagagagataattaagtacctaaatcacagtaaggacaaatcctcaagttgaccttattttaagggttaagatagcctcaatacctgacctataatgggaagaggtggtcaggaaaggatttcttgaggaagtggcatttgagctgagagttgaagaatggagggcaggaaagaggcaggccttgactgacagggatctgtggtacctacacagaccctagagtgggagggagaagccagagttttaagaagggaatcaaggccagttggctggcccaggacaaaaatggggagagaggcctgacatgaagctggggagggtggcttgtgggtcttcatgtttcccatttacttacaatgcttgaaaggctttgctcatctaatgccaatcatttatgtacacccaactccacaacccacacataggtttataactggaaaggcacaagagggaaaactgtgcatatcccagcgggcagctgatcatgggactgatgtctgacattcagaattaagttgtatggccatgagacaccacagtaaatccccaattaagcagacatagatgggcttacttaatgtcaaatacacctactgacttaaagcaagaaagatcagatattatttcccttccaggtgccatgatgcagagatgctggaagtcttggcccagaattc

SEQ ID NO: 195858 - DNA, 1000 bp, Homo Sapiens
tctcattctccaaagcctgctagttattgaagcttcatttaagcacaaagaaactttttgtctctttgtgttttcttgctgccacccagggcctgcgagaacaggcatgaggatttcaggggctggtgtgggcctccccatggcttctctagggcagccccacagctggcattgagagtgagatggtagttattacaacctagatggggccaacatgggtgtgtgaaaggagccccagagatgcctcattcgccttggccaactgtggcctaagaggatgagccccatattagtgtttacaggggtcctgggcccacaaacccatcactgctttctggctctgcacctcctgatgtggctagggtctccacctctttctctgtggaggagctggtcaccactcatctgcctttgtgccaggtgcagtttgtctccaacctccaaaatcccctttctgcaccttccccttctcttgctgaccccttttcttctctggcatccttacactttctctttcccttcatccatcaatgccttcttcaaaaaagcatgggtcagattccttcacacaaatgccgcatggctacttcctccaataattgcatttttacaggggaccacacctgaagccaggtctcttagtaattacggtccttggccaccagcaagctattgggggaaatcatctcttgaatgggcagagagaggtacatttttggtagctgtaaaatgatatcacagagtcattcattctcattcattcttgtgttcagaagaagagcccatcttttaagtacagtgaattctgttagtgacatacaggtgtacagtttcttttcaaggacctacaaaataaaaggggctatctttcagaagatattcttcttcacattggaaatggatgcagttttgattcttcaactccattttctcacttgtccaaggttgtaccaaaccactccatctgagtgacatagtgatgtttctaacatccacacct

SEQ ID NO: 195859 - DNA, 1000 bp, Homo Sapiens
tttggaatgttgagaagaggggaattcacccaacccacacagatatttgcgggtacagataaatccttggctgagctcaagaggcttttcaaaagtctactctgatgttctgtatattaaaaaaaaattcagcaaagccaaatttttgaaaaagagcctatatggcaaataattattcttgtgcactttatgcaaataattaggcaaactgtaataagactgaaacttattttgcaaataaattgatcctgctttgatttgtctttggtagaaatgaaaaattggagagagaaaaattatgctttagaaaaatgatagtatacctcttactagatttcggcctcgtctattatttttgagtctctgttgatgacctaatatctgattggttcttggatcattcacctggatccctcaaagcttcagattagttctatgggaacttctgaaactagaactttcactcttatgtttgggctcatcatttgtcttatagtctgctgttctcttaagcgctgtactaagcctgtgtggataagaatactattgctttttgttatgtagaccttgggactccaacacaaagttatgtagacaactgcaaagtggtttcattcttctcactccagacccaaccctgaccccaactatgcccctgtcagcagaaaagttaaactgattgttggccttttcccatctctgtagctcacacctcaggaatgaggtatgccgaaacccagggtgggaattgaaaccgcctttgcaaaggttataacagtgagagaaatctaacatggctgactccatcttgcttctagtctcacaggctgactgtcttctctcagtcctgagcataggccaaactaaccatgggaggaatttagtttatggcttaacttcaaagcaaggatgataatagttcctccctaaaactgatcccctttttttgtaagactaataaaaggtcacaagattaggattataagaggggcctgaattc

SEQ ID NO: 195860 - DNA, 1000 bp, Homo Sapiens
attacctgggaattactggagtattcatatatgcactgatcttatcattaatttaatggatattctcttttatcacaaactctggagtattctattagtctttaggaataggatgtcaggaagtaagaaactggctccatctccatggacactatcgtttcaagtcaaaatagagtcaaaaggaaccccatcacatgctgtaagcaactagaaaaactcagacaaaacataggaaacactggtttagaggcatttgaaaagaggcattataagactgtgatccctgagagaaagaaaccagatgatgagatgttaacctgcaccatcttacttcctgtaggcagtttccaggcaacagcacagagttaggcagtctttttaagctgaagaaagagagattagaattcagggatattacaaaaggtggagttcgtggggcatggtagcacagatgaaggagctgcacaaaaaaggaactctggagatctgcagtggggtctggaggaggctttgcctaagtactgatctgtgcatgcatgagaggaaatgactcatgcttgggaaaaaaacacaagaaaggagtactcagaaatattcttgcagctcacagagcgctaggaattgttcatgttcccaccagccaagatgaaacaataacaacaacaacaacaaaattttaaaaaccaaaaacgaaatatataaggtatcaagtaaaagcttgagaatggtattagattccaaagcactatataattaaatggccaaaaactaatgataaaaagaaaatcttaagatcagccataaaaataagacacattgtgacacactgcaaacaaagcaataaagagaagaatgacagcagacttccatcataaactatgcaagccagatgtattgagagggggaaatattgtctacctacatttctttatcaagaaaaatatatttccaatgtgaagaatgaatgtacatttctggaagaacaaaatgaagagaattc

SEQ ID NO: 195861 - DNA, 1000 bp, Homo Sapiens
ggaggagcatggtagtgatcttcagatattcatggaagagtctaggttcatccctgcagcttgagagaaggtaacttgaaccaatgagcaaccggttatgagaaaccaggtttccgctcaaggtcctagcaatctgtgctgccagccaagcgtgtgtgtgtgtgtgtgtgtgtgtgtgtgtgtgtgtgtacgtgtgcattggaggtgggcaaggagacttcctggtgaagtcctgagcccactcagtgtccctgcaaatgttcaggcaaaaggtggccagccagctattcagacgggggttgggggtggggtggggatgcaggagggtataaacaaaaaagccaagagtaagggaaactgggttcaggtcctgcccctggttatagatatgtaatgatgtgccagtcagttttcttatttaggcttccatttcttcagctatgagtattgagtcatctttggttttcaacttttggtagcaatggaacgtttttattacatgaaatcttctgcaatcacctttcccctccctaaatatataagcccagtgtgttattattggacacaccctgactgtaggtgccaaggcctcctggcactgctgcggggctcctgggagtagttggaaagcactggaccagctgatcttccagccctaaaattctattctttaaggttttctcctaccttagtttttgattctatagactccaatccctcattttatgaagtacctggtgcttaaaaaagggatttatcgaagatcttacagctggttagtgacagggctgtatttaacacacaactcccactccaattcagtgttcatctcatcaggctgcccctacttccacccgggacttgtcttagcacttgttcctccatggtcccaggaaatcctgtactgccctctatagatcctttcccttttggaaaagcatcaagaaggcaataaatctagcctgaggcattgcagcctgagaaaatgatcttggaattc

SEQ ID NO: 195862 - DNA, 1000 bp, Homo Sapiens
agggctgcagggcagctccccctggtggaccctagaggtggcccctcccactcctgggagaagagaagccacactgtgcatttcgcagccaatcaaaacacaaccctccaatagagggcggaatggggttaccagaagctgggaaaagcaggggaggagaatgaagagcaggtggatggtacaaaaatatggtgaggactaagttctagtatttgatagtacagtagggagactatagttaacaatttattgtatatttcaaaatagctagaagaattggaatgttcccagcacaaggaaaagataaatgcttgaggtgataaatgtccttaaatatcctgactggtcattacactttgtacgcatgtatcaaaataccatatgcagccccaaaatatgtacaactatcacatgtcaattttaaaaaggaaaaacaaaacaaccagaacattcctctagttagtagctacaacagggcaggaactggagagaaaaacaaaacaaaaaaagcagcagcctcctgactggccatttcccttcttggtctccagttaaaagctgcctctgagctcccccagccccaggcccccaccaccagcctctgccttccaagataacctgtcttgcctgatcctggaaaggcttgtgagaaacttggggtggtaagaaataaaccaaaggagattctcaaattctatctctgggatttctgtttcctcaggtgtaaaggtagaatctgaacaccacctaaactgccaccacacagtgccactgtctttgctagctgacgtggaagtactgtgcaaacttaacagaagtgctgtggagatgctaactgactgaggcaactaggaggaaccctccctgccaggaagaggttcttggggatatacctcaaagcttagggctttcaaatacttcctagccaatgggcccaactgtccagcctggctggggtaacgatctactcccaactcctaccaataattctctggaattc

SEQ ID NO: 195863 - DNA, 1000 bp, Homo Sapiens
aatatgcatactctgtgatacatgctgtatacataggtactagctttgtgctacttaaaagtgtggtcctggcacctgtgacactggcatcagccagaaatttgttagaaatgtagaatcacaggcatcaccccagactaacttaatcagacttgcaattttaaatacctaggtgatttgtgtgcacactaaaatttcagaagcacagttttatctcacttaacccccacagcgaacctaggaggtaccgacgactaacagaaaaactggcttacacaagtgatgtcactactgtaaagcacagagacaagacccataggcgatgctcatgaatattttcaggcagaagaatggcagaagaacaggtagagctagaaaaagaacaagaggaatggataatcctctgacttctggttttgcctagtttataccaactgcagcagcaggttggaaccatagcccccatggcgtcgagctgtttctttgctcaagccaggccaaatcctgcagtggtcatcagtgtgcacactcaggagctaggagcaaaatttcctcccagaagataatgtgaagcaaagtgcacactgctgattatagcacatctaggttcccgcctcctccccaaattaagtatttttaattatttgttcacagataaatggttacatttataattcctacaaatcaatgcaaaataatatcagacctaaaacattactcaaaatatacaaactttgtagaaatcatttagacaaggtataaaaagatagtcatggggggggggggcggcgacgactgctgaattcagtaacaatttgctccctttctaagagcccaacctccttaactgcttaccatcaatgactgaggtagatggggattaagagaacaagagactgagcccaagtaaaattgtttcacttatactggttagtagccttgttagtaagcatgttccatgtgccagtcattcttttaactgctcattagggatgcactg

SEQ ID NO: 195864 - DNA, 1000 bp, Homo Sapiens
tatcacagtgaaccctcgtctctactaaaaaatacaaaaaattagctgggcgtggtggtgcacacctgtagtcccagctactcaggaggctgaggcaggagaatcgcttgaacccgggaggcggaggttgcagtgagccgagatcatgcccctgcattccagcctgtgtggcagagtgagacgctgtctcaaaaacaaaaacaaaaacaaaaacaaaaaacaaagatgagtaaatcagccaggtatggtggctcatgcctgtaattccagcactttgggaggctgaggtgggaggatcacttgagcccagtagttcaagaccagcttaggcaacaaagtgagaccatgtctccacaaaaaagtttaaaaaaaaagcttggcatggtggcacatgactgtggtcccacccagccacttgctaggctgaggtgggaggatcacctgagcccaggaggtcaaggctgcagtgagccatgattgtgccattgcactccagcctgggcaacatagcgagaccctgtctcaaaaaaaaaaaaaaaagttgggtaaatgccaactgtgagaaccgaccctgccctatcagtctcccatgacagacatggataattgattttagcatctctttctttaagagaatcctaaagattcagaatctttcttcctatggttattcaggcaatcatgacatctcgacccgccaaggcaaaacctgcatattatcccagcccgtgggcttttagggaaccatcccgagtgtggtgaaggcagtgtaattgcaaacattcacagatctgaaggaagaattcttcgttctgctctttgcttcttagtgagaaacagttccctggtcactggcagatgatctgcagctggggtaggattcggcattgttatggatgtgtagggggaggggtgttcagaagcctcctgggagacaatgtggtatggagggcatcttcctagggcatctcaggaaacagttgctgtcaagcagccccta

SEQ ID NO: 195865 - DNA, 1000 bp, Homo Sapiens
cgcgggcggggcctgctcgccgggcgcccggggcgccttcttcccgagggacgccaggaccgctcgctgggctcccgcggccgcctcgcaggtcctcggcttccccccaccccgcgtccctttctgcccctgctgcgtgagaggtgtcggcggctccgggccgggatcgaggtggcggggcgagggaaggaggtggggcgcaggctgcattgcgcttctgtccggggccctgggtcagaggggccggcggacgaggcctcgggtccgggcttggggagggggcggtctgcggggtcggattgagggccgggaacccgcggagtcttgcccctgggcacctgtggggccgagatcccgagccacctgtccacacacccccttcccccagtgccctgcgttgggtccagctggccccagacctaggcctttcccagcctcgggcgattatagtttatttgaaaacgtttgatttttgtgttaatgattcttttactaccgccgtgcaacagttgtgtaaatgtggtcgtgttacgccatcgtttttacttgctcctaagaagggccttaccagctcctgcgattatctcacgcgatgattcttggtagctcgtgaaaaaaatgcataacaagatactggttctcaagggaccaaaaccccacccccacctaaaggaaatagcttgtttttgtttttcttttttacagcaatatgctacgtgtggggagggggagggacgatggaggcagcctgtagcgatctcatcctcgagagaatctgctaacaatttggggggtatctttccttcctttttaattaatacacaaacatatatacgtgtgttacataaggggtgtttatttgcttttttcacttaatacgtggaagaccttttctctatcgtttgaacctaaagcctagaaggcaagaaagcaactcgttagagagttgataaagtatcactgcagtggccagtgatttggatagaaataagctgaattc

SEQ ID NO: 195866 - DNA, 1000 bp, Homo Sapiens
tgctgcctttaacaatcgtcttacagcatactatcatcattatgtaagttaaaagtaaggctccgattctggatttttttcctcttcaaatatgcccatttacctattataggattgtggaatttagtctgttttaatagaccttaaataaaaacattaccataatagggtcttgaatccattttatgctattttcagaaacttacagactgagactgaaaattaaatggtgtcaggtgtcatttaactgaattttttaaagtgtgaaagattagaattcactttcgtagtgggagttctttttgggttgaactaagcagtgagatgtgagtgggccattaatgacatttaatgaccattctgattgtggagcaacggaaagatgagtgcttttcaatccagtagtactttaaaaggttgaagagtatacactgtttcatgattcttttattccattgtaaatattttagagcagcatttacttcatatggtgactgtatcaactaggttgataaggttctagcctacgaaataattagagaaataactggctcaaggattttctacataccagtgagcttcatcatggaagactgagcacacaaccttacttagaatatttgaaatattttattataaagtgaaatgttggtgggtagtgggcgaaatttgtgtagggttttggggtcagtactcatttgtattttgatctgagcaagtatttaagtccagatcattcactgctgtgtaaagattgtgcatttattttaaaggctgggtgattaaggtctgtggttcagaagcttggtactttaaacttactattcaatatacaaaatcagtgtattcttaaaaatttgatttatgtggccataggagggaacactgcctgtgcccgatggttttcttcatagagaccttggtcaggtctagacagacaaagcaattgaacttatttggcttcaaatgaaaaataccaagttagaaattataggaaaag

SEQ ID NO: 195867 - DNA, 1000 bp, Homo Sapiens
ccggtttgtaccttcaccactgctaaaactgcccagcaaaactctccctaacctctgctggactagatatggcagagcaacccttgtggcaagtctctcttctttgttgccttcctactgctccaatctaattgtctgtttctttcactgtctctttagctattctctaaaaggattctctaaactttggagtctaaaggctccttgtctatattttcactcttggggatactatttactcccagcactttgattatcctattccctcgcatttcatatatttacttgtccatctattcaacatatgatccccggagtggctcgcatggggcaggtcctcaacagagcccgcctgcatgaggacacacctctctagctgcaacatctcatgggagctccaaaagccatgctcacccttgctccacacttgaacttgaaatgagccaatgtcttacactcaacttgtccagaaacaaccttctcacatttccattgaaatcttctttccctcctattttctggactcgtaattgtttctctgtgctcattagagatgggaataatgatcagcattagagcccaggctctggagccagattgcttgggttctggttctgccactttccatctccctatcttagagtagttgtgtaacctccttatctctgaaataaggataatgagagtaaaaccaagtagggtagttttgaggagcaaagtgagtttttatttaaagcaattagaatagtgcctggtgcacaatgactactgggctctactatgacattatttgatattattgttggcttcgtttctcccatgcatcttacattcagttggttgtaatgatgagcctctagcactgtggcctcccctgcattccttcttccacgagcccggttcatagcagcatggcagctagtctctccgctcctgactccttcattctaatacattcccacattagccttccaaagatgcaactctgctcatggaattc

SEQ ID NO: 195868 - DNA, 1000 bp, Homo Sapiens
agagagtattgaaagggtttctgtgaatacctccacaactgtggttctcaaagtgtaatccctgggccagcagcatcggcatcacctgggaacttgttagaaatgcagattcccaggctgggtgcagtggctcacgcctgtaaccctagcactttgggagtccgaggtgggtggatcacctgaggttgggagtttgagaccagcctgaccaacatggagaaaccctgtctctactaaaaatacaaaaagccaggtgtggtggcgcatgcctgtaatcccagctgcttgggaggctgaggcaggagaatcgcttgaacccgggaggcagaggttgcggtgagccgagattgcaccactgcactccagcctgggtaacaagagcgaaactccaccgaagaaagaagagagagagagagggagaaagaaagaaaggagaaagagagaaagaaagaaaaagaaagaaagaaaagaaaagaaaaaagaaaggaaaagaaaaggcaaattcaccagagcctttgaatcagaaaagaacccccaggggctggtggtagcagtccttgcacaggccctccaggtgattctcatccagggaagcctgcgagcccttgaggtggaatattctcaggaatccctgagatatgtgaagaactgatggcataggctatttctagggaggaaatggggctgctgggtgcacagatgaggggaggtgggagacctctgtaattgtgtaccatgtgcatatattacctattcagagaataataaaacaatgcgtttaatcccccgtcttcctccatctacttctctcgtaccccatagctgctctagcacctccacctccctcctcaaatggtgttctttgcttcctaggcaagctggttttctgttctcccttccccggtcttctcttgcctggtctttattacaaggtgtgctaagcctcataaggacagttgaagagaaaagaagtgagactgtgctagtggctatagaattc

SEQ ID NO: 195869 - DNA, 1000 bp, Homo Sapiens
tcagacagtctcgctctttgtccaggctggagtggagtggtgcgatctcagctcactgcaacctctgccttccagattcaagtgattcttgtgcctcagcctcctgagtagctgggattacaagtgcctgtccctacagccattaatttttgtatttttagtagagatggggtttcaccatgttggccaggctggtctcaaactcctggcctcaagtgatctgcctgcctcggcgtcccaaagtgctgggattacaggcctgagccaccatgtccggcccagttaattactttttattggtgaatagtattctgttttatggatatatctcaacttgtttatcagttcatcttttgatggacattttgttgttcctagtttttagtcattatgaataaagctgcaatggacattcaagacatgtatttgtatatacatatgtttcatttttcttaagtaggtatctaggattaggattgctgggtcttataagtttatatttaacttaagaaactgtcaaattttcccaaggtgactatgctatttacattcccatcaccagtatgtgagtgtcccagttgctccacatcttagttagcactcggcattgtcagtcttgtcaatgttagccattctagtgcatatctaatggtatctcattatgattttaatttgcattttcccagtgattaacaacattgagcatgctttcatatgcttattgacactcatgaaatgtctgttaaaatcttttgcccattttataaattgagttaatttgcgttcttattgagttgtaagaattctttattattcttaacacaagcctatcatcaggtgtttattttacacatattttcttccagtctgtggtttgcagtttctttttcataatagttacttatgaagagcaaaacttttatttgcataagtctaatttattaattttctttttttcctttttttttaagagataggttcacgctttgttgcgcagact

SEQ ID NO: 195870 - DNA, 1000 bp, Homo Sapiens
attgacattttctaaaatcatatgtgtagatttttgcagttaatgaattaaaaggcctctcagacacctgagtgaaatttattttcaagagtcagagaagatttaagaaaaaaaaatcagtatttatcaatgttctcattttcttttgctgtcaccttaacaaccgcagttcttttgtataacaaaagtgtaaaacatgctttgcattgctacgggtataattattacttgtctctaagtaacagaaaaagactggaacttaatgaagggggattaagttaatttcttttttagctaacagtttcctgtctcttaaaatgcagaccctggtgaacataatgtttgggaagacaaaattaagctttttatttgactaaaatctccactctggaatattgatattaaaatattaagatgatgtttattctttaaaagtatgtaaatttggtattaaataaagccacagaaatcctctctgactactccatccaaagtccacagatcccggggtttatgtgttatctagacatcactcctattaatattcattagatgggtctgcttgcatttttataagctgtgagagaggcaaaagaaacaatcagaattctttaacacacaggcattatcaattcaacatatgccaaatagcagagcacccagatctgaagttaagattcaaatgcaatttacctttactaagctaattttcatgaaaactcttttctctttatccattgttgtctaagctatttaattttctctattctgtgcaccatgcacttcagtttttaatttcagagattattcagcactatattttatcttagttaacaacaaaactcttatcttgcaatcaaactaaagggaattcccccttaagaagaaaaaaaaaatctaaaaactttaaatggttttagtgatcagattacctttatctttatgaaccttcttaagcaaaccctttccaactcccgaaagcatttattgatgtgaattc

SEQ ID NO: 195871 - DNA, 1000 bp, Homo Sapiens
agacattttgagacttaagtataaagttgaacctctcactactctccacttgtgtccataatagacagggtgatccactcatgcacttgtttcttctgagctcagcttgtttctttgtacactgctgctcaaagccaccaccaacagacagttggaaccagatatgaaaaacaatcttcattacaagttgtattaggttggtgcaaaagtaactgcagtttagaattactccatgtttagcactctgtgggctagtacaacaggatagtagtcaaggaagtgtttatgatagtaagatcattattcaagtgactgaccatgttatctaaattggataaaaaaaaaagaaaataacaggaatatactttaaaataattttttcctcatgagtcacaagaatcactatgcccaggtactgtattttctcacctggtttccttagctcttgtgagtgtattttcatgcatagatactttttcaaattgatgttcctgcagggagatggacctggagaatgctattatgccatcttcctgaggtccctcccagtcccaagaattgaaaccaatagaattcccatgtcttgtgctaaccaattctgggaccaggaatacttttctctccctatgttaaatatgattgagaccaagcaaaaattagcctaactctttgcttcataaatacctgttcctgtccacctatttaaactgttttcattttgagaataacttctcagggagtgagtacttcaagatcctcacctcactgggccttccaatctaaaagtatcatgttataaactgcccgttcgaaccagtccatttcacagggttttcagaatgcaggaactatctagtttgtctttgtgagcctaagctgaaactggaaaagaaacctggagtataaggataatctttcaatcacttagcaaatgccacttttgttaagtatccctcataatctcatacagatacatgaacacacctcctacagtgaattc

SEQ ID NO: 195872 - DNA, 1000 bp, Homo Sapiens
tgacaatgctgttggtgctgatttaattataggatgccatggggaaaaaagctctacagttttctaaatggaagggataaagttgaataaacaagagagttaaagcattgttccaggtccagattaaatgttccataaatactctttgaattaaaataaagagaagtaagtaggctatggaatttcgtcgggtaaagtattaagaaaatagaaccaaagcttcatttccttgatttttccaggcgccatgaaattgtttatcactaggaggggtattcactgtagtccagggaccacagtggtctttgaagtctccctgcatggtagctggcctcttaaggcaaacaacatttacagaatgtcaagtctacatagtttgtgattctcaaacccttctgtagtgagggttctccaagacagtgagttgtggtgcttgtggtgataatggcagtggttgcattggtggtagtgatggtggtagtggtggagatggacatgatggtggtggtgatgatgatggtggtgatagaggtggaggtggtggaggtgaggaagtggtggaaatggtggtggcagcagtgaaggtggtggcagtggtagtgatgagagatgtgccatttgcattcagcgttcaaggatgggcaagaatttcaatatgcagagtttgtgggaatggaaattgcaagctgaggaagcagaaacatatatatatatatatatatattttttttttttttgcccaagatggcaaagagaacagctagaatatgactggaatcattcagattagcaatgatgaggaattcactcacagcagtagcctttaggatagagaagctacagtaagtatgagagtcctctgaggatcaacagaacttgaccactgactgggagtgaggatggagtgagagtcatgctctgtgatcctctccatgagggcaagggcggggaattgtgtcccttggttcttccatagggtctgttcctgtgtttagtacat

SEQ ID NO: 195873 - DNA, 1000 bp, Homo Sapiens
ctaaatactcaccatagcctaatttagaccaacataaaatatacagtataagtatataaattaaaataggattaataatcccctctgctcagagtgattgttttctgtctcaaagttaacaggcttttgagaagtaaaccttaagatgactttgagagaagaggaaagtgatagagaagagagtacttgctaagcttcccccatgagttaactgggtacccagccagggaaagaaacccagagaggttaagttaaatcgctcaaaatcatgcatctagtaagtggtagagctgggattcaaatgcagttctgtgattccaaagcccaagttatcttgttgcctccaagaatagtcttctgctttcttagttatattataaaacctttaaacataaaaagaactgggaacaattatagtttctacaggttcagtgcatccctgcaaactcgagaattaaaaatagaagttactgaaaacattaccatttgcaggtgcaggggcctgagcacaaaccagtgactctcaaatttttaaaaatcatatcagaattacccaaagagcttagaaaatgtgctgactctcacaggtcctgattcggtaggtctggactaggtgattccgggaggtgtgtgcagggggatggtatttaatgcacccactgaaaaactctcatgtgtggtatgaatttcctgggtgaatatgggcagaaaagccatgtcgccatttacttgacacctttcagtgccacacacacccttctgcccctcccctgcctagtccagggcttcacactgagccttcctatgacaataggggccgaactgccactggtttctgaggcctcagtgtaaagggcaaatgcgacaccaattccaacaaacctgtaaatgtcaatggctaagtagtaaaagtttctgcagaggccccagagctgggattgattcagttccacctcaggttttttcctgagtgagagggagagacgtaactttggaattc

SEQ ID NO: 195874 - DNA, 1000 bp, Homo Sapiens
aatgtttattggacgttattaatgaattaagatgccctctaatacgtaaaacaagtcagttttattatgacttaatgttttctagatgaaggtaatgaaacagaagtgcagccacaacaaaacagccagttaatgtggaaacaaggtcgacaactactcagacagtaagtgtctcatggtgaaacttataaatggctgaagacaagaaacagttttatgaagttatttttactgtgtattttcaagtcagatgaatattttatctcatacagatgctgtgaaaaagcttaattgaattactgttcctttttcatattaaatactttttctgtgtggtagaacttacgtagttaaaagaattttataactttaaagttattcttttcattgcatattttatgtatgaatatataacattttaatatatgtgcaattggccaggcgcagtagctcacacctgtaatcccagcactttgggaggtcaaggtggatggatcacttgaagtcaggagtttgagaccagcctcaccaacatggtgaaactccatctctactaaaaacacaaaattagccgggcgtggtggcacatgcctgtaatcccagcttcttgggaggctgaggcaggagaattgcttgaacccgggaggtggagtttgcagtgagccgagatcgcgccattgcactccagcctgggcaacaagagcgaaacttcatctcaaaaaaaaaaaaaaaaagtgcaattggtgtttacatgcaattttgttatgttttaaaacttttaaataattggagaactttttgaattctccaaatttgcaaatattgcctaacatatatttcattcattcattcattcattcattcagtcattcatttgagatggagtctcactctgtcgctcaggctggagtccagtggcacaatcttggcttacagcaactgctgcctcctgggctcaagtgattctcttgcgtcagcctcccgggtagctgggactaca

SEQ ID NO: 195875 - DNA, 1000 bp, Homo Sapiens
gagggccagagaagttactcatagaaagccaccccgcaggttagtgtagatgcctcggtcagaagccagggtctgaggacattcagagcaagtactttttctgccacaccaggagatgaggggctgcactacaggtaatccaaaaagaaagattacagggtttaaaatagcattagagagaagggaaaatagccttggttgtgcaggacaacacaatgtgcacctggggatgtggggcagcgagccaggggaggggttagaatataaggaggggacgggggtagaggaaagactgatatggggaagggagaagttaaagggagagaaaatcaggagaggagggaaggacgggaacttagcgacggtggaagacccaggctttataaaggtgctagtgacctggctctgtggctcacgcctataatcctagcactttgggaggcccaggcagggggatcacttgaaatcaggagcttgagaacagcttgggcaatataataagactctgtctcaacaaaaatttaaaaagttagctgggtgtggtggcacatgcctgtagtcgcagctactacggaggctgagatgggaggatcccttgagcccaggagtcggagagcacagtgagctgtaatcatgccccctgcatttcagcctaggggacagagcaaccttatctccaaaaactaaaaagaatctttttaagtgctagtgaataaaaattactcttgccctatagcagctaaatcctatttacttcaggcccacctccttcaataagctaagtttagtgaaaaagcatggaattctctagtgtcccccactcctacccgtccactgatgcttgaaatacctcaaagtaggacagtggctttcaggcagtggagagaagtcttaaattacacatgccttgctgagttaacagattgattggcactctggccctttagagtataatcaaccaaccttcaacaagtgtaagtgattttatcagaaacttctg

SEQ ID NO: 195876 - DNA, 1000 bp, Homo Sapiens
ccctctactcaccagcaggtcagtggtaatcaaaactctgctagagccagaacgaaactccctcataatcacgtctcgttccttttggtccatatctccatgctggaagagaaaacaaatatgcagcagaccaggtaggcacctgggttccaggaaccctggcttcaagtaggacacttctgacgggcagacccacaacaggctggcagcgggcaaacacaccatggcggatacagtgaaatctcgagcatgcatcttctcggtgagccagtccaccttcctccgggtgttgatgaagatgactgcctgggtgatggtcagggtttcatacaagtcacatagtgtgtccagcttccactcctggaggttgggggacaaaaatcagtcaggggctatacccaacaactcactaccaggcccgcctcctgcactgggccccacctctcgttccacgttgatgtagaactggcggataccctccagggtcaactcttccttcttgacaagaatccgaatggggtccctcatgaacttcttggtcacctcaagcacatcagaaggcattgtggctgacagcaaaactacctagtggaaaaaaaggccagtcttagagtgctggttccttcctgaggcctgctcccttccctagccacacctaaaactgaagcagatgcataaaaaggctcaagaatccagtatatggttcccctggcacttactatttttcaagaatcattagctattcaagcaagactgccctcacctgggtgttgctgttgagcttttggaatatgtcatagatctggtccttgaatccacggcttaacatttcgtcagcttcatccagtacaaacatcttgatgtatttgggggctagagaagaaaaaaaaagccaatatatagcatatgattagggaaatgtgggagagatatatccaacttcgctgataaaaaacagagaggagccaagtagtctgctctcagagtacaaagactgatc

SEQ ID NO: 195877 - DNA, 1000 bp, Homo Sapiens
ggtgtggtagccagtctcgtttatgatgtggtcatactgagtagcagtggcatttccctccctcccttcttctaaagttcaaatgagttttctctcttcaatctagaactcccatagtcatttacgtttagaatgattccaaatggagagtgagtctcaatttcctgtgcactgaagcacccgttgtatggtgtataaagatattgggaacactagtgcctttttgggacctgagactatttagatattaaagtagatttcagagccatttaaagcagatttttcagttcctcattcaggaaaagagaatggcagtctcagaactggaagggacctcagcccttttactgagtcttcatgcctttatgccaataaatgcttggatcagaaaatctcattggctcaccaagctgagtcaggaaacctacctgtaataagacatgtgtaaaccaaaactatcaaacattttaaattgttttaaattgatgttttaaccaatggctgccatccattgtactataattgaattaactcgtatagatagaatcctattaggcaggtggattcctttatagactaccatatttagacacacacctccaccccaccttctcttgaaagcttttgaaaaggaatctttcccaaaggttgatttgactatctgcagtggaaaaaccttgaagagttaggtaacctcatttactaaaacaaaaagcaaagtgtatttgttgcatattaagtacttgtcatgagatggattctggaccagtgattttataattattaattctatgtgtatctcttattaattctaataactgtgcaatagagtagatactattgtttctattttacttataagaacactgaggcctgctcaaggtcagagaactagtaagtggccgagctaggaatccaacacacgtccaactccaaggacatttcatagcaagaaatgacagaccatgatttaggctgaggtttctaaaattttgaattc

SEQ ID NO: 195878 - DNA, 1000 bp, Homo Sapiens
gatgaaagtgcctagttagttgagttgttacaattaagggataacatgtgcatgaatgtgccttgtaagttggtaaatgctataaaattggaagttttagaaatagtgggcactgatgttcttactaagtcagctctccagagtggttttcccatttttatcccccatgagggatctgtcatcagtgaaaggaatgatacaggattcctacgtgaagctagagacttgctaggacttcctccccaccgtcaggccccatcctttctcttccctccttccctctcttccctcttcattttgctatcaccaggtactgaaataggtaccagacatctggacatgaataagactgactccttcagatgcttttgggctacccaagggagagagaagcagtgataagaccaattgaacatcatgagacaggcacttcactagagagagggaagctctggccaggcgtagtggctcacacctataatcccaacactttggggaggtcgaggccggtggattgcctgaggtcaggagttcaagaccagcctagctaacatggtgaaaccccatctctactaaaaatacaaaaaatagcccggagtggtggcgggtgcctgtagtcccagctacttgggaggctgaggcaggagaatcgcttgagcctgggaggcggaggttgcagtgagctgagatcacgcggttgcactccagcctgggtgacagagtgagactctgtctcaaaaaaaaaagagagagagagaagctctctatgctgtaagggtgcaagggtgggctgcttgttcagagtgccctctagagaaggtgacaccagaactgggtctcaaaaagccaaatagaattagccaggtaaagaaggaaaggaagtatatcccagacagagaaatgacatgcttagacattgaatcagatagttttaagaaagaagagaaacacaaaagtaataagacacaaaataataatggactaaacaaaataagaattc

SEQ ID NO: 195879 - DNA, 1000 bp, Homo Sapiens
tcaatgacttttcaagaaagtactgtagtattaatatttacctagacttaaggttacttaccactttttaaaagagaattttcttataaaagtattacgcctggacaaaatttagaaataaatctgatttttatgttaccacataaaaaagaatgcctttgttttaatccagcaaagaaatagcaaccgatacaataacaaaacagctcattttaaaataaaaaaatttaaagtagccaaaataattttttcatgagagttcttacataaaaatggagcaaagttgtttttagaacattttatttttaaagttatccatcatattttttcctacctctaacttggataagttttgcatgccaaaggtaacatttatgattacaacataataaatgcattatctccaatgtctgaacatcaacatttttgaagatgctcattaagcaacatttataactgaaaacagggagctgttatttcagagcaataattttaaaatgctaagttaacagatctcaattcactctttataaccttacaagtgaggatgttaaaatatatatacttgaacttggtttgcccaaaccatcaaaatgaattccatttcttgtggtctccttcccctacccaattcactacatcctttcatgcaactaataatagtagctttagggttaccttaaacacaatgtaaaagaatgaaacatttttaacattttaacatctttggcccagtccactatccgtctgcctgtagaggtgaaaatcatctcatgtgtgcggcacaatgccttggttatagcacctatcatattttcatatgtctgtccttttaagtaggctgagctcctaccgtggtcccccaaacttagcatatagttaagtactcaataaatgctaactgaaagaatgaattcattacaataaaatagatgaatcttaaagatcaatctgagggggctaaaaaagaccctaaaccattgttcattaagatgaattc

SEQ ID NO: 195880 - DNA, 1000 bp, Homo Sapiens
aaactgtagtcccccaaaataaaggggacatataatgaaatcggaaaggaatttgaaaaagtaatgatcaaatattccccaaatttgggatacaacctacaggtataagaaactcactgaatccgcatcaagataaacagaaggaaaatcactcctaagaacataatctaaaactaataaaaaccaaagataaaaagaaaatactgaaaacagccagaggaaaataaataacacattaataatgggaaacaacacatgaatgatagctaaattctcaacagaaacaaaaaaggagaaaagcaatgagatgtcatctttaaaatggtaaaatgggccaggcacggcggttcacggctgtaatcccaccactttaggagaccaaggcacatggatcacctgagctcaccagttcgagaccagcctggccaacatggtgaaaccccgtctctactaaaaatacaaaaattagctaggtgtggtggcaggcgcctgtaatctcaggtactctggaggctgaagcaggagaatcgcttgaacccaggaggccgaggttgcagtgagctgagattgcaccattacactccagcctgggcaacaagagcgaaactctgtctcaaaaaaaaaaaaaaaaaaaaaaggtaaaatggtaagactgccaatacagaattctatatccagaaaaagtatccaatagaaatgaagaggaagtaaaaatattttcagagcagagaaaatagcaaatttgtcatgagcagtccagcactacaagaaatgctaaaagaagttcttagaaaataagtatcactagataaaaacatagatatacagaaaacattgaagagcaacagaaatggtaaatatataagtacatataaagaattatatttattttcttttcccatcttaatttctttaaaaaaaacagaaagtaaaacagataaggcaaatcattttaaaaaacagcaaaatgataaagccagtcttatcaataattgaattc

SEQ ID NO: 195881 - DNA, 1000 bp, Homo Sapiens
ttaggaaagcaatgaaatgcactgtaaaataatatagttaaatatgctaatgttactacctaaagtatctccaagcaagtaggaaagaccaagaagagagacatcatcagctacaatagtctaaatatactgtagcgtcttgtttagcagctttaattcagaagactctaaagttcttatgtagaatcagctgtcaatggatcagtgaagtggtcaatatttctaaattatttttatgaattgtcataataacccattaaagctacaaaatacttaaactctctctctctctcacacacacacacacacacacagacacacacacacacacacacactgactttttcttttttttctttttttttttgagatggagtctcactctctcacccaggctggagtgcagtggcactacctctgctcactgcaagctccacctattaggtttcacgccattctcctgccttagcctcccgagtagctgggactacaggcgtccaccaccacgcccggctaattttttgtatttttagtagagacagggtttcactgtgttagccaagatggtcttgatctcctgacctcctgatccacctgcctcggcctcccaaagtgctgggattacaggcatgagccaccgcgcccagccacactgactttaaaggaaagtaaccgactttaaaggaaagtaactgactttggttttgtttgctttgtttgttgtctgaatttgctcagatggcattaggtggatgtgtgagtaggtgggtaaaaccaattggtacaggtgagtgatcccagctgtaacacagaagttgttaagatgacctccaaactcaaatcttaaagcagaagtgtccaatcttttggcttccctgggccacaggaagaagaagaatgtcttgggccacacataaaatacgctaacgatagctgatgaactaaataaaatacagaacaactcataatgttttgagaaagtttacgaatttgtgaattc

SEQ ID NO: 195882 - DNA, 1000 bp, Homo Sapiens
acatgttttattaacttttgtaccttctccactgtgccagacattgaaactgtttgatcaattcattgaattaaaatagaacaaactatcctaaaaaccctatcataatccagtaattggggtctgaaaaattcagttgcataaactgtggcattgctttattgcaaggttaatgaaatggcttggctggacttgtaccactagcaggcagtgaattctgaaagtctttctctgtgatccaaatgtggcctagtcccagctgtggtttgttgtcaattggtggctgttggctggtctgcttagttatatcagtgaggaaggggacaatgttagaccttgtactgctgggacttagtgatgtcactgatgacaggaagcttctagttggttggttagtttcattggcctgatctggagagagtggactgagaattactggggctgtgagaacttgccttccctagaatcatggcctgtctttttcccacacaggaacttgagcttgttcctccctacacaggaacttgggggccaatagcattgtccctgattttcatgttttcactggttgtattattggagaattttactgtttaaaatgtaaatgaaaaatttatattctcattcagttcacatcagcaaagcattactcccatttagggatagtttttttttttttttaaatgacatctgctaaaatgggatcctttataaatcagttttagttacgatattattttctccaaacattggtgataactttaatatgtatgtgtgtgtttgtttttaaaggtgtttgaagtggtggaacgtgtagaagagttaagaaggaagtggccagtagcgtgggggaagttagatgatggcagtattggtgtggtgactccatatgctgatcaagtgtttagaatacgtgctgaacttcgaaaaaagagattatctgatgttaatgtagaaagggtgctaaatgttcaaggtaagtgtcaattgaaatgaattc

SEQ ID NO: 195883 - DNA, 1000 bp, Homo Sapiens
tagattctcatagcagtgcgaaccctattgtgaactgtgcatgtgagggatctaggttgtgtgctccttatgagaatctaatgtctgatgatctgaagtggaacagtttcatccccaaactatccccacctgaccaccccatccggagaaaaattgtcccatggaagctgtccctggtgccaaaaaaggttggggaccagcagttcacagtagccatctccctatggcggtgagcaataaactcaactttgccttatgaaaaggttctttcactggtgtttgagagaagccggcatttgacaatatatgtcaacctaaacaaacaaaagtattttagggctttgctactcagagtgtggggttggtttaaaatgcagggtctcaggccccacctcagtcccgtagaatcagaatccgcattttcacaagatgcccaggtgactgtgtgcacattgcaggctgtggtcttgggcattattcttctaaagaatgagtgcaggctgggcgcggcggctcttgcctgtaatcccagcactttgggaggccgaggtgggtgaatcacaaggtcaggagttcgagaccagcctggtcaacatttttaatagaaaccccttttctattaaaaatacaaaaaattagcttggcgtagtggtgagcgcctgtaatccagctactcgggaggctgagttacgagaatcgcttgaacctgagaggtggaggttgcagtgagccgagatcacgccactgcactccagcctgggtgacagagcgagactctgtctaaaaaaaaaaaaaaaagaatgagtgcagatgaaagtttaaactttaaagaacagtggttttgttcttttgtttttagtcggtttatcaccaacagaataggagaaagatttggattaaaatttctgctttgtttaaaaattcttcagttttgtgacctgccttaagaggatgagtgggtttttcaggtatatggggaaacatttatctgctgaattcc

SEQ ID NO: 195884 - DNA, 1000 bp, Homo Sapiens
tactgctaaaggcctgggtcagcaagcgcctgaggagccggggaagtttctatcagcaggaattgcagttctgatgaaattcataacatgcctgtcatacagtgcttgagaatatggaggcccagatctcagattaatacccagaaagccacattttattcatgaatgccaagtcacactaacctggggaagtccttggagtcttaactgggactttcctgaccgctttctgacctgcaccatcttttttttttaactgtggtacaatatacacaccataaatttatcatcttaacaatttttaagtgtagaatttaatggaattaagtacatttacattgttgtgcaaccatcacgactattcatctccagaatgcttttcatcttataaaactgaaattctgtactcactaaacactaattacctatctctcttccctcagcccctggcagccaccactctagtttctatctctatagatttgtctactctcagtatctcatataagtggaatcatatactatttctcctttcgtgacttatttcatttagcatcatgttcgcaagattcatccttgagacatgcgtcacccctttttgtgtgaggaggaagcggcagctacacccctagaagcatttagggggtgtcgaggaaccaacacattgagtctccgtgaggtcattgggtactgacaacaatccaaggtgagatatcaatgctagccttacttgtaactggtgatgataaaccacgatcagcagctcttgacattccaggggttctgaaaagaattctaggagagaaggactcccagcagaaaagcactgggaggcagctcttacgtgcaggcagtcactacatggaaacttgtggtagggtttctcactgcaggggaaggctcactatagcagcactttctctctctatttcacagatgccatcaggagggatctttggcttggggaaacactgttttctcttcctgcctttgggtgact

SEQ ID NO: 195885 - DNA, 1000 bp, Homo Sapiens
ctcaattccagcagcatcttgcataggatgcttttgctcctcgccttcacccacctaaactttgtcacactccaatcccagttcaagttcctgtttcctgcttgaagccctccctgccttctaccccatagcagtttgcccccgaggcagtcctgggcagctgctgggctgcctgggacaggctgagtcaatctaactccagggaaagctctttactggctggctgcacacactttcctgctttccgctacagagcactaaatatgtcgctggtactgctcagaaagggctttcaaatgctttaaaatctgtataaagaagacactagttacatagatacgaagtattctgctctaaaagtttttttcccaacacaaaatgaagcttctcttctctttaacttcctaggattcaagctccctcgggtgcacttacaaagtccagagaagcttgcagggtgctcccagggcactgactgagcaggagtgggaaacaggttgctaattctctaggcccctccctctgccagcagaatcggctgcattatgttagggtcaagtcacaggaggacacaggactctcccaagcatggcctaccccaactctaggctctaggcccagggggctccacctccctccccaaacacctcatgccctaacgctggcttcactttgacctctacacccctttctgtcatggtctgtctgctggaatgcccttcatttgtgttataaggcccagttcaatgttcacctctctaggaagacttctctcctctccccaaatgaagcatgagctaccctcacctcctgcatactcctgcagccctttgaactcggttttcacttctgttttttttgtttgtctgcttgtcttgctgttgcacctctctctacactgaagctaagattcaccattttgcttcctcctaagaattcctcttacaccacaacctctcaccctttgtccttgagtttctcagacacccaacttgaattc

SEQ ID NO: 195886 - DNA, 1000 bp, Homo Sapiens
gaagcacagaggtcagggatccgcttgaggatgcagtatgtcccttagtagagctcaagcgctgtgctgggagatccgctgcgctcttcagagccagcaggcaggaacatttaagtctgctgaagctgtggccacagcagtcccttcccccaggtgctgtgtcccagggagatgggagttttatctataagcccctgactggggctgctgcctttctttcagagatgccctgcccagagaggaggaatccagagaggcagtctggctacagtggctttgcccacctgtgccagttcgaacttcctggcagctttgtttacactctgaggggaaaaccacctactcaagcctcagtaatggtggacgcccctcccccagcaagctccagcatcccaggtcaacttcagactgctgggctggcagcaagaatttcaagccaatggatcttagcttgctgggctccgtgggagtgggatccactgagctagaccccttggctccctggcttcagctccctttccaggggagtgaacagttctgtctcactggtgttccagctgccattggggtgtgaaaaaaaactcctgcaactagctcagtgtctgcccaaatggctgcccagttttgtgcttgaaaccctggaccctcgtgatgtaggcacctgaggtaatctcctggtctgtgggttgcgaagactgtgggaaaagcatagtatctgggctggaatgcaccgttcctcacggcacagtccctcgtggctttccttggataggggagggagttccctgaccccttgcacttcctgggtaaggcgaccacccaccctgcttctgctcaccctccatgggctgcacccactgtctagccagtcccaatgagataagctgggtacctcagttggaaatgcagaaatcacctgccttctgcattgatctcgctgggagctgcagaccagagctgttcctattcggccatcttgccagccatcagttgtgaattc

SEQ ID NO: 195887 - DNA, 1000 bp, Homo Sapiens
ggatgtattcaaattaagctatgtaacaagactgattttcaaactcctttcttcttagacagtgatatagtttgggagtggggagagttttaaagagtttgaagaaaaaagtcacgatagacaattgtttctgttttactcaaggaattaactaaaagatatatgactttagagaagtcatatattgagccacttattgcatgagttctaaataaactccacttccctgccctgaccctaaacctcttgacctcatttctcttctttaaaatgccttatttctctttcctttacagtaaaactccttgaaagacagtccatagtcttgtttgcaatagctatcttcccactctcacttgaacccactccaaccaggcctccccatctccatgaacctgatcttgtcagagtcacaaggacctccacgatctccacattgctaaccaaatggtcaatgttcagtcttcatcttattcagctcatcagcagtccataacttcctcttccttgatgcatattcttcacctagcttccaaaacctatacttctcctggcttttctctgccttaccggtaatgccttactggtctcgttgctggctccttctcttctgccccactttatgcacagaaatgccctagacctgccctttctctacctatactcaccctctactgcttgtgagcatcttgcggtcagctctccacctacccagccccctgcagtttgagctcaatacctgtttgttgaagtgcactgagtccggaaagtcggttctgtcagtgagcttctacagaaaggaagcctttgaaaattttttttgagaaaagaagacggggcaagaaggggggccggaataaaacactgcactcacttcactatttaccctcttatctgttatctgtagagaggaggcaacactgaggagcacagtgattctcagacttagagcacacccaaattattaaaatcacttgttaaaatgcgggttcctgaattc

SEQ ID NO: 195888 - DNA, 1000 bp, Homo Sapiens
tggtatttgttatcttaagggtgtcactattttcagtctgtcagcagtcttgtttctgaaagccatagacaaaggtttcctttatactggattagccttgaatttgaagaaccttctccaagaacatatcttaaatatgctttgaatttatgctgaacaatgctaacagttattgatttagaagggcagcagaagaatcaattctgcagccaaaatacaacttctgggcataagaaaattcctttagggttttgagatgattcggatcaaaactgtccatcttattataatgcttgatgtttctaattaaatagttgatgtcatccaagaatcccttaaaaatggggagaaaatacacaaactttacattgtgggaaaactaccttacatcttgacggaacctgaaaactttctctactttatctggtttcaaattatgcaagaaagtccccatgaggacttcattaaacctgccagagttttataaccaaaaacctcactggaacccccacttttacgaatctatgaaagtaatttaacccctctgtgttctgcttgcccaagatcagatgcaaatactattaaacagtatatacagtttaattctcttgagttttggtgatgaaaaatcctatccaaatattatgatccttgcaatacgtaatgtaaccaaattaacgatagctccaggtggaaattaacaaggccagggctactcacgtttcctctcatctattcccatagtaacagctaatgtattatattgctaaaatatcttatattcagttttatgtctgaacttggtgttgtgtcataaagcgtagcattcctatccagactggattcttaatatgtgtatcctcatgaaatttaggagagtttcgtgtctgcaaatcaacacttcatgtgcatagtctaaaccacatgcagataaaagcaagtcagaacctaccaagactctcaccatagtgaacctacacatggtatagaggaagaattc

SEQ ID NO: 195889 - DNA, 1000 bp, Homo Sapiens
cctccctgccagagttctagagtttagaaatgctttccttgacgggttgcaagaaaagcttgctgctgacacagcacatactccttctcagccacggagcaatgaatggtctgaaaaaatggagaatttagaaaagtctgaaggggtgagaaaaaaaaacaaactaatcattcccagctcagaatctataacaagaagccgctctcagatgcctcgaaacaagcaattcaagacaaacatagtcccttgacacagataaattgtaaaattaattataagttttctaggatttcaggtgaaatattgaaaactctttacagaaaaatctaaagcccttcaacatcatgtctggctctgtcagctttcagattaagcatttggggaaaaaatttaagataaaaatatttacattacagaggagaacctcattacatcatgtttcacggacttgggagaaaaattgaaagtatgaaaaggagagaaaaactgctatgcgggccattagctaaagcttcaaaatcactatattatctgaagtaaaatatgaaatcaggtaaggaagcagagatacttctcaaacaatattctccaaaccagagcttctaacagtagaggtttcaattccttgggtaacctcaggaaggtataaagagagttgtggagactcacaggaaacccttacgttgtaaataacacagaaaccagaaccgaactgggttaatcaaaagagggtcattatttgttcatctagcttcaggtaaagcttgatccagagttcaaagtacacacccaatacccagtttctctcctccccaaagctcaggaaaaagaaagagagagtggccacaaaagctgggggcagtcatttgggggccatgagctttagaatggccaaaagaggaaggggaagaaatttgaaactgatcacatcattactgttggaacaaggtccacttgaagccagtgagacgccagttcttaggatgaagtgagagaattc

SEQ ID NO: 195890 - DNA, 1000 bp, Homo Sapiens
ctttaataaattatatgtctgggcacatatagataaggacataaaataggtttctctgaaaatattcgtccctgttcctgtccatatttaaatattggcaatttacctttctagagttttaaagttattttaatttttatgttcttgtagtgtcagaaacaacatttattcaaggcatattgttaaatccatcatctggagaaaaacatggtgggagacccaagacaaaatacctggtgtcttggtgatggaggagttaggatttacagaaaaagggtagctgagacctggctgaagggattatatagtttttcatgtttcttaacatatcaccatggatttagtggcttgaaaggacactcatttacattctcatagtttctgtgggttaagaggttgaatatgggttagctgggtcttctgtttagggtcttatgaggttgaaatcaaagtcttggccagggctgtgatttcctctgaggcttgaggtccttttctgagttcactgttattgatagaattcatttccttgaggttttacataggaggtccttagctcctaaaggccaactactaattccttgccacatggcccttccacatcatggccctttgccttttcaaggctgttggagagtctcctccagtatgctgtgaggagccttatctagggtaatgaaatcatgagactgatgagcttatcacattcaggagccccacccacactcaaggggaaggaatcatacagggcatgtacaccagggggaagaatcttggggaccatcttagaattctgcttaccacaggaaagtaatgagagatgtaagattttgctgctgagacttgcagaaagttatcgccgtcattgtcactgtcattgtcagcatcatgatcatcactgacacattttttgtcatcctagaagatgtgagtgaactcacacaaagtccaaacatttttagtacatgatcaagaagactaactagacagcttgagtaac

SEQ ID NO: 195891 - DNA, 1000 bp, Homo Sapiens
aaaacagacaaacaaacaaaaaaacaaaaaattaacaacactttgaaaatgtttaaaaacattttttaaaaataactcacaggctatacaaaaataggctgtgggcaacatacagtcctaggatcatagtttgctgatctctagcctaggcttcaagtagaacaaagaaaaaaaatcaactgtgccctatcctgaaaaaaagagacagaaagaaagacctcaccaaaacaaacaaacaaaaaaagccctcacttactgagaattaataataacatctctgtccttaaatgtgttgatgtttccaattttcagtatctacatggtccaggaaatcccaagccaagatatgcaattaaggcagatctgggtaggtaatgctgatagatgctcaggggaagcaacaacataatttctggtaagcattctctcaaatcagatttagaggagcaatgcatgactcaaactaaatattttaaaatggaaaagaaaaaccccaaagaatttctctgttggaattgtcaaatatttaaaatgttgaaagagaaaacaaaattgaagatatgtctaggatcctcaatgatctttaggtgttctaaaaagaaaaagatgtgtaagaaataaaaaataataagatgaaccagtatatttagaaaatattcaaacaaaatttataataattaacactacagttattgaaattagaaacagtagatgagtcaaggagtagattggacatggctgaagaaataattaataatctagacggtagatctaaagaacatacaaaatacagcacaaagagaaaaagggattgaaaatataaaataacggttataaaagacaatggctggagtgagatgggctaaaataatttgatcatagtttcagatagaaaagaatacaggggggtatggggggtaacattcaaggtgaaatactgagaatttttcagaattgaagaaagtcctcaagcttcatattctgaatgcataatgaattc

SEQ ID NO: 195892 - DNA, 1000 bp, Homo Sapiens
ttacccttaatatcagatatatcagttctgcatgtctttttattgccaagtaattttccacagcatggatataccacattttatttatccatttgtgagcttcaaatgttgactgacacaatattgtagaaaggtaccaagagtgaacctggtttgtgtattagtttcctattgccatagtaacaaattgccacaaatataatgtcttttaggaaaacacagatttattatattctgaagtcagaagtctgaaataagtttcactgggctaaagtcgaagtgttagcaccacttgttcttctggaggcttaggggagaacttgtttccctgccttttccagcttcttaagaataccagcattccttggctcatggccccatcctctgtcttcaaatttcacagtgtagcatattggttttagtcagggttctgcagagaaacaaaaccaatagaatggacagagacaggatttattataaggagctggcatggtattgctataaaaatagacacacagatcaatgggacagaatggagaacccagaagcaaacccacataccttcaaccaactaatattcaacaaagttgacaaaaatacacaatggggagaggacagtctcttcaaagaatgatgctgggaaaattggctagccatatgcagaaaaattaaactggacccctgtctctcaccatatacaaaaattaactcaaggtggattaaaatcttaaatgtaagacctgaaactataaaaatcctggaagaaaacctaggaaaaactcttctagacattggcctagggagactttatgaataagtcctcaaaagcaaacacaataaaaacaaaaatagatacatggaactcaattaaactaaaaggcttatctacatagcaaaataaataatgaacagagtaagcagacagcctacagaatgggagaaaatatttgcaaactgaacatctgacaaagggttaatatccagaatctacaaggaattc

SEQ ID NO: 195893 - DNA, 1000 bp, Homo Sapiens
cggtggtacaatctcagctcactgcaacctccacctcctgggctcaagcgatcctctcacctcagcctcctgagtaaatgggagcataggagtgcgccaccacacccggttaattttttctatttttaggagacacagggtttcaccacattgcccaggctggtctcaaactcctgagctaaagtgatccgcccacctcagtctccgaaagtgctgggattacaggcatgagccaccacgcccagcctaacacatattcttagatcacaacggcatcccaaagcatcactttaaagttcagataaagtaacttcaacccttgctctgacaaagtttcgtatcttacaactccctaccttctacaagtggcatgtttgcagtctcagttcttcccacaatctactatgacccctctctccttaagaaccaatgtcaatattcgtgagactggttagcagaaaactgtcagctaaatcacatcctgacccttctttctgtacacacatttaaaacaacatcttgatgcaaactgatataaaaggaacaatttattacagatgcaaaagccaacttaacattaaacttttgtatttatatcaccataaacaatgaagtgtaagagaaaacccaattgaacagtttggttcacccatgccttcataacttcaaaacccaataatcatcaatacataatgatgacaagataaccagttcttgaatattaagaaactagaattgttgctttagcatgtttaagactatgcacctcccccctcttccctctctgacacacacacacaaaataacagcatcaacagcatcagcaacatcatgaaatacctacaacaaaaaatttcaaccctggcagcacttgagaatgacctaagaaatttattttaaaatatccattatgtgggttctttcatcagagattctgattcaattggtctgggctcgaactcaggaatcaatatttttttaacagcttcccaaggaattc

SEQ ID NO: 195894 - DNA, 1000 bp, Homo Sapiens
tgatgatgatgatggtagagatgatgatggtggcgatggtgatgataacagtggtgttgaggatagaggtggggatggtgatggtggtgatggtgatggtggtgatagtgatggtggtggtgttgaggataaagttggggatggtggtggtgatgatagtgatggtggtggtggtgagcgtagaggtggggatggtgatggtggtgatagtgatggtggtggtattgaggataaagttggggatggtgatggtggcggttgtgatgatgatggtggaggtaacgatgatggtaggagctgacacccactatgtgccaggcactgttcaaagtacttgccatatactcacacaatgtatatctccaggtggtgggcatgaaaaatgtgctgaattaatgaatagagatgacttgattcctactaccttaagttcacacctagggctagagggtaagtggaacagaatgaaagaaagatgggagaggggaaattgaaatagaaacaataatcacggtacaataagacagagcagtggttaggtagatgggctctacagccaggctgccccagtttaaatacaagctttgttacttattgactctctggctaaattaatgaacctctccgtgcctcagtttcctcttccgtaaagtggggatgataacagcatctacctcatgggttggggtgaggattgtatgagttggtatgtctccatatctgaacagtgcctgacacgcagtagatgctcagtaacccatgcttcttcgtcttcttctaaggtgcttagcagaattcatctaagccactcagaggcagacttggtcacttcaggctcctggcttggcttaaccccagacaagctctcaatgttttatcggtcatctttgctgcctccatttatgctaccatcccggacaccaaaatccctgattctaaccaaaactgacttttcattttgcatctttatatcccctgccctctcccatggaaagaattc

SEQ ID NO: 195895 - DNA, 1000 bp, Homo Sapiens
gcaccattagttgaagacattggcctttccccaatgagtgttctcagtgcctttgtcaaaaataagttggctatagatactttaattaatttacctgtcctctattcttttctattggtctatgtgtctgtttttatgcgagtactttgctgttttggtaaccatggctttgtagtatattttggagtctggtagtgtgtgatgcctccaggtttgttctttttgctcaggattgctttggctatctggagtcttttgttctatataaattttacacttctttttccgtttctgtaaacaatatcattggtattttgatagagattgcattgaatctgtattttgctttgcgtagtaccaaactgcttttatgaagtgcatataacaataccaaaacctggcaaagtgagaagtacagattaatattaattataaatatcaatgaaaaaaatctcaaataaaatagaatcaaagagcatctggtagcctattaaaaaataatacatcatgaccaagtagcacttattttaggaatgcaagtaggatttacatttgaagaatcaataataaaataaagaggttagggagaaaaaatcatataatcatcttcaagatgctgaaaagatatctgagaaaatttgacacttattgttgattttaaaagccattaaagtagaaatagatacatgcttgacctggtcaaaatacacttgcatgtgcacacacacacacgttgcaaaaaaaaaaaccttcaaaccttttatctattgagggcatttcctcaatagatatcatcaaaatgatctatcatcacaataagtcaaagaatgccaccatactgaaaaaaggtatttgtgaatgcaagaaaacaagaggacaaaattagcgatgtaaaacttggaaaggaagaagtacgactcataccatttgcaaatatgaatacttataactccaggaaaccaaagagagtcagctgaagagataccataaacaagaagag

SEQ ID NO: 195896 - DNA, 1000 bp, Homo Sapiens
tcagctcccacttataagtgagaacatgcagtggttggttttctgttcttgcatgagtttcctgaggataatggcttccaagtccatccatgtccctgcaaaagacatgatttcattcctttttacggctgcacagtattctacggtgtatatccacaccattttctttatccagtctatcactgataagcatttaggctgattccgtgtctttgctattgtgaatagtgctgttcttgctacctttatatctagctcaggaattgccaagctgtggtcactgacactattgtcttgaagagatattctgacaaccttgtctctatgaccccagaaagacaattccattagtcctatgtgggaaatatttttttttaactgaggaccaagcaaacataaagatgattaaaatctgaaaagacagataatgcataacattctgaagtgacttgctactacttctgaagaaactgaggtccctggggattctttgtagtccctggggcccctctattcctggaggcacaaggaacacaggcagtgtgccccctcctctgagccgtgacttcccttttcatctgtggagattcctatttctcaaggctggcttcaaagtggattgcagttctccccagccttttcctctttatgctatctccccacactaactaacaatttttcattcaacaattttactattaatcactgtagaagaaaagattggtgctaaagaataaaactgggaagttacagagttcccaaagttgtagtggaaatgtgagattttgaagccaaatgcttttctctgatggaacaaagaccccagcatcctccagtttctctctgacagtcttaaaggtaaaatttaataaatatcatatattactaaacctcctccaaatccatttctttttgaagatctctcaaaatagggataagagtataattaaggtagattaattaggcactcaagtgagtgccttgcatgtcagaggaattc

SEQ ID NO: 195897 - DNA, 1000 bp, Homo Sapiens
gatgatcaccacatctttattcataaaagtgagaaattacaacataaatatccaataacagtatattaattaaatacatttgtatctatcctaacaatggaaaatcttacagccattagaagagatgatgtagactgcatatactattactagaaaaatatttgcaatgtactgttgaattcattatatttttgtttcatttatacacacattggcattgaatgatccagaagaatataaaccaaaatattagcgatgtttgttaaatgtcaattacttttacaaatgaaaatagtgttgcttttatcctttaaatatcaacctcaagacagtacagatctttaaagaggctttttaatttcctatgctcagctatacaacaactacatatgaagaaatcattaaagaaaaaagtctaacataaatttgtcagcagcataatctttttttaaagtatttttatggtaatacttggacaataaataattatttttccaaaataaaaaattataaagctattttttcacaagtttataaattaaaagttatttaattatatgagaaaattctaaaggtataattttgagtgaataaaagaggatataaaattaaatatacaaaatacatacaatttagtaatacacacaaacaaacatacacaaaagagactgtttacaataagtacttccgagtgagggaatttcagcaggctttttcttcttttttactacatttaaaagttttctatagtaaatatgtattctttccaaaatcagacaaataataaacactataaattgtttaaatgaacatgggggacataaaatcatgtactatatatgtttattttatcaataatggaaacaaactaaagattttgcatcccaggcaagatgtagtgggacgaaaggcccttttctcattgtggtcacctggaaatctctgatagtgtcttctgtgtttaagatctgaaaaatggagaatgtgtggctctgaattc

SEQ ID NO: 195898 - DNA, 1000 bp, Homo Sapiens
ctagtaccctggggtgttgcactttcttttgtgtttcccaaccctctacccatacttttgtgaatattttatttattaaacgcctcaaattatccaatttcactgtctttcctgctttctctcaaaactctgactttttacccataccatgttttctctcaaggtcagatgttaatgactcaacctgaatggctacagacattcactccatgctgagcaagggaagttacctggataagagaatgacagttatggggagatggcaaaatactagacctcaacacctctgattgtgttggcttgactagactgttgtttgatgagtcctttaagttgcaatatcatgtcctgacttcagttcacagtagtattacttactacatctggaaggtggagtatgtacatgagggccctatgaggacacagcccatccgttgtgcattctgtaggagagaaaacaacaatgaattcctagaactaagaaaaatactcagtggacaggaaagaagtagcaaggggaaggctcccagaggtttagaaagttgggcctcccaaaatgctcaaactcagagcaacatagggtgccttggtctggacaaggatcaactgaggcatggagaggttcgagagggaaaacacactacagggaggaaaggtattttacaaaggtgagctgactggaggtgaacctggcttccttctcaatgcaggatgggaagaggcagaagagggactgggaggctgtagcattagtagtgtctgtaggccagatagtggtgagatgagatttggaggtgctttgaagggagagggcaagtttcagttgtagagagaactataaaacagggctgaagtgagtaaaatgctatgcaattgattgggtgattattgatcttattttctcctatttcttaaggggaatctggttgggaccatctcatccctggttttggagaaccaggttatacctctctctgtagaggcagagaaaagcagcata

SEQ ID NO: 195899 - DNA, 1000 bp, Homo Sapiens
caggtagcctcttctcaggcattcttgacttctttgtagtataacatattatcaacccctttaaatattaaaagttaaaattaaatattatataatttatggttcttgtagaaaaactgatatacaaagaagaaaaatttaaatgtttcataacctttcccatctagaaataaacactgttacaaagttggtatattcacttttattattaccctccccttggcttcccaaagaaagaaaagcttataaaatatacattttattttttaaaaactaaattctaaagatatttagtaaaaagcaagtttccttttttctctcacctgcatttccagtcctgtctctagaaataagcattaaattggtgcaagtcttttggcatttttttatacttttatatacaccaggcattcctacgtcaattttttttgtgtgtgtaaacagtaccatgctataagtactattctgtgaatgtgttttccctatcactgaatatactgtgtgtgtatatacactgaatattcctgtcagtatattcttagcaattatgtggtattctgtaatatctttatcatgatttatacagtcagctattaatgaagatggatgttcgtagttacaaacagtgcttaggttccttggatttctaggcacacatataaatgcttctgtaatgtacatttctgaaagtgaaatcctgggtcaaaaggcatgtagatttaaattttgatagattaccaaattattcttcagaaaagctgtagcagtttacagtttcaccaagaaccacccctgatggttgacttactttctttaggcttattttaagcatgagtttttctccaaatactttagtcagatctcttagatttttatgtgtaatactcattttgtttgtatttgagtaattttcacataggaagagttaaggagagatatctaagtaggtggatggattgtgttattttttattaatttttaatttcactacagagaattc

SEQ ID NO: 195900 - DNA, 1000 bp, Homo Sapiens
tgaagggaaatacaacggtcatttaggttggtgcaattctttttttaggctatttcatttttatgtgaggcagaaaatggaactacataatacatttctacaatttatatattcatcaaaaccatttacaaaattactactttcagcatattttaaaaatgagattgcttaacaaattatgtttatgtagtcaaaacacaccattaaaatttattattagtcacttaatggaagttaatggtgagtttataaatgaagtgctggcttactttgatatagtctaagagcaaccaaaaatagaaattatttcccagaattctatgtatttataaagtgcaaaataagcaattttagcaattctcaaatgtaggttttccagatgcatttaatcctaaatacacttgtagaaacagaatatttttctgctaagtcaggtatgtctaacttatccatcttacatgtaaaaactatcctgactgaagtatttcatacttattaaaagataaaaaactataaagatacagaaacattataaaatatttttaatactctggggggtcgtgaaatttccagtgaaactatctcaagtctacaaaacaaactaaaacaaaaagccacaaaagtaaaataattatattattggtaaatactcatttactgaaaatgaatgcattatagaattaaagatagaaagatattgcagataaatttaccaatgagaagaaattctgtatgtgcagtaaatatttttaatagaagttgtttgggggcagtttttgctcaggaagtctaatgtgaattcacctactattttccagaatgaggggcactcttctgaagaattatccaaaaaaattatcactcctaatttgtattggttcagggtagtataaacgctaaaatatttaaaacagaattcaataatgcttcttctacaataaagggaaaaatgatcttaaaattgtaactttttataaagctgcaaataagataattttta

SEQ ID NO: 195901 - DNA, 1000 bp, Homo Sapiens
tgatgagattatatatctaacggaagaacaggtatggatgttccctgggtaatcaggcattggtgggttagcagccatcttttttatcattccactcatatacaacacatagctcagatttgttctaaataaacacagtagctgttaaacatatttaaataagaaaagtaggaaccaaaaaggaatactgtgaactcttctgtctttccttgtctggcaccaccaattatagaatggtaaaacatgaaactttgtggtctgaaaaactttttattctgaaaactactgaatgattaagcaagttttgctaagctttatataaatatattaaagcagggaaagaatttgggtctttcctgttaattctgttgcctattcactccttttctactgaatctatatcacattgtttggtcctctgcaactgtgaaaaaaactactcttcagtgaagactgagaaagccaaaagttagaagaaatgttttgggtttaaaaacaattttttttactcccccagaataaagttttttggaggaaaaaagaaataaaatttaaggtgatttcaacttatacagttcaatcttatatttgctgaacttacctaaatccctagggcatcacttttcaatgactgtaaaagacatacagtttcaagctcttaggaaaacatgaacacacttacccggcaaaaggatgaactaccaccgaccgtgggttatttaaatactgaactactgtgcgtctcgttttatcagctagcctcatgacactgatactcttgtaatgagagtctgtccaatagagattctttgaaatccaatcaaaagccaaactttcaacattttccaccctgttagctgcgagaatttctcttcctataagttaaaatatggacatattttaagctaagtatattttgtaaggcatcaattttcctactaatgcacactgaaattttgtgtcagagttagagcatatttcaggaacacatgtggaattc

SEQ ID NO: 195902 - DNA, 1000 bp, Homo Sapiens
ggcagatttagaaaggtacactgaagagattttattttatactgatgtgtgtgggaacagcttgagcagagacatgatcatacattctaggaatgtttgcagagagaaggcaccgtggtaagagaccaggcctgagggacagttgtgaaggtcttaacacacaggtaatggagagccatcagagtttttaagcacaggagtaatgggtgctgtctatttattacccatttattcaacaagcatttgggtgtcagttcaccactggcttcagatgatttgaggacagtgggctcagggcctttccttcagcagacccagggatctgagtgctggagcaactctgaaatcgctgtgcatttctgccctgctgccagctttcggggtggctggagcttgtttttcactatctaacctgttcctggctttctgtgcctcaggagaagtgtgtctgtcccactttcagccctgcagagctgctgcagcacgtttggtgaagacgtacagtcagtgcctcttggttttgctgccctgtgctgcatgtctgcacctaggagtggtgggtagggacttctctcagctcttctgccctttgaccataggcagcctctgcctgggacgcagtgaagacccagagtggctcagaggatttccataaattcacttgttttgccatttgcctaggtgttcatcagactaggtgttcatctacacctatcattggcaggacagagagggtattgaggacctctttctcagccatcctcccgtggctgccatcttctccatgagagcctggagtgccttagaggggttactctcagttcttctctgctgccctaaggtttcaccaggctctgtgcatctgtatcttagggagtctccctcagccctcctgttacacttgtccctactttttttacatgagcgctgaatgaaggcttgtgggaaaaagttggtgagtaaattgagactctccttgtggctgggaccccttggaatt

SEQ ID NO: 195903 - DNA, 1000 bp, Homo Sapiens
ctcccatccagccagcttgaaatggtcagcagaaattcaccaagcgtctgctgtgcaccagttactgttttaggagcccagggatgtggtgacacccgagataaacacaaggtcccacatttgcaggcctggggacattgtctgaggagcgctaaatcagcaatcacttaaaacaagctgaggggctccaggatgctgggggaggggctctgcttagagggaggctgagggcagagtcgtgcttgtggtaagagctctagcaggggccagctggcaagtcctgatccactccttagcatcccggtgaccactttgtgcctcagtttccttggctgtcagttgtggatcttgacatcgtctaccctagagggttgttgtgagtggcgagctgatagaagtaaagtgcttaaaatagcgtctggcactgcaggagggaagacctcctctgggaatgaacttgtgggcctggcatggccaagggcatgcagtgggggggatggggaggcaagggacgcctgtgatggaggctgggctccagccatgctgtggcccgctgtgctttcctggcggggcgatcatgggcaaatgcctcagtgtccccgaatctcagcttccttattggtgggaggattcggtgagtggcttccctggtggaaagtggccttggccagagtagacatctgtggctggactgtatacagagccctgcccaagtcggacacagccccccaatctccagtgcactctgtctttttttttttttttttttttttttgagacagggtctcactctgtcgcccaggctggaatacagtggagcgatttctgctcattgcaacctccgcctcccaggttcaagtgattcttgtgcctcagcctcctgagtctctgggactataggcatgtgacaccatgcccggctaatttttgtgtttttagtagagacggggtttcaccatgttagccaggctggcctcgaactcctaacctcaagtggatc

SEQ ID NO: 195904 - DNA, 1000 bp, Homo Sapiens
ttcatgtgtgctatgctccagaatttgaaacagttgaagaaactagaaaaaaactacaaatgcggaaggcatatgtagtaaaaactactgaaaataaaggtatggaaagcatattgctaaatgcctcctgtgtgtcaggcactctgccaggtgtgtcatcatgcaattcccagtctagtggtaggagaggcaagtaaaccatcacagtattcagtaactgtgaaccacagggttctctgcagcacactacataatctgggttgagaagggagaaatattggttcatagaagacttcctatagtatgtgagaagtggctgaattttaaaggataagtagacgttaactaaatgggagaggaaaagatggaaaggcaagccaggcaagatgtttaaatgtttagaggaataaatgagcatcatgcatttaaggaactttaattaatacagtataaccaaagcccaaaggtttcagtgagagataagtttagaaaagtgggtaagaagtgaatcatggagggccttgtgtcccatgctaaggaattaaggctttgaccagaatgcagtgagaagcagttatgatttgcagttgtcaaatcatatagttgtcactgctaatcatggagaagttctacttttgaccagcaattggctaaatgcccccacatgcctgttctaccacatagtgatggagagaaataaagtgggaaaactcttggaaaacttactcagaaatctggtaagagagctgttgagaatccccagtcatctgcagacattgaactctaacttgtaagataagtaaataaatagcaccaggaaaacttgtatgtttgtgtggcaaaggaaattataaaatattaatgtggagaaagacctttgacattatctgacctgggtcctaatttttctgggtgaggaaactaagtctcagaaagtttgtgacctgcctatattattagagatgaattaaagacaaaataagggttaaaacccaagctt

SEQ ID NO: 195905 - DNA, 1000 bp, Homo Sapiens
gccgagagatccgctgttagtctgatgggcttccctttgttggtaacccaacctttctctctggctgcccttaaccttttttccttcatttcaactttggtgaatctgacaattatgtgtcttggagttgctcttctcaaggagtatctttgtggtgttctctgtatttcctgaatttgaatgttggcctgccttgctatgttggggaagttctcctggataatatcctgcagagtgttttccaacttggttccattctcctcgtcactttcaggtataccaatcagacgtagatttggtctattcacatagtcccatatttcttggaggctttgttcatttctttttacttttttctctaaacttctcttctcacttcatttcattcatttgatcttcaatcactgataccctttcttacagttgatcaaattggctactaatgcttgttcatgcgtcacgtagttctcgtgccatggttttcagctccatcaggtcatttaaggatttctctacactggttattctagttagccattcgtctaatcttttttcaaggtttttggcttctttgcgatgggtttgaacatcctcctttagctcagagaagtttgatcgtctgaagccctcttctctcaactcgtcaaagtcattctccgtccagctttgttccgttgctggcaaggagctgtgttcctttggagaagatgtgctctgatttgtagaattttcagcttttctgctctggtttctccccatctttgtggttttatctacctttggtctttgatgatggtgacgtacagatggggttttggtgtggatgtcgtttctgtttgttagttttccttctaacagtcaggaccctcggctgcaggtctgttggggtttgctggaggtctacttcagaccctgtttgcctgggtatcagcagaggctgcagaacagtgaatattgcagaacagcaaatgttgctgcctcatcattcctctagaagctt

SEQ ID NO: 195906 - DNA, 1000 bp, Homo Sapiens
ctgccatatggtgaggctcaaaaacaattcacttgtttttgtttgtttgagacacagtcttgctctgtcgctcaggctggagtgcagtggggcagtccacggctcactgcagcatggacctcccgggctcaagtaatcctcccacctcagcctcccacgtagctgagactacaggcacgcgccaccatgcccagctaaattcttaacatttttctgtagagatgaagtcctgctatgttgcccaggctggcctcaaactcctgagctcaagagatcctcccacctcggcctcccaaagtgttgggattacaggtatgagccactgtgcccacaattcaatagttttgaacaataaaagttgtttttttaaaatccactagttaataaattaaacaggggcattgatagcagtgagttctgagtgctttggggaaaatgaagattggtaaagtgctttgagttcctttttttttgagacggagtcttgctctgtcgcccaggctggagtacagtggcgcgatctcagctcactgcaagctccgcctcccaggttcacgccattctcctgcctcagcctcccgagtagctgggactacaggcacccgccaccacgcccggcttattttttgtatttttagtagagacggggtttcaccatgttagccaggatggtctcgatctcctgaccttgtaatccacccgcctcggcctcccaaagtgctgggattacaggcgtgagccaccgcgtccggccgagttccaactggaaaccacggagtaagctagcttattctttggaaacagattattgctaacatttatccatcacttagacatgctaggcactatctgagtgctttacatgcagaatcttctgaaattgctcaacaatcctatggccacagaaataattcttttttttttttctttttgagacggggtctcactcttttgcccaggctggagagcagtggctccatctggctcactgcagcctcga

SEQ ID NO: 195907 - DNA, 1000 bp, Homo Sapiens
cacatatatgttcgatttcacccacacggccttttgttttgttttgaggagctttaattagctgccaattttaaaaagttaggaagcagggcataaaagccagatttcaaggctgggcatggtggctcatgcctgtaatcccagcattttggcaggctgaggcaggcggatcatttgaggtcaagaattcgagactagcctgaccaacatggtgaaaccctgtctctctactaaaaatacaaaaaatttagccgggtgtggtggtgtgtgcctgtaatctcagctacttggaaggctgaggcaggagaatcgcttgaacccagaaggcggaggttgcagtgagccgagatcacaccattgtactccagcctgggcgacagagtgagactccatctcaaacaaaaaaaacaaacaacaacaacaaaaccccaaaagccagatttcagcgttccttgaaaattcaagccatctggctacatttccccacagcagcagtaaactggaatgggctagttaccgccccaccttgaggtagactgagcgttccagtttgctggtctccaccatgccctgttgtcttatcccagcccatgagactcactcactttacctgcctggcatcagaaggcatttgactttgtgacttttgagccaggctaagagaaattccaaatacattgagttgtgatcaccatcaaattcagctcagagcaaagggatggacctgaattcctaatggcattctgaagggagtttttcctttctgcacaaatcaaaaaatcacaaagaactcatctacctccatgaccatccctgcagggtaccagcatttagtgacctgtcctctctgttgtacctgagaacttactttctgataatccgcacggcccactttctcctttggattgccttccgagccagggccccacgccagtgggcttccagtttgatggctgaaagagttcactgctggcattagaaggtgagcacaatcgtatgg

SEQ ID NO: 195908 - DNA, 1000 bp, Homo Sapiens
cagcagtgaagggaaatcttcccagtggcaaaacttcaggcagcatgctttgcttggaagaagaaatggtcagacacgcaattatataccaatcccatgggctgtggaccatggtttggctggatgttcaggaacttggaaggaatatgattggaaaactggtaacaaggaaatttggagaagaggtatgtgaatagacctcgcagaatgagcaaaaatcataagatatttgtctcccatgtgaatgctcactaaagggtgacctcagtagagcaggactttaaaaatcaagtggataggatgacctattctgtggatagccatcagcctctttctccagccaccccctcatcagccagtgggctcatgagcagagtggccatggtcagggatggaggttaatcatgggcttgggaatatggactaccacttatcaaagctgacctggctatggccactggtgagtgcccaatccatcagcagcagagaccaagactgagtccctgatattccccggggggtaaatcagccagctccccagtggcaggttgattacactggactgcttctatcatggaagggacagtgttttgttcttactgtaatagattctttaaaaattttttttaattattattttttatttttagagatgggatcttgctgtgttgcccaggctggagtgcagtggctatttgcaggcatgattatagcacactacagctttgaactcctgttctcaagaaatcttcccactttgcctcagcctcccaagtagctagaactacaggtgcacaccactgtgtgggcttgtaataaactcttactcagcatattaatttgccttccctgcacacaatgcttctaccaaaactaccgtttgtgggcttatagaatgtcttatccattgtaatggtattggtattccacacaacattgcttctcatcaacgaacacacagcaaaaggaatgcagcaatgggttcaagctcatggaattc

SEQ ID NO: 195909 - DNA, 1000 bp, Homo Sapiens
atttacggcttctgtgtcaacgcaggatgctgagcagagagtctattctgaataccttggctttaactgtgttacagtgagcgccaaaccaaagctttctccctacaggctggaagacccgcaatatgaagccatttcaacctcctgttagctactctgagaataatcaatgtctctgggtctgtggtgatggcctaatttatttaaaatgtaaatattatatttctctatgtcccaaaatgccagctggttcttcttctttgatttaataagggtttcataaagatatcaagtgctgggccgttgtcacaaacacagacccagacagactgtcttcccggatgtgccttgacccacaggaagcaggagagggtagcggtggaggtggagtccaactgcctgggttcaaatcctgatcctgccagtgatgagccacatgagcttgagcatgtggtgatcctgcctgggccttggcgtcctcattagtaaacgggaaggataactatggtacccagttcactgagttattgtgaaaaattcactgaaataatctggggaaggcacttaacacactgtctagcacataaagaaatgcaaagagcattggctgctctcatcatgaccaccagcttcccccaaacccccaacgctgacacggtctcactccgtcaccccgtctggagtgcagcagcaccatcgtagctcactgcagcctcaaatgcctaggctcaagagatcctcccacctcagcctcctgagtagctgggaatacaggcacatgcaaccatgcccagctaatttttttaatgttttgtagagatggggtgggaggggtcctccctatgttgcccaggctggtcttgaactcttgacctgaagagatccttccatcttggcctctcaaagtgctgggattacaggtgtgagccactgcacctggccttatagtcaccactaaacatcactgatttgagctttttttgcttgatgaaatgaattc

SEQ ID NO: 195910 - DNA, 1000 bp, Homo Sapiens
ttgctcaaatgtacactgtgtataagtgccttgtatagtagttgagggcataatattaaattataactaagtcaacatatttccctgagtaacctgatctgaagttctctgccatgtccctttcccacctttgtgcctctgcttgtgggttctccgtgcacctgtatgtgtccagatagtccctgtgcttcaaagcctgatgaaactttcttaatgccccccagctactaagattctctacaggctcgggattcccatggactttatttgtctcttcctaaatgatatttttcacttcaacttcatataaaaattatataaaattgaattacaagtatttgaaatagttgtctaatcactcaaactagatttttctttaagtataatgtattatatgcagttatattcattaaatatttgttaagagagcaaatgagcctatttcagtattggatttttaaagtaataccttatacagttcaggcaaaatatttctgttaataagcattattggccgggcacggtcactcactcctgtaatcccagcactttgagaggccgaggtgggcggatcacctgaggtgaggagtttgagaccagcctggccaacatggtgaaaccccatctctactaaaaataaaaaaattagccgggcgtggtggcgggtgccctgtaatcccagctacttgggaggctgaggcaagagaatcgcttgaacctgggagatggaggttgcagtgaaccgagatcgcaccactgcactccagcctgggcgacagagtaagactctatctcaataaataaataaataataataaacaagaattattatatctggttttatttcattccgaagttatgtcagtttatgtaaggttatttgcagcattcatctgttttttccccttgatttcacatacagaactcattaccaaataaagagcaaagacttaaaaacctcacaacaaactttcagctaatgatgcttccttaggaattc

SEQ ID NO: 195911 - DNA, 1000 bp, Homo Sapiens
gcttggcaaccaaaagggttctttggtaagtggtcataacagtgccacactaatcaaattcctcagttttctctgatgtggggattttagagccaagtgacctcactctaagcaaaggcagcatgttaatatctggactgacaactggaggatggggaagtatgacacagagagaaaagcatgagctctggggttctagtaaacaccatcagtcaatactctgcccagagtcccggctgctggtgtgtttcagggtgcttttgctacctgtaattggtacctttaactcttcttcccaggactgccttgggctactagagtgagagtgtgcacacccaaggaagggccaaaggggctagaagtgtaccttcctccaggtgagctctgagctgataggcccagctccctcgttttgggaagatcctaaagtggaacttacactccaagttcccctgtggattcaggctgaagttaacttccatagtactttgcctgaaatcgtatctttcttcctccttgtgttacttagaaattttccccgagaatatatccttgatgatatggtttgtctgtgtttccacacaaatctcatcttgaattgtaactcccacaattcccacctgttgtgggaggaacccggcagcaggtgattggattatgggggcaggtctttcctgtgctgttttcatgatagtgaatgagtctcatgagatctgatggttttaaaaacgagagtttccctgcacaagctctctctttgcctgctgccatccacgcaagatttgacttgctccatcttgccttctgccatgattgtgaagcctccccaactatgtggaactgtaagtttattaaacctcttttcttcccagacttgggtatgcctttatcagcagcgtgaaaacagactaatatacttgatacgtcagaagcatataaatgcttgtcccagagtcaatctttaggaaatctgacctagcccaggggggtcaaagaattc

SEQ ID NO: 195912 - DNA, 1000 bp, Homo Sapiens
caagtgcagcttgagcggaggtcacagcagccagtcgccagtgccaagcagccagtgagcagctgtcccaggtgggctctgtcaacacagcctctgcaggttccaaccaggagatgaagccaggcactggtgtggcaagagcaccgaggcacgcttcctgagaggcacagtcacatccctgggagccaggaagggtcagtggggagtgtcggacgccaggggagcacgggactttcagaaagagaagatgctcttccacccagccggcagggcctccgccaggggctggtgctatcttagacagagtgggtgttgcccttgaggagctgtgagctgagtcccgtgggggtgttgcagaggccccagtctcccttctgccccaagtccaagcccactcttggggagctgtgaggctgagggtgcattctcccaaagctgctccagctcatcccaggcagcctcgggttgccagtctcctaagtgacccaacatctgtgccccctttgctggcagcactccgccccatccttgtcccctgcctcgtcctctgccccttgcaagcttccctggctctgtctgccctctgcccagaggccctgccctacccagtgtgtgctggaggccgggctcagagggtccagcctgtgcccagccactggagccgagaccgagaaaagtcctgagatgaaacccaggacaacagaaggcaggtgtgagccctgcgaactcctaactgggcgccgggatctgtccagccaagcaggggcaggggtgggccgacaggatggggacccaggccaggaactaacttcacaggaaaagccctgggtgggcaggaagattccagagcacgctgtggctgacaagggctacaggcagcagtgtggagccggggaggctcggggtggccctgtcttctgggcggcggcccccagaaccagctggcagcaagcctcgtatacaaggtaagaccacagagcctggcagtggtttggaattc

SEQ ID NO: 195913 - DNA, 1000 bp, Homo Sapiens
ccaaaagaagacaagttttttcctgcaggacttgtcagagctttcattgagtagccaagctttgtgattctctaaatggagagcatcgtcataagcagggtttcttaaactcaccagaccaggaaaccatttctggaaaacaagttcatggaacatgctttggaaaatactggaccagatgacttttaaggtttcttcccatctgagattccaactactgactccaggagcctagactgggagggtgataggaaggaaagctcagtgaggggagagccagtgtggaaaggttccctgaaggagaccatctgcaagtgttgatggtgtgtgtttcatgtgtttttggacatatttgtccacttatagccctctgtaagtattcagcaaatgaacacttactatgcaagtgcctcccattggtacacagttcttaaggccacagctcaaggagtgaaggaaaagtggtcactatagcaaagctcatagttaattttcctgtatcacctgccttcccttccagcttagcttcctcctcctcttccttcttccatggcacagaacacagcttcaaggtggcccctgccaccacgttggtaacacctgactccttcaccccttagccagagctgactggatgcctgacccattggcccaacccatcaggatctctttgcagaatctgaatggagaggccaggggcctgcagtccacttcctggtggtctctacagctgtagagctccatagtcccaggggttggagcagcttcttggggtcgctgtgggctgaaaaataagcaggaagaagcaggagtaagaaccattaggggaaagcaatgatagtaaaccccatggagagagagacacagacagactggtccctgactaactgtatatgctgaccttggatccctccctgtaagactcttaatccccctttcttgagctagggtcaaatagcctagaggagggctccctggaatttaatgtgcatatgaattc

SEQ ID NO: 195914 - DNA, 1000 bp, Homo Sapiens
tttttaagagatagggtttcaccctgtcacccaggctggagtgcagtggtgcaatcatagttcactgcagccttgaactcctgggcttaagcgatcctcctgtctcagcctctcaagtagctgggactacaggtgcacatcaccacatttggctaattttttaattttttgtagagacagggtcttaatatgttgcccagattggtctcaagctcttggcctcaagtgatcttcctggcttgacctcccaaagtgctgggattacagatgtgagctacagtgcctggccaataattgcttttgttaacttttttttctagatttatgaattttgttgcttatttctgggtatgatattaataggtggttatatatggctcattcaatagtcaatgttcaaaggaaaaaatgattgctatgtatgtttccagctttgtaggctggtcacctcattattccccattccatatcctgaacaagtggaacaccctttcagagacaagaacatgggaaaaagccttccttaaaaacttttctgaaaattgctataatcatagacccaaggaacagcctaattcaccttatgatgtggttcccaagaaaggagaaagaaagtgtctaggaagactagacccaatcttgagacccaaaggtgagactggcaagggcaggagaagtcacatgtagttctctgtgctggaaggaaagttccactggatataaccagccaatccatgctgcctgcttctccttggttcctcttctttctttagctcagaagaaggaactccttattttccaagtaatcccagcatggagaatttaagatggctgtaaattctttaacattccttatatcacagggtctaagaccccttctcttgaatgagggttctctttgctattgcttggatctatagaatacagcaaaaatgatgctgtgtgtagtaagataaggctgtaaaccagtaagaactgattcttttgctttagggaattc

SEQ ID NO: 195915 - DNA, 1000 bp, Homo Sapiens
agtctgtgaagagcctgaagagcctccctctgcgaagaggctccgcctgccaagagcctccctcggcacccacgccctgctaagtggtggttcccaggaacatctcatcttatctatgacctctgtatggaagaactcaacaggaatatttcatgtaaaagcttcatgacaaatgatttgcctggggacactgataccaccacgatgtacccaagaccgccagccgatgaagtcttcccaaccaagtaaccccaacacactctcaccttcttaccaaatgtgccagattaatgtcctgctccaaattcaggccttttcagaaaacataaagcttcccgctttctatttgtgaaaaagtaacctcgttgctttacataaacgaaaatcacctcatttaatatgccttttgtgtacatgtaaattaaaacgttatcactagcagtaatttttaaacttctggattaatactttaatacttctctcctccttaaaaattatctaaaatttcttcttgatttgccaacacctcacactttaagtaattttcataaggattctggagaaaaatattttcactagaaaaaaaacaaaacaaaacagaacacttccagacgttatccagaagacaaaagtttgctcacatcatactgtctctagaaagccctttctagggtatctgtggcaacaggatacagacgtcttttgtttctttcttcctttactgaaatgctcaaaactttccaacagtcactctcaccatccctggagttgagagtttctataattgattctcttccacttacaatgacaatttaacccaccccaactggcaggttttaaaatcagtcaaaactaagaattgtggaacaatgtggctgacaagccaccattcttatttgcaaaaactgacagaatctggggaatgggaaggaaagagggtgtaggtctgtgtaaaacccccaacgaaaagtcacagtaacatgaagaaaggcaggaattc

SEQ ID NO: 195916 - DNA, 1000 bp, Homo Sapiens
ccaaggagttggaggctacagtgagctatgatggtgccatggcgagagagagatagagaaagagagagagaaaaaagttacataaaaaaataaaaagattccagccaggcacagtggctcatgcctgtaatcccagcactttgggaggccgaggcaggtggatcacctgaggtcaggagttccagaccagctggcccaacatggtgaaaccctgtctctactaaaatacaaaaattagccgggcgtggtgaagcatagctataatcccagctactcaggaggctgaggcaggagaatcgcttgagcccgggaggcggaggttgcagtgagccgagatcgcgccactgcactccagcctgggtgagtgagactccgtgtccaaaaaaaaaagttccctgcccagggccagctcattgtccatctacctccacacctgtgagcttctctggttctgggactaggttgtatccatctggcgcctggcaccttctcagagaggccctccctacttccgtcctgcaagggcccccccatctcttaccttactatttccctttctccataacatgtacacttgtttctgcatttatcatctgtcttccctcaggagaatgtaaaccccacaagggctgggttttgcctgcctggctcacagctgtctccccagcccctagcacagtgcttggaacatagtagttgctcagttaaaactgacagaaaaggctgggtgtggtggctcatgcctgtaattcccacactttgggaggctgaggtgggaggactgcttgagcctaggagtcgagaccagtatgggcaacatagcaaaacgtgtctctacaaaaaaaatacaaaagttacctgggcgtggtggcacacacctgtggtcctacttacttaggaggctgaggcaggaagatcgcttgagtcaggaggtggaggttgcagtgagccaagatagcgccactgcactccagtctggaagacagagtgagaccctgtc

SEQ ID NO: 195917 - DNA, 1000 bp, Homo Sapiens
aaaaaaaaaaaaaaagatgagtaacatgatataatgtgttgttttacataagagccagaatgtttaccaaagtctaactctcaggcctgtagggaagaaattgattaggagatatacctaatgtgaatgacgagttaatgggtgcagcacaccaacatagcatatgtatacatatgtaacaaacctgcatgttgtgcacatgtacactaaaacttaaataataataaaaaagaaactgaaagcttgtatttccttatttatgaaacagatgaagcactggtaagaataagacaatatatggatcatctataaagcaccatttgtttttgttttctaaatagtgtggaacagtgtaatataggatttgacatcaatgaagaaggttcaagtacaacctctgtgtatgccagctgccttataaaaggcttataagaagcttatcttaccccaatcattgaaacacatttaatgatgtaagaattaaagggatgatatgtgtatgaggaggggcattttaattcaaatagctatgtaaatgtaagatgttttacactgtattataccaagttaagtaaaccagggccttatgttcattatttcctaatctttggtgggggtgagggaggagagaactgaaggactcttacagcagaaacaccagttaatataaaataatctccactacttaatagagatacaaaaataataaagttgtggccttcgttcaaaaggtaactaccacagtatatgctaattgggtgggtaatctctcttctcaaacacacactctcatataaaactgccgccaggattaattacgagtgtatcagtagtgatggagatttttctctatggatctgaactagtccacccactgtccagatcacaaataagaatgaaaatctttccatgggaatataacagggaagggccatttccaacctcattcattcacttagtccctatcttataccagattatatttcacgtgctgggaatt

SEQ ID NO: 195918 - DNA, 1000 bp, Homo Sapiens
tggcatttctgtacctactctgggccagaggacagcccactgtccacagcggtgagtcccatgcctggcagcatccaccacaagctaactgaagagctcttgggccttaagtgaatatcagctacaccctggaagtacttcctgtgggcctgtggtggtggtggacatggggagaaattcctccacctggggaaaggggagggaagaataggaaggactttgtcttgtggtttctgtaccagctcagctgcagtacaatagagcaccaggtagagttctaagatttctggctctaggccctggctcctggacaacatctctggacctgcccagggcccaggggaacttgctgcccttaagggatggacacaagcctggctggctttgccatctgctgattgcagagacctggggccttgagcaaacagggtagacaggtagtggttacagcggaccttggttgaggcccatgcttgccggcttcaggtctgactcagcacagtcccagtgctggtggccacaggtgtccttgtgtcacccctcccccagctccaggcaggtctgcacagagagcagctccacttgcttgggagaaagtaagggaagagaacaagtctctccctggtaatccagagaattcttgcaggtcttatcaaagatcatgaaggcagtacctctactctttaagaaccacagcattaatgggcttggagccccaaatgcatatacaactgcagtaagcaaaaacttagatcacaacacccaagtctctgtctctttgaatacctggaatgccttcccaagaaggaggaatacaaacaagcccagactgcaaagactacaataaatacctaactcttcaatgcccagacaccaatgaacatccacaagcatttggactatccaggaaaacatgacctcaccaaacaaactaaataaggcaccaggggccaagcttgaagagacagagatatgtgacctttcagagagagaattccgc

SEQ ID NO: 195919 - DNA, 1000 bp, Homo Sapiens
ccaaagttgcaaacaacagtgagagtgagtgagatctgtggctggcgctcctggttcctgagcccgtgttcaagtctagattacgctgtttccctcattccaagtacaaggagtagctgctgcactgtgacctccccattggacaatgaaaggattttacgccccacttcaagctgcatcctacccaaatctacctaatgagccattacccttctttaaaacaactgtgtgaccagaccacttaggagtgtggagtgtgaccacttaggactccacacaatgagccagaaccgtccaactcaaggctggtgtttctgaaggcttgcactgggaggagcgccccctgccgctcagccctgagtccacaaccccacctgcacgttgctcaatgtcctgacctcctgctgtctcaacatcagagctatttaccgatttcctctctttgctaaaacaacaaccaccacaacaacaaacttctcatgaactggggtttctcaatctgccctcgtacttttgctccccaagaattcagtgctgtatgtacagtgggaaatggaaacaatagaaccatgtttcagctgaaactggcacagttaaaaaaaaacaccaaccacgaaaaaactagaatgcctacataagcttggggattttttcgtgctttatgcttaagacgcttttgaaaggttgcagctaaaagtaaaatttgttttgatagcattctcagcaacagaaagcaaatgaatctcttgtcctccccatggaagtaaaaagaaggagcccagttgctgctctggagaaagtggccatggaatttaccttctctgtccttagaatgaaaggcctcaaagcagccttcgtttgcaggctttgcaggactttgctgatgtaaaaagccttagaagccgttgagtctttgaagtctttcttggctctaacaggaggctaaaagccaagtctctcgaattcggcttgttccctgggcctggaaagagactgaaat

SEQ ID NO: 195920 - DNA, 1000 bp, Homo Sapiens
atgattctgccacccatgtgtttgctctcattcctagctctatgatctggatttgatcagaatgtattccaggtatttataccaatctgttgacgttcataaccaaagaccccggctgcatcctccagagatggttattcaatcatacatcaattcactcaccttttaccttcttgtttatgaaaataacctgagagactccacaaaatcctttgttgtagagcgttcctcacatacatcagtttaatgaccttaaccaaaaagacttaaggtgaatttaacaagacttgtacttggcagattatatctcttctcagcttctcagcgttttctcctctaagctaagtatctcaagggctgtaatttttttgacaccagaaatgggaataatgaattgcaatgtaatagagtgacaataagctagatgcatttacatagagagaatgtccaaatttgcattcattcctaaaacatttttatggctgtgcagtcacattgactgaagattccagctgtctggatacccagatactcacaaggtaacctgatctcggtactagatatggcctgggtccaagcaattagctctgtttgtctagaaatgttttgatcagttccccagaactgaacaaattcaggaaaatccacccatgacaaacatctgcacattcaataaattcatttggaaaaaatgtttcttgagtgtctactttgtgactggcactgttctggatactgggatacagtagcaaataagataaagtttcttccctcatagagcttacatcagagcaaaaaggcacataataaaaaagtaagcaaataaataaataaataataggattttagatagttgtaagtgtcatgaaaaaaataatgcaaggtaggggctagagagtgactggtgcatggctgcatggtaactgattatgtctatacaatcaaaatatatatactgattatgtttgtataatcaaaatagaatttgtaatatgaattc

SEQ ID NO: 195921 - DNA, 1000 bp, Homo Sapiens
gtgttaagaactggcccacttttgcagacctgttttgccttctttgtgccaagtagaagaggcaggatctgcacaaagacccctgcagactcatgacctgtcaccagcagtttccaaccatagaaaggctcaaggctcaggtagagggctagactcgagagttatggccattagagctggaaagaatctcggaaataattggattcacccagtaccctcatcctatggatcaaaaaattaggggcccaggactggagtgggagggtgcccaagagcacaaaaccagtttgagatgaagtggagcgcagacaaaatacatacgcatagccaaatgggagcgtaatgtttcagccaaaaatctagctgtgattgttcatggtttttctcattagaatggctgctgtgagtgtggatttccctgcttgcccctctctactctgccctaccctgctctgtgctccaggaggctaacctgtatgaactgcatcaacactctccctgccccctagggcttctggttggttttggaaaatggtgaactttggtgggagatgggagagagtgaggagagtgaggctgcggtgttcattgtattaaggttctctagagggacagaactaataggacagatgtagatatgaacgggaatttattaaggagtattgactcagacgatcacaaggtgaggtcccacaataggctgtctgtaagctgagcagcaaggaagccagtccgagtcccaaaacctcaaaggtagggaagccgacagtgcatgcagccttcagtctgtggtcgaaggtccaagagtccaaaagctgaagaacttggagttcgatgtttgagggcaggaagcatccagcacgggagaaagatgaaggccagaagactaagctagtctagtccttccacgctcctctgcctgcttttattctggccgcactggcagctaattacatggtgcccacccagattgagtgtgggtctgcctttcctagtccac

SEQ ID NO: 195922 - DNA, 1000 bp, Homo Sapiens
aaggcggaggttgcagtgggccaagatcgtgccactgcactccagcctgggcgacaagagcaagactctgtcaaaaacaaacaaacaaaaacaaacaaacaaacaaacaaacaaaaaacactggctggctgcagggcgtggcattaagggggattttgatgttctcctttgtgttttctatattttccacaaagaacactgttgtaaccaggaaaaaaaaaaaaggctttactcaggaattctcagtggctttccagctcacacctgtaatcccagcactttgggaggccgaggcgggtggatcacaaggtcaggagttcaaaaccagcctgaccaacatggtgaaaccccatctctactaaaaatacaaaaattagccgggcgtggtggcaggctcctataatcccagctactcaggaggctgaggcagtagaattgcttgaacccaggaggcagaggttgcagtgagccaagattgtgccactgcactctagcctgggcaacagagctagactcagtctcaaaaaaaaaaaaaaagtttttaatggcattcgattctgatgtaagcagactcatcatctttgagcagtggcaggaggacaccaaataccacgcagggctcttaaggaactttgtcacaaagaccagaaaaaaataaattgtgaatggaataactggcaagcactcctataacacatacaggttaaaagaagcacagagatccacaagtgtctggaaactggagtgtgaagagcagtcacatcaagttggctgagcagagagtttccagggatctgattctgaaccagctttaacaggagagattgaagaaagagagtggggaggcattctgatcaagccacagcagactgcactgagtggctcggcaccctcttacaaccccgctgagcatccgtgaagactgactactcacctctactagattcaccaggtgcaagaagaattcctgggcatcttgctgcctgttagaggagaattc

SEQ ID NO: 195923 - DNA, 1000 bp, Homo Sapiens
atattttgttaagaatttttgcatctaaatttatgagagatactggtctgtaatttcctttttaaatttctttgtgtggttttggtgtcaggataaaataggcctcacgaaatgagttgggaagtgtttcctcttatctgttttctggaaaagaatattgtgtttttaattcataagtttttttccaagattaatgttgttctggagaatcaaacgtagggtatttagggaaagaggggccaggcttgtacattcctttttcacgtttagtgtgttcccctctggagtccactatgcattagtcagagtggaaagttcagtctaggagattccaaatgtggaggaaatgtgactttaatgtgtcttcccactcactggtattttaagaagcactaaagaaagattagagattagcgcttgcataagcagctaaaggacagctaaatttttaattactttctaattacttagtacctgcactctactttccaatatataattaataacacttttccatctgtcagaagggatcaagaaccagaagttatagagctatggaatacagatttaagaaaataattttattatatttagtcataaaatttgcatacagtagagcttactccttgtgatggacatatgggttttgacaaatgcatcgagttgtatatctaccactatgatcaggattccaaataattccatcaccgctcctaaaatttcttggattttctctttggagtcaacttctccactcaatcacggtcccaagcacccagtgatctattctccaatcctacagttttgccttgccagaatgtcaaaaatgaagtcaaacagtacactgccttttgactgtggattttttcatttagcaaaatgtttctgtgatttatttatgttattgaatgtatcaatagcgaggttcccattagctttatttcttgtttctgtgaaagcttagagtgttcaatacgccaaagttattttggaggaattc

SEQ ID NO: 195924 - DNA, 1000 bp, Homo Sapiens
gtatcttttatatttaaacttatcttaaaaagatagaattgtttagattccttgaaatggctggtgtttgaaagatgactgaaaaagttagaaatgtaaaataaggccaatgaaaagtaagaatagtaagtaacatccttttgttttattaaaatgggattgtttaatgttttgaacaaattagaaacaataaaattagtataaagtagaagctatcaggggcaaggggagaaagttttactataatataatctatatcatctaattcctgtgtgatgatttataatattctcttctagaaaagtaaaaaagaaaagaaaacacttggaactatgctgttggaagtgcacatttcactactgcaatgtatcattatagcctatgatagcagcttgcattatcctttaaatatttattctcttgaataattagatttaggatatttgaattcatttggtgaatacgctattaactttttatatattttgatagtatatcaatcgttcacttgtctagcatcaagtaaatgaaactaaatagtgtagaagtttacagcaaaattattcatttttctggatcctgttgtatacttacatctaaaactgaatacctattacaaactgggaaaatacagttactgacttacttctggtggctaaaaattaattctattgtagccttctattttacttctctttgtagttgaaagtaatggttaaaaataaatgaagacaatattacatcaaaaccattccagagctcaaagaggtttggaggctgttaccatggtgcccactgtggcggctcaccagccgggtttggcatagctgcctcaacaaaatgggcctaacttttgttttctacagaaacagtgagactccaaaggcctgtgttgacaggtaatgagatttaattcataagaggggggaaaaaaaggagagaaaatatccatattcattgcttaatcaaataaaattctttcagaggattctgggaattc

SEQ ID NO: 195925 - DNA, 1000 bp, Homo Sapiens
actttgtactaaacgaaaaaaaattatctcagcatttttcttaactactaactagcctagttagtatgcaaagttagcaaccttgaaaagtactgttagctttgattctgagcaggccagagaaatctgcctcaattaagtcaaatcgtggttttgaacaaaataatctcaaaggtatcttcgagccctgaaaaacacaaatcagacagctgcaattttcttcagctctctcctaaggtaaacattttttgaagaaacaaaagggagggtaggaggcaggaagggtgctccaaagtcctcttacagcttcatagtaagtcaattgaatataagtcaacacattttaatgatctagtatataaagcataccatgatgaataagagggtacttgctcataagaagcttagcttttcacctagtatggcaggagtctccccaggccaaattctgcccactcctcagcctgtttctgtaacattttattggaatacagccacactctttcatttatgtattgtcatggccaccttcacaacatacacaacagtagagctgagtgattgcaacaaagacgatctggcttacaaaacctaaaatatttactatctggccctttacagaaaaagtctgctggccactgaaactgaaaaagagaataaagacatctttccactaactcttcaaagtcaaagaatgttagcaccagaaataattttaaagatcattacaactttcccgttttacaagcaatgggagagtttcccattttacaagcatggaagatagtaaaaaccttctaaacaagaggaaaatgtcaataacagattacatactatgtgccaggcactattctaagggctgcacgtacattatctcacttaattccctccacaagcctgtgaggcacacacttcagtacattttgtagatgaagagactgaggcacagagaggttaagcgatttacccaagtttgcacagttaacacatggtgatgctg

SEQ ID NO: 195926 - DNA, 1000 bp, Homo Sapiens
atactctcattttctttcctttaagtcttttatttaaggggaaatcataatgggaaaatctcaagttacatgtaattcctatttattgtggcatgtgtatgtggccaacagattcttaaaaactcatattagaattggaattatctttcatgacaaataaaaaaggaccgtttgttattcttccacatttctttttctcatccattcagtaaacactgtctcccacaggtctaccattggtccctggatgacttattgcatttttctgtggtttctactaggagatatattttcttacttatacagatgctcagaaaaagaaatttgaaaaagcaaactgcaatactagaataattttgctgatacttcttcctttatgttagcttcttctggatggcttagtactgtaaatgctatatttttctatgtagaaataatgtaaaatctgtcttttagaaatgtctaagtattctattcatgaaagaatttctgttagggaatattgtctgtctttttggatggaaaagtactgctgttggtgaaatcggtggaatgagatttactatttattggaactatttttgctaaaaatatgcatgttaaaatccatctgttagaaatgtcaaccttaacactaccaagtaaatctgtataatattgatatctacctgaatctcttgggctgcaagacttttcaaggccttgggataacctcaggcatcaaactcattgacaaagtagtgattgtacattctaacaaattcattttagcctttacattttatttcttagcttaagtcccatttgtttgctagtaattctgaacttctgctaagcactgtgccaactgtcttcatttgattaggtcaagccagtggacttaattttaggacttaaattcaggaagaaagttcaaaattcatgtcctgaaaagtgtgtctgtcaaattctgaataaaaacatacttcttgggactttttcccctatcatcattgaattc

SEQ ID NO: 195927 - DNA, 1000 bp, Homo Sapiens
agagcctgtgaactcagactttcctgatgccaggaagaaaggtggatggggaggcctgactgatagcagagacacagccagcgggcaagggtggcctggattaggaacagaggcagtgggaaaggacaggaggaggcagagggaataatattgcaggacaaaaactaacaatacagggtgagtatcccttagataaaatgcttgggaccagaagtatttcaaatgtcagctattttcagatgttggaatacttgcatatacataatgagatatcttggggagataacctaagtttgaactgaaatttatttatgattatgattcatatataccttatacacatagccattagttttacccaatatttttaatcactttatgcatcaaagttcgtgtaaattgagccatcagaaagcaaacgtgtcactatctcagccactcatgtggacaatctgtgatcgtttggcagcaaataaattgtggtgtttacgcaccaaataaattgtgcataaatagaaaatgtcaacatatttaaaaaggcagcccatccaatgggagaaaatatttgcaagtcatatatgtaataagtaattaatatctggaatacatacagaacacctaaaagtcaacaacaaaaagtcaaaaaacccaacttaaaaatgggcaaaggcatccacagtggactgaataaagaaaatgtggtacatatacaccatgtataaatactacgcagccatgaaaagaacaaaatcacgtcctttgcgacaacatggacatagctggaggccactgtctgaagtgaattcaggaacagaaaaccaaatgccacatgttctcagcatccaatccaaactatgcgctaatgagcgtattatgagctgttgcccaaacaatttcatacgaagttaccctagccatcatcctattatcctattatcagttctactaataagtggctattatcagttctactaataagcggctcactcaatttatatac

SEQ ID NO: 195928 - DNA, 1000 bp, Homo Sapiens
cacagaggacagctgcaaatatgaggaaatacaataaagccctgcagataagcacttatcttctggctataattctttagtgccatctactgaatcacagcctaaactacaactgcaaaaatattctgtcactttgaaaccaaggacaagaatccagccgcaaataaagatagtatacagagtcttggccctctgaaagcacccagaaatgaagccaattgactatattcaacttacacaacagttaaaggaacataagtcctttcagatgagaaagaatcaacacaagaattctgacaattcaaaaagctagaatgtccacttatctccaaacaaacccactggctcccaagcaatgattcttaaacagactaaaatgactgaaatgacagatgtagaattcagaatctggatgtcaaggaatctcatcaagcttagggagaaagttgaaacctaatccaaggaatccagtaaaatagtcaaagagctgaaagataaaatagtaattttaagaaagaaccaaactgaacttctggaaccaaaaaatgcattacaagaatttcataatacaattggaagtattaacagcataatacctaacaaaggaaatgcagacacaacaccagtgtcatgcagctgagaaacagcatgagaccaagctgaggaatctcagagcttgaagaaaagttcttcatatcaagtcagtcagataaaaataagggaaaaaaaaggatttaaaaattcatacaacttctgagaaatatgggattatgtaaagacatcaaacttaccactcactggaattcctgagaggagagagagtaagcaacttggaaaatatatttaaagacatagtccatgaaaattttcctaaataagctagagaggttgacatgaaaattcaagaaatacagagaactcctgctaggtatcattcaaaacaccatccccaaggcacatatttgtcagattcactgaggtcaacatgaaataatctaaa

SEQ ID NO: 195929 - DNA, 1000 bp, Homo Sapiens
ataataaacataaaacactgctcttttctataaccaaggggtatcactgggttctggctatatatgccatggctgaagtgttttaactgttggcatttaccaagttaactattttttttacaggttaactgcctcataaataacatttttgaaaaagcattaaagcaatgtcagtaacgtaggttagcattttatgtgcatcctaaaatggaggatttctccccatacaacaagataaaggaacagttattctgtaaaagtcagtttaatctatttgcacatttgcctcatccattgaaagagctaaagcatacagtgacttaacactttgcaatacactcatacagtacacttaatttcaaaggcaaaactagccaaactgtatgcattaacaaccatatttatgaatatgtagcatcggatatgctccctgaatgaatctcttgtaatactagttctagttctagcgcaaagtcttgtcccaactttcagccaactatattcactatttggttggtgcctatagccttaaggctattactgtcaccagtgcctgtccctgatgtagaggataacctgtagaataaacaagcattattttactgaaacaaaagtcttattgtacctcttattggctagttcaggtccctccctcttctgtcttattctccattcctctaaaggtaatccttggctgtaaaattacaaaggatagtctactaaagtttcattactcatctttttgttattttttatttatagaaaaccttatacatttgtgattttcagtcaacttacctttatcttgatttgattttcaacattcacactcaggttatttagtgcatttaaagctttctctttaatactctggttggaatggttgattttgtttgcaacaattggaataccacccaattcacgaataatagcctacgaggggaaaaaaaaaaaaaaagcaggactgggacttcagtatgcatctccgttcactgaattc

SEQ ID NO: 195930 - DNA, 1000 bp, Homo Sapiens
ggattacagacacccagctaatttttgtatttttagtagagatggggtttcaccatcttggctaggctggtctcgaactcctgacctcaggtgatccacccgcgtcatactcccaaagtgctgggattacaggtttgagccaccgcacccagcctggactgcattttcattataaataaaagttaaaaattaaagatctctccagcaaacatgatgtacctattgcaggcaaggcaccgtgttatttactagagagacaaaaatacattagatacaattgctgccctcgaggacaatagcaactggatttaaaactattagacatgaatccccttctgttaatgacttatacaaattgcttagttattattggaagcaatgtagaagtaatcaaaatctgttgtgtttttttttaaagcgttgtttctgtgtttaaactgtaaaagtttaaagatgcgtctttaatcagaagcattggttttttttctgcttcgttgctctttatttcaaagagaattatttaagttgctgtaccttattaaaaatgacagattttatcaaaagcatgtgccccaaggtaatgggaaagctcctagagaagaggtttggagaatattgatgaagtgtctgtgcccgtggaatggaggcactttagcagccacagggaaagaaggactgtaggaacagcaggtgaacacagagcttcacattccagccatgagtaccattttgtgtcttccaacactttaaaactacctgttaggatatcccccgttgcaccttttacttttctttagaatttatgagttgccagattaaaaagaaaacaaatcaaatccagtagcttcataaaatgctagcaataaccatttggaaaatacagtgaaaacacagccagtttataaaagcaacaaaaatataaaatatataagaatgaactaaataaaatatgcatgagagtggtattttttttaatttgtgaagaaaaattttagaattc

SEQ ID NO: 195931 - DNA, 1000 bp, Homo Sapiens
acatctgtgtccagatataatgaacacaaaagtcacttcccagctggacatgaatgtcccaatgctgaattcctccccggcagtgatcttgtaacctcactcaaatagcttaaaaaacagacagctgtcatgtcttcaccctggtccttcttatcaccacaacatctgtattatctctgaaatcttacatttcatagcagtcagcatctgaccataatactttagctttagccctctctccccaagaccctcataatccttccccatctctttgatcttagtctactagctccacctgactttcttcttttctttgatgcctcaggccagtaccagccctcaggctgccagcctggatcaactctgcaaaccacatcctcttgagactacccctgggctctgatcaatcacttactgattgatacggtttggctgtgtcccctcccaaatcttgaattgtagctcccataattccaatgtattgtgggagggacccggtgggaagtaattgaatcatggggggtgggtctttcccttactgttttggtgatagtgaataagtctcatgagatctgatggttttataaaggggaattcccctgcacatgctctcttgtctgccaccatgtaagatgtgactttgctcctcattcaccttctgccatgattgtgagacctccccagccatgtggaactgtgagtcaattaagcctctttcctttataaattacccagtcttgggcatatctttattagcatcatgagaacagactaatacactgatcaatggtggtgcctcaccctgccaggtctgtaagctgcctagaaatagtctctgcacccatgaaaagttcttgcccacatgtccgatcaggggctgcaaacctttgcaagtcatttttgcctcctctctgccccgcaattttctttccctgaagaacttactatctaggtcttaaaggaaatttcagccttccacgattatctcacacacgaattc

SEQ ID NO: 195932 - DNA, 1000 bp, Homo Sapiens
aacaaaaaataggtaaatatggctagagaaggtcccttctgaaataaagagaaccatccttccttaagaagtggaatccagagaagggagggagcacaaaaatttgagcctcagaggctcaagagaacccagttatttgcgtttgcagctcctcacccctgggcgtgattcctgtatgtggaaacgcttgccccttaggacggcctgtttgcaaacatgtttcatccacatttttttatggcatccctgcagattgtagcctggtgtgatggggtctaaagacctacattcacatgtcatatctactactcattgactcagtgactttggataagtcacttaacctctctctagatgtcactcttctcagctgaatgatgaagaatttgaattagttaccttgaagtttaatcgcagtgctaacctttgtaagatctatagttgtgttacaggtgagccatagaattaatagattaatttttttttttaacggagtcttgctcttgtcgtccaggctggagtgcaatggcatgatttcggctcactgcaacctctgcctcctgggttcaagcgattctcttgcatcagcctcccaagtagctgggattataggcgtgtgccaccacgcccagctagtttttgtatttttagtagagatggggtttcaccatgttggccaggctggtctcgaattcctgagaattttggcagggtgatccacccgcctcggcctcccaaagtgctgggattacaggcgtgagccaccgcacccaggtgcttaaattttttaaaacatggggtgcttagaaaagaggttctgagggcctccagtaagatggttttatagtacggtgttctgtcagatttttaacttctttgtatggaactctgggagaagctctttgccagtctgcattggtgttgcctttcatatgattatcttgttgcagctaatgtggatttactacctcccatgtaaaaacctggtctcaaagaattc

SEQ ID NO: 195933 - DNA, 1000 bp, Homo Sapiens
gattacaggtgtgagccaccatgcccagcccaagttatgtaattaagtaaaatgtttttaagatcttcaaatattctgaaattaagcaacactcttcaaaataaccttgaatcaaaaaaaatcacaaaagacaatagaaagtatttcaatctgaatgatgatgaaaacacagtgtatcagtatgtgcaggatgcaggccaagtgtgctggctcatacctgtaatcttggcactttaggaggccaaggcaggagaatcacttgaagctaggagttcgagaccagcctaagcaacctagcaagaccccgactctacaaaaatttcaaaaattatccaggtgtggtgggaggcacctgtagtcccagctactctggagattgaggtgggagggtcgctcccaggagggaacccaggaggttgaagcttcagtgagctgtgattgtgccactgcactccagcctgggtgatgaagcaagatcctgtctggaaaacaaaaaaagaaaaaaagaagaagaatgatttaataattaaaatcccaaatccaaatggcttcaccgttcaattctatccaacatttaaggaagaaataacagcaattttacacaaaccaaactctggtcagcatgatcatgtggtgtgtcagagtgggtggaaaagaaaagtgcctgaaaagagaaaaaagaatgccccaaaggtgctcagctgacttgaaagtattctcaaagtagacgcaatgttttaaagaaagatgttcaagagacagcaactgtggtgatgccagacactgccaagaggaaatgagtgtgtggtgaaagatgaaaaagatgacacaaaaatggaggctgatattaagaggaaaaaaaggttttctagaccagtatgggcagtaaccagtatggaagaagtagaggtaaagaaaaaggctgaggccaggggcggtggctcacgcctggaatctcagcactttgggaggccaaggcaggcagatcacctgaagctag

SEQ ID NO: 195934 - DNA, 1000 bp, Homo Sapiens
cgtctctcttgccatagttttttccagatactgcagtgacattgattaggtctcagccttggcgatgtagactgaggtggagagggattattgtcatgattcttgctttcgtttcagtcagttcttgatttgatttctgccatttattcctctcaatttttacctgggcaacatcatctcccgcctgctttttaaggtgaatgttgacagctgatttcatatattaattctggctttcttaagagggacatggctcccttcattcttaagcctttggggctacttttctttctcattcactcatgatctccatttgatccgcaagacagctcatatttgagagagcagagcaaatgtgttattcccatttcaccgatcagaaaatgagggccggccgggcgcggtggctcatgcctgtaatcccagcactttgggaggctgaggtgggcggatcacgaggtcaggagatcgagaccatcctggctaacaaggtgaaaccccgtctctactaaaaatacaaaaaaacccccaaaaaattagccgggcgtggtggcgggcgtctgtagtcccaactgcttggaggctgaggcaggagaatggcgtgaacccgggaggcggagcctgcagtgagccgagatcacgccactgcactccagcctgggcgacacaggctgtgtcgcctttttttgagactccgcctcaaaaaaaaaaaaaaaaaaagaaaaagaaaatgagggcctagtaagattactcttatttgctcaagatcataggaaagttagtggcaaagccaagagttgatcctggatccttttgtatccaagaccagtatcttttgcaaatacttttctttattttgataaataattaacatttacatgcattattttcccccagaatttgaattttttcttaggatagattcctaaacatggaagtattgagtcaaagagtataaatgtgctttaaaaaaaatgctcttaatacattttgcagaatt

SEQ ID NO: 195935 - DNA, 1000 bp, Homo Sapiens
ctgtcccattttgtagcactccaatcttgtgacttccaattaggtgacaagaagtgtctaaattcttatctgtggtatttcatcataaattttgtataagactattatatgaactgacaacagctatgggcctggagacaaaaggattaagacacactaaaaaggtatggacaaatgaacacaggtataaaacctgaactgtatttcaagtcttttgctctttcttcaaatttttgctacctttggccaacatcaacagtactaggtcatttaacaaaaaagatccattaaaacttaattcggctatatgaaaattaacttcaatctacaatgtgtggcttaaattcattcaaagcattgtggttaaaaaaggaactctaaagtcaacctacaggagttggacaggtaacataagtgaataggataatctgtcaaaccaaaggagcttatacctcgtaggaaggaaaccacagctactcaattccatcaactggttgtcacgtagaatgcaggccctatgtaaccagaacttccagtttttcaaaagaagttagaaatcaagattttcatctaaatatctatgggatatgttaacagaacttccattttttcaaaagaagttagaaatcaagattttcatctaaaatatctgaattctaaatgttgctaagtaattaaattattttaagaacactgtgtaaaacaagcaaaaccacaaaccaaataaccaataggacatggagcaagccaaacaaaacatacttgtgggctaaatctagacaatttgcaacccctacgaaagggatcagggtttttaggaaagggcattttgtaagccaagaccaggaaagaaggggacaggcgggtgggaaaggagatgttatatgtgaatgaaactaaaacaactttccagggggaaaaacccagaatacactgctcccccaaaaaacaatataaagaacaaaatggaaatttaccatatctgaattttcttgaattc

SEQ ID NO: 195936 - DNA, 1000 bp, Homo Sapiens
cacctgcttccactatgttacatccaaacagctggcttcaacagctagacccaataaccaaatgcaagatttctgtaagattcaacaacaaccaaatactactggcttgctctcatctcctattatgcaccaaacaaaatcctctagtctcagaaacctgtcgagaggtcttctataatcattccaagtattgttactcccaactctaaggtgtacattcaagcaaaatcttgctattccctgcctacaagacaccttttaccccccaattatgggcagattcctttaattactgagcctgcggtatcctaattctttctttaacgtaccaaacctaacaggatctgatccactctcccttttcaatatacatattattataaattgacggtttcattgaaagcatatcgctgtcttctcttccctaccagtggctctttactagtatttcacattaatcttcactattgctatgcatcttgtaagttaaaattctgtctaatttgctgcccattcagctataacataacttattttctgaacatttaaattatccgtgtgggaaagcctcaaattattaccatgtactaaatctggaagtcattttgaaaattcagtgccttccaatcaatacttctgggactgagtaactgtgatgggagaatacctcctcttcattctcttagctgcttgcctttggggacattttgctgcacattttaagaggactggaaagaaaaatacagttaaaacaaactagtctattttaggttctgttgatagtttagtgatgtactaggggaatgctggggtgtgtggtaggaaatggaggtggggaacagatagacatggaacagaatcactaagagctttgctgttttcagttatctacatgtatagacaactggaaaaaattgaaagatcatccaagttggaggaaaaaaattctcataacacaaattcaagcaatgagtaaaaaagaatgaggaagaattccgcg

SEQ ID NO: 195937 - DNA, 1000 bp, Homo Sapiens
gccatgtcaataagcaaggtcaataggtaaacagggacattatagagcctccaatgaaaaagacaagcagcaacggttttagaatagtaagaactgccagcacttgtacagctcggaacagtgttgttctaagtgtttggctcatctgaactcctcttgaggttcacaagcctatgagcttgttgcagaagcaaatacaggagaaaccttcatgccctccaaggatgacactggctcaaggcggaatgttttggcactaggaggacttcattaaatttcatgttgcaattaggaaagttgaaattcaaccatatcaaaggactaatatggttctttaaagttgacaacttctattcgtcacaaaactccattaagagagtacaaaatgcaaactgcaggatggaaaaggatattgagaagcacataaacccaaatgaatacataaagaacacctacaaaccattaaaaataatcaagtcaataatgagcaatgaccttgaacagacacttcattggagaaggtataaggatggcaaataagcccatgaaaagatgctcaacatcattagtccttagggaaatgcaacttaaaaccttgatgagagaccactgcacattaatgcagtggtacactgaaaaacactgaccaaaccagacacagtggctcacattggtaatctcagtactttgggagcccaaggcaggaggattgcttggggccaggagttcaagaccagcctgggcaacatagtggccatgatggtctatccctccagaaacaaaaaaaatttattagccaagcatggtgacgtaactgtagtcttagccactcaggaggctgaggtgggaggatcatttgagcccaggagttctaggttgcagtcagctatgatggtaccattgcactccagcctgggtgatagagcaagaccccatctttaaaataattataataatgaccatatcaagtgcaggtaagaaggtggagcacctggaattc

SEQ ID NO: 195938 - DNA, 1000 bp, Homo Sapiens
actaacaggtcttctgccatctgtctcttcccttctattccttcctccatactatcagacgatatctttctaaaataacaagataaacagatcacattcttctgccactttaaaagtcctgaaggttctccatttccaacagaatcaagtccaaatgcctcaatatatatgaaaggcccttcccaaaaggccccattgtagctttccagttttgccttctaccacttcctctgtcatatacctaataacccactcataccacgacaacctggcaaatgagcaaatatatgccttttgttttgttttgttttttgtttttttttttgagatagagtctcactctgtcacccagactggagtacagtggcgcgatctgggctcactgcaacctccatctcctgggctcaagcaattctcctgcctcagcctcctgagtagcttggatacaggcgtgtgccactaagcctggctaatttttttgtatttttagtagagacgggatttcaccatgttggccaggctggtcttgaactcctgacctcaagtaatccgcccgcctcagcctcccaaagtgctggaattacaggcgtgagccaccgcaccccgcccatacgtgccttttatacatattgctgctctacctagactgttcatctccaatcttactcatccttccaggtctagtttgttacctcctccttccttgacacccttgaaaactggctgctctgtgccaccaaatattctgtacatacctctttcatagcatttatcacatcatattgttgtttacctatttgccccacaagtctctgagctcactgaaatcagaaacaatgtcttattcaacattctattcccaggacctggaattcaaagtgattaatgtttcactaacgagtgacacctatgtctctcagaaaaaaaaatctctattaacagggcaaggtaatggtaagagttcaccatccctccaggactaccaatgaaatgtgaattc

SEQ ID NO: 195939 - DNA, 1000 bp, Homo Sapiens
gaaagaaatcacaataaattagattttaaaaactgataaataccattaaaaatcacaaagaaaaacattataaattttataaactgcctgacatgttcctaaatttttaaaactattttttgctgcacgctttttgtttgcctctttataaagatttcacattttgaaagaacattttacatagaatagaaagataatccaggctttcctctagcaagtttgtttgaaatttgttttgtttgttttttaaattggtaatctggaaaagtttctttcagcatcataagttggaaatgtcatgtaaaattttaggattattgtcaaactttggaaaacttttacctagattctctcatgtatctgatttgagagcatttcagattttcttgtgagtgactaatgcaactcctccttgaattgaagacactcatttaacagtttgtcatcaatgtcctagtgtagtggcttgacagtaagctttatgttgaggcctgtacactcacatcatggtgccaggtgagttagcaccatgggcagcaggagttttcctgaaaatgattcctatacctccatggttggcactaactcaactataaacaaaagtgactgtgtacctcctaaacagatcccactgaatttccccttagcttcatctcccaaaaacccttgccactccagcaacactcactttatgttgtgagggtggagaagttcgaatggaaaagaaaagtcatattaattattgcagctaaaagatcttaattgtgcaaatttgacaaaaatatatgaccttgtgaacatattgccagggtctcttcctcactgaatggagatgtctgatagatctctttccatgttttagctggcacatgccttctgcccttttttcttttcttttcttttgagacagggtctcgctctgtcgcccaggctggagtgcagtggcatgatcttggctcactgctttctgaccttttgattttcttcttgcttggaattc

SEQ ID NO: 195940 - DNA, 1000 bp, Homo Sapiens
tcacaaataaatggacatggacttattttttaatcagacaacaaattaatgattaaaataaaatcaaacccaaaaccaaattttcttccatgtatggttattcagcaggacatgggagcctcttgggctggccctttgtccaccataaaaggttaatctggactgtgaggctgttcatcctcccgctagccagtgccttcaaggacacactgccctgcagtcattgtccctaaccagaagaggcaccctctttcatttcatggtagttcagctcatgcccaccctgggtacacttgctgggtgttctgcctcagaaccaggtctgtaagaaagggacccaaccactgttggtttgacctaatcttcctattttccaagactctgacttttttccatccccatcttgctaccaagtctctggtttacctagaggcagaacctacaatgctcacttttaagtagccttctaaggatgggctgtgaaggtgcacaaatcacagccacagcttaaaaaatgagcagaaaacaaggcaaagttgaccggcagctcagatcctccctgccttctgaactcaagactataccctgacaaatgccccagcacctcctggctctgtcaagttccctgtaatgtgtcttctccaatagcaggtggcgggtaagtgatccacagtaactgcctcctcccttgttccatccttgacaacagcaatcctcagtgtcttcaactgaacaccaagctaactgtgcctccctgacacactcagtggtgtcccttaagctaagcaaccctgagaatagaacctctgcatccaaggtggagtggggctgacacccactctgccagcctgctcagtgggcccagttgtttccggcctgcagcttccttctcatgggaacttgtcagtccatctagatcctaggtgtggccatctgggtgtctgggtgtcagagttggccagtccggagaagcctacgtaaatttaaaacctatgaattc

SEQ ID NO: 195941 - DNA, 1000 bp, Homo Sapiens
tgctcaataaatatttgcaaaatgattgtaagagtcttgaaggatttcacaggtagagagttgttccttagttcatgtggtaggccctgccactggtaaaacagcctgaacaggacctagtagctccgtgctctcaacaccttctgttcttgtggtggaaggcagacatggagaagtgagaattgatagataatgaagttgatacattcagggggtgatcattgctacaaaggaaacaagcaggctaaccaggtagagattgtcttgaagggtctacagataaaactgccagaggaggcacctctgacaagggagaatatgccttgagaacgtggaggcagagtgttttaggtggaagacccaccaatgacagactcctggggctgtgacaagcttaggctatcaaggaacaggggagagtgagaaagaatctctctgtgagcacaggagaagaataggtcagcaaggaggtggagagggaaacaggccagttcagtgacgggagggccatgtagaccctggggaatggtttgagaattaggctaaacgtgatgacaaggcagtggatgtttttaaacaattgatatgatcttaattatattgtttttaaaaggaggggcaagaattactggtggaagaggcagtgtggtcaaaggcatagagcagggtgtgggtgaaactgaggataagtttagggaacgatcagagcttcactggagactggactgcaagtggaaggaaagcaggaggctggggtggtgtcgacaatggaaagagagcaaagaggttattgtcacagggaattccatgagcagagttgcatctttggaaggctaatgtgggaatgtattagaatgaaggagtcaggagcggagagactagctgccatgctgctatgaaccgggctcgtggaagaaggaatgcaggggaggccacagtgctagaggctcatcattacaaccaactgaatgtaagatgcatgggagaaacgaagccaaca

SEQ ID NO: 195942 - DNA, 1000 bp, Homo Sapiens
cctctttcatgccgcctgtgtttactggtggtttttccaaaacaaaacgcagtcgcttctctggtcaccttgccaatgcctcacagccttcttggctgctgagatctttctgtgcctcagcagacagtcaggttatgtacaggaaggctgcttctccaacctttctcagctctctcgacctctcgcagaattcagttttgttcttttacaaatttaattaaaaaaaaaaaaaaaaaaggctgagacccagaaaaggaagatgaccaggtgaggaacacaaagcttggggtaccaggccagggaacctgggagtctgcattccagtctggcacttcctcctccatgcctcccattccccactaaatgagaaacaaatgaagttaacagtcccacactctaccgtgtaacgcaacagggtctcagacctccaccatctcttcttagatgcctttatcttttctgttacagctggacatttcctctttatctctaaatgacccaaagcgggtcttgccggctgcttggtgtaatcatttgagatccctgcctcccagggctattgagaagctacggatagattagggggtgaaggtttcacggactatcccgtcatggcccctgggaggtacagtcctatgagtacaaggtccagggactgccagtggctcccattcattcaccacccccagcagagacctgctgatgaaaatcactacgcagggccctcgaagtttcctggaaatggctgaggccacaggcctgcttaatgggaagacaccatttccaatttccaaacaaatgaattcacagctcaattgcactgcctggatggttccaaattcctcctgctgagcctgatttccctcctactttatttttttaattattaaaaatataggccatctgccatccacgtaggaggaaggagacggctggagggccaaaaacagatcctacgtgatgccaggcccataatgctcatctctgccaagcagcctca

SEQ ID NO: 195943 - DNA, 1000 bp, Homo Sapiens
tgtggtgttaccattagggggcagctgacaagctcatctttaaagatcttcatatccctatttccctttaatttgaattacctagattcctagaataacatatgaaggacagaaaatacgcagttttgaaactcatggagtaagactttattatgtgtgacaactagaaactttcatagtttatgcatatttctatatcaggtagatcattaaatttaaccataagagtagatgttcaaaagaaggcattctatttatctcaacttcccattaattatatcactctccatcatttttatgatatgattttgtgttattgatatttattaaggcatattagtattctgtagaagactgagtatatttattgtactaaagcaaacagatttcacttaactgatgatcacagcacttgaactcaatcttatttaataagaccaagaagtcctggcatttgttttagctttgctttcattggttatacataaaattatgacttacttttaaaatgtgttcttcagctttggcttgcttcgtggcccctccaacaccaggtgaagctgttagtcccagtatctgaggaaggggaatcactggtttgttttctttcttgagtctattgtttttcaacttctgcatcaaataatgcctcatgatgttattatacactgcttctttgttggtgtgatgacattcatcaatgataatgagggaaaagtcttaaaagaaaattcaaagagttcatttctccatatcagcacactacagtgagaaaatagctttagaccagtaattgagctgccttggggatgccttctcttgggcacgacacaagagcagtccactttcagtttttaggagggaaatctaactatactagcacctgtacacacagacgttcgtatatactaatcatgaaactccctgttagacattctccttctttaatagataagattcagaaagtttacagagctaaaaagcgttagatgtggaattc

SEQ ID NO: 195944 - DNA, 1000 bp, Homo Sapiens
atagaaaaatgggtttctaaaacatgtgtgttctagggaaagaaaacagctggagcaaaagctagagggtgggaaaatggctgtacggccaagaggccgcagagacttcaagcaactggagttaagccttgcattacaggatctcctctgattggtcagtactctgagtagtagggagctatgggaggctccggagtgagagaattatggccagagctgggctctggaaggctctgaggggccaggctggtctgggccatgcacgcccatcccagtcctgcacctgcccccactcacataaggtcctgatggctccttctcatctgctctctgcttcccgccaccaccagggccactcggtcgctcctcctccacgagactctcagggggcgagggagatgcactctgcggagagacaaaggccggggggagaaagggtcagggccctgggctcctagattgcattgtgatccagccgagactgagggtcccccaccattattagggtccggacctcaagcttcccatctgggaaatgggagcttccaacggctgactcagtgctaaggttttgttctctcttctgttttgttttgtttttgacggagtcttgctctgctgcccaggctggagtgcagtggagccatctcggcccactgagacccccgcctcccgggttcaagcgatcctcctgcctcagcctccccagtagctgggattacaggcgccaccaccacgcccagctaatttttgtatttttaatagagacagggtttcgccatgttggccaggcctatctcgaactcctgacctcaggtgatccacctgcctcggcctcccaaagtgctgggattacaggcatgagccaccgcaaccagcgccttacttcttctgcaacctctctgacatctataattatttcaaaattaaaccattttggccgggcgcagtggctcacgcctataatcccagcactttgggaggccgaggcgggcggatc

SEQ ID NO: 195945 - DNA, 1000 bp, Homo Sapiens
aaaactaggaaataacacagtaaagtacttattggtggtcataaacagtaactgaaatcattgaaaagaaaactgaagattataaatggcccttgccaattcccaggaataaatacattctgctgttgtttacttcctctacttcatatcatccctctttacttcccctttaattaatgttagaagatttctgttattaaaaggtaaataaacagttggtatgtgtatgatttagtttccttttttagattgtgtttctttttttggagtctcactctgtcgcccaggctggagtgtagtggcgcattctcggctcactgcagcctctgcctcccaggctcaagcgattctcctgtctcagcctccgaaatagctgggatcacaggcacgagccaccacgcctagctaatttttttttttttttttgtatttttaatagagatggggtttcaccatgttggccaggctggtcttgaactcctgacctcaggtgatcccacccgcctcggcctcccagagtgctgagattacagatgtgagccaccgcgcctggcctagattgtgtttcttgaatctacatgtgttttctgcattatttgtaagctgaggtgtatccacctcatgaccaacatgtcgacatgtgatgatctcttggtaaaatgtctgtactcatctaatctttggttcttgcaggcgacatggctgtatggaatacagataacaagtttactcctggtctgcattcttcagttttttaattccatgattcttggatcactgcttatcagttttaacctttcagtattcattgcaagaaaacttcaggtaggactttttttttgtcctttatcaaagtaaacttttttttaattgcgtggtttattgaaccttattttcacacagcatacaaagggaaatttacaacctgatttgcactaaaaagagcacgtggcattgtgtgctttttcttgtgcatgtggtagcatttctgtttcaagct

SEQ ID NO: 195946 - DNA, 1000 bp, Homo Sapiens
cagcctccaaggcccccaaagaccctcctgagtcccacagcctgcaccggtcctcagtctcgctggaccactgctacctctcgctgagcgggaacagcaaggcgccatccagctccagctccagctccagctccagctccagctcggaggacagcgactcggagcccctgtggaagcagcgagaggtgagagacacggccgcatgccagggccagcagggcctccttcctctctcaccaccctctccctcccccaggatatgcaggccaaccctgtgggcacgccgggctccagcgaagaggacgaagacaccacatggacccccacccggctggcctcacccctgctggcagctgagaaaaaggccacgaagggccaagtagccagggcccctgtgaagcccaaggagaagaagaaaggcccctgcccaccccagatgaagaagaagtgtgtcaacggcttcatcatgttctgcaggatgaaccggaagcagtacatccggtgggtagggggtcgtctttggccctggggaaggccctggcttcgttctctgcccgcagcctggccatgccgctcctcacaactgtctgacactttttccccctccgagaccccacaaacccttcgtggaccacagttcttccccagaactgaacccggccccattgtattggacagggtccatccattgtcagcgctgaaacccaattcaggctttagacttcagaaaaaaaggagttttttttgttttgttttgttttttgagacagagtctcactctattgcccaggctgtagtgcagtggcacaatcacagctcactgcaatgtctgcctcccgggctcaaatcactgcaacctctgcctctcagattctcctgcctcagcctcctgagtagctgggataacaggcgcgccatcagctaatttttgtatttttagtagagacagggtttcaccatgttggccaggctggtctcgaatgcctcacctcaagtgatc

SEQ ID NO: 195947 - DNA, 1000 bp, Homo Sapiens
tgatcctgatcttagatagaaagcattcagtctttcatcattgagtaaaatgttccaggtttttcacagatgtcctttaacaggttgaaaaagctccatttgggtcagttttggaatctcatcaaatgtagcaagaaaggctgacaaacaaagtagtgttttccatcccgacagagaaagcaagtgagggtgaagtctcagattctggagacaatccaaactaacaaaatgtccctaaatttgtcatgaaaataaaagtggggagtcaaaggatattgttcactttcatagttcaaggcaaagttaaatgtgctatgttcactttaaaatgaatgtgttttctgccacaatggcaaagaattaacaaattagcaatttagtttgtaagagatccacggaatatattaagacattgcagatgttatctgttttaccaaggactcaaagaacaacttgaacttctatgatttgctggattcaagggcatactgtgggctgcctttctgctaattagattattttacccaccaaactatcatggaaaaatgatcaaacaagcagtagtttacgcacatagaacaatttgcctagaattgaaggtaagctcaagacagatggagagtgggaaacaaagatcaacttcgcttccacaaatagctgagtgctgagtgacccctaaaatgagctaatattgggcaaggatattgtcctagacctcagagttcccctttatccttggattgtgttgtataatgcagcagtgggtttgcttggtaaaagagaaagagcaaagtaaaaaaggggaagacatctgttacttctattgagttaagccttctaaaaatatttcccttttagtgaccacttgttattttgaccctttgatcttttgctttggaaataggacctttgaaactcttctgctttcctccctgtgtttgtaaaatgatgataatgcccgcaccacagaagaagagactccgttttacatccaaagctt

SEQ ID NO: 195948 - DNA, 1000 bp, Homo Sapiens
taaacacaagtagttgaaaattattataaaactagtgaccagcatttgtattttctctgttcttctgtatatgctacctcatttcttcttaattcatctgtcatcttcgctcagtgctgttttccatatcatacaatgtcagtagggtgtcagtagagggaatctcccctcaatagttcctctcccaaggaattcaatcaaacttgatccaaagatacagacatggttcaaataataaaatacgatgagtaagcctacctgttattcattaatggtcatgactctttttagatttactatttgagtttatatattacttgtgttgtaaggcatttataatgtttttaatgtagtttcaaaaatatatatttttacttaactttttagtattttttatttgtttactagttaggtactctaaagtgattatagtaattttcagagaccgttttgatcctcagtagtcttgcatattaatcatcgatcatgtgctgtttttgtaatttactaaaactacatgcaaaatgcttctatgaatttaattctaaattaaattttggaatttaaatctggaaaaaaatttcatgataaaagactttacagtctttgcaatgtattacgcaatgtatttaatttgtgtctgtcatattttcttagttgataaattaatataaccatttaaactgaggcttctgttttctttctatagtatcttcaaccaatcttgtcactcctccagcagttgtcagtagtcaacctaaattgcagactccagtgacttcgggttccctcacagcaacgtcagttcttcctgcacccaatacagctactgtagttgctactactcaggtgcctagtggaaatccccagcctacaatctctttacagcctttgccagtgattttgcatgtacctgttgcagtatcctcccagcctcagcttctacagagccatccagggactttggtgactaatcaaccatctggcaatgttgaattcc

SEQ ID NO: 195949 - DNA, 1000 bp, Homo Sapiens
cataaaaggacaaagtcataaatcttgtcctcacaggaaaataaaaaattaataaatttgatcactttaacaaatttgatcacttttaaacaaaagtgatttctcttctacatgcaggctctaaacacacacacacacacacacacacacacacacacacacatccagtatttctttcttcaaaaatccaaagggtagcattctcctactcaggaaagatctttcaaatctgagcacctgtatttggccagggtagaatttcttctgcagtccttcttcctatgtgaactgaaggaaaaaccaggatacagatgtaaacaaaatcaaataaaaactgaaatattctccattccccctcaagctcagaaacaattctggagcctctaacaaggtgatgagaggaagaaccacgaatcacaaagacagcaattgtggctccacagagctcacgggtgaaactgatctatctgcatggtaacaaattccagggtaaaggctgcagtagctccatgatttggatgttttgcctgtgtggggccagccagtagatatttgaaaaattcaaatcgaggagtatgcgtcttagttttctcctaaatatttagtgcctcacaccaccacacagcccaccaaacaccagagtccaaaccacactcataccctttctcttttatcttcaatggctattagcagctgtccaaaagagaagtagtgtttttattcttttatagtttgtctttttaaagacacggattcataaatctgggttttttcttgcctctgtacatttaggttcacatttattttaaaacagggaagagagtaagccaaaaaggaaggatgtgagaaaactattaacccagccagcctaataatcagtgattaaagttacagtcagagaagaacgacatcttgatgcctcctaccctcttcctcctctgcgtgcctttaatattctacttcaggcactgagagggagggcaacagggctagtgaattc

SEQ ID NO: 195950 - DNA, 1000 bp, Homo Sapiens
ataagaagagccaccagagagcttgtactctccctgcacacacaaaagaagaggccatgtcagcacacagtgagagggcggctgtctgcaggccagaaagagagccctcaacagaaacggcattgaccagcaccttgatcttagacttccaacctccagagtgtgagaaaattaacttctgttgtttaagccacccagtctgtggtattttgttatggcagcctaagtgtcctactatgatatcttaatatgtattatctagaaggaggaaaggctaaaacaaagtcaaagccgtgaataccgaggactacgggcacataccaccatgccagctaatttttgtatttttttagagactaggtctcgctgtgttgcccatcttggtctcaaactcctggcctcaaatgattctcttgcctgggcctcccaaagcactgagattacaggcatgagctgccaatacccagacaaggattacatgattgttttgaaaaacattatcgttggttaaaaagattaataacaagggtggcatcagttttgagtttggacaggcagttgctgggcaaatgtctggtcttatttaaagcatttcactcttatgtttttgagaaaagaacttttatctaaggaatgaaaatattttcaattttcaggcccagagaggcattaaaatgagacatccaatcatgtcatactcctccctttgagctatatcttcatctctggaaactgcttgctattgccacaagtagctataaattaacctaataatgccacacctgacactataacccacaccctataacttaataatatgtagccagtcactaaccagtgccatttctgtaaacccatgaaaactgacaaacaactttgtatcaaccccactgcttgtccccctttttttgcctttaaacatccacttgtaactgctgctaagcagagtgtgcattcagtgcaacttgcatccatgatcccaggttgcagttctcaagct

SEQ ID NO: 195951 - DNA, 1000 bp, Homo Sapiens
tttcccattgtttcttgtagtcttatctccttctggaattaaaaataatttttgtcttctccttttccccccatttttagaagtcatgttttctgtttcatcctatttctattcaattagtggagtaatttagatttttacaagattaaaaattatatagagatgagtattattgatgacctgccctcttcacagaaatagccaacactagatatactcatgtcctcatgtcgtatttatataacattttcctcataaatttaataaccttcttactgtttgtcctccagatttattcaggagattgagcatgctctgggtcttggcccagccaaacagtgtcctcttcgagagtttctcaccgtgtacatcaaaaacatctttctcaatcaagtcttggctgagatcaacaaggagattgaaggagtcactaaaacatctgaccctttgaagattctggccaacgcagacaccatgaaggtgctgggagtgcagcggcctctcctacaggtaataatacactttgaacttactatttttatcagcaattttcattgacttggcaagtgtcataaatttaaaaaagaagaattaccatctgtttccatattcatcagggacaaaacaaaagaaaataaataggcactagggaaatttagatttaatgtagttggataatggaagttccttaagatctttaaggaaaattaaaaaaaaaaacggttagctttggatatgagagatggtgaatctcattaacatgcaggcagttcctcattattatgcctggaattggtccttgaaaggaactatttttccattggtgaatgcatccctgagtatgaaggattaacaggaaggaagctatgatgcccaacttcaattaccagcaggaaaccctctataccttttaggggcagacttacctttcaatgacttggctacctcacagggaatttgaaccagtaaactgacctttaaaagtcaaatcactgaattc

SEQ ID NO: 195952 - DNA, 1000 bp, Homo Sapiens
ccatcctggctaacacagtgaaaccccgtctttgctaaaaatacaaaaaattagctgggcgtggtggcacgcgcctgtagtcccagctactccgtaggctgaggcaggagaattgcttgaacccgggaggtgaaggttgcagtgagctgagatcgcgccactgcactccagcctaggcaacaaagcgagactctgcttcaaaaaaaaaaaaaagaaagaaagaaatgcagaatatgttaataacacagattaaacttatatgtgcttgtagactttgtttgtttgcttgctttagatataggatcttaatctgcctcccagattggagtgcagtggcgtgatcatagatcactgcagcctccaactcctgggctcaaacgatcctccctcctcagtcttccgagtagctaggacttacaggcatgtacctccatgcctggttaattttttaaatatttttttgtagagatggggccttgctacgttgcccaggctggtttcgaactcctggcctcaagtgatccccgcctcccaaagtgctgggattacaggtgtgagcaactgcacctggcctgtatgttgtgtttatagccattgcaagtgaatagcataaaaaattgagaaaatattcttcctgtactcaaaaattattatgcaattcaacaaagaagttgctcacatcactgctgaatgagtgaagttctgcaatacaatgtcgctgtttcactttcagcttaccctttaacacgtaaatgaaaataccaaccaatatccatgcctgaactacatttgctcatcaattttaaccatagattggctactaataccagaatttggcaaaaatccatgaaagcattttatgagaatcaattgactctatggaatctacaataaaaggctattggtattttactattgttttaaaattgtgtgctagaggacaggcaccgtggctcacgtctgtaatcccagcattttgggaggctgaggcaggaggatc

SEQ ID NO: 195953 - DNA, 1000 bp, Homo Sapiens
agaccagaaacggacagaacaaacattccaacccagatactctggatccactcccctattcttaaccgcaacagcgtactgcctctcacagttcacacaaatagcccaaaatgcaaccggaactgccgaatctcacagagatctggcaagtattacaattatcatctcatggactctcccgaaaaatcctgactctggttgataccaatttctgtgcaatcactttccgattcctgaaagcctcacagacgaatggaaatcacccaaccatctccattcttccctacttggaaaaggaggcctgtaaagagtcagaaacctggcgtgtgattccacaaactaatcttcttttcaaagcagagtctaaaataaagctttaatataaacctctggaggactatttttataccagcttagaagaagagagcgtacaggaaggtgtgaacgatttgccaaatggctctgtgaatattaaatggcaaggtggggagcgggcggggtggggaacggctcgctgggaggcggcacaatgggagggggcaagaatcaatttgcatattctcctgaaattcactaaaaatttacaggaacctctatattctaaaatcaaaaacgcatttcttgaacaaatacaaagcacaaactcacccttgacttaagtgtgcaacaataacgctctcatcctcctctcggtccttcttttggataataatacgactggagaaggatacggcaagcgtgagactccaggcttttcttggagcgcagactaagtttgaaagcaccctccatggccacaacttccctcacttcgtacgaaatgagaaggaaataaaaggaggaggaatcggtctgagttcgaagctggttcctggggacagatctctgagggacgctgggttctcaacatgtagctgccctcctgggggaccctcaagaggcacttccagctctcatattcccaccccgagtccagatctgcgccttcttgtgcaaagct

SEQ ID NO: 195954 - DNA, 1000 bp, Homo Sapiens
ataagaaactgccaaactgtcttccaaagcgtttacaccgttttgcattcccaccagcaatgaatgagagtttctgttgctccacatctttggaagcatttggtgttatcagtggaaaaagcttttttttattaagatgtctcattgacatttacaacttcatacgtctgaattgtgttcactctcgccctctccaaacctcctatgttccttaccttgaggaatggtaccatcatccctcggggcacttaagagtatttcatgtcctcctttctccatcactactcaaataaaccagtcactaagctctgttgattctcacacttgtatttctttgaggtttgttcctgttttccatcctttgtgcctctttccatgaaacaacctccttcactcttctcccttcctctggcttgccctggtccacactataggcagctatcttccaaaattctgtgttacttcgttatttaaacaacaacaacaacaataacaacaaaaacctttgacgttctcccactgccttcagattaaagccgcaactctcctgggtggcctgaaaggtctccatgaactttgctctgccaaacacctttggcctcattagttgcttttctgtcccccacctcaacaccctgcatgctatttgcagtgtttgtaacatctgcagttccccaaacatgcaaggctgttgtaaaccattgcatgtattattctacttccttggaactcttgtctggagaattcctactcaggtttcaagatttaactcaaacatcacctctcttgacaactaagagaaaggacttctttttctggatccctactgagtggcatggtctagctaagttatgccttcatctccctgacaggcagatttatttgtttatgcatccatcttcccctcctactccgtgtctgtgcatttctgtatccttccagctagccactgataaaatttgctgcattaaatttataaaagggcaacagaaggctgtgg

SEQ ID NO: 195955 - DNA, 1000 bp, Homo Sapiens
gcgatgtaaaaatcacactgagggcaacttggtgttcgattaagcagcttcaattagattcatgctggatttcacagaagcagtggtctaggtgctcccagggattttcagaggctatttataaggcagcatgttcccagaagtggagttgggaggtccttcagtcggaaattctgaacgtcttaattataaggggtcttagacaaagtgctcatctagcatggaatcctctgaccctgataagtccatgaaggagtcaggattatgggtctttgctcttctattttcctagctggtattgcttgttagcaattgacacccagtagcttagcatcaccattctaggttagagatttctagccagtgatttctatttcaatgtctgcatgacacctttgtctggcttgagagtggtggttctcaaagcgtgatccctgggccagcagcatcagcatcagccttacccaagtgaacttgttagaagtgcagattctcaggttccaccccagacacactgaatcagaaactctgagcatggggcagctcaccaaactgttttaacgagctctcatgcatgttaaagtttggtaacactggtctagggaaagtgggataacaattgctaagggcctctatgtgatttccaagctaggcttgtgatgtttattgttgtataatcacacttgagcttagaagtgatcaaaccactttaaggattaaaaaattggactcaaaactttaggaacttgcccaagatgatgcatccagcggagtggctaagtcaggattgtgaacccagatccttttgatctaaaacttgttatttctcctataccatgatgaccagctgtggctccaaatctgctcccaattggtacaaaagggaatccagttggttctgtaatgtttttagaattaatcccttcttcagaagtagattaataaagctatttttaggctttactgctatacaggctttattttcatgtgatttaagact

SEQ ID NO: 195956 - DNA, 1000 bp, Homo Sapiens
gactccacaatgtattctatactagcttcaccccagttgatgcaaatggaaactcattgttgagggaactgagctcccaaataccaagcttcctttatcccaggctcagtggtactattgcgctatgattggaatcatcctgaaacacactgatctcaggatacatggccactgtgagtcattgattagaaaatgtctgttttccactgagaaaagtgatcagcaccctatttggccaaatctatgtttcatgtgtccaaggcatgtggctggcataggggcaagaagtgcagctaatgagagagtcttgtggcagttctcacactgggcaggcaacggatgtcctagtgggtactgatacctggaaatttaaccatctcaatgggagaaacactttggaaacattggaaagaagaggagttcaagaaaaggctctcttcttggttgagttcttaaatttaactctcagcctcttacaagaaggtgtaccatgaagaaaattgcatctctggacatccttttttctcccagttctattactttgaaagcttgcataacaaggagaagaaaaaaagtataggttatttaatgcctccatattcctactattatgggcaacagaaaagaactgcttttaagaaccaaacttctcaactcagaaaacatgtttgttaaagccaattattatccttgcagaaaatgcagtttgtatagattgtaagtttcatattcttgctattttagttactaataagcactacttcaatttagcacacaatctaattccatttaaaagccttttgatttttttcaagccatgaaatagtttgccttgctctagacaatcttcccacattagttatggcaatgtaggggggctctatgtataaataacttggcagcagggttaggaagagctttctacaccatcaacaagcctacatgtgagtattcacaattcttagagaatttccaaagtaatgatttaaaataaaagctt

SEQ ID NO: 195957 - DNA, 1000 bp, Homo Sapiens
ccgcctcttctctatcccccccaccaccccgtggattctgttgctgtttgatgaatggcttgggctggcaatttgtatttccctctccaaagtggtagtggttgagttgagaacaggggtgatgaaatttaacaaagcatttttagaagagagcaatgtgcatgttgtacgcagtcattggaaagtcatgctttgcgctaggtatccttttgaagcccccgaacctggctctcctgaagccgctctctctctctcctgctagtcagctactagtggttgtgaatataacaatacaaactttgtcctgctggaggtgtaaagactaaaaagagaaaaaaaggatatcagtgggaggtgtagtggaagaagctttttaaaaaatgacagatgtggtgaagacagtacaagcgtcctgatcatggaggagcctctagctgagtaggtggagatttctgatcagatctggttaaaggcattgctggagtatctccagatatgagcagttgaacatgcacaatctgagacttgtgcgaagatttcccaagggaaagagggagccaccaggagagaattctgaaagtatacctctctttcccatgcccccaccagcgcgcgcgcgtgcacacacacacacacacactcacatgctttctctttctctctcaaagctactcctgcagcgagtcagaaaaaaaaaggaaaatgaatctagatgtttcattcatttcaaataagaagacaaagccggaagagggatgattggttttaggttcctctttcaaatcctgtgttacttggattgagctccctgggtttgctaaacttgcttaattgggaggttaggcgggtgtgaaagcaggaggaaggaagggaaaactagctccatctttggggccttgtgagtgagaaggtgggggaggaccaacttatttcatcaagaggcaagatgtgtgctcttaaatggttttcgttttacaaattctgcctgcttgaagaattc

SEQ ID NO: 195958 - DNA, 1000 bp, Homo Sapiens
cggaacccccgaaaatgaaggcgaagagactgtgcagtcagtaagtcattggtgcccactcgggatatccaagttcaggggaattctcagactagagtttcatcatgagacaacagctgtccgcacaacagaaacagtatataaaagtattgaaacaactgcttaaagctagcagagcctcggtttcacaggctcagttaagggtcctaaggcaaactgttgtttcccataatccatggttcccagcagaaggcatgctggacctagagctctgggaataagtggggagaaatcttaaacaataccataaacaagggcaacgggtcccagtaacatctttaaccttatgggccttagttagggctgctttggccctgctgtacacagaagatcccaagaagggaagggagaaggaaccatcacctaccttaccgccgcctcctcttccctcagccctgccattactgggtaaagataccaaagaggaaacagaggttttccctgagccccctcccccaataaattggaaaaaagacaagggatacactacagctgtgggaccctgtcttaggcaagtggcattagaaggggagctcttaacctgcccggtaatgcaagatcagcaaggtactcaggtatatgaacccatttcttttgacgcttataaagataagaaaaagcatcagagcaaacggagctgctagtccatttatgaaaggattaattgaagccatagcagacaacttctgtttggccccatgggactggtcagtgctagctaaaacaactttagagcccagtcagtacctcctctggaagacagagtatgatgagttgtatgaacaacaagccaaccagaatcaattggccgggcaaaacataacagctgctatgcttcaggggaggggttcctatgccagtgtccaacaacaattaagttttgttccctaagcctatgcacaagtgtctttgtgtgctatgagggcttgggactgaattc

SEQ ID NO: 195959 - DNA, 1000 bp, Homo Sapiens
aataaatggttagtcttataaaataatgtataataaagagagtatactttagcaaggtggttccaactaaagtgggtaagaagtataatttgggtaaaaacattccctatgttatccatgtaaaagtaagccatactcaaattgtatatgaataacctggattggttttatatgtaatttaagttttttctaaacatacatacttaatgcatagctgaaagtcacaaggaatcaacatagttctatatgaagaacgggtttttgtaagaaacatatttacatgtcttatatctgcagaaaccattttctccaaactgaaacttggcataactcatttgataagctgaagtacactcatggaacaataagtatatttgaaatcaggcctgagccccaaaattgatcatctctggcagctatatctctgcagagaataagatcacacctaggcacccatttatgtgacagcttgtgtacactgtgtgtacacagggcagagacatatcaaaagagagctaaaatccaaagaaaaaaaaaccacccaaatgtccatccgcagtgaaattgataaagaagttgtgctacctacatacaatggaataccaagcgaaacgacagggcatgaactattaccatccttgcaacatggatgaatgtcaaaaccataatgttgagcaaaagaagccagacatgcgagaaacatgatgtatagtttcatttctaaacattttcattaatctgtgatgttggaattcgggatagttgtcaccttttgaagggagaagtagtgaacaggaggtggcccgaggggtcttctggggtcctgatgtcttctatttcttcatgtttagactgcttacacagtctagtctcacttttggaaaattcatctagttatacacttatgatacatgcactttctatatgttaactatacttcaataagaagctacttaaaaaataaaaataagctagcagcagtggctcatgtctggaattc

SEQ ID NO: 195960 - DNA, 1000 bp, Homo Sapiens
aacagcctggccaacatagcaagaccccatcgctacaaagattacaaaattagctgcgtgtggtggtgtgcacctgtggtggcagttcctctggagcctgaggctacaggattgcttaaacccaggagttagaggctgcagtgagccaggattgtgccactgcactccagcctaggtgacagagtaagaacctgtctctaaaaaaaaaaaaaaaatttgaggccgggcgcattggctcacgcctgtaatcccagcactttgggaggcagaggcgggcggatcaggaggtcaagagatccagaccatcctggccaacctggtgaaaccccgtctctactaaaaatacaaaaattagccaggcatggtggcgggtgcctatagtcccagctgttcaggaggctgaggcaggagaatcgcttgaacccgggaggcggaaattgcagtgagccaagatcgtgccactgcactccagcctgggtgacagagcaagactgtctcaaaaaaaaaaaaagttgaattaagtactccatgtggctgagtcagcatttgaaccaattcagagtctatgtttataaatgtatgccatatcgcttctcggcctttcggctaagatcaaatataaatgagtgccatactgcttttgcttcacagaaatgtcttctgcctcatgcaccattctctactgtcatctcccacctgagagaacacatagaagggctcagcaaaattctctgtaaaatgagtacagcaattaattttttcctggcaacatatgacactcatttttcccatatgttatttttattatgctaatgcaattcaaaaatctggcgaatatttcattagtaagattaaaatgtcaccttgggaattctggctaggttacatgccaaaccctctcttctttgataatcttttggtgttggtaaacaatgcaagcacaatgccaattatctagatccagatcatgtttatcatttaagtgacagaatgagaattc

SEQ ID NO: 195961 - DNA, 1000 bp, Homo Sapiens
ttcttcactaaactccgtttacaccctttgttgaaaatcagttgtgtgtatatgtgtaggtataattttggactctctgtgctgtttcattgatccatttgtctatcttgatgccaacaacacttttcttcattacagttcctttgtaataagtgttgaaatcaggtgctgttagccctccaactttgttctttttcaaaattgttttgcccagtctaggtttgtcaatgtctgcaaaaataccatgttgggattttgattcaggttgcattgaatttggagagaattgccatcctaataatattaagtcttccaccctatggacatgatatatctctccatttattttggtctttcatatctcttagcaacatcttgtagtgttaaatgtacaaatattgacagaatacaaataagactggggaaatatgactaaaatcatgaattctatcaatgtcaacgtccaggctgggcgtggttgctcatgcctgtaatcccagcactttgggaggctgagacgggtggatcacctgaggtcaggagtttaagaccagcctggccaacatagcgaaaccccatctctactaaaaataaaaaaattagccaggcgtggtggcatgtgcctgtcaaatcatttttcagcatctattgagatgatgatttgatttttcttttttagtttgctaatgtggtgaataacattgattagttttagaattttaaccaatattgcattcctaggataaacctcacttggtcatgatatatcatccttattatatattattgtattagatttgctagaagtttgtttagaaatgtgtatctgtgttcatgagggatatgggtatgtagtttctttttcacgtagtgtctttgtcaggtttcagcatcaaggtgatactggcattataggattagttggaaagttcccttcagttttctggaagagttggtatagaattggtattatttcttacctgaacattttgttgaattc

SEQ ID NO: 195962 - DNA, 1000 bp, Homo Sapiens
cattagttgaaaaattgtgattccaccatagattttcttctaacttgcgttttttacttctgtctctctttttcttaaacacaactctgaaggtcaaatattcgggacaatgtagaaatgattaagcttcataaacagctagtagagaaaagcaatgctctttcagcaatggaaggaaaatttattcagcttcaagaggtacagtgataatttattttattacaatgttacagagatgcaaaggattcaaaagtagtattcaagttgtttttttaacatggaattatcataacactagaacataattttgaaggattgttctttgtattcacaaatgtgtatcatttcccttaatatattgtttattatttataactcaagcactaaagaaataattaactgcttggactttttataaatatctgtgtcatcttaaaataataaccatatttattataaattatcttctaccaaggaaatttatttttaactccttttatctgaatttattatggacacatagcactgaagttttgccatatttgcatatatcttcaattttaagcatttataaaattattggcaatagaccaaagtaatgaataggtcagtaatcatgttctgttaaaactttcttttatttgaatttttttttcttttttggtcactaccattacctgaaaatatttgattactcttaacgtcaactatcagtgtatttattttaaaccttaacccttcaggttgacaatacttgggattctttatgcccatggttgttttaacaaggactgtgaccccacaggaatatgccatctgagggcttctatttgttggcactgcataattaacataggttctggaattaatgaactccaagacattccagttgagcagaatttatgtgaagtaacactttctttgaagtcccgagacaaggagggcagtagattgatgcaaagcaaagggtcatctgaagcctaaattcactgttgaattc

SEQ ID NO: 195963 - DNA, 1000 bp, Homo Sapiens
gatgacacacatttgcagtgttacatattttctttagaaaagtaaatatggctgggtgcagtggctcacccctgtaatcccagcactttagaaggccaaggcgggtggataacctgaggtcaggagtttgagaccagcctggccaacatggtgaaaccccatccctacaaaaatacaaaaaaaaattagccgggcatcatggcgggggcctgtaatcccagctactcgggaggctgaggcgggagaactgcttgaacctgggaggcggaggttgcagtgagccgagatcgcaccattgcattcccgcctgagtgacagagcaagactctgtctcaaaaaaaaaaaaaaaaaaagtaaatatatgctattttaaaatgctattttaaaagaagcaattgtgcataaaaagaacatttaagaatgattaactgtactttcacacttcacagaaatgtctcagatcaagctcaaattgcatggtagaaataggatgtcccattaaaataatgagggtatttctatgctcagggttatatttgtagaagtaccagaaaaaataaaaaggaaactataaattgggcattatcttacacaccaggtagctgaatcaatctgaccttaatgtttcataggtactatctgcagagaccaactcaggttgttcacctgtcagaactaacactgattaaataatgcccctgacactattcttaaaaccttttgcctccatatgtttaaagaaaaatcctagcaaatcagctaaaaattgtggttagtgaagttactaatgtgcatgaagaaatacgcatcatcataatttctggacaatcattatttactgatgttttaaagttaaattcacctgacaatagtaaatattccagttcaaaactgttatgaaagagattattagcacgttgaagttctgcacagtttccagctgagctgtcatttaaaccacacccacacagcccaaaagcacatcatgcacagagaattc

SEQ ID NO: 195964 - DNA, 1000 bp, Homo Sapiens
gacgtggggcgggcggacgggaagcctggggtcgtggccaccgcctcgggagctctgggagcccgggtgaccgcgtaggtcagtttctcgcggctgtccacgcctggagttcgaggccggttcccgcgctgacgggttcccgccgggctgcgctcgggaggtctgtccgcgcctggttgggggtgggcgctcccgtcccgggcgtctcagaggatggtcgggtcgtggcgcggcgacgcagggctgcagccgagctcggcttcccggcggccgctggctgctccagcgctgcaggaagttaggcgttaaaagtaacaagatgttggcgtttgttgcacttcccactcgggtgccacgaccatgctggtgccgcatgcatcccctaccagatcttcagctgcgtgccttctcggtactttcgtgtgtccatgtgactttttaatttcctcctaacaagaggaggattgatgcacaatggaagtcacgcattgttcatgtgaccgtttcccaatgtaccgcgtggtcggttctacaagcatgaacgaatatccaagggagattctgaaactgaatgagagcgcagctgcacaatagactttaacaattcacttatcccgctgccctaatgattggcaggaggcattgaaaagggttattctgatttagtattagttttcagttcaagttgtcgtttttaggcagacggtattgtgaaatggaactgtgggcagtgtgatattcttagcttaaataaggttgcttgaatgttgcaaatgtggctattaggtgtctgtgaatagttaataatataattaaatcagctttaaaatcggtgatgtgttttccctgaaaacttcagtctttgccctgtaataggtgcattctggatttggagtttggaacctcctcacctctttactcagcatctgggaaataatttgcagattcgttttgaggggtagaagtatttgcagtctaaccccgatacaatgaatttttt

SEQ ID NO: 195965 - DNA, 1000 bp, Homo Sapiens
gctgaattttaacatttttattgatgagccttagaagaaatacttgaacacatatattgatatttagttgccagctagtttagaaaaagctacagtgaaatgccagagtaacttctgactttaagttccaaagttccattggttagggagattgttttcataatttataatttccaggaaaaggggaaaatatatattgacagaaactctggttggaagaaattttatggaaccgttgcctggaagagtagtgggagttttgaatcttaagatgacaccagaaaaacttaatgatttagattaattaaagagaccttccatgctggcaaaatgcagacagaagttttttttattttagttttataaaagtactttatatagcaatgctttctttatttcatccaagtaacttcccagaccttccacctgttccagtttcattttgtctgcctttgttcctgttcactgtcattgatctatatattcgtataagaatttcatatagtttcctgtctgactatactgtaagaagtaacctaagaatatgttgttatataaattcaagttttaggatagagcataactgtatatgagccaatgcatttttaaaaagtatttaactctttcagtaaagtgtttcttcctttcaggcagtgtttaaaaattagtatctttcaatctaaggagtcattaataattttaaattcccctttcttatagtagtggttcacacctggttttctagtgagggtaagaggtgaagctatgacattggagcatcttctagagaggttatgtgggcagggagaagagtcagagtccaccaggaaacaaaggtgtagtcccatctctgttactctcttgctgtaggacgttggggaagtcacataccaccccgccacctccacaatttcctcacctctgaagtgaggagatcattgcaaatccaattagctccaatattttttggttttcaaacctatcttaaacagtagaattc

SEQ ID NO: 195966 - DNA, 1000 bp, Homo Sapiens
cccaccatctaggaattaatctaacttcagagaaaaactaagaagtagagtgaggaggtgacatatgctcccagagtgacctggagttgcagaattcagaagcctaattataggtacctgcttcacacacatttcctatttaagtgtctgaagccatattgtagaaagatatcagaatcaagactggactgacagcttttctgcaaatcaatattcctggtttcaaggaagtcactggcacagggcctgtgaagtcctgggtagcttcctgtaagggagcattccactattacctcagccccaaaagaaagaactgattccatttgcattccttgccaatagataaggaatggctagacattagcaactgtggagggcaagctggtggtcatgatgactgagtgaatggatgaataaatgatcatttaatcaatccatccactaaaaggtaatcactactaatccatgctttattatgtaaccacagccaggggaccctggtatagattttcctgtccttttagaccaggagtcattgactctgggttggaaaagataggatgacaatccaccagccaaacttaccctccaatataaaaaaaatttaagacatttgaattctcagcagtgagattcttgtccatcttcctgaatttggatactcggcttacctcaaattatataatagtttgcagaagaaggttgcatgggcacaagcctcgatcatcagtccccgagaacggccctgcaaatacagccagatacgatcttcctctggaaccccatactcaaactgcagggactcaaggtcctggagcatgtccatttccaagccactatttcctgcagtgatagacactaatcaatttggctccctgtcccggtagaagaggggtctatgtaggaggtgtgtgtatgatggtgtgtgtgcccaggtcacaagcactcatgatgatgggcttcagcacctctctactcccagattctgaatttggaattc

SEQ ID NO: 195967 - DNA, 1000 bp, Homo Sapiens
aattatctgttttttgagatggagtttcgctcctgttgcccaggctggaatgcaatggcgcgatcttggctcaccgcaacctctgcctgccgggttcaagcgattctcctgcctcagcctcccgagtagctgggattacaggcagtgccaccaagcccagctgattttttttgtagttttagtagagacggggttgctccatgttagtcaggctggtctcgaactcccaacctcagatgatccacctgcctcggcctcccaaagtgctgggattacaagtgtgagccactgcgcctggcctatcaaaattatctcaccacatcctttcagcagctaggataagtaggaattcttatccctttttttgcaggtgagaaaaaataagtttttgggaggttcagtgactttcgataggaagcagctgggtgtggcagagctgagtctggagccagggcctcttgtctctgggcttctgtctgtgcgatggcacagttcccaggcggcggacatctctgcatcctgcctggacatcacctgctgggtaatgctaacaatggcaggttgggaggcaaggaggatcccccacagtccattggcctcttgttctgggcctgggagaacccagaataaggatgaaacaagggacgtctttagggcatgccggcccctctgtgctgaaaggaagctccatttttcttccttctggcaagaaccatcaggccagccctcttcctggtctgctggccctggaaaccacagtaaatgactttttcaggtaataccctccattgccttttttctctcctcttccctttcatccctagttgctaattagtgagatgcttgttacttgcagttttgtgtcccaccctctgcgtggtgcctactggaacactgtccctgcctgctcacccaagttgtgtggtcccctggcccaactgagctgaccagtagatatgagtgtaggtaggaagaagtacagggacttagttatgaattc

SEQ ID NO: 195968 - DNA, 1000 bp, Homo Sapiens
tatattattatctctgttttacagatggccaagctgaggccaagaagagtaagtaatttagagagatccgtagctgataggtggttgagcccggatgaaaacacaccccaaagcccatgcacctaacaaactactcgatttgggaaaggtattaggtgaggtggaaagcaaatagggtgggtgaagcattgttaggtcagatacctgaggataaagtggggaaagggtaaagggaggaacaacattcttgccgacagctgaagctccagtccagaagcagtaactgagggcatggaagtcagagccacagaaatcagtaaataggggaaagagaaaggttttcctaagggaagaaaaggaattgacatttgtttgaggtgtgactggagaattggaaatggcaaaacaagagtttctgagcatgaaggggtgagatcgtgagaaatgaaatcaccctgaagaactcttggtgaaagaaaagcagacccctagtgagcagatggacatgtaaaactggcgacggtttgggttgttcctttactgtgttcattgttcacctgccttcaacatttcatcagacactcccttcctctggaggctagcatctgttttgctttttttttttttttttttttttaaataggactgagcattcaactcttaggcacttggttatatatagtacttaggttattgaaaagagggccgagtgtggtggctcattcctgtaatcccggcacttttggaggccaaggcaggcggatcacctgaggtcaggagttcaagaccagcctggccgacatggcgagaccccgtctctactaaaaatacaaatattagctgggcatggtggtgtgcacctataatcccagctacttgggagactgaggcacaagaatcacttgaacccagaaggtagaggctgcagtgagccaagatcgcatcactgcactccagcctgggtgacagagcgagactccatctcaaaaaaaaaaagctt

SEQ ID NO: 195969 - DNA, 1000 bp, Homo Sapiens
cttgccaacaattttttccctgcttttgtctgtttggttttgttgtcatcctagtgggtgtgagggattatattttaaaaagtaatattaaaataattagtaaaataaaaagtaattttcacaaatcttttgtcatttattcatcataaaacacctacacttttgctatgtgtttttatgtccctattttaaaattgtgaaattaacttctcttatgtagaaacttatggaacaaatactgcaatccaagtcttctgacctgaaatcaaggattctctccatcatcctattttactatttcccctaccagtgcatttcacagaaggacctagataaccaataatttggctgagtggcagtgttttaattgtaattttgatgaatatcaaatgataatgtttcaataaaataaagaaatgcctgcttgagtagcatataccacttttcatgtttctctccacattttgaaggcagccagtccttttcaactgcttttcagagaaatgtagcaggaagcaaaaacacatcttcagtgctctgagtaataacttgacacattgcttaaaaagaatcccagctgtgctgtttcataactcatatgtttgaaagcttctgctgatttttctacatgtggggaatggttttgccttatttgccacttcagtttgcatgatttcaaacattctgctcaaagaaaatttcaagcactcagctcttttcagaaacaaggtatgcctctctgcatagaaaaaaaatgtcaccacaagcaagtattcccttggacaagttcaccttcatgacagtatgtgctcaactcttgctcactcctggtgctagccacttaccatcactcagctctggggcctctgaggcatattctaggaacggtgggtgccacgattaggaacacgtctttgtactacacaagacacctctctgccttgcaaactacttgacaggcaggggcagaccttcaccactctgagggggaatgaagctt

SEQ ID NO: 195970 - DNA, 1000 bp, Homo Sapiens
gacattattattcatgggcttttctaaacctttcttaaatttattgatttttttaagtttatatagtttcctgggataaggtttacttctttgtgggtgaggagtctggctctaggtcgaaattccacatgtgatctttccggcctgaccgtagacaattacaaggctctgcctggagggcctcatggggagaagctgccttccccacaccatagttggtgcacagctagaacattgcagtttcctggaggggctgtagtctaggaatcagccccctgcattcctagcccagatgcctccattcagaggacttccttccattccaggctcccctctctgccctgccgcgtccctgaccacctccaccccaggggtccatttagaaaagcgagagccttctcccacccctccttgacagtaagacaatttccccatctatgccgtgtctacttgatcctcacccagtgctgccattcagtgggggagaaaggaaagctggggagctagcatttctttttgcctcccgcttgcactgttgcagaaagtaagacttgattgttactttcattttagcttgtggtcctaactgactgcctcagtacctgattgctagacagtgggaggtgggagggtgttcgtaattatttattaattttattttgtgggatttttttttctgttttagttttaagaggtgccccttagaaatgtttccggaatttgttgaataataatttgactttacatttgtaaggcactatgtagtttataattttctttgtaagaactttgtgacttaagaattctctcaattttacgaacgcactgataggcgtaagcaaagtgactttccctaaaaaatcatgaactgacaacagacttaatctcaacttcaagtcccggcttagccacctattaagtgacttgaacttgggactaagcctgttgtcggttcagccctctactataccatcctgcttcattggtaaattagtctttt

SEQ ID NO: 195971 - DNA, 1000 bp, Homo Sapiens
gttcaaagagggagaattcaagccaggaaatacataaataaggaggctgtgagaaagagcttgagcatttgaaagaccttttaagcagtttcaccatagtgtccatcttctgtcactttttgatgctattacacatccatttcttcaaggttcagtgcagcagggtttatgtctatgctggagtttaggttttggttttctggaaggacacctggagggcggctatagaggagttccatgaaatattgatcataagccagttgagatgaattaaaaaagacaaaaaagaagggcagattttgatgatcctaaaatatttccatggttcacatacagaaataactgtttaggcagcctaatgcttgtgttcgtttgaaaagcagtcttgatttgttttctgaaatcaagacatgcatttctgacttcgaatgaaaccactcatttattatgacatatattaaaaactataccgtatgcccttttcatcatactttatgccttttgcaatcaagtaatgtatttatatgtctgtgtgcatatatatatatatatatatatatatatatatatatatatatttatctatctatatatcccctgatgacttcccagtgactttttacacctctgtttcagaggagatatataaagatttcaaatattaacccttcttattgcctgaccaggtgctgacctagattcacaccactcacatggaacatttctcctgccatcttcatcatctgtagccaaaaacttgtttgtatttcaaagaatccagagctttagtgggcatttcacacatttttaattatggataatctactggaataggcagaatctgctgccattcatggagtgattataaaataaaggctctctgctcattatgattcaattcccctaatgttttaacaaaaacataaattaattgtatgggcatgtaattgattttaaagtagggaaggcctttctaactatagcagcagtaaaagaattc

SEQ ID NO: 195972 - DNA, 1000 bp, Homo Sapiens
ctagaactgagatctgtttccttgttggctgtcagacaggagctgctctcagcttcttgaggcatccagtattccttatcatgtgtttttttttttccatctcagcactggcactttttttttttttttttttgagacagagtcttgctttgtcacccaggctggggtgcagtggcacgatctcggctcaccacaacctccatctcccgggttcaagtgattctcctgcctcagcctcccgagtagctgggattacaggcacccgccaccagcccggctgatttttgtatttttcatagagatgtggtctcaccatgttggccaggctggtcttgaactcctgacctcaagtgatcctcccacttcagcctcccaaagtgctgagattacaggcatgagccatcatgcccagccagcactgacaattctaatccttctagcactttgattccttctcacctctccttctgcctctagccagagaaaactctctgattttaaaggtcttatgtgattagattcagcttacctaggtaattcaggataactccctatgtcaaggtcaactgattaataaccttaattacacctgcaaagtcccctttgccataatatatcatactgacagacatgctatagcataatactaatagttctaagaattatgataagaatcttggaaaaccatttttagaattatacctaccacagtatccttcaagggataaattgattctacttcttctctatgtcagaagcatctgatgaggatgaactatatattctgaaatccccatgattagatgtgtactagaaggtgattttactttcattaaaataaattcggagtcattgacacattttatctttgatttacataaatgcctccgctctgtttcttaccctcaaaatatttcccatgtagctaagtggccagtaccgaatcctacatgcattaataagtgtagatggacaaaaatatctggattactgagaattc

SEQ ID NO: 195973 - DNA, 1000 bp, Homo Sapiens
tttgttttcattattttctatcctttaaagcagaaagatcatgcaggctgcaggttctttgtaacaggccaagagacagcaaagttggacacgccaaagattcgtcgaataacaagggacacatgaaacattcttgagatgatgggtctgagcaatccattatccatcagatgaggagaccacggcccagggaagacagcaggtagtccagggtcagtggggaagcccatattctgacccgggcctggctgctcccatgggtcctcagatcaggaacgccaggcccgtccatctcaggccttgccctagcaggtgggcggagcagaggctggagccggccaagctccccagccaagactcccaaggccacaggctgccctggggtttcctggacagtgaatcccatggccaaatgggcactgatgccagagaaagaagctcccattttctgggcatgtatagggtatatcatctcactctttcctatttacaactatgtgagctatggcaacaggggctcagagaggtgatgcaacctgcttgacatcacacagctggcacatggctgagctgggactcatactggagactgtctgactgcagacccaagctctttccctataccctgctgccatccgggcagggtgtgtgacacattcctcttgggctcggtgtccatggtctactaaccggggcccagcttctctcaatacctagctgctgtggatgggggcagaggcagatgtttgagccaaatcttgttagaaatgctaagatgaagcctgggtgtggtggctcttgcctgtaatcccaacactttgggaggctgaggctagaggaccacttgagcccagcaatttgagaccaacctgggcaacatagtgagaccccatttctctaaaaccttaaattaaaaagataaaatatataccaaagaaaagaaacacagggatgacatcttcagccttctggggacaaggtaggaattagagcagaattc

SEQ ID NO: 195974 - DNA, 1000 bp, Homo Sapiens
gtgtaagcttgagcaagtcacttttccagtcaaattctgattaacacaatatataccccaggcctgggctctagctgcacctcagtgtgccttatacctggaccatcaattcccatccatgtcaccagcctttctccaaacagctcccctctgcctaggatgcctttccctcttacacacttgacaccttcctagttatctgttaggacccagctcacacatgtctttgaggcttttagaaagccatctctgatctttgtcctatggtaatacttctatattattttattataatatcttcccagcaaggctgccgtgtgtgtatgtgtgtgtgtaataacagtttcaggccaggcacagtgactcatgcctgtaatcccagcattttgggaggctgaggtgagtggatcacctgaggtcaggagttcaagaccagcctgatcgacatggtgaaaccctgtctccactaaaaatacaaaattattcgggcatggtgatgcacgcctgtaattccagctattcgggaggccgaggcaggagaatcgcttgaacccgggaggcagaggttttagtgagctgagactgtgccattgcactccagcctgggcaacaagaaccaaactctgtctcaagaaaaaaaaaaaaaaatcaaagggtcataaacacagcctgcaatatgtattcaaaaccaggcaaaaggaaacaccacaaagcatcaaaaggaaagagatacttgtgactaaatcctaggctaaaatgataatgttagtcaagtcttctaaaaagttgaccaacttttctttaaagagtagctattatggataagatgagagaaaaggaggtgaagaattcattaatattgggaagatcctttgaaggtgaagactgcaggatgagagtgctaaggtgtcagattactgtgtaattagggaccagttctgttccagatcatctctatctctggcagagtctccctttatttttgcaaacaattgaattc

SEQ ID NO: 195975 - DNA, 1000 bp, Homo Sapiens
tatagaaagatagaggagggctgagagaagttgaggaatttgctcaaagccgtatcactatttagtgacaaagctggaatttctgtctagatttctctgcctgcagaaccaagggtataggccacctcattatctgcttttcaaatgattattttcttagcataaattcctagatgtggaccttactggactgaaagtataaaagtataatatccttggtaaatgctcggagtgtttctcttattttaacctcactattcattcacatttgaggatgccattctctctggcattgtcacactgtgagaggttgacatttccataaacgcatggttattcttatgtatatgtgtgtgtgtgtgtgtatgtgtatgtgtatatacatatacatatatatgtatgtatatatatattttaaaagatcccagttattgagagctaattatgggccaggcacttcacacacatagcttatctcatttaaaacccacatcctacaagtgatgctatgctcccaacatttataaacccaaaaacaggaccagagagaggagtcagcctgaagtcatatggttagtaagaagcaggttccaaactcaaaatttgatctaattcctatgcttttcggctgtcccttacccgccagcctggcaggtgttatggataacttctgctggctcctctcctcactcggccccaccctgtcctccatgctgtgtgcctcaggcggcagcctggttagaccacaccacccagctccctggctgtctgggttcagccaaagggagggggctgcagtgtaaccacaggaccagcccaaactaggcctactcttttgataacagaacatcgagttaccttgtaggtataacagagccaaaattgcaagtcacgtagcctgggcatttgtaatagaaaaactttgacctctaacaacaataagccaatgaatcctccctgtggaacgaaaaagactgggacatgagcagaacgtgaattc

SEQ ID NO: 195976 - DNA, 1000 bp, Homo Sapiens
atctgcattctaccaaattactgttccaatggttagctgagatgctaagcaccaaagcgctttgcaatctgtaacactgctgttagacatgtaaggaattgtaattatcatttcccttcctagggtggaggcaacttcctcacatacttcattgcagtatttatttatttatttaatttaacttaatttaatttttgagacggagtttcgctcttgttgcactagattaagtatctattatttttccgtttgcatattttatcacttgaacagaaactctgagcgcagggtcatgaccttgccttactctataccccatagcatgcagcagagtgcaaggcacatggtaggccatcaaaaaacttgttcacagccaggcgtggtgctctcacctgtaatctcaatactttgggaggctgaggtgggaggatcgcttgagccctggagttcaagaccagcctgggcaacacaatgagaccactgtctctacaaaaaaatttaaacattagccaggtgcagtggtgtgtgcctgtagtcccagctactcgggaggctgaggtgtgaggatcacttgagcccgggagttcgaggctgaagtgagccatgatcgcaccactgcgattgcagcctcaatcactgcagcctcgacctttttggtccagcctgggtgacaaagcaagaccctgtctccagaaaaacaaacgaaaaaacacttgttcagtctacgataattcaagacttttccaggcagtgtaatcaaaagaaattcatctagctctcctatatttacgctgctgaatagttttgtagaaatggagttgaatatcatgaccctgaggtattttaagaccctaaataagcaatcttaaattatcctgtattttctaaacactcaatatctgtgttatctgaagtttgcaaattccgcaagaaatttttaattttgtatttttatttttgtgaatatctaaaaataagtccttgtactgttataaagata

SEQ ID NO: 195977 - DNA, 1000 bp, Homo Sapiens
aaggctcggtgggcccttcccaacttgtcattgattccaaacagacccgcccgctgcccaatgtggatatcagaccagcaagtcacaaggcctcagtaggtcatgttttttatgtcagaagctgctttataaagggcgttataatttgctacttggagcctctggtagagaagctgtctgcattcaccgttcccattggggtcaggacttaccctctccctaactgcatcgtctgtctcaagaagaggacaagtccagaccctaatgggcacctccgaatggaggcagcttctctttatcagaggcacaaagtagcaaatcactggtcactcaagatggagttaagcctgtgagttcccaaaatggaaagcgtatttcagttcgctgaacagctttcagtggagactgttggtttgggccctatgcaaattatgatttttggataagccaatataaaggacaagtagaatgcccaagagaggtacattctgtctccaattcctaaagagtccagcaatgtggcatctttttctttttttcttttttttggctttgaggtctgatgagacagcagtcttccttgatgccagagggacttagcactgtgaatccacccacatggttccataaaaaactttacttggcaagcagttcttttgcattttttcaggatttatcagttacttttgctagaggaagtgtgataatgccacagtcagggccactgaggatgaacattctgacttggcaacatgatacagataggaaaaacattggaaattaaagaacagaagcacttgtgctaaatcctgacctgctccttgtggcaaatggcagggaagtttaggcaacagtcggggagtacagcaaccatacattggagaccttaccacatgaatgagaactattctagatgccttggtgctgggcctatgtcaaaatgggtttcagcagtgtctaagacaacacagcaagtgctatcaatctgtgtaatgaattc

SEQ ID NO: 195978 - DNA, 1000 bp, Homo Sapiens
tctaaagtaccccttccccttctagtcactttctctggtacataattcagttttattttccttataaaatgtgtaacagtctaaaattattttttttatttatttgtttacttctttatgttctggatgtaaatgctgtaaagcaggaccaggtttcattgttgatcatggctgtgtaaccccattccatatagcagcacctgaaaactggtaggtgttcaataaatattggttagatgattgaataaattgatattccagttgcctatttgccatgtatacgtagattattctaaaatgcagtgttttgaaaactgaactgaccttcattatttatttatgtttctatatttatttatttatagagatagaatctccctcttttacccaggctagagtacagtggcctgatcatggcccactgcagcctcaacctcctgtgttcaagcaatcctcttgccttagcctcctgagtagctggcactgcaggcacataccactatacttgactaacttttttattattgtttatagagatagggttttgctctgttgcctaggttggtcttgaactcctggcctcaagcagtcctcctgcctcagcctcccaaagtgctgagattacaggtgtgagccattgtgcctagcttgaactgactcttctaagcaccaaccagcttccttgacctatgtttcttctcttgttctaggataccaccattcactgtttattccagccagaatcctgggaattatccttaattcctgcttcctcactgctcccaaatctagtttattgtcatatgttgttggttctctctattaaatttctgctctccattcctgcagcccattctgtttaaccacttcagggttctattgttgcttatgatgtagccataacctgttcaaatcctccctgctgccaaaatgatctctataaaatataaatactatcactgttactcccctgcttaaaattcttcagggcgtcctttat

SEQ ID NO: 195979 - DNA, 1000 bp, Homo Sapiens
gagacattatttgtatgtacactttttggtcttctggttttaatctgcaggcacaaagaatgatcaatatagtctcaggtaataatgggagaggatataatgtttatttggcaggtgaagaagggacaactttggtgtgttttagatgaagatattagagtaatgtgtgaacttccattggcatacccagataggaacaggtctttttgttcaggaacaaagtggagctacttatctgctctgtgaaacagcttcaaagtcacccatttgtcatttgaatccacctggtttagacatttatcttttacaaatgatttaacttgggaaatttttttttaaagatactagagatcattgagaatggctgaaacaatgttatgaaacaaactgtgtaaggtttactaaagttataataaacaacaaactactcctaagattctaaatgtttgtttctaggctggtctcattgggagattagtgaaagctttcgaatggtttaaataaagaaatacctttccctggtccagggtgcatttccttttgtatagttgtagttgcagctgtgcattgtctagttgtaattgtagctgtagtctatgctgattcacactctgtgtatcttctgtactagttttgtcgtggacttgaatcagagtctaaatattcctggcatagaattctcagcctcggctgggtgcagtggctcacacctgtaatcccagtactttgggaggctgaggcgggtggatcacgaggtcaggagatcgagaccatactggctaacacagtgaaaccctgtctctactaaaaatacaaaaaaaaaaattagccgggcgtggtggcgggcacctgtagttccagctactcgggaggctgaggcaggagaatggtgtgaacctgggaggtggagcttgcagtgagccgagatcacaccattgcactccagcctgggcgacagagcaagactccgtctcaaaaaaaaaaaaaaaaaaaaagaatt

SEQ ID NO: 195980 - DNA, 1000 bp, Homo Sapiens
ggcagaggttactgtgagccaagactgtgccactgcactgcagcgtgggcaacagagtgaatctctgtctcaaaaaaaaaaaaaaatagaaaagaaaagaaaacatacttgattgttcttccctttctcaaatgctaagtcaagctgatcctgaagctatggttcataaattactatggtgactaccctgcagtgtgagagacaggaccctgagtcctcacaggaatctggagtgaagaactaaactttttccccactgaaaacagcacggttatctcagggactcttcctagaaagatgctgttcaaacttgagttttaaaaaataaaagcactttcttcctagaaagatttcgtaattctgctccaaagaaccctagcccaaaatatcctatggaaaccatttcaagagagtcctacttaagagaattcagatgagtttatggtggcaagtgcaccatgcttctccaagtgtgtgcagcctgtaccagccaggcacattataataaaaggtgacttgccaatagcactggcatgtcccaaggagaattttgcctgaaagatctcaaaaaagcaaacttagcttccattaacctctccaaccctataaaattatcacctgcgtggacatctatttatttgtttgttttgttttgactgccaatatcacttcccctgtattttggctaagaatgcttaagcaatggacatgtgatcctagtttggacaatcagattttctcttcttgcaatttgactcttcagtgaagtgacaaaagaacaggaattgttgggtgcaatccttctaaaacagcccagtgaagaaacagctggttagttcctcctactgagatccttgtagttgtagttctcctggcctctgccccttctgagacctgaacactcagcttgtccttggattttgtgagtttaagttaatcagtgttggtttcctttatttgctaccaaagatccctaaccaaagcatctcctgaatataaa

SEQ ID NO: 195981 - DNA, 1000 bp, Homo Sapiens
tgtctctactaaaaatacaaaattagctgggcatggtggagcacgcctgtaatcccagctacttggaaggctgaggcaggagaatcacttgagcccaggaggcggaggttgcagtgagtcaagatcacaccactgcactccagcctgggcaacaagagtgaaactccgtctcaaaaaaataaaagaacagaaaaaatgaaggagaggaatatgaaaagaaaatagctaagaatttcacagaataagaaaacacatgtacatcaagcaggatacattaaaaaaaaaattcctcctagatatattatgagaaactaaagaatatcaaaattgaagagtttaaaggaagttacagagaaagacatatttcctaccatggaacaccatttagctgatagaaatctcttaacaggaaaaatggaaccaaaactgcagaatgctatcttccaagtgctgagagaatcatcagttacaagtgtgtaccgactgaagccactatgtttaccaccagctgctctacacacactagaggacttttcaaagaacgtacttcaggaatggtctgagacgaaaacaaatgaggagcagagaaacttgcaaatatattcataaatttaaatgccatctaaacaaatgaagataataatgtctacctcaagcaattaaaaaaagacaggactaagcgactagacaagttctttgtattttttggaagaggggatattaatattatactttattaggtattgtcagagtaaatgtgtccccccaaaattcaaatgttgacatcctaaccctcaatgtgatcgtattaggaggcaggcctttgggaggtgattagatcctagggtggagccctcatgaacaggattagtgtccttataagtgttctcaatctatctctctgccatgtgaggatattaaccagaagacagcagtccgcaaaccaggaatcaggtcctccacagacactggatctgctggcaccctgatcttggaattc

SEQ ID NO: 195982 - DNA, 1000 bp, Homo Sapiens
tgtatacgtcctgcgatattacgagtaatatcaacttcttggcctctgaatatgaggaagaatatcacagggtgggtgtatacctcgtgctctattatgcggagtcgtatctgtctattacggggagtaatatcattctctccctttcaggatattaataacaatttcacaggctgggtgaacacagccggcgatgctgaaattattatcatcctctccccctcttcccctcctggcccttaggacccccatcgcagggggctgaggcaccccccgcgaggcggggactgagagccagtccctcttacccccctggctcttaggacacccatcgcaggggggggaggcaccccccgcgagggggggactgagagccagcccctcttcccccccggcccttgggacccccatagcgggggggggaggcacacccctcgaggcggggactgagagtcagcccctctacccccccggctcttgggaaccccatcgaagtgtggggaggcaccgcccgcgaggcggggactgagagccagccactcttccccaccggctcttgggatccccaccgcagggggggtaggcaccccccgcgaggcagggactgagagacagcccctcttccccccctggctcttaggacccccatcgcagtgggggaggcaccccccgtgaggtggggattgagagccagcccctcttcccccctggctcttggaacccccatcgcagaggggggaggcaccccccgcgaggcggggactgagagccagcccctcttccccccctggctattacccccatcgtggatcctaagacccttaggacccaagtggaggactgtgggtattaggtgtccaagaagaaagctcagatctaccgatggcaggtaccttacttgggatttactgtccgacaggggtccgaatgcagcccgggatcacaaagaaagcaggtcgtttgcaatctaccagagcctaagggcagaaggcaggtgaga

SEQ ID NO: 195983 - DNA, 1000 bp, Homo Sapiens
ttgtttactcctgaaacttttattaatcaggtattggacctcttgatccatattgctaagcttttctgtttatgttcgatctgttcatcttactgctcgatgttcaggaatatttcctcaatgtcacatccaaaataacaaatttcaccttcagctatatccgtttcatttttcaacttgtcagctatttttctcaatcatgctcttaatttctaataatttgctcttatcctctttctcttttttcatatcactttttttgttttatggatactatattttctcagatttttctaaggatattgatgtgaggttttcagaagttccttttgttccctaaattatacgtttcttctgaagttagttattctgtttgttccctttggtccttctcttccatgctgctcattttccttagtttcaagtgttcctaggttatctgttcatatttgtgaatgacagagcgcatcgattagcttggacagctggtactcagagcttctctgaaattgtgtgggcccatttcactgatgggctgctcccttgtaggttctgtgtaagtggctcttctgctgcttgtctgtgggaggagcatcccactcccagacacagctgccactctaggagcagttactccgggggtgaagcattttaatgtatcttctttttggtagagcttccattcctgtttgttatacctctttgtctgcagtagaggccctaatgcttatcctagcatcctcccttgaggtttctttacagattggatcacagctttatcttatagtcaaaaatggtatcccaaacagaccatgatgtctaaactgaggttccttggtggatacctgatcactggttgcccatgatctatgcctcctctttgtctttatcgacttaacttgaagctactgcagggctccctatgggaaaagcacacttatcttggttccttttctcttagattttccaaccctatcttctttctgccttctaggaattc

SEQ ID NO: 195984 - DNA, 1000 bp, Homo Sapiens
aaactccatctcaaaaaaaaaaaaaaagaagaaatagggtttgttccattatggcacatgtatacctatgtaacaaacctgcacattctgtgcatgtatcccagaacttaaaaaaaaaaaagaaataggatttgtttgttgactatttctgtgacagatcttttgcatctggtattcagagacaagcttgagtgaggaaagcattgctccttaatttaattggcatttttaagatttagtgttggaaggacatttggaaatgttgcaaaatacaaaatattttcagatttttgatccaggaatatagattgggattttgccaagcctgtgttttctacagcatggtgaaaatgcttcttccttgctttggtttcttgcatcttctagagtaggtgaaaaaaaaatttttgactctcttggaaggaaataatcccaatcaaagaaatagctaatactgtagaggattgagaagtttttcttgaaccagataaatcaaatttagaagcacaccatcagaagaaacaaaatcaactgtgagcaatagctcagaaaatgaaactgggcagaatttcgtgggacaaaagttatatttcaatgagttcaaattaagtttgtttttatatttttgtttttaactttagttccttttttcagaatgagttttgtgtatctgctcgatatgaaggaggacagtaaattcagaaaacataagttttgtcatatttttttcttgttcatgtatttttgtttacttctttgtagatgggggaaaacttgaaagatgctagatgtcttaaaattacatagcttcatttgaaactgatagttggcaatatttgagaataaaattgtttggtaaatttgtaaatttgtgttgttgaatataccaaactaggttgagattacgtctttgagctttaatagctttctagtcctaaactaacaaagtgactttagatttttttagtactttaaaatataagtgaaaattttagaattc

SEQ ID NO: 195985 - DNA, 1000 bp, Homo Sapiens
agggctcattctcatgtactatagtattcagaatattattggaattattattctgatcagactcggtcaattaaaaattggccagctattagatggagtgtgatgttggatgggggctgcggcattctagaggggtcaacacaggccttgcttttgagggtctcacagcaccaggagggtgtaatagacagaatcatggtccccacaaggaggctgcacatcctaattcccggaaaccatgactatgttgctttacacagcatcaggtactgataagtaaagggtcctgatgtagggacagttttttgaaatatttgggtgggtccaatgtcctccaaagggtccttctaaggaaacagggagatgggaaagccagagaaggagctgagacaacagaagcaggggtccaagggagggaggcgcggaggtggtgtgcttctggcactgagggttggggagggggccgtgggtgaaggagggcaggcaacccccaggagctggagaatgcaaggacacagatgcccccttgcagcatgtggaaggaacgcaatcctgccaccaccttggtttcagcccagaagacccactttagactcctccaggaccgtaagggcataacctgcattgttttacgtcatgacgtttgtggtagtttgcaacagcagccataagaaaccatatagaggaagagggacatagagaggatgtggaacgagcctgagtgccccacatgcctgccccgagcctgagtgcacctgccccgggcccaggtgcagcaacctatccccagctacctgtccccagctaccagcaggggcctctgaccttggcttccaagtgcagcgcagacagcctcggccagggttctcctcacccccactgcttaccaccaatccttaaagactctggacacatgaaacattgtgtaaattctaggacagtatttttcagatgtgggatctgagaagcaactcctcagtagggaacccacttagaattc

SEQ ID NO: 195986 - DNA, 1000 bp, Homo Sapiens
tcttctttatgactacttcacaccttcgttcctcttttcaaaccactgtttcctcttctttcacttgatcactacttctttcctctctttaattaaaaaaagaagccgcctcttaccaccattttcaccactttacctatgcccttattccactttgctctcttttgcagtgaaacaccttagatattcacacagtttctaaatcctatttcccattatttcggactcattccacttaggcttcttctcatcctcactacctgaagttgctctttggatatcaccagtgacctccatgtggctatatgcaattgtcaattctcggttctcatgttagttggcctatcagcagcatttgactattgatttgccctcttgtctggtaactgtagcagatgctatagatgtcctgctcatatcccctcatatcaatgcatgcttttccactttcagttactagtatctctttttctgagggatttcttcagctgccagagttcactctgcctatgctcagatggctagaaatgccagcagagtaatactgctttcccctcccttaagcagtttttaaccaatgactgatatgagttggtgtggaaataacctagctctattacccctctcttgaggccatgtcatttaccagatattctccagtgcgattaagctccagttacctgcaatggtaacttgtttgataaacactttattggctgctattatctatgtctcacttctctgctcccctgagctcacttcctaagcaaactacctgtatatgtaatcctcgtttcagggtttgttttctgggggcacccaacttaatttaatattccttatctggttttcagggcaccttattatcttggttttccacctacatcactggctactcctcatcttctttgctttaagacttcttaatattgaagtactccaggtttccttctttagtcctcttctcttcttcacttatacgcactccttgagtgaattc

SEQ ID NO: 195987 - DNA, 1000 bp, Homo Sapiens
tttaaatgtatccatatatcatcattctttttttaacaccaagaaaatgttttaattaaactacagaaacaatggttatagcacagaatattcataagcaaaaagatacacgtcataagtacttacaaagttacaaaccatttgctcccttaacattttccgtattttaagttcatacatgtagataagaacagattcaccattttgaggaagaggaggaagcaaaggtatatttatcatcagctagatgtgctcactgtatgcagtggtatttatatgcaagacccgagtgactggaagtgcagttgttgggcattttaataaactggacagccatttgtttctgcacgacaaggcatcttcttaagccaaaatatttgataaacttattttcagtatctcctaggtttcttttatactatgtttctacctcccttacagtcttgttatatatgtagtttatctgtcaaaaaaaactttttcctatttttgcatcttttcaaaatacctggcttggccgggcacggtggctcacgcctgtaatcccagcactttgggaggtcgaggcgggcggatcacgaggtcaggagatttagaccatcctggctaacacggtgaaaccccgtctctactaaaaatataaaaaattagccgggcgtggtggtgggagcctgtagtcccagctactcaggagactgaggcaggagaatggcatgaacccaggaggcggagcttgcagtgagccaagatcacgccactgcactccagcctgggagacagcgagactccatctcaaaagaaaaaaaaaaataaaaacgtggcttatttatttacataatagaaacattcaatatatgtcacctgaattaaatgtatagaactctccagaatgaacaaaagtagctacttttaaaatggataatgcccttaaattaattcaacaaacgataataagcacttactaagaagcaggttacactatcctaggagctaagaattc

SEQ ID NO: 195988 - DNA, 1000 bp, Homo Sapiens
gacacctcaaactaaatcaaaatagaactgcttgtcttctttctcagatccatgcttttgccagtattttccactgtggccacccactttctcaaattgaaagtccgagggtctccttgtctcatccctctccctcactgtcacatctaacccaacactgagtgctccaaattcttcctccttgaatctgcccctccctccattccctccaccatgatttttgtccctggattatttgatcagcctttgaactattcaaattgtctcatttctcccctgctcccatccactctgcacactgcagccaatatgatctttaaaaaatgtatgaatctgtttcatgcctgtttaaaaccctccagttgctacctattgtcttaggatgagatcagaagttctcaacagtgcaaggctccccgggataggcctgctctgcatccaagtctcacctcctttcactcttcctcccaagggatcgctccagcccccatggtctttgttcagctcctcaaagatgctatgcccagtgtggactcagggcctttgcacatccgggctctgtgcacatccatcctccatctcctcctctggagaactcctagctattcttcaggtctcttcagtttagatcacctcctaagaagaccttgctaaggaggccttaggaagtccaaccaggttcaatccccttgtcataccctctcgtagaaccatgtaattttattgtctaaagttaggtccccccaaaacaaagtatgggttaaagacttgagaacaggtcatgtattggagatgcaagcacagaaatcaagagtacagaaatggggagagatggagaaggaggagaggcccgtggaagggaagggggtgttactaaggttgctgggtttacaaggaggctgactactccaggactctctcctgtcatttccaagagggctcacacagagttggagaagaacccggggcaggaaatgaaaacctgtcagtgcacaagctt

SEQ ID NO: 195989 - DNA, 1000 bp, Homo Sapiens
ctttctcacccaagttccacccttccttcatgccttagctccaattctactgattatgaaagcttctctgagtttctcagtaatttctcttatcactttattatacttacagctttaatcgacaagatgcaccccttaatgaaatattattttgtactgatcttttactgttgtcacatgttattcttaatttcccaattagaatgtattggaaatgtggcaatgtagaatgtaaggaaaatgttcatgtcttatactgctggaatatcctccccatatatatgcatacatccaaaagtacttattgagaccctacgtgttgggctgtgctgggcattagggataagcctgtaaaaatctttgcaaaggaacaagacacaaggttatttttgcctccttcaatggtaaggcacttaataggtattacaaataattaattagattaagtttggggatatagcatataaaaagaaccacataatttcggaactagaagagatctcagaccagggattttcactagggatgaggtgcctccttgggtattttagaaacctatgggggttgggagatagaagcgggcggatcacgaggtcaggagattgagaccatcccggccaacatggtgaaaccccgtttctactaaaaatacaaaaaattagctgggcatggtggcgggagcctgtagtcccagctactcaggaggctgaggcaggagaattacttgaacccgggagacagaggttgtggtgagccgagatcgtgccactgcactccagcctgggcgacagagtaaaactccatctcaaaaaaaaaaaaaaaaagaaaaagaaaaaaaagaaagaaacctacggagggtttctggttggttggttgtttggggaatgttatgggatttgatgggtggttccagggataaagtatgtcttgtagtatgtggactgccctgctcaacgaagaactgtattgcctcacacaaaattttaagatgattttctgg

SEQ ID NO: 195990 - DNA, 1000 bp, Homo Sapiens
aagcctgctttgcacaaacccaggctttctgcctccgagtccagggttcctccctcggtttactgttaacatccaacagtgcttcccagtcactgaacaaaaacttttaaacaccagataaacagcaaagcagttacttgcaggactaagttaaactccaagacaaaagaaaataggaagctatgaaaccattttagaaatcactgaaatagacaatcatgtaaaatgagcccctctgaaatccatggatggagaagctggaaggcatccagatgtcctatctcggttttgatctgtgcttatggcatcctttgattcagatgaaggaccaggaatttgggggtaagagaaataaaaagagtgatgaaaaaggcagtatctctatccaagagttgcaaaaagaaactatgactaataaggaaaattcattgtaggaaactaaccacacgctacaggaggatggatcaaatttctcacccttcagaccagaaagtcaaaggcacaacaagcaagctgcatttgaaacaatcttctgagtcctggttcaaagaaaatgagagtccagtattcctgggaggataaagtgaggtggcctttgaggaaggagagctaagtggtggagggggaaatttactttttactctacttataatatcttttatgttttgaatatgatactgtgtgtctattttacatattcaaaaatgaactgtatttcaacaaacgatcaaaagaaagagaatgagaaggtctaggaagcaatttcagcaggtcagctcttcccactccagcctccttgttagattttacctttttccacccaatcccaaaggcgagcagcccttactttcggctcactgaaatctacgctgttcggccttcaaatcctggagccacagagttgaaaaagaccaccttttccaaagccctcactttacagatggggcccagaggtgggagaagattttctcaagcctccctcactagttaggaggaagct

SEQ ID NO: 195991 - DNA, 1000 bp, Homo Sapiens
ggccatgatccctccagagactctaggggagaatccaacttctggtggctgtcagcactccttggcttatagtcacatcactctattgcttgaaggccagcgtcttcaaatttctctcagctctgtcttcagatcaccttttcctctcacatgtattccagtctccctctgcttccctcttataaggatacacgattgcactgaaggttcatccagataatccaggataacctccctgtctcaagatccttaacgctcatcacatctgcaaagaccccttttctttatgagataacatttacaggttttagaaatcaggacctgatgtctttgggaccccttattcagcccactgcaacactgaaggccaccagttgaatatttgtccattcaacagacatccactgggtatctattctatgccaggcactgagctggtctctggagacacatagtggaaacaagagtgatgtgtgtcctccccaagcccacactctagtgaaagatacacacagcaggcaagccatagacccccagtgctcatcagccagtcacctagcaaggtcttccctgaataaaacccaggatagataaatgtggacattttcagaggatcaatgccttagggattttgctgggggatgggggaggagaggcctaaataataactacaatctactcagcacttattacacactaggccctgtgccaaatgctctaatacattatctaatctagtccttagaataagctcaggacataggtctgattatccccattttacagactgagaaaactgaggctcggagtaaaaataatttgtctaggatctcacaagtagtgaatggctgagctgagatttgggcctaggtctgttacactctagtgttcttaatcaggcatgaccctgcctgagccatctgaggacactggggaccaggtagactgtgggctgaaagagcaggagaggcagtattgggccgtgggaagagctgaattc

SEQ ID NO: 195992 - DNA, 1000 bp, Homo Sapiens
ttaggatgaaagtcatagcaaagaagacagggcagataataaatagtttttggcataatattatggagctaccagatcaagcctcacctgaggggaccctactaatggatattttagttccatgaagccaagaagatatactgagcagtacacactggaatagccatccctgtcatccatgggtgacatcattctttttttttttttaattttattttaagttcgggggtacatgtgcaggatgtgcaggtttgatacacaggtaaatgtgtgccatcccctaggtattaagcccgtcatgcattagctatgtttcctgatgcccttctctcacccctccccctcccccgacaggccccagtgtgtgttgttcccctccctgtgtccatgtattctcattgttcagctcccatttataagtgagaacatgcagtatttggttttctattcctgcattagtttgctgaggataatggcttccagcttcatccacgtccctgcaaaggacataatctcgttcctttttatggatgcatagtattccatggtacacatgtaccacattttctttatccagtctatcactgatgggcatttgggttgattccatatctttgctattgtgaatagtgctgcaatgaacatacatgtgcatgtatctttataacagaatgatttatattcacatcattcttattactcagatgcctactctaattggttaatacctatgctgtagtggctgttaaatatttttaatatcatccttatatgtaccaggaattatcctttattattaagctagtttgagtaaggtttggcttttgggttttgttgtgtttttttctttttcatctacagcatattcagtagtacctctaagacaccgattttttcaaagtttaatagaagctttcattaggctggggctggtggctcacacttgtaatcccagcacttggggaggctgaagtgagagaattgcttgaggccaggaatt

SEQ ID NO: 195993 - DNA, 1000 bp, Homo Sapiens
tggataagaatatttgattgtagaactgcttctacctaactgcattctgttatactaacaatttggctagcagaatttttttttaaaatcctccatttgcagctttttgtactctgatcacaatatattaaatcccccagaagaactactaccttgaatacaaagcacatagcggtgctcttttaattgatttgtaaaggttagttgctcagtactagtggaaagtttcatgattacttaattgaattacctgcttcccccagtagagtgcttactgggcaccatacagtaagctgagagttttacatgcctggtactattatttccccagtttacagattaggaaagcaagatgtagcttacaaaatatgctgaaagaccactggcataaaagccttttaattccttgctgaaaaactccctgggttttgaaatatgataaactacatttttgttgttctctgaagattcaggttcatatagtatgacagttttatttttgtgactctcaatcatatatgagataaatgatgggggaaagagaccgctttgaggtcaagcagacctatgtccaattctaacatcaaggagaagccacgtgctttggcaaagtttgtgtatttacactgttgggaaaactaaaagtaatttatataaagtacctagcatagtatctggcagggtaggtgttcagtaaatgttgctggtattatttttgctagtgataacattattcagccatataaacacatagcactaaggttaagcaaaatatgtattgacattacagcatgcctaggtatttattgcctaaaatatatttccgataagcttttcttagcatttgctgctttctactaagagttgagtgaaactacgatgaccacaatttagtctacttatttaaacctttaattggttggcttccggtaaattgcagtttgaatgactagcccaatcatgtatgagtagccgggaatattcgataggtatagaattc

SEQ ID NO: 195994 - DNA, 1000 bp, Homo Sapiens
caaatagccagttattctttaagtgctgggtcacaaagaacaaagaaagactgagaagttgtcacagactggagaagaataaggagatatggcaactaaatgcaatggatcctggcctgggtcctgaaccagtaaaaggactggtggaaaaaaataatgtaattcaaaggaagtgtttagattagttaatggtattatatcaatgataatttcctggttcttataattgaactatggttgcgtaacattaggggaagctggacaaacaatatttggtaactctatgtatggtttttgcaacatttctgtaagtctaaactaacttcaaaaaacagggagagacgaagaccatcagcaggctaaaagtgtccctaaactgtaaatttggatagagagttcaaatgtttttccactagaaccagagattttctctgttcaaatgatactcttgccagcaaactccaaatcggagtcagcgaatgtcagtttaatgacacaaattatgcctgtctggcactcacctcggaggtacaaggcttccctcagcctgacctaaccatacaacttaaggcttgagccactggatcaacccccaacccctaaaaaattcattacagtcagcaatgggaagaaaatattcccgagtgcaaagtgattttcctctatattgatgagtcacagatgagctttgtgaagattctcttgatatctcaactttgaaatgcatggcttctcctagcttcctaataaatatcacctgaaattcatattgaactgctcatcttgaaaccttttttaatactctcttcatgcttttcatagcattctcacttgttgcaacacacttattaaaagtaataatccaagacctagttaaaaaataatagactttaaacctattactgcctactacatctatgataattttcctacaaggaggacctgacttttcctctccatgtttatttattcaatcatttgtttgtatcagtatgaattc

SEQ ID NO: 195995 - DNA, 1000 bp, Homo Sapiens
tgaaagctccatgcgtgttattgcccttgaagaccttccagtgcaacaagatgtgggggtagaacagagtgatattaatgatcctgaccctgtgtaggcctaggctaatgtgtgtgtttgtgtcttcatttttaacaaaaaatacttaaaaagaaaaaatatataaaagttttaaaatagaaaagcacataaaaaattaggatacaagctgggtctggtggctcacgcttgtaatcccagcactttgggaggccgaggagggcagatcaagagatcaagaaattgagaccatcctagccaacatgatgaaatcccatctctactaaaaataaaaaaattagccaggcatgggggtatgcacctgtagtcccagctactgtggaggctgaggcaggagaatcacttgaactcgggaggtggaggttgcagtgagccgagattgtgccactgcactccagcctggcaacagagtgagactctgtctcaaaaataaaaaaaaaaattaaaaaaaaaggatatgaaaatatttctgtacagcagtacaatgtgtgtgtgtttttttgtttttgtttttgtttttagatggagtctcactctgtggctcaggctagagtgcagtggcgtgatcttggctccctgctacctccacctcaagggatcctcccacctcagcctccctagtagctgggattagaggcttgtgccaccctgcctggctgttttgtatttttagtagagacaaggtttcaccatgttggccaggctggtctggagcttctgacctcaagtgatccacccgccttggcctcccaaagtgctgggattataggcgtgagccaccacacctggccgaatgtgtttgtttttttaagctaagtattattacaaaagagtcaaaaagttaaaatttaaaagttcatagctgggcaccatggctcacatctctaatcccagcagtttgtgaggccaaggcaggaggatcacttgagcccaggaattc

SEQ ID NO: 195996 - DNA, 1000 bp, Homo Sapiens
tgaagtgctagaatggaggagtatcagacaaggagcccagaaacctgtgttattgccccatctcttcaactaatttattgaaagaccttaggtaacctctgtcccctctggactgcagtttgcccatctgagaaatgaatggttgggattgtattggtctctaaaccacccttcagcgctcagattccagaaggatacattttgaccatccttgtccaatcactgcctctagccagggacacacactcagctctgtcaccatggaacagatgtgtcagcggcagcaggaattgtttaatctgagcctccacctggtccctccagtatgctctaggcttcctcgccctagaatgtggttattaactccgagtgaccaccaggtggcgccgttccccaaggcactgtgcatcctccagaaggtcatttgaatgcccttggagcttgatgacacgcaaataacccagaccgatgttcagtaaatatgttggggtgctagctctcaggggatgagaaggcattgctacataaccagatgtagagaaaactgaaacgtgggaaaagctgagaagagcagcctcctctccgagtttatacagccagacctgaaggggtggaaggggtcgggactgcatttctccgtgggtgctcattcctgccctgtggtccccacgtccccacccgggccccttgaccccaccgtcacctcgtgaagtttctttccacagctgtgaactcgaggccacgaggattttgcaatcttcatttttggagaaaacacaaggcagttgttgctctgacccaggggctctggcctgcgggccctgcagctgtctctacaagaggcacatgcaggcaggggctggagagaggaatgagcagggaccatcgcacttgagatttgttctcgctctctgacaaattcaacaaatatccacttaacccttcatctgtgccaggtgtcctgtgcctcaggcagagctgatgccgccttctggaattc

SEQ ID NO: 195997 - DNA, 1000 bp, Homo Sapiens
ggaatgctcaacaggtatatatttggttatctttgtatttttgtggaatgtgttttagatatgcacatttggttacattagtggtagaggctaaaaagaggagaagggaccaaagaacaagaaatggaaaacacaagatcaaaattaggggacagtgacagcaacagctgatggtcttatgtcgggggaagagacagaacaactgcaagataggtccagaggctaatggtgtctccatgcagttgtgaatgttcatagtggtgctttcagtcatcaagaaaagtgtgtgctctgtatattctggttaataagtcagaaaataagtaataatactagagtagtatttgaaatcagaaaataaattggcatttgaaggataaactttggatatccagaaattacaatcctgcagaacagctctttactcaaagatgagagaaatgaaaaattattaagtaatgcaaaggatcaaggtagccagttttcaaatgtaatgcattaaaaggtcgtaactcccttgggagaagagcactgagagaccagggtagttctccgtacgtggttactcttacccagaaaagcaaggtagaattttgttgttagaataataattagtgttcactgagcacttactatgggtatcactgtgcaggtgatgacatgtgtacctcatttaatttctcatcactttgcggttcaggaattatgaggattatctcatttgaaatgagaggaaactgaggtgtaaattgattgctaaagctgttgatagtcacacacaattcataagcaatcagcctgaattctcctccccacccctagtccaccaccactcacagagcttgtgctcttgccagggcttactagagccatgcttaagtgaagcaaaatcacttcctagctttgtggctccagggcagccagccaggtagtgtttccaagcctcagtctgcctgttagacagtggggataagagcaattagttgactgcctattacat

SEQ ID NO: 195998 - DNA, 1000 bp, Homo Sapiens
cttttctgaataggaaccctaaaactgtgagtgacaatgtgcatttgatggaaatatggaataaccagaagttaagttaaaatgggacgttgaagatagtattattctagcttatatttcactgataggaaaagtgagactaaaatgatttatgtagggccagaccattgaggtactaaaccaaatgttcatgatatttgggctcactgtcctctgccatactgccttgaaaattaaatatatgttattgacatattttgaacacctgagtcacttcattttacatttatacatttaatattatttcttaaaaacagaagtatatacgattattttaatgcaacttttatttctacttttttttttcttttcctcaaagaaaacaaacacaattgtacttagcagcatatgattagagaggattgacttgagtcccagcttttcagatagcttttcagattattcattttcatgtgaatttttatactctgatatgaaaggtaggatgctcttccctgagattactttggttcactggaactgtcactgctggctggtaggaaataatggctttgactttaagtagccacatcttgtagacagttaaaagtatttattgacagaatgttaagtgatgcatttcatagtggagactcattttatagaacgacattaggcagaagtattcttaaactaatgagttattatttgtacattagaatcaataatagaaaacttgttaaacattctataaatagtaaatgtagaactcaaatcaaaattttccttactttcctaaataacttagaagcatgaaacatgaaggagagttttgaaattttaaaaaatgttaatttgctcaatacgaacatatcacattgatagtttattatacatattttgatgtgtgctttccataagtaccccagtttctcctttttatcctataataatctgaatggaaaaacagacacatgctcctaaattgtatactgaattc

SEQ ID NO: 195999 - DNA, 1000 bp, Homo Sapiens
gtaacattttagaacacagcttattgctagattttgctttttaaggtaacctatagcaggcctttcatgaggcagtatttttatttattttgactactgttacaattgtgatgactttgaaatcctatttacatcattattttaaaacatgcacatatactaacaattctcagtttatctcattattctgatgaatgtttaattctatggtcttggtttccatgtttcttccagttcatttcgaggcaactccctgcctcctacccttatcacaaatcgaagggctctgtcctcactgccttatattgaatcatttttgcatccctgagatcatcgtaaggaaaaatacgataatcatttattgaatgctaatagtaatgtgttggtctctgagttaaagtcctttaaaagtactgtgtgataatctccttttatagatgaggggactgaaggcacccacatgttaaataacttgcctctggtcacacaattagacagtgacggggccgagattctgaagcctgtcttgttctaagcatagtatgctatagcctcctgagataatcctatttggttatgataggctcttcttttcatgtaatgcttaattttatgaattgttactttaattaagagtttaacagctgtatttgtaaatgatagtgggttttaacttaaacaggccttggaatcatggctacttttgctttatagaatgaattaggtgacctttttactttttcctatgatctgtaacagtttgtataatatagaataatctgttcctttagagttggagagaattccctgttaaatccatcaagtgaacccagctcctttttggggtaagtttctcaattttctccttggtgtatagtatcgtaatagtaagattttctatttttaaaagattttctattcttattgagccagttttcaagttttaatagaaaattacaaattttgttcatgttttcacatttgttagcatgtcttttgg

SEQ ID NO: 196000 - DNA, 1000 bp, Homo Sapiens
ggtacctcatataagtggaattatataatatttgtccttttgtgactggcttatttcatttagtgtaatgtcttcaaggtttatccatgttgtagaaggtgtcagaatttccttccattgcagtatacaccatactttgtttagttattcatccatgatggacacccaagttgcttctatcttttggcaagtcacaccctcttcttaaccatcttgacctgcaagtgacacctgtctcttctgatcacattccacaggagaaggtatgacatagctccacctacatgcaaggggagccaggaagtgcaatccctggctgggctgccacgtctcagaaaccattaagcctatggaaggtaaggcacaatttgttggtggacaactagctgttcctaccaccccttcgcctttgcacttcctgcaacagctactcacagtggcccagaaaaaaaaatgtctttctttttctagtttcagttcccaacaggacaaatattttcagacctaaatactttcaataaatagttatagctctgtaatcccagcactttgggaggccgaggcgggtggatcacctgaggttaggagttcgagaccagcctggccaaaatggcaaaaccccttctctactaaaaaaataaaaataaaaataaaaaaaattagccaggcatgttggtgcacgcttgtaatcccagctactcgggaggctgaggcaggagaatcgcttgaacccaggaagtggaggttgtggtgagccgagactgtgccattgcattccagcctgggcgacagagtgagactccatctcaaaaaaaaaaaaaaaaagaaagaaagaaagaaagaagaaaaagaaaaagaaaaatgtatagctaacatttttgtagatgttcgcaatttccaacgtccttttcatattgaatggtggtacaacttctgattctgtctctgtcactttctcactggatgatatttgtagagcccatagctctacagtgaattc

SEQ ID NO: 196001 - DNA, 1000 bp, Homo Sapiens
attgtaccaagcagagtatctttcaaaattttcttcatttaaaaaatatgtatcttgactcaggcctataatcccagcactttgggaggccaaggcaagaggatcacaaggtgaggagatcaagaccatcctggccaatacagtgaaaccctgtctctactacaaatacaaaaaattagccaggcatggtggcagctggtgtagtcccagtgtgaattgggattcagtttattcccaaattcccaaattatatatatatattatatatatatatataaaatatatatatatataaaatatatatataatgtatttaatatatatataatatattaaatatattatatataatatattgaatatatgatatatatgatatatataatatattatatatattatatacaatatatattatacattatataattatatattatgtatattatatataatatataatatataattatatattatataattatatattatgtacattatatattatttatatatattatatataatatataatatatataataaataatatatatattatatatatcatataatatataatatatataatatatatataatttccttttacatcctgcatccttcaacgttccatcccccaccccacagattaagttattccccaggggagaatatggcagagtctattttaatgcagtttttaacccaattaagaacctacgaaatcattactttccaaaactttggaacaaagccgcagtagtatggatccgttggaggcttttcacacaataaaatgtacctctctttgtttttaacatgtttctcccttcctctcttctttttttgtgaaatgtgtatttactttatttgtagtaagtcacttccatgcacatattaattttttaaagtaataagtatgtgtattgtctacgtgtgaaataaaacacacatttatttttatgctttggaagttatccagaatcatggaatt

SEQ ID NO: 196002 - DNA, 1000 bp, Homo Sapiens
taatgcaaataactcctgtacaatcactgcatcatcaacggttttgtttgacaacattgccactgtgctgcccttttctagcttgagaacatgctagtaataaatgccgtgagtaaaaatccagctgaagtcaaaggatgcaggaataataaggcctgggtcttctacttgttggtttagaaggcccccaagaaccaaggggagactctcattttcaggactggctatataatttgcaggacctggtgcaaaaagaaaatgtggggatggcctcttgttcaaagttatcaagaatatcaacacagcagcggtaaagcagtaaaccaagatgagggccctgtgactgcacagatcacaacaccaaaacgctggtcctgctcattttctacaactgtgtacacacacacactcacttgcatccaataaaaacaatcgtagcagatttgcttatttaatgaactttatccacattatctcttcaaattgccaggaggctggaaaaattaagggtattcaccatgcccaaagtccaccggtattcaggcttcaaaattttttttctttttttttttttcatttttgttttcaatgggattgtgagacaactgcagttttagtgcaggaagattaaaagttatctgaattattgtccctaccccttgggacaatacatcacaatcttactgtgcagacagtgctaagtgctgaggccagaagtgttcaaggagaggagcagagggaagcaggagttcctgcttcatttctggtccactgactattacccgtggtctcaccatcagcagcatcagcagcaatctttggcttactggtttgcaaatatagacgagcctaagagagtgaggaggaggctgaggcatggcccagggtggaggcagagcctggggaccagaagccatcaggtaatttagttaatgatggtgatacctgctagactatgctaaggaattactggggaagtcagctcccttccttggaattc

SEQ ID NO: 196003 - DNA, 1000 bp, Homo Sapiens
tagaagagagtattggtgacaaatgaaatgctatgtctaaatgactttaagatcggacgaaagaacagcagtatgctttgtgtttacttaccttgttaagtgtgttttcactcactcctcaaatcaattacagtttttagtctccttttattttcatgtgctaaccaataaaatttcacacgtttctcaaatgcgaagaagaaaatttgtgttcaaagactttgtaaagtaatacatttaatatagaatttatttgagcgtgtattccttgaatgcccactacgtatctgaaactataatgtatattatgtggaaataaaatataagtagaaaccaaaccccaaaagtttataaatctgggtgaaagaagagataacatttctaaccatataaacattagagacaatataaaatagaatatcattgaaattccctggaaagtcattgtgatatatagccttactactcagtgttgtctatggatcagaagccccgggcataccttggtgctgttataaatgcagaatctcagaccctgttccaaatctactgggtcagaatttgcattttagcaaaattctcaaggtgtttgtgtgtacattaatgtttgagaaacacttagttggaatagtgttattttgtgtgggtataaatgtattttagagagtgaggggctggaggaggtgataaggggaggcaagacaggatatatgtaccatagtttgaaaaagccattaatcaaacaatcaaggcttagtgtagatgccagttcatcatgtcctggctcctgaactccaccttgttatccaacagtctgcattccttaggcctttcccttcactttctattttaatccaggccatggtaagctccttactactactgagtgcactcaactttttttcagtctcctttttcaaaaattgtgtttttgcagtcttcgagatgtacaaaatgaaaagatacaaaaaaatcttctctggttattagagaagaattc

SEQ ID NO: 196004 - DNA, 1000 bp, Homo Sapiens
ctatatataatcactatgatataaatgtttacctattataatttgtgagtacctgaattgtagcactctatttttccctaattggcaaaagttcattccctaattgggtagctaacactcccaagatatcagatatgttatttgattaggatgttaatcctctttatgtcacctgttttccaaatggtataaagaataaaaatcatcctttgaatcattgccaaaaaaaaaaagagagacccctgaagccattctaatttagcttttagctgttgggtggaactaaactctgtctatcccagtaagacactccatttgcatttataatctctggggtgatgagtttcaaaatattgtttgtttatatgtcctcatttttgcgtatccttatgggcagttggatgtttctgctcttaaggcagtatggtgtggcgagtgagagctagggttctggagtcagcctgagttcaagttgcagctcaactgttactagctatgtggtcttgtgcaaattacttaagccacagttttcgtcaactgtgcaatgggagtaatagcactaataatctgcctcctgagttactggaaggctgttaaaaagataataggtataaagcactcaacatagtagtattctttttttttctttttttttttgagatggagtctcgctctgtcacccaggttggagtgcagtggcgtgatctcggctcactgcaatctccacctcccagattcaagtgattctcatgcctcagcctcctgagtagctaggattacaggcacgtgccaccacgcccagctaatttttgtatttttagtagacatggtgtttcaccatgttgtttggctggtctcaaaggcctgaccttgtgatccgcctgcctcagcctcccaacgtgctgggattacaggctgagcaaccgtgccagggcagtagtattcttatcactctagctctctcaatactgtaggtctattgcttacagtgactcacagt

SEQ ID NO: 196005 - DNA, 1000 bp, Homo Sapiens
agcaccgtaagccttctcatccaccagggggcgcagctcagctggtaagggggcggggccccaggggggccggagctcccctccccattcttccacctgctagaagggtcctgctaggctttgctcctcccctctattctgaaagtgctttccctttagggccacacagcctccctggacagggactgctcttcaacgaaagggctgagtgacttgctcaaagttacagaatcagttagctgagatccgaatccagctcaactccccacagcatgcagctaagcatttccccagtggaaacaacttctcacaacttccgtagtgctgggcaaggccaagtcccctcacttctccgagcccccgttttctcatctataaagtgagacatgatatgtgtgacacagccagtcaccctcacacaggataccatgtgattcatgggaaccccaaccctactcctgactcactgtgtgaacccaacaaatccctgcacctctcggagacttcatgtccccattttctacactgtctgcccctgagaatggtgtgaatgcgcccagccccccttgccagataatttggtttgaaatcccaaacacccatgttttaagaatgaagcaacagaaatgaaagcttcacgagggctaggattgtttttgtatattactgtatttcttgaacctagcattaacctggcacatagtggacacccaaaaaatatttgatgactgaattaatgaggctttagaagcctcaagagaaacataacaatgggttgctgcaaagcccagtgccaaccatctacaaagtgaggagccagttaaagagtaaaaatgagaaagagcaaaaggatttagtgaccatgtgagtcgtctccagactttgtgtaagtgattgttctccttttggccctcagtttctacatatacaaagtgggattcctcaaagatctccaggggtctttgtcccttatttatttctacataaacaaattatctta

SEQ ID NO: 196006 - DNA, 1000 bp, Homo Sapiens
cccaaaaggggtgagctggccaggtgaggccaggcaaggggtttagagggcccccttaacctacgggcgggcatacctgctgacctggttctgcactgaacctgagtttgggcccttacacacttgacactctcacagcagcctggagggtgaggggccgaggggctcgcccaccccttctgacccaggctggaagctgctctcccctgtctgccagcaaatggtcactgatccaagcgggtcaggccaactcgactggagcagggcagagaagatcctgtttgtttcccgaggtaactcctgccatcctcctctgtctcttcacgtggcggagtgttttctcagcagggtggggcagggctcaggtgtgaaatcctgggaggcattctgcttgcccccaccttgctgctgcgaggccctggtcccactgctgagccgggggctggcagatccctgggaacggctgagcctgtgtttcagggcagcatcgtgcaccgagcaggaaggctgcttccggcagtgtggagccggcggtggagggcagggttagggcctgttctccagctggccatgcttgaccctccagctccaggcgaagctgccatcaggggccagtgtgcactgcaggtcgatgcccgagtctggcacctccatgtcgtagcgaacaggctgcccgtctttggtgaccaagctgaaggctgcagctgggatctaagggtggagcaaaccagtgggctgagatcatggcatagggctcaagccatgtagaaaggtaaagacatctccttccagccagaccggcagccctaagggcactgcctgtctgtcattccacgggactcagagaatcccacccggctcaagtgtaggtctggaggacctctttgtcaccactgccagccttgctttgaggccctgggaaatgctttgaggtcctgggggacgttgaaggccaattccaagtattccctagagtgccattctacttctttgaaagctt

SEQ ID NO: 196007 - DNA, 1000 bp, Homo Sapiens
tgatagggattgcagaaaatctgtagattacttccttgattttttttaggttgtttactattgacatatagaaacactacagattttggtatgtttattttgtattctgcaactgtattaaatttgtttattagttctaacagaattttggtggtgtctgtagggttttgtatatataagattatgtcacttggaagcagggacaatttgattttcttattttcaatttggatgctttcttttctttctcttgcctatttgcttggctgggacgtccaatattaaataaaagtaggcatcatgtcttgttctagatcttagaggaaaagctttccagtttcccccattgagtatgatgctagctgtgaatttgtaatatatggcctttattgtgttaaggtatgctccttccctgtctaatttgttgagagtttttatcatgaaaggatggtgaattttatcaaatgctttttctggatctattgaaataatcttatggtttttgtctttgattctgttaatgtggtgtattacatttgttaatgtgcatatactgaaccatccttgcatccttgggatgattcccacttgatcatgatgaatcatctttttaatgtgttgttgaatccagtattttgccagtattttgttgaggtttattgtatttacatttcttagtgatattggcctacaggtttttgttgttgtggtggtggtggtggttgtggtgtctttgttttggaatcaaggtaatgctggcctcacagaatgggttagggagaattccttctcatcaattattttcaaaagtttaagcagaattgatattaatttttctttaaatttttggtttaatttagcagtaaagccatcaggtcttgggcttttctttaatgggaagccttttattatttctatctcattctcattattagtctgttcaggttttctgtttcttcatgattccatcttggttggttgtatcagtctaggaattttc

SEQ ID NO: 196008 - DNA, 1000 bp, Homo Sapiens
aagacacgctagcctcaggaagcagtgagctcaccatccctggagtgtgagtcaagcactagtcttggatgaccccttgataggaacgttgtagacaagattcaaatatcaaatagtatttggactagtgatttcaaagtctattccagacccctgtgaaactgtatttccaaccttggcatttctggatttccactaaattaagccactttccttgctcattagcatcttgtagagctgtgtggctatttgagcgcttgaatgtggctagtccaaattgagatgtgctatatgagataaacaccacgtttccaagaattagtatgaagagaaaatgttaaatatttcattaataattttaatattgattacctattgaaataatattttgtcatattgggctaaataaaatatattattaaaatgaatttcatctattccattttacttttttagtggagttactagacaatttacagatgtgtctcaaattatatttctattggacattactgttcaagactatcacctgtggtaacttgaggccccatctttaaaagtggtgactattaatactgaggagtaggtggtaacttctagctgccatcctaacttctcaaattaaagtgagacccaaactcagcctctgaaagctttattatttatttatttatttattcttcttcttattttttttaaaagatagagtctccctgtcatccaggctggagtgcagtggtgtggtcatgtctcactgcaacctccaactcctgggctcatgcaatcctcccaactcagcctccagaatcactgcaattacatgtgtgctctgaaaccttttttttttttttttttaactttgtagagagtcttgctgcgttgcccaggctggtcttgaacttctggcctcaaatgattctcctgccttggcctcccaaagtgctgagatgacaggcatgagccaccatacctagcatctctgaaacctttaaatagaatt

SEQ ID NO: 196009 - DNA, 1000 bp, Homo Sapiens
tccctccagacattcatcttcaataaaacattcaacgaataacagaatgaacaaatgacatgtggccccagtcactgagctggggccagtggaaaagggtgggtgaaggatgtcatcggtggggacctgtggagtttgtgggactcctcattcatggggcttgcgagcagggatgtccatgggcacgacaggaatttgggtatcagcatccatgggtctctcattctgcacattgaatgtatcaccaaggcctgccaattctggctccaaaatcccactgaaacccttccttttctctgtctccaccctctgccaccagcatcactttgtttcctctcactgactctggactccccctccaacttgcttccccacagcaacctcaggatctctctaacacccatgtctgaaccagttccgtcccccagccatccccggaatgtcgttttcctgcttccccccttggcctcaggataacatccatgttcttagctccacttatgaagtcctctgtgaccaggcctcactcacatcctgacctcttctcttctctcatcccctggccacccccaatctgtgcttacggtcccacagagctagctctcactggccctgtgtctgggcaggctgttcccttggctggaggtactcctgtcacccacctgtactgtatttttggctcagaggctgcttttcccaggaagcctttctgaccctctgaggatccctgcctgcccttaatcagatccatgtaactctatgtgctgctccatccttgcgcatctctctgctctgtgcctagcagacggcagcagcctgtggaatgaggcgctgagttccataacctggggcactgtgcccccaacctgctcccttgcagctctaccctctttcaggcccagctgcagtgccgtgtgttctgggaatcgttctgggctgctcccacccagctgtcggtgacccctcagttccaccgtcctggactcagcctccccaagct

SEQ ID NO: 196010 - DNA, 1000 bp, Homo Sapiens
agtggtagactcaggggttccaggcccagtcagaggagtggtgtcagtgctgttcctcagcatttctggaggctccgtttctggcaggaaatcataatctaggtactcatattcggtggcctgtctccggtcccgggcaagcaggggacccaaggctttctcggcttcatctgcccaggtgtcccacagctgcaagctgttgccagggcccagtaggatcagcaacaggaggagttgcagaggcatggcacctaggaggagacaatgggcggagggatgtcaagacagtttcacccttgggcttagcaagcaccctagaccaccaccctctactgccacagctggaagcatgtctggtctggagcagggactggggacttaggcatccctgacatgcctgggatggagaagatcctcagccagtagcagttattattattactcatcaacatgaataaagccatccaggagggccctttaacttcttctagatggtgcatagaaattgatttgcctccctctccattttggttaagccactttatttgtggacaagacaatccactggggtgtagaaagatttagtgcttctgcttctagttctattaacttttcatgtcactccttttttctttttttttttttttagatggagtcttgctctgtcacccaggctggagtacagtggcgctatctcagctcactgcaacctccacctcccgggttcaagtgattctcctgtctcagcctcctgagaagctgggattacaggcatgcacaaccacacccagctaatttgtgtatttttagtagagacggggtttcactatgttggccaggctggtctcaaactcctggcctcaagttatctgcccaccttggccttccacagttctgggattaggcatgagccactgcgcccgacctcatgtcactccttcttaatttcaagtattacattatttataatctatcataagagtaaagtagtacctgcaca

SEQ ID NO: 196011 - DNA, 1000 bp, Homo Sapiens
tttagcacctatgttcatcaggaatagtggtctgtagttttcttttttggttatgtcctttcctggttttggtattagggtgatgatggcttcatagaaagaattagggaggaatctgtctttctctatcttgtggaatattgtcaaaaggattggtagcaatttttctttgaatgtctggtagaattctgccatgaatccatctgatcctggatttttatggttggtaatttttaaattaccatttcaatctcgctactttttattggtctgttcagggtatctatttcttcctgatttaagctaggagggttgtatttttccaggaatttatccactccttctagattttctagtttatgtgcataaaggtgttcatagtagcactgaatgatcttttgtatttctgtagtgtcagttgtaatatctcctgttacgtttcttattgaggttatttggattttctttcttcatttcttggttaatcctgctaatggcctatcaattttatttatcttttcaaagaaccagctttttgtttcacttatcttttgtatttttttttgtttcaatttcatttagttctgctctgatcttcgttgtttcctttcttctgctgggtttgggtttgtttttttttcttgtttctctagttccttgaagtataaccttagaatgtcagtttgtgtcctttcaatctttttgatgtaggcatttagggttatgaactttcctcttagcaccacctttgctgtatttcagaggttttgataggttgcatcattattgtcattcagtttgaagaactttttaatttccatcttgatgttgtttttgacccaatgattattcaggagcaagttatttaatttccatatatttgcatggttttgaaagttccttttggagttgatttccaattttattccactgtggtccaagagagttcttgatataattttaattttcttaaatttattgaggtcattatgtggcctat

SEQ ID NO: 196012 - DNA, 1000 bp, Homo Sapiens
catacctcactgtagcctcaaactcctgggtgtaagcaatgctcccatctcagcctcccaagtagctgggactacaggtctaaatcactgtgctcccagtggtatcttagttattttggtgatttcctggaaatttcttggatgattttcaaatgtcatttttttatattaatctcaagtataatttaggtcactattatcatagaaagttaagactggacagtattatttccaatttagcttaatttttatagtcaaaatatctggcagtaggaattgaaataacaaccaaaaacattgacagattgttcttaaaatcatccagaaatgatacactctattaatattatgggtgggacctagtgtgtgggcatctattattttttcatttatttctccacaacatgttttcatttagttttactgttttctggttcagtacatcatacagcttgtctaagtgctagaatgtgtaatgtgactaatatagaatgcaattaacctcagaaccagttgatgatgtgttatttttcttgtgatattgtggtatcatcatcattaaagttacttaaaccttcattttttagttcaagaccatctgaatggaatcttaggtttatccagtcttgttctgtaacctttatctaggccctctgtaattccaccttcaactttggagacatcttaaaaaccaaggcacaaatctggcttctatcactggaaccatctccagctttgaaggacttaaactcaaatggcatgtcttttaatatttagagaattaagtcctaatccatcctgtttaatgcttttcactgtattacttaagatgcaaagaaaatgtcctctcctttacccagctgcaacaaattaataagtaatttcaatcaaataagatcatttttatcctgaaattcactctatatcctccaatgctttggactcgataaaattgatgaaatgtgtgtgagctttaaaaaatacctgaggctttgaattc

SEQ ID NO: 196013 - DNA, 1000 bp, Homo Sapiens
atttaatttggccgatggctttagcattcacaatggaaaaatgttaaatctaattagttgatgaataagagaggtcttgtgaattgagggacaaactggaaaacagtatgaattcctcttgattttgaatcgtattctaataatttgtaccattcactgaatactaatgatttaaattaatcactattaatacacagattgcttaaaggatctttacatactgtctactccaagattttgatttatctgaagagaggttttactagaaacttggtagtattacatttgttacagttccttttacatatttccataaatgtatatcacctctatggctttcaaattttaaaaaagttgccattttgaacaattttatattttaaaatgttaccaaaacccttaaaaaagcactataatgtcgtcttaataaaaataaaaatttaaaaaattgcccatttaggaaaaaattacttgcagaaagcaaaaaagtggttaaaagtaaaatctttctattcagttgaaacatagacacataatttctaccgtattacaaaccccattactaaaattaaatactgtccaaatggaagattaaaatgatttcaaatttattttgataaatgacaaaaatgccaagataattttgaataaaatattaccctatttgcctgtcagtctttacttaaagtctcctgtaactaagaaaaatatagtttctctaattgctttaaaatttagaaaacagacatgatttatatttttaaatcattatatagggtagccttacactttacaatttaacattagttactacgctctcatacaagaatatgtcacttcttcaaccaccccttaacaacaaaaaacccaagcaataccaaaaaataactaagagaaatacctgtattaaattttatcaggacttataacaatgaatcaaaagatctcacaaatgaaattttatcctatgtcatgaataagaaactgtttagatctgcat

SEQ ID NO: 196014 - DNA, 1000 bp, Homo Sapiens
ccatattgtgtgactccatttatacaaaatgcccagattaggcaaatctatagaaaaagaaaaatcagtggtagccagaggctaaaaatagaaggaatgggtaatgactgctaatggggtttctttctgagtggatgaaaatgttctaaaattgattaggtggtggttgtgcaactctgtgaatacactaaaaatcactgaattgtatagtttaagtggctggattatacagtatgtaaattctatctcagcaaaccaattattaaaaaaaaaatcccatgagctgaataaatatgacatacggtaacaagaatttaaatataacccatagcaaaatattatgtctgttttgcttttttaagcgaacacagctcatagtctgctattaaataaaacaaatcacaaacctcatgtgtgggaaacagactggccaggaagaaatttttgtgccttggaagaattcaaattccctagaaagggcagtcaaaaatctttagcaactgactcagactaaaggcatcaataacctattgctggctgaaccaaatttaagctgctaggaaatgacagtactttaaaaatgggctttgcaaagtcattttagtaataaatacaagaacatctgcagcgagaactctcagccaaaggctgttacctgtgagctttcaggatcctctgggcaatggcatcgcctatcttgttgaacacaactttgtcatcagcacagcttatgaaaaactggttctatgagaaataaacaagacaatcatgttagtctttattttcttagcaatatacgtaagaacaatactgtaatatattttttaaaatgtttcacacagcagatgtgttctgatcactgaaatcacatcaagaaagtcaacgacacagaaaaaaagccgcctcatctcactcagggtctcatctgattccaggtcatatcacctgtaacacttaatcaagtggaaagttacactatattatttcaccatgagaattc

SEQ ID NO: 196015 - DNA, 1000 bp, Homo Sapiens
tttggaaaaattattgaaagcttgtggaatcaactggctgtgtggaattcacaaaaagagtattttatatttattatttgtaagctgtaagctacacatgctttatattagtaacatttttatagatttatatagatagatatagatatgcacacattatctccccagggagctggttgtttattagcacattaatgagtagtatgtatttttaggggtaatgtgaagctcaaacaagaaaatgtatgtaaaatatttggtattgcttactacaaacttgataataaatgttaactctgttcccactttccaccctacctgctttgttctttcctgaacaagttacttaacttttcaaccatagtttcctaatgggaattacaggttcattcctaattgacttttggggattcaataaaatggcatgtcttacttagctgacaaactaggagcttagatttctgttcctccttcttcttttagtatataaaggtgtaattcattaagcatttggtaaaatgaaacttctgccatgtccttaggaataaaccaaagaaaaatgttccaaaattatttatagttaataatctcatatattgttatttatctagatctagtctacttactgccaaacttttttttcatttcagtttatagttatagttgatcaatcagatgtcttttttttggtaaatattcttgttttttattttgtttttattcctggcaagctatgatagataggtaaacattcttttttttttgagacagagtctcactttgttacgcaggctggagtgcagtggcacaatctcggctcagtgcaacctccgcctcccaggttcaagggattctcatgcctcagcctcccaagtagctgggattacaggtgtgcaccacaacgcctggctaattttttttgtaaagacggggttttggccattcgcagtggctcacacctgtaatcccagcactttgggaggccaaggtgggtggatcc

SEQ ID NO: 196016 - DNA, 1000 bp, Homo Sapiens
ggcagcatagcaagattcatctctacaaaaaacaaaaaactaaccaggcatggtggtgcatgcctgtagtctcagctactcgggagcctgagggagtatctatctgggaggatcgcttcagcttggggtgtgaaggctgcagtgagctgtgatcatgccacagaaaaaaataataaaataaataaatttaaataagactattactagaaggctttcatcacacatctttaaacttacataccatcctccaatcacactgcttgaaattcactaatatttttgtaggtcctgcaattatattgtcactagcacaataatatcacattgcattttgcatgttaaatgcatccattggttcaagataaacactgaaaatacatcacaaattttaaaaccatcttttagcacttgttcaatttttgatatacaccaaacacggcagagacctgagcctttctcaactttgagaaggcccacccaaggaagaccagattcttggtgacacagttttctttcttttttatttttttgagacagagtctcactctgtcaccaggctggattgcagtggctcaatctcagctccctgcaacttccaactccctggttcaagcgattctcctgcctcagcctcctgaatagctgggattacaggcacgcttcaccacacccagctaatttttgtatttttagtagagacggggtttcaccatgttggccaggatggtcttgatctcctgatctcgtgatccaccagccttggcctcccaaagtgctgagattacaggtgtgagccaccgcgcccagccagtgacacaattttcttagaacatctgcaagtgaattcactccggagtaaaaggaaaacgtttctttctcaaagtgactgaaatgcctgcagctcctgtcctgttcagaggatcctccaaggtaaccaggaacccagcctaaccttggagaatttgttccttcatgattgacatggtttgtctgtgtcccc

SEQ ID NO: 196017 - DNA, 1000 bp, Homo Sapiens
acccatgcatacagaagatagcttttctgtagattcatcttcttttgttattgttactgttttttgtgacattccagcaattttcttgtatccttttctagcctgatccaccagaagctgaaattcactcttatgttttttacctgaaattcaaaagatcttctcagtaaagctaggactatgaaagttaaccatctacaactgacaaactgaatatcaagaggtgtacaagggatgggcatggtggcttacgcctgtaatcccagcacttcaggagcctgaagtgaatggatcacttgtcaggagttcgaaaccagcgtggccagcatggtgaaaccccatctctactaaaaatacaaaaaaaattagccaggtgtggtatcacatgcctgtaatcccagcactttgggaggccgaagtaggtggaccatttgtcaggagttcgagaccagcctggccaacatggtgaaaccctatctctactaaaagtacaaaaaaattagccaggtgtggtattgtgtgcctataatcccagctacttaggaggctgaggcacaagagtcacttgaacctgggaggcagaggtttcagtgacccgagattgcaccactgcactccagcctgggcaacagggcaagactctgtctcaaaaaaaaaaaacaaaaaacaaaaaacagaggtgtacaagcttgctcaagaacagcatccttaggaatcacttgcaataaatttaaaagctgccaagcataagaatacaaagggctggagtgtcatggaaccttctttttatcttctcccttcctcaaatacaaatatggaaacatgatattcctagttagctactctaggtttcttcccaaactccattctctagaaaggcttttacataatcataagagcatgaaagatgcccgctttcttaaatatatacaaatgataccattctaacttccaagatacaagagaactaagagtatttgctgaatctaaaatagaagct

SEQ ID NO: 196018 - DNA, 1000 bp, Homo Sapiens
gggtgaagaacacaacaaaaagctagtgttcaattctgtcagatcatcagggccagtatgggaagaatagcttgagcagggagtttggcatcatagttaaaacaggctgaggtctaggtatttgctaataaaactcttcctgggttttaggggctttttactccttatctgctcaaagtcacacagctagtaagtgacagcatcaggagtcaaatccagggtttctcattgttatttgtgtttttaggtgtaattttgatatgctgcattagtttcaagagtctttatcttttgcagatacaaactgaaatatttataaatgaaaagatttgtaatctgggatttgcttcaaaattatactgaaggaggagggatgagtgaacaggtagggtatagataagctcagattggttatgagtcgatcattattaaacacgataatgggtgcatagggttcattacatcctctgcttttgtatatgtttaaaattttctacaataaaaagttagttttaaaaaaaacaagtcaaaaactctagctgtcttcagtgttagctttatctgtgctctcattgttttggtttgctttgctgctttccagttcactcttggggactggaaagacccttattcgaatgtcctgttttgtggcttgttcagttttttaagagatgagaaaatgtgcaacataacaggaaaatgttaacagctttttgtgagaaggttaaagagctcttcatcctagaggagggaaggtttcctgtgtagtttctctgcacaagattcttctatataagtggtagggacctggtgttttccagcttctctgggaaaacagacttaaactacctatgaagaatccaagaggccggagcggtggctcatgcctataattccagcactttgggagaatgaggcaggaggattgcttgaggttatgagttcaagaccagcctgggcaacaaagcacaacctcgtctctacacaaaatagaaaaaaa

SEQ ID NO: 196019 - DNA, 1000 bp, Homo Sapiens
catcctccataaacaaaatcaggaagatttgagaacctcaggcttgtggaaatccagacatttgggtaatagctatttgtgttagaaaggaaattacccattctgaggatgtacattggcatttttagacatatagagaacattcagtgaaatatttcttcccaaaatactgtcataagcggaaagagttgctgatctgtgaaagcactgagaaatgccacaatttcttactggaaggattcggcacacttttttgcccttactcccaagtgtgaataactgaagagtaatactgaaatacacccaagaagacagaaagcatactgagcaaattccggctatgggtaacttcttagaaatacagaccacaataaaatcataacattttcatagtagggcttatgcaaaggtattcttactatgttctgagttataaatcaaagtgtattttcctaaaagatgattccaatcatatctgatgagaagagcaatcaaaaagtaggctagtagcacaagtgggagagaagacactagagacaggtaggtgtttgtccctaatgttatccataaatacagattttaaaaagtgtcatacaatacatgagcaatcagaagggtctaaaataattcaaaataaccagcatttgctgagtccaaactgcctccccacactatatcccaaacctgctcctggtcatctatttgaaaatgtgatttctacgcctgttcagccttagttcttggaattttcattttttaaacaattacatggactattatatgcaaaaattaggtcctgagaattctgaggacaaagtacaaagttcccatcctcacagagcgtggattctcatggaaggaagacagtaaagaaatacataatgttaggaagtattaagtgctaataaagaaaaacaaaacagcataatagatacagaagaagaaaggtgctatttgagacagggtcattgagggaaggcttctctgacaacatggcatc

SEQ ID NO: 196020 - DNA, 1000 bp, Homo Sapiens
aatgtgaagggctctgtagcttctttttcttccttgggttttgatgtgctgatgtaatttggacattgcttttctgcctacaaatgggacgattcctgatatgtgtagattagggtgaaatctcaggtgctttttgattttctactttcagagaaaaagtagaaattgctgctgatataccgagacttcaccgaagagatgttcagtgtaatataattattttgatgtcacttttcattgttttattcacaaaaaggaaaaacaatattttataggaaaacattagtaacaagagagatatcttaatttttaaattaatattcagtgctctttttaacacgatatttattaggtgcaagttacatgctattgtagtaaagttaaaagattattcaaatctttggaattttcagagatgaattttatcaaatacatatttttaaattaaatgggctatcaagtagagtttagaaatcttctgttcatacagatttttatcattttagtacttcatctgtgatataaaacataaatcttgagagaagggcttttgatttttgttaaaagcagcatgcacatcctataaggcatcagtcagaagactcattagaaacatcatactaaaaagttaaaatgtttcttacgctaagattatatcaccaaatccttgaaaagacatagcttcttatcagattgttctttgccttttagacttccgtttcaagggagaaaaagtaatttttgactaaatgtctattgatttaatgtctcccagacccaccaaatagagtttattcaacactaaaatgcagttacctctagaataaattttgaaagctgaaatggaatttggcaactgtttaactcgacacagaaaattcactgaatttagaacaagaagtaaagtgaacattattttatttaattcaagatgcagttgtattttaagaagacataataatgagatggcaaaccaaaataaataaatgaaaatgaattc

SEQ ID NO: 196021 - DNA, 1000 bp, Homo Sapiens
taaatttctgtattagaaaagaggaagggtcttgaattaatgacttccacctaaaaagaaaaaaggtatttaacaaaaagatcagaacagaaatcaacaaaatagaaaaaaaaaaaacagagaaatgcattaaaactaaaaactagcagttggagaaaatcagaaaaagagaaataagaagaaaaagaaaaagcaactctagccaggactgataaggaaaaaagaagttacaaattaccatatcagtaaggaaagtgggtgacatcaccagagtctagaaatactcaaatgataacaaaggaatgttataaacaactttgtcaataaatcccacaaatcagatgaaatgaaacaattcctagaatacactatcaaaacttttaaaaagaatgttttgaataggtatgtagttaagtatctccccacaaagaaacctcatacccaaatgtcttcactgataaattccataaaatatataaaaaataaacaataccaattctaaaataattttttcaaaaatctgaagatggaatacatagagatttatggtataaggccagcattaccctgataccaaaatcagagaagggtagtgcaagaaaactacattttgcactaacatctctagtgcaaaattctaaacaaaatgttggcaaatttaatacaacaatatgtaaaatgataatacaatcagaccaagtatatttgtttaatgatcttttgttcaggattcatttaacattcaaaaatcaatttatgttatctactaagcaatgaaccacaaaggaaaacctacatatgaattcaataaaaccacagaagaaaatgtttgacaaaatcttacatccatttctgatagaaatgttcagcaaactagaaatataagaaaatttcctcatcccaatgaatgacacctgtaaaaaaaacccatacctaaccctaaaattaatggcgacgacttaatcctttccccttgagatcactagcaaagagagccact

SEQ ID NO: 196022 - DNA, 1000 bp, Homo Sapiens
aattatcacaactgaggagtcctgctgtcaactagtgggtagaggccagggttgctgataaaacatcctgcaatgcacagaacagaccccagaacaaagcattatctgccctcaaatttcaatagtgcaaggttaagaatccctgaaatagaacaatagaattttaaatattttgagaacaaagtatttaagttggatttcagacctagagctcaagaacaaaatcataaaatgcatttagaaaccacttctgctaatttcctttttctagtactggacagtacagtgggcaaaggactataattctgtagatcaaagtccagtcaaaagaaacagacatatctcactttcaagtgggagctgaacaatgagaacccatggacccagggaggggaacaacacacacgggggcctggtgggtggtggggggcaggaggagggagggcaacaggataaatagttaatgcaagctgggcttaatacctagatgatgggttgacaggtgcagcaaaccaccatggtacacgtttacctatgtaacaaacctgcacatcctgcacatgtatcccagaacttaaaacgaaataaaaaagaaacagacataagatgcagcatgccaagaagcatttcaaaatagagaagctgcatattggttcctacgcttcagtgatgttaaaatgcaaactaaacaagaaaaatatttctttcccctctcctctctggttgaacaactgctatttcttcctcaagccctacctcaaatgtttcctctttggtggcgaaacctcctccaactctcccagagcacctctttcttttctataatcctatcccacgaaacacttaccttcattaggattctcaacatgtgaaataaattctttgattacttttatgtgtcccccaataaactttgtacttcatggtcttcttttttaaaataaactttttaattgtagaatagattgactgaaaattacaaagagagtccagagaattc

SEQ ID NO: 196023 - DNA, 1000 bp, Homo Sapiens
tgcccttgaaacctaattatcataatgtgaacccaaatgttagggttccttcaaaatgcaagtgctatgaagcggaaaagtaatgggaattaaactgggcgtaaccttagaaatgtacggatgtggggaacttaaaagaggtatttcattaagttaggagagcataatacaaagatttagccacataaaatacacagaatcaaaaggtttaccgaccccccactgcagccaaaagatatataaaacacaaataaggtgaattcaagaactactgttttcaactatcaatttctggcccccgaatctccaagttctatataaccaaaagaaaaggatctcaacaaaggatttcagtaattttgaattcaactaatgcaactaaaatcagagagagaaccaaaataattcttcacaacccagtttaagaaaaaacctagatattccctcaataagaaactgaatacattttttaaaacgtgttggccaaaggtgaggcaaaacagtaagctgtttaatcccaaagaaaagaggaaaatatggataagaataggccaaagagtcaacaatcttaaagtaaaaatggttccagtggtagcaattgatatatccctcacacatctaatttaccctagaaactatgatggaaaaaaagagctaacactgcttaatagaaatacattcatcttgaattcactacattacctgttgttcaccaaaacacagaattcagcagaaattaagactgcactggaccctatctacagagatggttactaaaagtcctaaaggatggacactacaaccctaatatggttcctaacttcaccaagaacaccattaataagagggtctatatataattatttcatctacctatttacaagcattaaagtctcagaaactatccttttctactcaactgaactctctaacagaaaatactgttaatctgatgtatgctctttaagaacaaaattgtatacaggaaattggtgaattc

SEQ ID NO: 196024 - DNA, 1000 bp, Homo Sapiens
aggagtggaagttattactggcgtctaatggatagagagcagaaatgctgctaaatattctaaaatgtatcagacagtcttccacaacacaaattaatcttctttataatgtcattactaatgtcacagtttagaaaccttgctgtagataatctcatattctgcccctttctacccaaaattaatacactatttagaaaacttgctctagataatccaatattctgcacctttccacccaaaattaagacacataaacagtgttataaataaagttttggtgccgcaaaagaaatagcactcgaatataaaattttctttttaatcctccgcacggcaagttacttctctagaagcgaagcaatggagcaatggtgagcgtacacttggacaagggagggaaaggggttcttaccctgaggcgtgtggcccctgctgctgtgtccttccccttttgtctagggttagaccgcacaggcaaaactaattctgattggctaatttaaagagagtgacggagcgagtggtttggcaggaaaaatggttatgacagagcaggtaatcggtatgagtcagggtggagcaggtaattgaaaaagtttgctttatgaggaagttaagtttaaaagtagaagacaaagaattgacatactgacatattgattctttgaaaagaaatttagaactcatatctaagtgcaaaatacttgaactgcattcttttagtttctctctgatttattatagttcttgtttgctagcatgatgctgtcacccgatttcaaggcatgttttaaaaagctttctctggaaagtgattttatgtgttgtggtgctgtgaatggtgcatcccacacaggctttgtcttatatacccacaggttttcttaggaaaatctacgattttaggaagatcaactgtgatatgtcttcaggataatttgaagtagaattgatctcatttcttttttggttttggtctttaggaagatgtgaattc

SEQ ID NO: 196025 - DNA, 1000 bp, Homo Sapiens
atattttcaagaattaggaccacttttcaatatattaaaacattttcaggatccttctccatcttagaagctgtacatttgtttatttgatctacgtacagtggcatggcatacacatggattcacagaccccttccaatcacattccaggtacacagtctatatctatatctatatatctatatctatatctagatatctccatggctctgttatttttatctttaggaataacctattcaaataaaaatctgtgagactctagcatcgaatgctttgtatcagtttatgagattactttccattataaaaactagctgaatttgtgtcccgaaggaaatagtacaaataatctttcattagggctagagatatggctattgatctacaagcccagagcactgatttgcctccagaaagacaaacacatctctctgacatcatctacctctcttctatcttcttcagtctagccacactgaccttcttgctatttctcatttcactaaactcattcttactttagggtctttttaaaaaacacaactatattgagataaaatatatatattaataccatataatttatccttttaaagtatccaattcagtggtttttataatattcacaattgttcaatcattgccactatctattttaagatattttcatcatttccaaaagtagttgcatattcactcgagaggtgaaccagaggtcccttggcagtgtagtaatataatcaagacacatcaaaatctagacatgcctcaataacttctaaaatcaactatataatcatgtttcattgcttaatcaataggccacagagcttagctgaagagttaagggattggtatccttaccaaagtcttcctgtccatttctaaatcagtaaactctgttagctaccgaactcaaatacttcctaacccaaatagggaaatataatgaatatttttccagtgtaactcgatggataacttacttcatgaattc

SEQ ID NO: 196026 - DNA, 1000 bp, Homo Sapiens
agctgggtatggtggtgcatgcctgtagtcccagctactcgggaggctgagatgggaggatcgcttaagcccaggagttcaaggtagcagtgagttgtgtcattccactgcactccagcctgggagacagagcaagaccttgtgaaagaaaagcaaagcaaagcaaggagaggagaggaaagtgaaaggtaaagggaataataaagaaaagaagagagagagagagagagaaataaattatcctaggttttgagagaaatggtgtgtgttttttatttggttttgcaataacacacaatgttaagccccaaaatatcaccagacagccttaatttagaagtgaggaggaacaccattgacagggtcttaggggtgtcttacaagggaaaagtccaagtgggattgttatggggctttgaaatctgtgctcgggtcatttcaaggcaggtctttcaaagcaaggaactgtttgggtgggcaaaatttgtgatataataatttaagataagtggatgcaacaagaacaaggaagccagtgttgacaagtaaactgttagataagcaagctgtttgcccaggtgaagagtactgtctccaataaattgatctgtaggaacttcccaaagtgaataatgaagatatttgctggtgtattcttatctttcctaggcaaaagttccctagagtaaagaagtcatattgatcaaggtgttttacaatttcatctactttatgttgacacaggtgttctcagttcataggtgtcttttactttccaagataaagctgttaaagtagcagacattcttttttgtaacatatttactaataccttcgaaagtcattatcttctctttgtgaaactcactgtggtctgtaatttagggaatgcgaaggtgaataataaaaaggccctagcaatgagaagcttagagaataaatatcaattagataaaatgttcataaaaatgtagtaccacaaaaggaaagaaatgaattc

SEQ ID NO: 196027 - DNA, 1000 bp, Homo Sapiens
agcgccctgcacatctgtgccctgggtgctcacttgactcacctaagtcctagctctgggcaggaggctgagcctgagagaagcccccccaaggccaggagcaggtgtccacaccccaaggtctgaaagccaccctaaagtgggttcagggctgtaaggggctccgtgtgggaagtcaggaaggcccccgggggctgaaaacagagtttgacctgaaagaggcctgagccccaggacctgcactgtgtctgagttaattgtccccaccctctgcctgtcccttgtcttaggtgttcagtcctaattactgcctttttttttttttgaggcggagtctcgccctgtcgcccaggctggagtgcagtggcatgatctcggctcactgcaacttccgcctcccaggttcaagcgattctactgccccagcatcccgattagctgggattacaagtgcgtgccaccacgcccagctaattttttgtatctttagtagagacaggttttcaccatgttggccaggctggtcccaaactcctgacctcgtgatccttcctgcctcggcctcccaaagtgctgggattacaggtgtgagccacggcacccagccttaattactgcttcttaacatccctacaggagccacctgaaggtgctatgaatgcaggtgaagaaatgacatccaggcagggcttatgcagatgcctcttgcctccaaaaggaggattgggtccctctgctgtacttaaaacaacttgaagctgggaattgtggagggggggagggggggagggggggagggggcctcagtcccacagagacctagctcccatttcgtgtggccagggtgttgagaacctttgtccctggagcccctgtgctgagtcataaacacatgggacaaattccagcagtaaacgaccattcactaagttgcaagtgactttctcagtcttctttgcttttgtgcagagaagactgagaattcagccctagagaattc

SEQ ID NO: 196028 - DNA, 1000 bp, Homo Sapiens
aggtgtgagccacggcgcccagccaacttttcttattttcacactctctcagacattcagacactgaatctcctctttgagctagcctcttctgctagaatttatgcagaacgtttaactcaagcccaggcagtcatacaggtgtcagtggcagagcaaggctcagaggccgcaccccagggctcttccattaaaccacactcattgcatcccacattgcctttagcaaatctatggtgaaatctttcttcctctttttggcttgttataaaaagcataaggcataacaggaaatatgagtgggaacattcaacactataagtaccttcctagtactgacagttccagataggtaaggcttatatgaagaagaaaaaaaaaacctaggtatgcgatgttactgtaataaaaaaccaaaaggggtctgggtaaaatatcaaataaaggctcacgcaaaaattcagtgggcagctgtctgaagatttccttcttttagtatcctccagggaacaaatgcctcaaaagttaggaactgtaaaaccgacgaaaataacattttccactgacaaagcaatttctacacagtgcagaaaactgacccactacattgcctatacaaacagcagagctagaaatggaatttcctttggttaatgtttctggacatctgaatattttcaggcactaaaagatggaggattctgcttgacagcaatgagctaggtattcagaagccaaatgtttctacaaaccctcccacctcaagcactgaagaataagacaaaactaagcttctgatttgaagggcaaattggaaattaaaataataaaaaaaatcgctaaactttactattttctgtgcatcaggttggtattaagtaagtgcctcctcatcaatcacacaatctcctgaggaggtattattctcttttaacagatgaagcaactgagacacagagaaattaagtaattcatagacaggtagtgaaatgggaagctt

SEQ ID NO: 196029 - DNA, 1000 bp, Homo Sapiens
ggttgttatatgtgttctttataaatttgaatattaccagcttatcagacatacgatttgcaaatattttttctcaatccatgggccatttcttcattttgatcattgtttcctttgctatcagaagatttttattttgatagattcccatttatttatttttgcttttgtgaactgagcttttcatgtggtacctttaaaaaacattgccaaagccaatgcccaggagcttttctccatgttctcttctaggagttttatggtttccagtcttatatttaggtcttttatctatgttgaagtgatttttgtatatggtattagagcccaatttcatttttttacttgtgaaaatccatttttcctagtaccatttcttaaagagcctactctttccccattgtgccttgttggtacccttatcaaaaattagttgaccataaacatttggatttatttctgggctctgtattctgttccactgctctacgtgtctgtttttattccactagtatgctgttttaattactatcactttgtaatatcactttaaatcaggaaatgtgatgcctccaactttgttctcctttctcagaattgttttgactattcagggtcctttatgtttccatacaaatttcaggattgttttctctatttctgtgaagaatgccattgggatttttatagggattaggttgaatccacataatattgctttgggtagtatgaacattttaacaatattatttcttctgatccatgagcataggaaatctttccattattcttctttccttcaatttctttcctcagtgttttatagttttcagtgtacaaagcttttaattccttggttaaatttattcctaagcattttttgatgctatcataaataggatcgctttcttaatttctattttagttaggttttcattggtatataaaatgctattaattttcatatgttgattttgtatcctgcaactttactgaattc

SEQ ID NO: 196030 - DNA, 1000 bp, Homo Sapiens
gaaccagttaggatatttaggatggcacaggagcagggagtgggccagggtgttgttacaggaaggagggatagtgatgatatggtttggctgtgtccccacccaaatctcatcttgaattgtagctcccataactcccacatgttgtgggagggacctggtgagagataattgaaacatgggggcagtttcccccatactgttcttgtggtagaataagtctcatgagatctcacggttttataagggctttccccttttgcttgcctctccttctcttgtctgctgtcatgtaagatgtgactttgcttctcccttgccttctgccatgattgtgaggcctcccacgtggaactgtgattccattaaagctctttcctttataaattacccagtctcgagcgtcttcgttagcagcatgagaacagactaatacagccagcaagctaaggagtacgtggagagtgcttcagcacagggaggatgggtcctacggccatggtgaaccagagcaagccaggtggggaaactgagccaggaggcgaatagaaagtgtgcagatgctgtaggggcagggcgtgcctgggagcagctgacgtctgggcaaatggtaccctgaaacacaaagtctgagaagagtgtttgagaaaaggagcaacagccctgtgctagctgctgcttcacagatggcacgtggggcagactttggcctcgcagtctcccttaccctcacaggaagctcaagcacaggggcctcgccctcacttccatggggaaactgaaactcagagaggtggagtgaattccgaagatccccaaacaggtaaaaagcggagcagagtgtaaacccacatgaaggcgtcaaagtgcacgctttagtatgttctagaaagaaaattggaggctgtataagaagcggatgtggcgatacaccatactgggggaaatgagggggatgaaacctaataaaggaatggacagaaaaaaaatgccccagatg

SEQ ID NO: 196031 - DNA, 1000 bp, Homo Sapiens
gtcagctacagtggcagtaaaattagtttgaaagccacctacttttcaaaacttgctagtaaactgcctgctgagatgccaatgaaactcactagacagtgtatactactgggtctcctgaccaccactggatctcctggataccaccagtagagaagctgtcagccagcaagcaagccacccattggcagccacagcgtaagaaaaagaagaaaacactagaaccagaaaaagaagtcccagccacatgtggtggttcatgcctgcaatcccagcactttgggaggctgaggcggtggatcccttgagctcaggtgttcaagaccagccttggcaacatagtgagatcccatctctgcaaaaaatgtaaaaattacctcggtgtggtagcatgcacctgtagtcccagcttctagggaagctaaggtgggaggataacttaagcccgggaggtggaagttgcagtgagctgagattctgccactacactccagccagtgcaacagagccagactctgtcaaaggagaagaagaaagaaaaaagaagaaagaagaagaaaaagaagtaacatcttcttccagtgttcttccaggaccttctactaacaaggactaacactgcaagaagtggcaaagaagaaaagagtgattgagagctgagaggcaataaattgataacttgcaaagttggggatatacatgaaataaaactggccatgatgcgacaactgttgaagctgaataataggtacaaatggtcattctgtctactttgtatatttgaaagtttccataataaaaggttttcttattcactcttttctaatgcacaggagttaacccacttgctttcaaatcctggctcagtcacttagtggctaattattttggtgctttgcttctccatttgtaataacagtagctacttcatttcggatacagggaagagttaaaagttatatgaaaagcaattagagcagagctgatatgcagtgaattc

SEQ ID NO: 196032 - DNA, 1000 bp, Homo Sapiens
aagaaaagaataaaaactggaatacgaaccaaaaggcagaattttcagttgacactaactaaatgacaactttcccaggtcaaggataaaggcttagacatcttcatttattttaccatggttagattggtgcattccccttaatctctcaagtttttgaaaggactaagatttaaatatcattctgtttttataatctccatagctattatggctcccattttaagtaaatctgtattctaaaaattaggatgccaaggcttaaaaaggtgaagaaatgtactcaaggtcatttggccagtggagagaggggcctggaaggaaacccagttctgcacaagcctgaatcccatcctctttccaaagctgcccagagcaggggaggctggaggtatttgcctgcagtctgattttgttcagagctggctgtgggccaggcctctgcgtttactgaaatgttctgggagttattgggggaaatggagctttgaacttacctagtataacacaggctggttctcaggatcataaacatgtttctgaacctaattaaagagccttgtgaaaagggcgagagcaggactgagacatgacggtcagtctcaaaactccccgtgggcctgaacgggagcttggcttttcccagactccgcgagaaccagccctctctgggggcagagagttaagaggctttcgaaagaagaaaaggctcttttacagtcctggctggggacctgggctgtaccggggagggaatgtaggaggcataattggggcttgtaaaacatttccagacaaaatcacttaatgtgttttggagagtaaaaagcaacagtccacaaaatctataaatttaggcagttttcttcagagtcaatagagccaggtcgggggatcagaaggggtggccgggtagtgttaaatgtgccatggatggctgcaggtgaacttgtctctgggcacgggacccaggagcagccagacccttgggtttgaattc

SEQ ID NO: 196033 - DNA, 1000 bp, Homo Sapiens
tatcatgataatgttttcattcagtaaatgtttattatgtgtatttcgacgtccctctgctaggtgctaaggggcataagatgattaaaggggttgtgaaaagtccagtctaactggggtgagagaggtaggcaggtaaattagcacaggttggaagcacaggggtagagtttgggaatgaagctctggggcagcacagtgggaagagtgctcctcctgccttggggaacaggacaggccttgcctctccttctggcttcctctgtcactattcatctcgcaggcttttctgtcctctgccacaagtgctcttcctccctgaggacttttgcagaagttctttcctctgcctggaatggatgcttccttcttgtctccacgccttgctgattgctccccactctttcattccccacttgctgtgttgtagcccctcactgtgtgctctgcttcctgacatcatttagcacggctgctgtgaaaggatgacttgctggatattccccacctccccctcaagagaatgctttcagctgtaagtaacagaaaactgataaacaagtggctcgacaaatggtggtttattctcaaatatataggggactggaggtcagtagccactggtgcttgttgagctgtcatcagtgtcaggatcgtgtctgtaggattctcttgtcctttccctcatggttataagatggctgtcccagcttcaagtgcacccacactcaaggctgggggaagggatggctctgggtcttttcctttttatctggaaagcaaactctttcccagaagctggcagcacacttctatgtgtgtgctattgtccatccctggcagtaatcagctttttcagccactcataaggatgaaagggagaggggggagaggtattaagactagtgttgtgtttgccattcaacaatgccatctacacttctcaagactgtaagctccttaaaggcagggattgtctgtccttttcttctttgaattc

SEQ ID NO: 196034 - DNA, 1000 bp, Homo Sapiens
caacattatgttatatcctaatattttcatgtcccttttccataagtgacaatctagttttcttccataaattaaaattctcatactacttttttaagtgaccacatacctcagatacacacacccaacaacatggacgtcatacaggttaggatttcctttatcgaaggacttacttctgtctgcagagagctgctagctgccaaaagaagttcaatgctgctaggagggcaatgtgtcaaagcaaaagccatgagctcttgacgagtggccaagtcctggtaaccttctgattgtcctaactggctacaaacatcccaacttttaggataacctgcaaaattggcaaggaaaaaaatgattcccaaaagaagaagaatattcaatctaagatgacaaatgcaatggcttcctgctcaggtcttgtggtaccaaagcaaaatcatagtcattagtgacacattattttataagcagaaacagataagaatctaagctaggaaagattagggtggtttattatccagaaagttcaatgctactctaaacaagtgtttctgacaaactctgttaaattttagattaactgacaataaatgcaaatgatctactgagatttggtgttctgtgaaaaggcagccatctgaattccgaagatctgagggcctgctgcaaccctgctacttagcactcctgtgagagctttaagaaagagccaaaagtctcacaattcttttcctacaaggacaataataacaccttcctcttgggttgttgaaggaattaagtaacatttgtatttaaaagcacatgtaaactgcaaagtgctagaaaaagagatattatgatagatctccatacagaatcactcactttatagataagacagacatctaaggacagtgaccgaatcaccccccaactcccagcagggatctttttcctatacattatactctgaattcttaaaatacatttttattcttatttgaaggaattc

SEQ ID NO: 196035 - DNA, 1000 bp, Homo Sapiens
tactgaaaggaatggtagatgaatcactgtgttatttagctgattgctttctctctctctctctcttttgctgtttaatgcatgcacaaatgttacatgcacttatgtcatgactgaactctgcagaacttactgtgccacgttggcattctgcatttgcctcttgactctgaactcttgtctgagttttcctgtgtcccagcaacagtcacatttactaaatgtttgctgaatgaatgcatgaaccccatggagacctaggctgacatctggtcctctcttctgcacagagtctgactgtcatgggtatcatcatctttgagactgtaatctttatgaaggcagagactaggtttacttgaatgagcaaagtaaccccaatgcagagtactatgtctgctacatagcaagtgctaataaatatcagttcagtaaataagtgggtgaataaatgaatgaatgaatgaataaatgtttgcatcagtcacctgaggaccaattgcacactagtcattccctttgcaagtctacctggccctggcatgtaatgacagaatatagaggaagatttcatggaagatgtagggtcagggaccttcttgaataaatacaaagtgccttacccactgtcggggcttcctatatagctcagcaaagagccttctgtgcctgcagtttttttttttagagcttctctttccaactgccacatgcatgatggatgatgttcccatgtcagggaatatactcccgtggggatactcaaattttgataaagtctaaaaatactgggagaaagaaaatgctatactactttctaaatgccacaactattaataatacacctgtcataattactcacttggatgtgccataatcaaaatgggttgtgggttatgcagttaccagtgaactagctgtcatgccatcctcttgcttccactcaagaatacgtgtcaaatccaagtgactgtggggttttagagaggatcttgaattc

SEQ ID NO: 196036 - DNA, 1000 bp, Homo Sapiens
cagtgagctgagatcgcaccactgcactccagcctgggcgacagagtgagactctgtctcaagaaaaaaagaaagaaaacatggatcttactcccctgtctagctctgaccaactgcattaagctgggcgagaaattctccctgtctgggctcagcttccttatccataaaatgatggggttagcctatatcaccatagcccccttcaacttcaaatcatcaatgtttcatgtattccatgaaattagctaatgtggccctcctgctggaaacgtaaagcatggagttgcctaacagactgcgcaaaacaaaagtaaagaatgaaaagaaacgagagcaggagagtcacttcaacttgaaactcactttggtcataagaatagcaaagtaatgagttcagacagtttgggaggaatagaaagtagaaactgcaaaacaggaaatccattcttggctggctgtcaaaaagccatgagctggtgaaaatttaggttcattttaatttttaatttcttaaaagtaataaagctctcaaattagtgtatcgagatgcctgctactgaaatacaaaattactgtctcctgcccctggctttttaatcactcttgacttctttagtcctatgtctgaggctgtgatggttccatctcaggagcatttgctgccttgttctgcagctggcaggtaaccttgaactgctcaccatggtaccatctttaaggacaatgctccaacacaaccttatattacagttctatgtatactaaccttatctctccaaatagcttgtgaacttgcagggactccaaatttacacatctttgatccctccagtgccttggctgcagtaggcactcaaatagttactgaacgattaagaaacgcacttaccagtcttttcaggcatctcaagctacatggcagggtttatatactcaacctaagtttagactacaaaatcattttttaaaaaggcattatgtagcgatagaaaagctt

SEQ ID NO: 196037 - DNA, 1000 bp, Homo Sapiens
tcaaaaaagcactgaatataattccaggtaacattaaaaaattatcaggctatgtccatttgctcaataaatggtggctattttgcagaagccattaggatacaaataagggaaatctggctttgagttacatctgataaacatttatttaggggacaaaatattgggaatatccaaacaatagaatatcttgtttcattctgtttaaaatctaatagaataaaataattaatatagaacttttatggcatgtaatttttaaattaaagttttaaatacttgttgtgtgttaacttaggagaaactggatatagggtattgtgtaccctatctccatatcacctcaagtaaaacacaacaaatcaccaaatgataatttaacattgacaaggtaccatcattgacaaggtgccaacattgacaaggtaccataatcattaaaatcaagcctttattgatctccttctcctcctcctccttcttcttcatcattgtcatcgtccttgtcatcatcgtctccccttttcaggccctctgatttctgtgtcattcctccaactcccacatcatgttctttcttgcctcctctagccatggagaagatgtatcagggagagcatgaactttggagtcagttatacattggtttggctctcagcaacacctgtcaacagtgtgatcttgagcaaatcatttagccttttgcagttcatgttccttttactgtaaattcaagataatggcatttctcaggggtattgtgagaattaacttagtttattaggtaaagcacttattctagtttctgtgggattatgtttttcaatgatggtggttgcaatagctcccatcccatacactcttttacatgaccagctaccctaatattcaaagatagggattatttcttctctgtgacttgtgactgctttgaccacagagtatgatggaaatgatgactatgacttccaagactgggtaatgaaagacattgaagctt

SEQ ID NO: 196038 - DNA, 1000 bp, Homo Sapiens
atatactgcagtctaaacaagcaaatgtactgcagtctaaacaagcaaacttactgcagtctaaagcttacaactagttttccatcctcctgaattacacacgagatttagagcactttaactctctttacatccctcctggctaatatgttttgctgctgttttaattctgtcatcttttaaaatcactcaactcactggcattattgtttgtatggtcagtattcactaagatctactcacatgtttatcacttctcacgcctccattccttggaccctccacccgaggtatctttttaagtgcatcctgtaaaatgtcctttttgggagtctgacagtgatatgctctctgatgctttatttcattgttcttgaaatttgtcttttgatgaatatggaattcttgttaggcagctattttccttcaatgtgtttaatatggcattccactgtcttctggcttccattattgctattaagaagttattaatctccacttgttcttccttagaaggaaatctttatctcttaaagcctgcttgcttttataacttttttttgtctttttgatctatagttttctatgacagagtaagtatgaatttctttttatttatcttgcttgggttttgctgagctggaatctttcatcacttctgcaaaattctcatcacagtcttttcaaagattgcctatatttcattccctctctcatttctttctgagactctgattaaatgtttgtcagaccacttaaaatatcattctattttcttaatattgcttctataattttcattacttttcctgttttatagtccaaatacttcttttgaccaattcaataattcttcccttagctatatctaattttctattaagccaaccattgaaacttatagttattgtagtctttatttctaaattttctattgatttttcaaatctgctaggttgctttatatagtttaccaatccctgcagatattttaaagctt

SEQ ID NO: 196039 - DNA, 1000 bp, Homo Sapiens
gaaaaacatgcagaaaaacccagaattctccaggaagagtccagtgttcccatctttattaatctggcttagctggcatttgtattgtcacgggagagagtcgggataaggacaacataaataggaaagcttgatcaagaattcccttacttcacagttactgcctaaatgcagatattaatacttaaagtcagcggatgtgaaactaaacagcaagctgagcccagcccctctcacagtttgctgctgtctcaggtctcctgacatgacagtgctcacgtcatttgcagccagagaagccccagcctcacccagcaccctcctcaacccagtgcttctcccatccactcatttccccaccaccggggacccaagcagcctacttcctctgaattaccatgcttatcctcactcatattttggctttgtttcactgttcccctggattttatggttgcattcatactgcagtataaccagtataaatcaatacttaatgatttcgtattttttcgcacactttttgtggacaaagcccagtgacaggtctctctcatctctttctttttcagttcacaccagcacctggcctcattgtcacagatatatccacaagggcttaaattcttataatctgctaattctttcacagtctgtctacgaggcagggcacacccggacaacttgaactagagatcagatatgagtctctttatgaggagcttaaaataaaataggatggagaaaaatagaaaaaccagaaacactgccccacctttgtttttttaagccactgctaaagagcctgcatacaagttaagcttgtgagacaaagtttaaactcaagatgtgtgcattagggggcaagtaattggtacccactgggttgggccttcttggagttggtagcttttcatacccactgggaatgtcttgtccctttttcacagccacccagatcttattttcaaattttaaatctcagtttcctaagaagctt

SEQ ID NO: 196040 - DNA, 1000 bp, Homo Sapiens
cgcgctgatgacaccctggcgcgctggcggaagaaaaggtgccggtccctcgctttcttcatcgggcttgcagtagcttcgaggttagccacaggggctgccgactgaacagctggatctaggaggcgggtccagaacaggagcccgagatccttgaagcccactgggagggaacccgaagctgaagggaacactgagtgtttctgggaacagaacagtctcttccacatgaagaaacgtggcccaggagaagcctccgtctgcatctggctattagctgctcacactgaaaatcaggatgattcacagaaaatgctcttgataaactggacgacctggcaacactgggaccgcaatcctgtagggcaacagtcggtgccccgaagagcacaggcactgagcccgagccagccgggctcctgcagtgctgggcgcaggccctggagcatgaggggccccggacaccacctgcggagggagtggcctgtgggcctcccctggatcccacaggccgcacgactccaagggtgcctgtccagcttcatcctgtgtgatggtggcacccgggcccacaaagggccaccttggcgagcttgcaggaacaccctgtgccgctacccacagccttgggtgcgcagctctgagagcagccaggagcaggaaaggtgggggaggagaagctgggggaatgggggtgcggccagctccagggacctctgatcttgctaaaagggcgatactttggtgagatgggcacgaagaagagggcaaaagaaaacgtgcgctggcgtcacctggccccttagaggcacctggggaaactgaggtggaggatgaggacagggcggtctcgccaactttcggcggtgagatcccgggaagctgcacggcccccggggctcgcgggcgccgaatccgggcagaagccgccgccggtctccacttggccgccccaagccgacctgaggagagcccgccgagggcgcattcgcctcccgcc

SEQ ID NO: 196041 - DNA, 1000 bp, Homo Sapiens
atttttgtagagatgaggtttcaccatgctggccaggctggtcttgaactcctgacctcaggtgatccatccgcctcagcctcccaaaatgctgggattacaggcatgaaccaccgcacctggccggtatacagttctttgaatggagacagatgtagacagttgtgaaactgccaccacgatcaagattcagagcagccccaccgccccactatgtgaatgtactggtttctctgttggttaaaaatatgagccaggtgtggtggctcacacctgtaatcccagcactttgagaggctgaggctcgaggatcgattgagcccaggtgctggagaccagcctgggcaacaaagtgagaccctgtctctacaaaaaatacaaaaattagctgggcgtggtgatgcacacttgtagttccagctacactggggctaaagtggagggtcacctgaaccggtggaggtcaaggctgctgtgagaccctgtctcaaaaaaacctaaaaatttaaataaataaataaatacatacatacatacacatgtatggcatgggtaatgggtatttacacatattttatatatatatatatggcaaatacttacctgtgctatataggttttgaatatgttatgtttaggtttctgggttgggtttgggttggtttgctagtgaacattctctcttgtttctgtgggtgggttctaagcagtggcatgggcccccagctgcatgtcatttcagtttgcagtgacgccttcctggacgattcccagctttgttgggaggggccattgtctgatccttgaagaaccaagagaccataacagtgtgggaggtggaagggggaggattgtggcattcagaccctggatgcaggtagccgtgtcggccaagctgcgggaactgagtggctgtggatggagtttctctctcctggatgtttagtgggtctcatcacattccctcatcctggcagtcttgcctgggtacctgaagctt

SEQ ID NO: 196042 - DNA, 1000 bp, Homo Sapiens
gagccacccagacagggcagatgaaaaattggctacgtgggaggcagtttggggtcttgggcagaccctgagggctggggatagggagtgtgaaagagtatttggtgtttgttcctggttcttggttagacattgagctcaatcaccagtggccaacgatttaatcaatcacatatatgcaaatgagacagttggggctcagaacacagaaactcccctcagcctcaagttatggggccttggcctgccccgcgctttgagcagggcatcggaaagctcagaatcgagtctctccgaccttctcctgccctcctgcctctagcccctttctcccctggaaaccatagaaaccagaattcctcttccccaaggcaggtcagagacactggagcccttctccccttaaaacaaaaaaaaagccacaaagccggcaaaggtcactctctgcctgctcccttgaagaccctcattccgggagggtcctgcccataccctggaggaaggaatgctacccagagtctaggaagtctgggcaggctggcccccctcccccacccagtctgctccctttaagatctacagtgtttcaacacattgatacacattcttcatagaacctaagccgaaaaataggcagtcagccaggcacggtggctcatgcctgtaatcctagcactttgggaggtcaaagcgggcgcatcgcttgagcccaggagtttgagaccagcctgggcaacacggggaaaccccgtctcaatacaaacaaacaaacaaaaaatagccgggcttggtggcgcacacctgtagtccagctgcgtgggaggctgaggtgggaggatcacctaagctcaggaggtgtaggctgcagtgagccatgattgtaccactgcactccagcctgggcaacagagtaataccctgtctcaaaaaaaaaatggggtttaggggaaaatatggaggggctgggagggtggcatgcctggaaaaggcatggaagctt

SEQ ID NO: 196043 - DNA, 1000 bp, Homo Sapiens
agatcctatttttttttttttttgagatggagtcttgctctattgcctaggctcaagtgcagtggcacaatattggctcactgcaacctccacctcccaggttcaagcctcccaagtagctgggattacaggtgcacaccaccatgcccagcaaatttttgtatttttagtagagatggggttttaccacgttggccatgctggtcttgaactcctgagctcaggtgatccacccgcctcggcctcccaaagtgctgggattacaggcgtgagccactgcgcccggccaattttttaaaataaaaaataaaattaagaaataaatacaacataggaatattcaaatgactgaatttgaatcaagccccctgcacgtagctggccctgagagcctgtgagctgtgggggccggtgccctaacacttcctgtcatcacagtagttgttattgaaagcaccaagtgccaggcgtggtgtggtggctcacgtctgtaatcccagcactttgggaggtcgaggcgggcagatcacttgagctcaagagttcgcaaccagcctggcctacatggtgaaaccctgtctctactaaaaatacaaaaattagccagatgtggttgcatgcgcctgcagtcccagccactcgggaggctgagttacgagaatcgcttgaagctgggaagcagaagctgcagtgagctgagatcacgccactgcactccagcctgggtgacagagtgagagactccgtctcaaaaaaataaaagcaagcaagcactgagcatgaatcctggcacacagcaagtgctcagttaatacaccctcttctttcccagcctctttggaattcaatgaacctggctctcatcctggctcggggaccctggatacatcactttccccagccttagtttacccatctggaatatggggtcactatgggaggtgtgaggctgaagtcaagcccttggcgggtgtacagcacagagaatgcggacaagctt

SEQ ID NO: 196044 - DNA, 1000 bp, Homo Sapiens
aaagcacagatacttggggtttcagtttagcataataggagacgtggagaaaagagggaacaatgtgtgtaagtgaatattttcaacaccggcctcaccgccgctaacagcggcacatctagcatttcatattttgctttgccagagcagcaaattgctgaacagaagggaaaaaaagacaattacatattttaggttactatttcacctttgcaaatcaatatacaagccattaaaagtacatttttccatgaatgataagtgtaattacctcttcttgccataaaaacttgtccttattaaatgtaaatatttaaaaatgattgaaatatacttgaagggtgctttatagcttgattttatatgctgacatctgggttgcctttcctaaaacactctatttcttggagagttattaaattagtattttgaaaggactaacactagacttgttccttgtttccattttaatttcgtacatatttagatttaccaggaattcggagagggtttatgtttagctaatgcatcattatgtttgcggggcttgcacacacgtagaagccatgatattgtttgcagagggaatctttcaagaattggtaactgcatctccacatttattttgtacccttgcaaagtataaaaattgagattccaagatttctggctgtaaatgtttaattttccaattcttcttttgagcaaggaagattgttttaaatatttacttagcttttaattgcacatcatttcagatagcgaatgccgatcagttttattgtagctctgtcggaggttatttaactcttagaaagatgtacactgtgatacttttttcagcttcactctttggaagagattttttttttctttaaacattattatttttagttgctgcactctacctctatttttggtaaggtaagactgttcaattcaatactttgagagaatttcagacaatgatagaaaatctaatatttgaaaatataagctt

SEQ ID NO: 196045 - DNA, 1000 bp, Homo Sapiens
ttcctagctttctttgcatgtatgtgcaaccatgtgactgaattctcatcacgattacaggagcacaagtactatatgctgccttcaggcctgaggaataaaactttctgccccatcctttacactgtcttctctcatcttgggtgggattcagtagatacactggaggatcccagggatgggaaactgaaagaacccgagtccctgaatgactgcatgaaacagaggcctctcctcctttggatccccacagccccccaccccaacctccccgcccccaccccgccccacaaccatttacacacattaaactcagacctattcaagaaataactcctaaaccactgaaatgtggaaactatttgttatggcagtctacgctgacaaataaaatatctttgatacaatagctttctatgcctcctttttttttttttttttttttttttttttttgagacggtgtctccctctgtcacccgggctggagtgcagtggcacgatcttggctcactgcaacctccgcttcctgggttcaagcgattctccttctcctgcctcagcctcccaagtaactgggattacaggtgcctgccaccacgcctggctaatttttttgcatttttagtagagatggggtttcaccatgttggccaggctgttctcaaactcctgacctcaggtgatctgcccaccttggcctcccaaagtgctaaaattataggcatgagccaccatgcccagccttccatgctttcttcttcttctctttgcaacagttctgaaaggtaggtaatcttacttcaacgaattaaaatgctgtagatcagccttaataaaagctgatatttgctggacccatactacgcaccaggtactgtgctgaggactttgtgttcatttatctaatccagacagcaaccatatatggtaggtactattacctcatttttcacatgaggaagctgaagtttagtttcccccatccccaccctaagctt

SEQ ID NO: 196046 - DNA, 1000 bp, Homo Sapiens
acagtctctcagaccacagtgcaatcaaattagaactcaggattaagaaactcactcaaaaccacacaactacatggaaactgaacaacctgctcctgaatgactactgggtaaataatgaaatgaaggcagaaataaataagttatttgaaaccaatgagaacaaagacacaatgtaccagaatatctgggacatatttaaagcagtgtgtagagagaaatttatagcactgaatgcccagaagagaaagcaggaaagatccaaaatcaacaccctaacatcacaattaaaagaacaagagaagcaagagcaaaaaaattcaaaagcaagcagaagacaataaataactaagatcagagcagaactgaaggagatagagacatgaaaacccttcaaaaaagtcaatgaatccagaagctgtttttctgaaaacgtcagcaaatagatagacccctatccggactaataaagaagaaaagagagaagaaccaaatagacacaataaaaaatgataaagaggatatcatcactgatctcacagaaatacaaactaatatcagagaatactacaaacacctctacgcaaataaactagaaaatctagaagaaatggataaattcctggacacataaaccctcccaagactaaactaggaagaagtcgaatctctgaatagaccaatgacaagttctgaaattgaggcagtaattaatagcctaccaaccaaaaaaagtccaggcccagatggattcacagccgaattataccagaggtacaaagaggagctggtaccattccttctgaaacaatttcaaacaacagaaaaagagggactcctctctaactcattctgtgaggccagcatcatcctgataccaagacctggcagagacacaataaaaaaagaaaatttcagggcaatatccctgatgaacatcgatgcgaaaatcctcaataaaatactggcaaaccgaatccagcagcacatcaaaaagctt

SEQ ID NO: 196047 - DNA, 1000 bp, Homo Sapiens
tcaaagattaagaatgcagttagcaaaaattaatgttcaataaagaagcatgtgtgacttttaagttagatggtatgtcattcaatgaccagataaggactaagttcaggtgcagtttattcaactgatgtgtgtgtttgaaaaataagacgaaaacataatgctttatttgaataaactttaataaaacaatatataatgtatggacataaggaaacctaagtcctcggggattataggggaaaccaaggcatgaggttacctaacaaggaaccttagaacataatcttacctggctcagtacaagtaggagagaatggtagcaggtgaatgggcagtgagcatggacctgaggagaaatgaatttgcctaactttcttgctaaataaatgtgcttttggatgctgacatcgagagagtggtgtgtgaagtaccataaatatttgctttattgtctgcgcggtgtgactgcattctgctcatttgcaggtgggcaatgggcactccaatgaggcagccttgatcctccacagaaaagggtttgattgtcggttctctagcaaaggcacagggctgttttgttctactactcagggaaaggtaagttgaaaaggttatttttgcttactgttagtgtgctttgaaatcctctttctgcaaaggatcttgacaataagatcatgtttcattgcttctttactgtctcagtttcatcagtctgcaaattagtttgaatctccccatctgaaaaatgcactttctcaaaacttcagcctcctttccttgttgacatcaaaaggcatagctggaatttatgcacatttgaaggcaatgctcttgttatttcctaggccttctatttccagcctacaaagtgccttgctcccagtcccccagttttctcctcccctgaaccacacatgctcacatatcatctagttcagcattggtaaacctaagtcctacagaggccaaggcaagtttataataactgaagctt

SEQ ID NO: 196048 - DNA, 1000 bp, Homo Sapiens
agaggagacccttctctctctactctttcatagactgaagtttgaatatgaaataggccttaaccatcatgttgactctcctgtcagaattttaggttggaaatttggttttattctttcatgtaattgcttatttgaacagatcacttactaaagctttagaagaagtgattcaaatgtgtgttttcccttcagttttataacaaatggattgatggcagtcaaatagctcaggaataaattactgtttcaatggttcttaaactttcttggatcataggatccttttgagaatcagattaaagccaaagatactctttggagaaaaatgcatattcctaattttgcatagatgacctttggattattggactctgactattgggaccctaaatactatttaattataaatcttttttttctcctccttggttatttaaacagttgaacagtgtcaggaacagatgtttctgtaatgtcacagttgctagcatgggaaaatcagagtctggcatgggtgtaggaaggaacactcctttcagataattgaactgttttctctaggattcattgtgaaggcttttctgctcacgtttgtagtttatttttcaattaattcctaggattggagctgttgggacagtgagaatgaaattcatttacaggaagtcccaggaaggagaaagtttgaggcagttttcaaagacgtgtatgtgcctagcattagagtttaataaactcacaaagggaaatactgtagaatttagatcctcacagttcttcatacagtgaagtgaactttaggaagacgatgctttgttaccagggatggagaatctttcttgattgcaaagacataaataggcatggctaggtagaaaacctagcctagttggtaggacaccagttctaccaactgctaaaatgaactttacttacagaggtggaaaaaatatatactcccttccacttgagtaaagagtgatattgttaaactaga

SEQ ID NO: 196049 - DNA, 1000 bp, Homo Sapiens
ctcatggactcccatatgttgaacaccttgcattataagcccactctacataacttcatccacatgtatgtcctcaatcaccgtgctatctgtggcagccaaaaaatatttctagcctaaccattctagaacgccaaacagtctatctgtctgtatataaatctccagggctggttgttaacagacaactgcctggatgcccagagacatctcacatgtaacatgaccctcaaacttgtcttcctttctcctggtaacatactttgatcctggcacgacccagccacttaagcagaaacctgaaatttcatgaaatctccctttacaactcccacactaaatccatcttaccttgtaaatgcctctcaaatccaacatgtttttcctacccctcagtgttaattatttctcttcagtactataccacagcctaactagtttatctgcttttctacaatccaacctccatactagttatcaattattttaattaaaaagaagttgaccattgctacttagggcaagtagaaggggtctctagtgcctttaggataagttcaaaataaatggtctaacccacaagacttaaaaaactctgcccttacatctccagcctttcgttctaccacacatcctttgcttggcttaccacccaccaaccttaggtgctcccaaatgggccattaaaaaaaaataccccaggcctttatatatgctgttctgccaggagttgcctcccagccccatctccctaactccctacttttccttccagatacttatcaaatgtcccttttccttagcaacatttcctactgaattcctcttctctcattcaggggctcctttagggtccacctctatactcctgtatatctttgcatatcctctaaaatgacatttaccactcataaagagtaaaatatattatttgcatattctcaaaaatgacatttaccactcactcccccacgtcccgtctatctcttctactaagctt

SEQ ID NO: 196050 - DNA, 1000 bp, Homo Sapiens
atccgcctgcctcagcctcccaaagtgctgggattacaggcgtcagccaccgtgcccggccctccattttgatttttagcctggtctgtcggggcctaatgcaggagcttattccaaaacaatggcctcctataatggtttatttaacagtgttaattagaggaaatggggtttaaacccaggggagtccgactttagggttcagggctgtcactgaggctccatttttctgaggtaaaattcctcactttacccatcgatgacggtcttgtagccttagtttcttggccacaccttcaacctttcagtgcctatggttgttcctagccccaaaaggtcacatggttcttctaataccttccattaagaagccaatagctttctgaaaatgaggccagaggccatttggagaatcctaaacctactacctgggaacgggcagggtcttgtggttctgaatgtcctcagaatgaatttcctgccatccctgggattccagctcccctctctccacagctccccacaagacagggttggaattgctaatcccctgcctttggggcagactatcagacccaaaggtagttctttgtgttttttttttttccggtgacacttcaatgccctcatgcaataaaggggccttccttgattttcctgagttgcccaagggggccggcacctgcaagtcccagggagggtgagcacttcatgctctctgccagcgtttctgaagcatggggtcggaatgggattttccagtgttacattgcatgtggatagacggtgcaggtccctgagaaagcatcgcctcatctcacctgcctctgcctggaaagtttcacccctctcagctcagctccaggggcatgtcctggaggcagtgccccgcctccttccctccagaggtgtgcgctgtttgcttcccacagcaacctttgcttatctccgttatcacagttgtacataactctgtctttcccaggggctgcagaagctt

SEQ ID NO: 196051 - DNA, 1000 bp, Homo Sapiens
aacttctaggagatgggtataaaacacatcttcttcaaatgtttatatcagagaaacaaagaactagagaagaaatcttaaatgttcattcttttaaatctcgtgattggttagtccataatggctagatggattaaaatgtaatgtgatttgtactaggcgtcatgagcataaaaaataatacatagtttctgttaagggaattctctcaaacaaaaggaaagcgatttttctcaatgcttctaatatttaacaatctccatgtagtccaaatttgtcattaaaaaaaaatcaaagaaagaaggccacgtatgttggggtaatttttaaaaattttcagattggctaaatattttattaggaaacagttttcaagtcaataatttttttaacatttcatgttaataaatgagattgaaattttttatgatctctaaaccataaaagaaaacaccgacagctgtaaaatgttctaagataaaaaaactcgagctacaaagaaagaatgaactaattctttacaaatgttgactgaagatagataaaactctaattaaaaatttaaaaggttaaacactgtattagaatgggcaactaaaatattcgtggtgtcagtttaattagtgtcaaactggcaagtcagagttttacaacctactagtaatctatgccgggtcttgttgtttgtgcactgtgttttgctttgctttgttttggtttttaaacagacttacctgtaaagttatcttacggaattattctttctccatatcttttaaggaattattctttctccatatcatcttttaattcctgttattagttttggaagcttatccataagtttccaaagacaagatgatataaaagttaaaaagcattcctctttacttatatcaaattattcttgtctttcaaaaagaaccaaaaaaaaaaaattcatcatggataaaaactaagcgcttgccttcttttaaaaagaaaaactgatgattagatt

SEQ ID NO: 196052 - DNA, 1000 bp, Homo Sapiens
ggtgtggaggctcacacctgtaatcccagcactctgggaagtgaagtgggaggctcccttgagcccaggagattgaggccggccttggcaacatggtaagactcccgtctctacaaaaaattttaaaaaccggctgagtgtggtggtccatgcctgtagtcccagctactacggagactgagggaagaagactgcttgagaccagaagtttgaggctgcagtgagctatgacgccactgtactccagcccaggtgacagagaagatcctatctcaaaaaaagaagttaactcatgttctgaaaaaagatttaaaaaaaaaaaaaggcagtattgttatggctatggcagttacacaagtatataaaggctaattaaagtttcacaagttccacaccactcatcttaactgcattgtgccatctgattttgtctcttcttcctttccctgtgtatgttatgggttgaactgtgtccccccaaccaacaagatttgtatgttgaagtcatagcccccaatacctcaaatgtagcaatatttgaagataaggtctttaaagaagtgattaactgcaaatgaggcaattagagtgggttctattcccatcagactgtgcccttataagaaatttggacacatgcacagataaaaggaccatgtgaagaggcagcaagcaggcagtcatttacaagccaaagagagaggtctcagaggcaaccaaccctctgctgatgcctctaccctgaacttagaacctccaaaactgagaaaataaatgtctgttgtttaagccacccagtctgtggtatttggttatggcagccctagtaaactacaaacaactttagaaatagaccaactaaaatgtttatgtattaaatatttcctttacacatacacaacaaccaggtacatacaggagacaactaccctccccctcaaaaaaggcaaatcaacagtcctactaacaactcaggagtcaggattccacagcttattag

SEQ ID NO: 196053 - DNA, 1000 bp, Homo Sapiens
tgttctttaatgatttactgctgcttcctgggctcgaaagaacccagttcaggagtttctgttttagtttgagatcttataggcctgtctcatcaggttggtgtcagcccagctaggattaggcagaattgggtgggggctgtagtgcatttttggcacagcatgtacctgtctgactaattctctgtcttttctttcctgttgcaattcatgggtcttagcatcttctgaatggtgtttagtaggtcatcctgttgatttcctgctagggagtagcatactctggctctgtaccattggccaagggacttaaggatagatgaagggctgcagttttgttaaatggaacaatatgaagagatggcattgtaaaaaaaaaaaaaaaaaggcttggcagcagggcccatttgaatggttggtccttggctcctttgttgatataggcagatccttgatgggaatttggaatgatcccaaatattgtagatcactggtacatcaagtcatcctcaaggttgtctgtgtaacagtcttgaatgatattttgtcagtctttggagattctctgtatagggtttaatcatttagttatttcagttgagactgtttagtttctttgcaaggagataagaaatgtgaaagagatgcagacattagggaaaaaaagtcaggagccttgtttccccatcctctacttgggttctggaactagactcataggtgagtagtgaggagctgggcccaagcacattaatcctagatctagctctgctttgccctcgctccagttcttgtatcaaattcacttcaagccacccagagtagtatgtagaggagtcattcaggaccgtgctcatacttcattgtatcaaatgggagatccagtaatttatagcctattgtttctggagcctggagatggctctgcataagatttgccgaagcaaattttattacattagaagagaacctagctggctgcatcctacactggaagctt

SEQ ID NO: 196054 - DNA, 1000 bp, Homo Sapiens
cccaaactgggggccactggcatattcccaaggacccacatttttttccccatttaaagggatctgagcattactaaaatgtaaaaaacactgtggattggcttttcaacagaaagaggcaaatttttttttaagacagagagtcagggtctgttctgtcacctgggctgaagtgcagtggcaagatcatagctcatggaaaccttgaactcctgggctcaaggaatcccctcacctcagcctctcaagcagctaggactataggtacatgccaccacacccggcaaatttcttttcttttctttcctttttttttttttttttgtagagacagaggtcttgcaatgttgcccaggctggtctcaaactcctggcctcaagtaatcctcctccctgggctacccaaaatgctgggatcacaggcatgatcaacctccctggctgaggcaacattatataggatgttaccacagaaataatagacaaaccctcatgtttctacactatgagtaagactgaaatctccctttaaaaaaacaatttttaaaaagatcaaatagctaagactggaaccagctcaacagctggctactgaatgtccttatagaaacatcatcaccctaacatcatcatctgaatgaatctagaatatctaagcttttggttattatactgtctttccattaaatgaggtaggagtagaaagaaaaagaccatgcctttgtatcccctatgcctgtgattacacagagtctgaatcagactgacctgtgtttgaattttgaccctgacatttatttgctctatttatttggccttgaatgctaatgaagtctatgaatttcaggtttttcatctctaaaatgggaataataagccttagtatctaggatcagggtgagcagagagaatgcgcagattgcatttagcacagtgcctagaaaccaacaaatagagatatgatcattaattattcaccactgaacactagctgaagctt

SEQ ID NO: 196055 - DNA, 1000 bp, Homo Sapiens
cacacccacaatcgttcacactgggactacatagacacagcagtttgcctaacatgcatatcttcgggatgtgggaggaaactgaccggggtacctggagaaaacccaggaagacatggggaggacatgcaaatgccacacagacggtgatcccagcagggaaacaattttttttcctcatcaacgttataacagaaggatgttattcaggggtctgctgtatatgaataaaatatttactcatcataattgtaccagatgtgaggaataggtctcattttactattttatggagcttgggtgggctactgggtgacagactcgaaatactggttttctgatttctaatacaatatgtcatattattccccaaaagtaaataaatatatttgtacaagtgaaaaatgaaaagaaaatgtctcgtgtagatatgattcttaaagagggtatttgctatggattgcatcctaatgggggcctctttaggcagtggtttgtttgtttgtttgtttgtttgttttttggagacagagtcccactctattgcccaggctggagtgcagtggggcaattcggctcactgcagcctccgcttctgggattcaagtgattctcctgcctcagcctctccagtagctgggattacaggcgcccgccaccacgcctggctaatttttgtgtttttagtagatacagggtttcaccatgttggccaggctggtttcgaactcctgacctcaggtgatctgcccgcctcggcctcccaaagtactgggattacaggcatgagccactgcccctggccaaggccgtcttttgatggcagccaatgtcattagactacaacttcttctgtacaagttccccaaagtatcaggggctctctaagagagtattacttatttctttcaggtcctgatggttttctctttggagtggttgtaatagaggaccaaggaagttgtgagctgttttctggcttttgctgtaacaaaagctt

SEQ ID NO: 196056 - DNA, 1000 bp, Homo Sapiens
ggacaacgctgagtttctgcccaggagctctctgcgtgatacaggcacccctccctccgggcctgagcatcgcccagtgtaaagagggacagagctcttccaggtttgaggtcgggggccctggccttggagcacagggtagaatctcaggacccctggctccagggagctcatattttgggactactcccacccttgggagaaggtgctgagggtatctcatgggggctgctcagttgggaccaaatgccctcaaatggcctccctcccagagggcctgcatcacccagtaaaacttgtgttcctggggaaaccagggtgcctcctcacagacaggcccctgaagggtcccaacacagccaagcctgtggtcagtcccagccatggcgcggcccacctgcccgccctttcctgtgagggcctcggtgccaggggaggcagccccggaacaatgcctcactctgttcttggcctgggcaggggcagctaattcagccacacctcacaccggctgcagatcccacactcccctgctctcccctgctctccctggctctcccctgctctcccctgtttacccctgatcacctctcctatcccctgctcacctccactaactggcctcaggaaacccagacactccacacttagcaccctcccagctccctgacaagccacaactcaaaggtcaggagtgacagccaaatgacttaggggccctggggctgcgggttggggatggcccatcctcaaggccagccatgagcaaaaagcctacccagccaatgtagccccaccttcgctcaaccacattgaccaggcctccatcatcatctggtgaatgaggagaggggctcagagaggctgggcagcttgcctttggtcacacagcccaggagcagcagaagtggaactcaaacccaggtcttgtgcctccagagcccatggtcttaaccactgcacaaaattgcctttaggaaaccccgaagtgatcatgagt

SEQ ID NO: 196057 - DNA, 1000 bp, Homo Sapiens
agatcgtactagctgtgagaccttatttcctcatctataaaatagggattcagccaggcgtggtggcacacacttttagtcccagctgcttggaaggctgaggtgggaggatggcttgagcccaggaggcagggctgcagtgagctgtgattgtgccactgcactccagcctgggtgatagaacgagaccccgcctctttaaaaaaaaaaaaaaaaaaaaggattcatttatttcacaaatattttattgagctcctggctctgattcagacaccattctaggtgcttcggacacagcaatgaattaaacagtgtctctgctgtcattattctttttttttttttttttttttttttgagatgaagttttgctcttgttacccaggctggaaagtgctatgatgcgatctcgactcatcacaacctccgcctcctgggttccagtgattcttctgcctcagcctcctgagtagctgggattacaggcatgggccgccacacccagctaattttgtatttttagtagagatggggtttctccgtgttggtcaggctggtctcaaacccccaacctcaggtgatctgcccacctcagcctcccaaagtgctgggattacaggcatgagccaccgtgcccggccctgtcattattatattctgtgggaggataaagacaacaagcaagcagatatttgtgacatggtgataagtggtacggagggaaatgaaggggtcagtggggtggggcatgcttcagggctggggctacatattttagtgtattcacagagttgtaccgtcatcaccactgtccattttaaagcatattgattacctcaaaaagaaaccccattcttttaggcattacccaagccccataataacccctccacttctgccctaagaaactacttatttctgtctctccatggattagcctattctggatgtctcataaaatgcaatcatgtaatctgtagtcttttgtgacttgaagctt

SEQ ID NO: 196058 - DNA, 1000 bp, Homo Sapiens
caattgtaatgtgatttctgcttgacccttacataccgtgcctcattactgaaacttgtcttgctaagagtacttatatctttgtaattgccaaatttcttggacaaatttcaatctttgttatctcaactattctccagtgtttgacactgataactgtgtccctgcttttagtatttttttttgtgtctctggtttctgtgatatgcccttcccttgacttttctttctttctctgtatttgttctgtgtttactttaggagctcctcgtctttattctcttcataaattccactagtccttgaggctcacctttcctctcccccatccccttcctttcctaaccctcccttccctttcccctcctctctcctcctctcctctatttcctcttcttttcttttctcaatctatgtactttctgtgtatattatcaaaatccatggctttgactacaatgatggttgacaaaatctctatctctaccccaaacttctctgttaagccaaagaaaacgtaatcaatggaacacctccattttggcatcccgcaagaactacaaattcaacctgtcaaaaaatgaactcatcttttttcccaaacttcctttttttccatcctactttgaccaccccaaatctgagaatcatccaagacttttcctttgcctgctctcccaattttggagtctctaagtcttgtcattttaaactccattatctgatcagtcttctttgtgtcctcactgccactaacctggtcttagtttataggattcctatattacaacagctttctaaccaatctactggtttcatttgtgcttttctaaactattctgtaagtcactgtcagtttctagaaagcaaaactgctcattttcccattatacttaaaacatttcatttgttcctcatctctttcaggataaaattcaaattccttgatatggcaataacaagcacttggtggtttggctccagattccctttaaagctt

SEQ ID NO: 196059 - DNA, 1000 bp, Homo Sapiens
tatggaaagttattaatatgacttaagtcatattaataaaggtatcaccttaaaaaaaagggagatgatgaatctgttctactctggtcagaccatcctggggtcttctctttggtctgggctgaacattttcagagtgttttatgtaagtaaattagatcagtaatgagcagccctaattcccacaagattttcttagcattagcttttttttttttttttagacagggtcactctgttgcccaggctggagtgcagtggtgtgattttggctcactgcaacctcaacctcccaggctcaagtgatcctcccacctcagcttcccgagtagcttgggaccgcagacatgtgccaccatgcctggctaatttttgtatgttttgtagagaaggggtttcaccatgttgctcagcctggtctcgaatgatctgcctgcttcagcgtcccaaagttctgggattacaggcatgaggcaccgcccccagccagcattagattttgacttacgatttcaggaaaaggaaacacaaatgttgttgacagttaataaccgtactcactcagaacctggtgcaagtgcgttgagaatgccctcccactatgagtaaaggcctgcccgcattgcatgggctcagggctaggaaaggctgctttcctgtgctatgtcacagataagtgacacactcagctggatgaggggaccccaagagaaggaggaatcaagtcaccctccttggctccattcttgggaaagttttgcaacaagaatattccgtcttcactgtcgtgggagttgaaggtggagaagggaagtcagtccttcaccttgagggagaaggggccacctgctgaggctgtgggccatggtgtcagagatgcctgggttagggccccacatccatctcttcagcctttcaagcctcgctttcctcatctgtaagttggggataaagataataatccctgcgtcctgaaggccactgaattgaatgaaagctt

SEQ ID NO: 196060 - DNA, 1000 bp, Homo Sapiens
ttaaaatatttttattttttagttcttgtacaaatggagccttcactatgttgcccaggctggtctcaaacacctgggctcaagcagtcctcccacttcagcctcccaaaaccctgagatttataggcgtgaaccaccatgcttagctgacaattactaataacaagaacctcttgcttcacccagtgtgggtgaatctgaataggggccacttcaaattcttttgcacctggttgcccagagtgcctttgaaaatgacatagaacgtttttaagccactcctcccacatatggactctctcgttaccttccccagagtctcatctctggcaagagaaggctgggacatttcattaccctgtgttggaaaatatacctaggccagcacagtggctcaagcctgtaatcccagcactttgggaagctgaggcaggtggatcacctgaggccaggagttcgagaccagcctggccaacatagcgaaacccgatctctactaaaaaatataaaaattagccgggcatggtggcacatgcctatagtcccagctactcaggaggttaaggcaagagagtcgcttgaatgcaggaggtggaggttgcaatgagcaagattgtgccactgcactccagcctgggcaacagagcaagactctgtctcaaaaaaaaaaaagaaagaaaagaaaatgtatctaaaaatgaagtcctaaaggtattctactgtttctaagactgggaacctttgttcttatcaaggtgtttcgggttatgaatttttttttttaaaatggtttagcagaacctattgttgaaacaacccatcagatgtgtgtttcactgagggcagtgggaaaaacaaggtttttctttttgagacagggtctcaatctgtcacccaggctggagtgcagtggtgcaattgtagctcattgcaacttcaaactcctgggcccaagcgatcctccttcctcagcctcctgaattgctgggactacaagctt

SEQ ID NO: 196061 - DNA, 1000 bp, Homo Sapiens
cccctgtcgcgtgaaggcagccatagacaatgtataaacggatcagtgcggcttggttccaagaaaactgtatttatggatactgaaatttgaatttcatataatttttatgtgtcatgaaatattatccttttgattttttccaaccatttaaaaatataaaaaccattcttggctcccaatccatatgaaaacaggcagtgggccggatcgggcctgtgggctgtagtttgctgacccctgtcttggtgtgcggggatatggagcgtgatgtatttattttaatctgtgccttcttaggattagactcggtcctggcactaagttgccattcataaacgctgattgaatgaattactgtatactctttcaggtgtgctggatgacttggggacactgctgctttttgaggaaagagtaaaaatttttctgagcaagggatgagaatccaatctttgtggcaatggctgaggagagggcgggagcctccctcttgtgggtcttcatggatgtttgtaagagtaaagagaattttcatttttatgtaaagtgtagagatctatttttcacaaacagacctacagaacgtgatttgtaataggaaacagatttccctccccttaagataaatggaatgtccccacctcccaaactgagaagagaattgtttcctccttgcaaaggaaacaaattggattctcaaaggaataatcagaagttttaaaaattgtcataataagcaagatatggtttcatggatgatgaaaggatgtttgtcttcgttgggagtggacatgaagttttggttggagaggcagttgggcccttctccctccctaattcctgccccttggcattttatcagtgccacatgggagaagtggcttctgcctgaatggggttggtggtcccactctggtcccactgtcagactgcattctcttcctttccaaatcttcatcactctactgaagtaggtccccattcctcagccaagctt

SEQ ID NO: 196062 - DNA, 1000 bp, Homo Sapiens
gcactttgggaggccgaggtgggcagatcacgaggtcaggagttcgagaccagcctgaccaacatggtgaaaccccatctctactaaaaatacaaaaattagccaggcatggtggtgcacgcctgtaatcccagctactcgggaggctgaggcaggagaatcacttgaacctgggaggcggaggttgcagtgagccgaggcactccagcctgggcaacagagcaaaaagcccatgagtttaattgttggatcctctcctttctggctatactcaccacatgaagatttcacccagtcttagggcttcatgcctactctacactgaggccacctgcttctccagccttgagtctgaactgcagactctgatctatctgcctcagccacacctccacctgatgtctaacttccacctaagattaaacatatcatgtccaaaaccaagcccctgacattgcaacctgctcttccagtcttcctcatctcagctaacagcaattccatctttccggataatcaaatcagaaaccttggattcatcctcaatgtctttttccctcacacattccttatgcgatcctccccctgcccctctacctctgaaatataaattagccgcggcaccacgcccagctaatttttgtattttttgtagagacagggacccaccatgttgcccagcctggtctggaactcctgggctcaagagatactcccgcctcggcctcccaaagtgctggcgttacaagcatgagccaccgtgcccagcaataaccattactgaataaatcactcaatcagtttgcttgtaactctatcactttgggacgtcacgcccgtaatctcatcactttgggaggcccaggtgggaagatcgcttgaagccaggagttccagaccagcctgggaaacagagtgagacccttcatctctacaaaattacaaaaattagccttgagtctgtagtcccagctactcggcaagctgaagtgggaagctt

SEQ ID NO: 196063 - DNA, 1000 bp, Homo Sapiens
attaatatttttaaaacctcttaaaattagaaaaaaaggggcagggcgtggtggctcacgcctgtaatcccagcactttgtgggggctgaagcgggcagatcacaaagtcaggagatcaagaccatcctggctaacacggtgaaaacccgtctctactaaaaatagaaaaaaaaaaaaaattagctgggggtggtggctggcacctgtagtcctagctactcgggaggctgaggcaggagaatggcatgaacctgggaggtgaactgagatcgggccattggactccagcctgggcaacagagtgagactctgtcgcagaaaaaaaaaaaaaaaaaaggaaaagataagattacgtcttaaaagcatggtatgaagaacaagttggccaggcgcggtggctcacacctgtaatcccagcactttgggaggccgaggcgggaggatcacctgaggtcaggagttagagaccagcctggccaacatggtaaaactccatctctactaaaaatacaaaaattagctgggcatggtggtaggcacctgtaatcccagctacttgggaggctgaggcaggagaattgcttaaacccagtaggcggaggtttcagtgagccaagatcttgccattgcaccccagcctgggtgacagagggagactgtgtctcaaaaaatttaaaaaaaaatttaaaaaaaaaagttatttttgccctctctctgagttcaactggattgaaaaaatacaggtctaataagttgtcctcttttgaaagctgtaatgaagtgtagcttcattagcaatggttagagaaatgctgctagacaagacaacagtttattccaagtgtcagactgaaagatgtaacagacatctactgttcttttctggtaatagacccaggttttccttctgggagttttccttctcccatttgcagtccatgtgattcacatggcctgattgctctcctaggtccagagggggtcatgaggatcaagctt

SEQ ID NO: 196064 - DNA, 1000 bp, Homo Sapiens
cttctaactcctttttgccacatcactagccagattaatcttcttgaaacaactttgatcaaatctcccaccttctccaaagcctttagggaacaaaaatatttctgctgcaaaaaggaatcccagagcttccctatcaaggccctccattgtccatccctaccattccctgaaatctgttaagccaactgggatctctttccccagattttgagaagttgttctcactacgctcggtgaactgtgcttattattttaaaactgctctcacttcacttatgttattctgataacttagaagtatctgttctcctctcccttcctcttattccactacctggttcaaatctcatcttctccacaaagtctttttgattaatatagagaggaaaaaaaaaagtcttcgaaatatacttgccttaatgcaaattattaactaggcagttcccaacatatctatgctctttaaatggggaatcattaattggcaacagccgccaaggaaccaggtaacaatctttccttcctgctacaactacttaggaatgccctctttgacttctccgtctcttcaccctcccttccctgaacgcttccttctccccttctagcctttcctagactgtgctgctcaggatcaatctctcatcacaaacatctgaaatctaatcttaatgcttggcctaatctgagtctctgaggtagcagttgtggtgactcttgattcattcattcacattcatttaaatgtttcctgagcacctggctctaaccttggctccaagttaggataaccagcgaacataaaaaagaagattgacggccaggccccatacttagagattttgatttaattgtcttggaacagggcgagccttcagtatttctgaaaaagatacccagttgatctcaacctggactggtaaccactgctctggtgcagcataattgatttttaaaaatccagttactgaaagtacaaaaataatttgtaaagctt

SEQ ID NO: 196065 - DNA, 1000 bp, Homo Sapiens
gatgtgatcttggctcattgcaagctccaccattctcctgcctcagcctccccagtagctgggaccacaggtgcctgccaccaaacccggctaattttttgtattttttttagtacagacggggtttcaccatcttagtcaggatggcctcgatctcctgtcttcgtgatccacccgccttggcctcccaaagtgctgggactacaggcgtgagccaccgcgcccggctggatagatttttttttttagccactgccacaacatggcacagggaccctgactggtgtaattcagttattccataaacattatttattcattcaaacagcttttaattagacgatcattatgtgccagttacagtgcttgctgctagggctacaaagccaaatgaggcatggtcgttgctctcaagcagctatcttgtcagggaagacaggtcaatagaccaatagctgaagtccagtttggctcaaataaatacaatgcacagggtattataggaatatgcagtttggtataaattagagtagtgggaaggggtcttcagcagggcttccttaaagaagtgacacccaagcttagttttcaaggaccagacgcagttagctgtattaattccactattagcagtagtaatagtggaaaggaagacagcttcttaggagagaaaacctgagatagagagcacggagaaatgatatacaatagtttgtttagggaactagaagaaattcagcatggctataacaaagcatgatgccatttgatgtagcagcgaggagactctcactgaatttgagagagctgaccggttcattcatctactcctcactctcacaacctgagccccaatgaataattctttctttgcacacaagacaaaactagagatagtagaaaagaaatttttagtatgaacgacagttatggcaaatgcagtcttacaaattggcatgagcttctattactagttttctaggaaaaataattgaagctt

SEQ ID NO: 196066 - DNA, 1000 bp, Homo Sapiens
cctcccgcctcagcctcctgaatagctgtaatctttgaggtgattttggaagactacagcatcttttaaggaggacacctgagcatgttgtacagtaagaaaaacttggtaacttcactgaaacatggcagctttgaaaaatctaaataagtttcattgtcctgtttgttaaaatagcacattaaaaaatattgtgaagagctggcaggatgcttctgacagccgagtgggaggctcctggctacagaccatggtgctgagctgatagttctctaagctcatctgtttagtttgaaaaaaggggaaaagaactgaattgaagaggggaaaaccactcataaagagaaatctgtttgacacgtaggaaaacatttgacttcttttttcttctatacctggctgctggtatgaggcaaatgagaagagagggagagaaatcctatttttaaattaaagaaaaaaaaaaagaggagaccctttggttccatggctccttccacctcctcaatctccaagcaagtcataaagcttcagatggaaatgcacagaaatgggatgttcctcccatgctcaatttcagagtctagctgtaacattttacaactaatacttttctttttccagttacatgtctttacactcaaaatcttttgtatatatcattacatacaaaacaaacaagcaaaaactgccatatttcatctaggtaattaatatattaaaatgcttaccagccacttgttttaacatctggtcacttcttgccgagctgtcatcataatgttcgaaaagggaaaacgcagcaggcattttctctaaagaagcagtgctctccattgcagaaagcaacctatcggggaatagagctctacataagttaaaaaattattaacatacagaatgaaagtgaaaaaaattgttcaaaatgaagctggtgttggtagtggtggtttgcataaggcagggcctctcactctatccaaaaaaggatttaaagctt

SEQ ID NO: 196067 - DNA, 1000 bp, Homo Sapiens
ctgggcaacagagtgagaccctgtctcaaaaaaagaagtaggaaaaaaaggtattctcccagattttcatcagaatcgatcaagaaaaaaaaaaagtgaattcttccctgaatgtaaatctctttttgaaggattcaaaatatactaccagattacctggtaaaatcataacacaggttttatctttttccttttaccataactgaaagtaacaccacagattttcaagaagaaaaagaggttctcattccatactttttcaagattataataacaagatttaaaagaaaagatagaaagaaacatttatatctagagccaggtcaaaaaaaaaaaatgatttgtttcacagagctttaaaacataagcaactagatcatccatcctatggcccaagatccctcttactacatcaccgccaaacttccctccacctcccccaaaacacacagtcctaagaacagagtggggatgcacactttagggaatctttctgtgaatgtgcattccaaagccaaatacaaattattcctgaattatgcttcttactattgacgtccctcattcctataattatcacagaaaatagaaggcaaactattctgtttttataatgaagaagaaagtgaaattccatttattagattgaaagccaatactcaaacataaaggagagaacctggttctgacggtaaagttggacaaaaacaaaaggcaacattgtctggagtagaactaaccacttgaacatgtgttacatactggaagtcttaaagaaaaaacaaacttcactcataatcctagagggaagcagtgtgggtaaagaaaaggatgtgaatttaaaaaaaaaaatctctgtaattattagattctacggattggtttttcaaatacttatcaagtaattcagttaagcaaacatgtattgatgacatcattaagaagtattagagtcagatacaataggaatataaacataccccttgacttcataaagctt

SEQ ID NO: 196068 - DNA, 1000 bp, Homo Sapiens
ataaattaagccctgatttgtagcatttgccaattcctgtggtttaaataaatactcttttatggctaagttcaggctctaacatgatgtcactaaatgtgaagttaggaagacacacccggtagccagccattatatattattttaccatataaatatgataggcataaataacctcaagagcatagataacagtaaaatgtagtaagctaattagaaagtactgagttttaagtatttactacctttgtatgtacttataattaaataagttaatatgaggatgcagtggctcacgcctgtaatcccagcactctgggacgccgaggtgggcgaatcacttgaggtcaggagttcaagatcagcctggccaacatggcaaaaccccatctctactaaaaatacaaaaaaattagctgggtgtggtgacgcatgcctgtcatcccagttactcgggaggctgaggcacaagaatctcttgaacctgggaggtggaggttgcagtgagccgaggtcaagccactgtattccagcctgggcaacagagtgagactccatcgcaaaaaaaaaacataaataaataaatacaaagagacagggtctcccctgtgttgcccaggctaaactcaaactcctgcgctcaagcaatcctctactcctgcctgtgtgtttcacagagttgagactataggcacataccaccctgcccagctacttcaatttttactaatgtttatatttaacaactagtttacaaaatttccaatcagttctaacgggctggtgcaagctggctccaccacaccactgaaaacccacacttttgctttctgaaattttacataatgaaatttcacataaaatcatacattcatttttttgtctcaaacattctacaaagttatctaatttagcaaaagtcaattaattaaaaaaaaaagtgtgcccaaagaaaacccgaatcaataatctatttgtttacatttttagttcaaagctt

SEQ ID NO: 196069 - DNA, 1000 bp, Homo Sapiens
taaaataaagatattctcaacacggatctggaaccgcgctccagttccagaactctagtaaaaagaaaaaggtggccggacgcggtgcctcacgcctgtaatcccagcactttttgggaggccaaggcaggcggatcacgaggtcaggagatcgagaccatcctggctaacacagtgaaaccctgtctctactaaaaatacaaaaaattagctgggcatggtggcatgcacctgtagtcccagctacttgggaggctgagacaggagaatcgcttgaacccgggaggcggagattgcagtgagccgagatcgcgccactgcactccagcctgggtgacagagcaagactgtctcaaaaaaaaaaaaaaaaaaggaaaaagaaaaaggtgcataagtaaaggtaacaatcatgggacactacttggttcagtggagagcattagttatatagtttagcaacttaaatattaatttaaccaaaaattgtgatatgaatctattggaatgctggtgggatgtgataggagacttaaatcctcatcttccaaagtaagaagtcaatagataattaatggaactgtgaaattgataaattagaatatcaacatattcgggaaaatgaatgtcagtaccagaacaccctgctaaaagagtggaaaataattgcatctcaggagcaggatttggagtagctgggcaagggaatgctgttttcattgtaggtttttagtactatttgacttttaactatgtgtatatattactctcattttaaaaatcatttaaacatttattttctatttcaaaacttgatatatatccaaatttggtatgcgccattttccttaaactttactatgagatcctgaagaactgtgtcatgtatttctttatgttattccttgttcccattcattcacttaacatttactaagtatgtcaatgtgtttttgtgtgctaagtttggggatataacagtggaatgtgcaggatgaagctt

SEQ ID NO: 196070 - DNA, 1000 bp, Homo Sapiens
tgaacttaagttatttcatcaggctaagctctaacagttttggtcagttttttcttaagacatgtggatctttgaatcacatccaggacaacgcacccatcaagaaaagcctttaacaagtttgagtcaggaattaaaaaagaggaaggaagggagaaagggagggaaaaagggagggagaacgggagggaaggaaagaaaggagagagggagggagggaggagagaggcagggagggaggaaggagggcggggagggactgcaggagagcaggcaggcaggcaggctttatgcatctccaactagatccccattttccccagaaacgtttttttttttccagccttcagcacactgaagggcttgagggctttatagactgttctcccaaatagcctccttgatagtcaataacatccactcagtcagtctggaacctcccacgtgttacctgccaggtcaaggaccctggctcttagataacaaaggaggaagaagtcaatttcaagagagaaaaataggacttatgaacggcttcagaaatagtatgcctggtgggatgttaaacgacagaattagagatagcaaggtataatatttctaaacatcttcaggaaggaatatttagtgtttgaacagaaaatgatgaaaggcaggcaaatgcaaagaattctcaaaaatggtaacaggaagggtaggatcctttggtaaaattggtgggagtgtggtgagagaaaggaatggccagaaaatgcttccggttttcaagcagctggaggcattctgttggcattggatagatgaaaaattaagatgatggaaaatgagagagacagatgtcatcatttatgctgctgtgagttacaggaataataccaaacaagtcatgtacagcaaaacagtaaaaacaggttaatttatatgccatgaaatcaaacgcatgatcattttaacttgtggttagatggttagatgtttacatttaaatttattaaagctt

SEQ ID NO: 196071 - DNA, 1000 bp, Homo Sapiens
tcccctgctgcagctgcatggctgctctcactcactcggttgctgctgctcatctgctttctatctgcctcagcctgttttttctgctttaacaaaatccccaagactgggtaatttataaacaacagagatctattttctcacagttctagaggctgggaagtccaacaccgaagcactggctgtggagggccaagtctctgcttccaggatggtgccttgttgctgcatccccctggagggaggaacgctctgtcctcacatggcagaggagcaaaacagcaaaaaggcctgagctagtgccctccagcccttctaaaaggcatggactcaccccaagggcagagccctaatgccctgatcacttcacaaaaggccccaccccccagcaccaccacaatgaaattaagcttcaacataggaattctggaggagacacattcaaaccattgcatcatctctccaactttttgtcaaaatccctttttgtgttgtctcccttcccattctctctgctttgtggacttgagccttttttattctcttactgtcagctgtgggatttgacatgaaaacagagaggtacttgcatggcgactcttccccttgtacccagaagaacacgactgctggatagctctgtgccagtcccttcctgtcctttggacccaggttgctcatgtgaggaagaggaaagtgttggggagatggcttctcaagtatggctggctctggtggtgtttctgggctcttctaaggtctccggaaaccttcatagactctgcagaatgaagcaccacagcttggtccagggcatctgcagattgagacggccctctcttcctcccagtcccagctgactccaccaggatccagcacccagcaatgaccacgcaaggagcccactggccccctccccagatgctggggcattccttctctcacactccggccaccagggtaggagtctcccagctaggaccctagactcctaaagctt

SEQ ID NO: 196072 - DNA, 1000 bp, Homo Sapiens
ggaagatgagatgagctatagacacacaggactcagaacagagcagggaagaggggaagagattcatggcttttaattgttagcaagaccttaaatcctatgggtctgcctagaaaccatctgggctctgggcaaagcctgggagagggggtagacagctgttctagttcctagatatgagagctagagctagggtgacggtaggagggaggaagaaaatgaacatttctcgatgcctgttgggtgtcagcctcctaggtgtttgccctgtgtttattcccttcccttggtgagaaccctcaaaggatggggcaaaggatgtgttttgactctacggccaaggaggaagccggataaggcagctgagacaccttgcccagtctcagttagcacatcatgagtcagggttcaataccaggtgtgtctaaaaagcccattcttccctcattaccattcacctctccctattggctgaaactgtcagttctgaaacagaagggggactgttattccagacctattcactgtctccttgtttggacatattttaagagccgccctaagcgattatgtgacaacttataaaaactaaatacaagttcctcatcgcaaacgttccaaactgccctggcagctttcaggtcaacttattaacctgctgagggtggttctgccagcaatctgtccctctgttgacctggggacttgattgcacatgtctgtcatttatggccacaacaaagttagaaagactcgtggctggctctatgacatttgtcatttaacattaacttgagttttcattaaaaagtgttcctttcaccagaaaaaaaatgaagaccgctctccttcatattaaaagccatctcgaaccttcttatgttttctgggacttagacatcttcaaaaacaatgaatactgccattttcatgaatagcagttccccaggcttgggtagacaaaagcctccagtaactgaggctgtagaaatggaagctt

SEQ ID NO: 196073 - DNA, 1000 bp, Homo Sapiens
aggtgtgcaccaccatacctggctaatttttgtatttttagtagagacggggtttcgccatgttgatcaagctgatcttgaaatcctgacctcacacaatctgcccacctcagcctcccgaagtgctaggattacaggcatgagccaccgcattcggccaaccattctgagttcacttttttcatctgtaaaataaaaataaatagtaactactttataggaaacaaccaacactggattatgtggagggaagggagccaggagaataaatgcccagccctcactctccactttctgtatctcacctcacaatggacaaatccaaccccagtctggaaggcaggagaccatggatacagttcccagggagtctccagagcagagagcaggatgcagaatggtgaagagtggattctgagacataaatggaaaatgctagaatagacatgaaaaaaaaaaggaataaggccataagacaaagagcccagaaagatctcatttctataataaagttggagaaaaatatagaggagataacacataggtggaacattgaagaacagagccaaccatgcaaagacacaggcagagaaaattctaagctgaaagaagagtattggcaatggccctatggcaagaagtagctcattgtattatgtgatttgaaggaagactcatgtgacttcacaagtcaaagtaagaaatgtagacttaattgggtatgcaatgtgttttaagcagaggagtgccatttagaatgacccttctggaagctgtgtaaagaatgacttgaaccagaaaaatggggagaaaataaagaaaataaaaagaagaaaagaacaatttttaaaaatccaaacatgtaatcaaatagatatcacaaggcaaaaccaaatgattaaacaccaaatgaatcacatagaccacaaagctcgtaagtgttcagagacagaacagtgcctttcaacttgagttggtaataaaggttttatggaagctt

SEQ ID NO: 196074 - DNA, 1000 bp, Homo Sapiens
cacagatggtgttaatacaagttcttttctctctccacccatatccttggtgtgaaacatcaaatagcccttttataattacaaagcacagcagtaattaatattgatctcagaactcagtaaaggtcaacattaatttatagaaaattttggattcaatctagtttttactctggaattgatgcagtgggcagtgtttcaccagccccaacaccatcaccatgatgacgacaggcacaaacttggaaaaattgtctgaaaaagtttttttttctaaagatatagcacacttctgtatggatcttgaatccctagtgaaatggtgccttcattatgaaaagaaacatcttttcattgggtttctaagctgaaggagtttggtttttcttttccactttaacaaatattaattagggtctacagtatgctacactctgccctaagtgacagataaagcagtggacaaacagaccaaatgattgtcaactcaattaaaaatactgtttagtcatctgtcatctttgagactaatggttcacaaacctgactgcacatcagaattactaggggagctttttaaaaaatattatgcctcgtcacataaaaacctatacacaaatattcatggtagaattactcataatagctagaaatagaaacaatccaaatgtgcatcaactaatgaatggataaattaaaatgtaaggtatacataaaatggaatactttttaccagttaaagagaatgaagttctgacacacagatgaatcttgcatctaagtgaaagaaaccagacacaaaagaccacatattctatggttccattcatatgaaatgtccaaaataggcaaatctatagagacagaatgaagattaggggttgtctagggctgacgatcttggggaggaatgcagactggcagttaataggtacagcatttctttttagggtgattaagaatgttccaaaattgattgtagtgacagttgtacaagctt

SEQ ID NO: 196075 - DNA, 1000 bp, Homo Sapiens
ttaagatatatttatgcactaaaaatataaaatcatgaatcattgttaatttgagagaagcaggaagaacaatagatccagagatagtacccaggatattttaattatatgtataatttctcaaaaacatctttatatccatatatgcttatctatatataattgtatctatatttctcaaaaatatgtataataaacatttatagcaaaatgctatagtttgacaaagatgtcctactggtgcgggttatattgttttctataatttatctatcttatgcttgaaatagattgtagtaaaaaaattaagaatgtttaagagacatggaaaatagaattttaggtccatcacatagtaataagagctccagaaggaaatattagggaaaatggaagctgagtgatatggtttggctgtgtccccacccaaatttcatcttgaattgtagctcccataattcccccatgtcatgggagggacctggtaggatgtcattgaatcatgggtgtgggtctttcccatgctgttctataaaagggagttcccctgcacatgttctctttcctgccgccatgtaagattgtgaagcctccccaaccatgtggaactgtgagtcaatcaaacctctttcctttataaattacccagtctcaggtatgtctttattagcagcatgagaacagactaatatacttagtatattccaagagataatggctgaatattttccaaaattcacaaaagacataaatcaaatttaaataacacatccccctacacacaccctctcataaatacagatttttctcaaagatcagttatgctcaatctgggatctttttggctacaatttgtgccaaaagtataaaggtatctgagctgggatggaacaaatttattataaaattagaatatcacaattaactattcttacctagatggcccggactgtcgcctgagaaagttaaatatttactctggccaacttagggcaagctt

SEQ ID NO: 196076 - DNA, 1000 bp, Homo Sapiens
ccaatctcagcattgttgatattttgggttagataattctttatttaaggggggctgtacagtgcattgtaggatgtttggcaacatccctgtcctctaccaacaagatgccagtagcaccctctcactcaccttgtgacaaccaaaaatgtctccagacattgccaattgtcccatgggggaaaattcaccccagttgagaaccactgggatatagcaatgataccaaaagccatgtcatgaagtacctcactgttgataagtttctttccagccatgatctccttgggcccacacagcagccctgccaggtaaggcaggccccactggagctgtccattgcccggggctctcagcacctaggagctcagcctcagccttcaactctgaaatcgagaggctatggcctcacattgttgaatcaatcacaaaataaactacctcttacccctcctcagtcctctggcaatgccagcacaggaatcaaaatatcaggagacaagatgttgacaatgctttaggaggccaagtttgtatattcctgacctgcactgaatcatgagaacagactattagcatcatttacctcctcatatacaggaggctaaggcccagagaaaagaaataatgtccttcatgttgaacacgtatcagtggtgccacctgctctgggccctagatcccctgaccttgaaacagagctcaaggaatgttaaccgtagccaattgcagtgccagcctctctgcatcccaattccaaattcctgggagccagtcacagtcagactctcaggctggcaacactgtaaaacgtcgggggcaccattcacacagaacatggaaatgcctatgtgatgcccagttccagagaataagaaggacttcagggccacctatgggtaaacagcaaatctcagagaagttggcaatgaagtgggtgggcatctcgaaagggtccactcaagtgattacaggcaagtcactaaactacttgaagctt

SEQ ID NO: 196077 - DNA, 1000 bp, Homo Sapiens
aaactgatctcagtctgtctgttaagcctttgtgagtctttgtgccattgttggagtagtgctaattatcaagcaaagacatgataattacgcagagcttttttgctaaaagaaggaatctttttcaacacccacgcactgcacaatttcctatgaccctgtagcactactctggtatggcccagaaatttgtatttctgtgtaaaggctggaaattatattatttctatctctcccgataccttttcttcttgtgagtaaactgtttttagagggttaaggaagaggggtaatggtccaaatgggaaatataaaactaatgacccttcatgaaacatattatgctcctcattaaacttattcagttaaatgtattccattaaattaaaataaataggatttaaaattttacccaggagcagtaaacaatcttaacttttgactttatggtagatccattctaagaacgaattcaaatccctgatgtatcataggtctttgcctccagcacaatttatgtactagtgctgcagaggttttcaaatttagtgtgtctaagaattacttgggaacttttttttttttttttgagacggagtctcaccctgtcgcctgcgccagagtgcagtggcgcgatctcggcttgctgcaagctctccctcccgtgttcaggccattctcctgcctctcgagtaactgggactacaggccccctccaccacgctcggctaattttttggatttttagtagagacggggtttcaccatgttagccccgatgatcttgatctcctgacctcatgatgcgcctgccttggcctcccaaagtactgggattacaggtgtgagtcaccgtgcctggcctacttggggaactttttataaatgcaacttccaatccagattccctcttcaccaagtgtctcaagtatcctaatttcagtgatgcagcactttgaaaaatattccatgtgaagatgatgtaaattttatcaagctt

SEQ ID NO: 196078 - DNA, 1000 bp, Homo Sapiens
tcagtccatccttcctgatgggggttggcattgcacggtgcgatgggtttgtgaatgcaaaataacatgtgctccatgtgccctttggtcatgatttctttctttctttctttctttctttctttctttctttctttctttctttctttctttctttttctttccttccttccttccttctttctttccttccttccttccgcctttctttctctttctttctctctctctttctttctctctttctttctctttctttttctttccctccctccctccttctctcctttccttccttccctccctcctctctctctttctctgtttctctttctctatttctccttccttccttccttccttccttccttccttccttccttccttccttcgtcttgtcttgtctttttcttttcttttcttttctttcttttttttttttgagacagagtttcactcttgttgcccaggctggagtgcagtggcgcgatctcagctcaccacaacctccgcgtcctggtttcaagcgattctcctgtctcagcctcccgagtatctgggattacaggcacgtgccaccaggcccagctaattttgtatttttagtaaagacagggtttctccatgttggtcaggctggtcgtgaactcccaacctcaggtgattctcccgcttcggcctcccaaagtgctgggattacgggtgtgagccaccgcacccggccttttttcttcccttcctttcccttccctcccctcccctcccctcccctcccctcccctcccttcccttcccctctcctctcctcccttcctcttctcttcccttcccttcaccatgttggccaggctggtctcgaactcctggcctcaggtgatccgtccgcctaggcctcccaaagtgctggaattacaggcgtgagccactgcgcccagcataaaaaaaggacttctattgatatataaaaatacagacagaagagttcaccaataataagctt

SEQ ID NO: 196079 - DNA, 1000 bp, Homo Sapiens
aatcgctttctacaggcacagctgaaggatgggtgccatgcatcaggatctgtcataggcattaaatcagagatctcaatgtcactgtgtccccagtaggatgaatacattgatcaggaaaccaaggaatggaagcaggagtgtccccacttaccactactcctaatgacccattgagagacttggtatttcctgtccccacaactctaggctctgcagggttggaggtcatggttctcagaaagggtgcactcttgccagaggacacagcaagggtcccactgaactacaagctatggctgctgccagggaactttggactgtgtgtctaggagccaataggcaaggagttgccatcttggcagaggtaattgatcctgatcagcaaaagcatacagggctgcccgtacacaatggaagtatgagggcatgcatgtggaacccaggtgacatgtagataggtacagcaaccccagttgagaaggctgagactcagcctcctcaagaatgagggtttaagtcacatcaccaggtaagccataaagacctgcaggggtgataacagggtgaggggaattttaaatggctagcaagagggaggggatcagcatcacctgcagcactgagaagctgcatctactgaagctacagaagctgtagtcagttttcatctccttctaatttccccaccaggaagagaaactcatgaaaactccagaggagctgcttcctgagtttatatggagaagcgggtctgtgaggactagagatggactgtggaagccataggaatgcagcactcaggtcttgcttcaagaaagaacctgctggaaggattgcagttagcagacggcctccagattcggtatctttgagatcgaccgcagtgttcatgctagggcagcattctccctaagctgttcccagccaatgatagtttggcagaagtactagagccaagccatttctggccagcatggacaactttgtgggcaagctt

SEQ ID NO: 196080 - DNA, 1000 bp, Homo Sapiens
atgcctggctaatttttgtatttttagtagagatgggatttcactatgttggccaggctagtcttgaactcccgaccttgtgatctgcccacctcagcctcccaaagtgctgggattacaggtgtgagccaccacgcccggcctaacgctggcctaagtttcttgccaaatatacgtgtttagacaaaggagagcagatggaagcatcatgtttagctaattaaataaagcaactgagagacaggcacactctatgtacagctgatacctgaataacaggttttaactgcatgggtccacttacacatgaatttttttccaataaatgcagcctacccttcacgtccataggttctacaactgcaattaaatacagtattctgtatttgggaggcctcggcctctgaaagtgctggaattacaggtgtgagccacagcacccggcctactaagaagttttaatttcctcacctgtaaaataaagataattcctgcccttgctgctgaatgagattatgtagttcaaagaggatgatatgtatgactgtatcttattagttattgtattaattattttctattgccttcagtagtgaaggaaatttttttccctagtagtaagggaaaattttacaattacctctaaaagaaaaacctttaaaaatacagtattcacaggatgtaaaaccttcgtatgtggagggctgacttttcctataagtgcaggttctgaagaagcaactgcaggacttgattatgtgcagatttcagtatccacaaaggtcctgaaaccaatatcctgtgacagcaagggatgactctatctatacattgggtaatcccttctattaacactaccttagatggaatacacattttccttttcacaattatagtgagatttaagaggtctcaaatgttacctgaaaggaactaaaagtaacaaactattcatgcaacatgcttacttatcaccaacataacatacctgacaaagctt

SEQ ID NO: 196081 - DNA, 1000 bp, Homo Sapiens
tttggggatgctggagggatggcaaaaaagtaaaataaatctcaattactcaagcaacaacccctccatcccttgagtgagcctcagtcttcaccctctgtgcttctaggcacttggctctggggctcagcagtttatttgcgtgctaatgaagccacaggcacactttgtattccattaatgtcctgcagacccatgtgcttttatggaattctaagcacaacttccattgcttgattgcttttatacatcaaccaaatatgaagaatcagcaagtttaaataaaacagcaccttttacaataatggtcctcctcatgaaccagtgaagattctgctgcttatttgttcagtgggggctcccttttaaaaagcaccccacccacttcccttttcattttatcccactctttgtgtggctcaaaaacagtattcatccacagctgctgaaataggggtcaactagtgtcatcctttttccattcagggacaaatgttggttcctacaagtctggaagttttctacagttgggtggatggtgtatgaacttggacatggatttgaactctgaggagtctcgctggctttttcgaaggcactggtaacagtcaagggctctgtgggccactgatgggtaaagagtagtcagggccgggcacagtggctcatgcccgtaatcccagcactttgtgaggttgaggcgggccgatcagttgagcctaggaatttgagatcagcctgggcaacatggtgaaatcctgtctctactaaaaatacaaaaattagccaggcgtggtggtgtgcacctgtagtccaagctacttgggaggcttaggtgggaggactgcttgagcctggggaggttgagtctgcacagagctgtgattgtgccactatactccggcctggatgacagagtgagaccctgtctcaaaaaagtaccagagaagactcagagaatagcgggaagatacatgatggaggtgactgaaggaagctt

SEQ ID NO: 196082 - DNA, 1000 bp, Homo Sapiens
cagcttagctaagtgatctactcaggctgtattcaaggtattggctagacactttctcatctggaggttcaagtggggaaaaaatcctcttccaagctccttcagactgtgggcagaattcatatgcttgcagtgtataactgagagccccagctttttgctggctgtcagatggaagccaccctcagtttctagaggttgcctagagtttctagaagctacctatagtttgccatgtgggcttctccaaaatggccgcttatttcttcaagccctcaagaaaaatctctagctctgattttctaagactgagtattatataaggtagcataaccttctcttatacctaagtcccaagctttgtatcctgctccaacacaccaattctcccaggtcttggaatccttgatagctgcttccagacctctttatattataaagaacatagaattaaacaaaagtagtcctagaatcccatttagctcctatgtagttgtacagcattgagcaagacacttaatctgtctaagctcattttaataattataaaatagaaggattagacttggaaatttctaagggtattcttatataatatgcagttttataattgcctgtcgtatttgatgacaagggctctagtatacgtaactttatgatccctgaacctagcacactgcctgacacctaggacagttaatacatactgtagatgaataaatgagttctttctatctctaaacatttctagtcaataaaccccatccgtgcacaggatcccaagaattttatgaagaaaaaaaacagcagagaaaacagaacagcaaaagaaacctaaagcatttacccagaaatattagcctagtccctcaatcacaaatataaactgacaatcaagcaccactagatacatcaggaaagctaacaatatgaaaaacaccctcttccaaaaaataaaaaataaaaaaaagaaaaaacctctgggggaagcagatcatat

SEQ ID NO: 196083 - DNA, 1000 bp, Homo Sapiens
attaattgaatgaatgtaaggccaggttgggcagctctcattttctgattggcggtccatctgattttacagactatgaacaaaaaacagagactaaacaacatcattccaataactatatatgagatgttaatatagtgctttagattggtccaaatattgaggctctctaggccttgcaggaattcactccagacttctaaggaaggctgaaactcttgagtttgcttatttaagtcaagaattttgttttgcagttcaccaatatcaaaggtcccgtggatgctcactttggttgtattctaagttgtttacacaaatatgagtggcattaagatgacagcacaattgctgttgcaattgtaagctttgtgcttgttcccctaaccatagaactatggatttcaacattgccacttcagtttgtaactcagtgttaattctattatgaagtagccacacttggttggctgtatgcatccagttctgcacgtactgaactgtttgaatagaactatgcaaagtgatggagtacatcacaacagaagtttttggtgtgaccaaggaaacaatagccaaaattatcatgcctaaggctctacgggcacgatgagtaagctgagttagaagaagtttcacaaagtgcaaagcaggggtggcagcccaaggcttggacagattaatgggaatccatagcccagggatgcaacccaaaatcatcaaagtagagatattatgtgtttgtggccaggcacagtggctcacgcctgtaatcccagcactttgggaggccaaggcaggtggattacaaggtcaggagttcgagaccagcctggccaacatggtgaaaccccgtctctactaaaaatacaaaaattagccaggcatggtggcgggcacctgtaatcccagctactcaggaggctgaggcaggagaattgcttgaacccaggaggcagaggttgcagtgagccgagatcgtgccaccgcactcaagctt

SEQ ID NO: 196084 - DNA, 1000 bp, Homo Sapiens
aggtggggaatttccttgaggtgggggttttccacgctttccagatgagggctgtacgctcattgactagaggcaccgtgtctaagtgtctgaggcttaattcccattctctagaagagcagctgactatgtgtatgtcagtgggaaaggggagagcccagaaaatcattgcagtttatcacagccacccccaccccctccatcactgcagaaactgagcctccactatcttggagtttccttgaagagttcccagtcttggtgaaatatgggatggacggccaggcacagtggctcacgcctgtgatcccagcactttgggaggccaaggtgggtggatcactttaggtcaggagtccgagaccagcctgaccaacatggtgaaaccccatctctactaaaaatacaaaaattagccaggcgtggtggcgcatgcctgtaatcccagctactcgggagactgacgtaggagaatctcttgaacccaggaggtggagcttgcagtgagctgagattgcgccactgcattccatcctgggcaacagagcgagactctgtctcaaaaataataataataataataataataataagaaatatgggatggaatttccattggatgttaaagatccttccaaaataggtattttccacagaaaatgttatatttggtctgacaactccttgcaaaaatgaactcaaatggtcaggaatatttgttgctctaggttttcagaagcagaatgggcatcctttcttagaatacattctgggcccctcagggtgttcagggtgggaataaagtatataaaatgagaagtcaaaacagggaagaggtactaggggggaagctgggcagaggaaaggaacccttgggaggcccaaactttaatgctctggttcataaaatgcaaaaaaaaaaaaaaatccattctcatccctcctgtcctgttattgtcaagatgctagctccttggacaattcaggatacaccaagctt

SEQ ID NO: 196085 - DNA, 1000 bp, Homo Sapiens
tccagatgtttcaaggtggcttccaatgtgatgttgttctttgttgctattgctgtttgcaggctatgtttaaaaattaggatcttaataaggaagggaaaatgaacccaaaatgagatcacagactctgctgaacccaaccttctcagcaaggctataatcagacaagcagatgaacagactgagagacctgcctgctgctgtctccgggagggaggactggggttttagcaccgggttgtctcttcccccacccccaggcttcctggggtgctggtcagtccttcttagatctgtgctcacctcaggctccagagatggctcctgtacaggctaggaataagccagcctggaccagagctcacggtcacacccacctggcctccgcctctaccctgggaatccccccaatcttccctcctagttaggaccccagagaatctggagactaaagggagtgacgaaacatgggactgttagtcccctcacctgtcccctcacccaaattgcccttgcccagtccctggcaccacgctcagtgggcactcaggactcctagtgggcaggaaggcaggggttgcctttctaccttctgccaacagcctgggtgtgccattctgaaccaaaccaaccctgccggccctgggagccagcactggggtgagaacgagacaagactaagacctcctgaccaggaattttaacatttttgcagcctgtgggggagccagcagccccctaaattgctcaaaactgcatttgagccttttccatcaaattctcaaatgctatatggatttgggtgcaagtagcaaaggctgcaacagaatagcttcatgatagaacacctgattcacagaatgcgcctggaggtgaatcagtggattggaatactattcaaggaccagctctccccagctttcctctaccatcctcagcacgttggcctgttctcatgccagcacttctctggtctcaaaatgaacagagctcaaagctt

SEQ ID NO: 196086 - DNA, 1000 bp, Homo Sapiens
gtaattactgggccacgcctgtaatcccagcattttgggaggccgaggctgggggatcatgaggtcaagagattgagaccatcctggccgacatggtgaaaccccatctctactaaaaatacacaaattagctgggcacggtggtgtgcacctttagtctcagctactcgggtggctaagacaggctgagacaggagaattgcttgaacccaggaggcggatgttgcagtgagccgagatagtgccactgcactccagcctggtgacagcagagtgagactccgtctcaaaaaaaaaaaaaaataattactggtttcatttctaaaggataattaggagttagcctgtaaaagtagaagaggtatacaaagcataaagaagaaaatgtgtaaaaacagagagttgacagaacattaaatagaatgttatggataatgtaaattaggagaaggacttctggggtaagactggagaagtaatcagggaccagaacataaaggattttgttgagtgtgtactatggggagccattaaaagattttaagtatggaagtgacatgatcagatatgcggtttgggaaaattactctggtgtttttgaagaaaatagaatgcagaagagtaagactacagatagaaagcatttaggaagctctagtaatagtcctggtaaaaagtaaggaagccctaagtattgccactgcaaatagaagagtggattcaaagataagtaggtaggattagaagttaatttatgtgcaatgggagggaaatatggttagtttcaggttcctggtttgggccgttgggtggttgatgggattatttccccaaatagagaatatagaagtgggaagaacacataattatgagtgaaaacattaattaatttagaaaatgttgtttgaaatatatgtactttttctaagttggtgagatagaactgcctttggtacactagagtatgttggtgaaaatttgttctacttaaggcaagctt

SEQ ID NO: 196087 - DNA, 1000 bp, Homo Sapiens
aaaggcctaaggaaataatgagggctttctgtgttttctacattgtatggccccatggtgagttctcaaatgttggattgtgaccacaatccaatcccttgagaaaagaatgtgtattaacaacgacttacaaaaaaaaaaaaaaaaaaaaaaaaaaaaaaaaaaggccaggagcagtggctcactcctataatcccagcactttgggaggccaaggcgggtggatcacctgaggtcaggagctcgagaccagcctggccaacatggtgaaaccccatctctactaaaaatacaaaaattagctgggtgtggttgacggcacctgtaatccaagctacttgaaggctgaggcagaatcgcctgaacccaggagacaaaggttgcagtgagctgggatcatgccattgcactccagcctgtgtgatgacaacagcaaaactctgtctcaaataaaataaaataaaataaaataaaataaaataaaataaaataaaataataaaaaaagattccattggctccctaacattcctaaaatttataggggacacatagagtatgagttctttcatgtcttcgaagtgaatggggataactgaaggcctcctcacattctttgtaccaataaaatttctcttcagtgtgaattcaaatgtggtaattatggtatgagaaattcctaaaagatttccacattccttacattcagagtttttcttcagtgtgtttttaaatgtttagtaagtaaataaaatctattgtaggctttcccacattcgttacatatatagggtttctctccagtgtgaattctaacatgtttctgtagatgtgaagaagcacggaaggttttcccacattccttacatatatacggtttctctccagtgtgagttcttatatgttcaatgagttgtgaagatgtagcaaaggctttcccacagtccttacattcatagggcttctctccagtatggatttttacatgattatgtaagctt

SEQ ID NO: 196088 - DNA, 1000 bp, Homo Sapiens
ctatactttagggcaatggcttcctggtgggcaaacatcataatgggactcatagcaatctggtgaaagggacaatttaagtcttcagcttgcaagaaatatatggtggttttgagcaattttttccaacagactttttaccatttgtgaagctcctgccagggcaactaaaaggaacactgaattttcctggtattttcactatgtctttggtttaatgatagcaaagccttttcccataaagaaagtctgttctgctcctggcagaggacaacaatggcagtctttcgcaggctcagtcacccttcaggtaacctccttatcccaagtcaaccttttctcctttatttttcttttatatcccatatctagcccactaatagattgtgtgggccccacatcagatgtatccagcagcttctcctgtccacctcctccattgtttctcccctgaatgagtgcagtgatctcttctctggttcccaaattcgcccttgcctttccacggatggtacacaaaggatctacctggaggggtccttaaacgccaagatcagatcaatccatttcctgcttaaagccctgtaatggctttccattttactcaaaataagatttaacaccaataaaattcagtctctttatcaaggcctcatatcccttcatataatttgatcctttctctgccacctctcatttctccatcacccctctatctctctccttctcttttctctgcattctactacattaaccttttgtttccatgaatatttcaagttcaatcctactatgagtcctttgcagttgctgctcatgctgcctggaagttctttccccaggtttttgcatggctgactttttgtcatttaggtctcagttcctcggtagtatctaaatagccttgcctgagccattctccttgagtgtcatcattgagtttgccatcttcatagtcctcgtcactggttgatattttttgtttactcttcttattttt

SEQ ID NO: 196089 - DNA, 1000 bp, Homo Sapiens
gagataagcactgcttttttttttttttactttatatacacatcttatttttatttatggagaatcagttaataaacacattttaaattcaatatattatgtatttgcttttttgataacactgctctttagctttttaatttagctttaggaagggaaataagcaggatgacaattttttttactagataattattataagagattaaaaagccacaaagaaccttgtttcttcaggttttcagagatgaatatcaacataatggtgaaaattttttaagtacttaggcgctaggcattggactaagctctttatgtaaacactatcatgtaatcctatcaacaccttctgaagatgtgctattattattattattattattattaattattttgagacagagtcttgctctgttgtccaggctgtagtacagtggtttgatctcggctcactgcaacctctgcctcccaagttcaagtggttctcctgccttagcctcccgagtagttggggctacaggtgcgcaccaccaggcttggctaatttttgtattttcagtagagacagggtttcaccatgttggtcaggctggtctcgaactcctgacctcatgatccacccgcctcggcctcccaaagtgctgggattacaggcatgagccactgtgcctgggcgctactatttctttaaattttacaaatgggagagctgagacttctcatcttagatgacacagctagtaggtggtggagctgaaccagccagctgggtgtatttacaatgatccaagcgacatgcaagaaggaagaaaaggggagggcaaaaagtgcctactacgtgtcagatgctttatacacctcagtgcatagagatttaaaaatcttttatgagtgataattttcttttctttttctacttggactttcttgctttcatcaacatgatctgggtgtcttttcatgtcagcaaagagattgactcctttatttttaactctgt

SEQ ID NO: 196090 - DNA, 1000 bp, Homo Sapiens
ggactataggcatgtgccaccataccagctaaatttttttttgtgtgtgtgttttgcagagataaggtttcatcatgttgtccaggctggttttaagctcctgggctcaagtgatccacttgccttggcctcccaaaatgctaggattacaggtgtgagccaccgctcccagctgaccttatgatttctcatctttacagcactgattgctgtctggatacctgtgctttgtttccctgtgacatatagcactgtctccatgactaaaaggaaacctcctggaaagcaagaatggtctctggtcagcacctagaacagcaccagacatgtagtagatgctcaataaatacttggaagtttaaagcaatgaaaccaagaacagaaatgaagattatatcactgttttttgagggtggggggtacaggggtgtttttacaatagaagtacccaagttaaaagggaaaggaacatttataacgggaaatattattagcgaatttattattagctcaatctcttttagtctcaactaaattctcttatttccattacacatcatctacaagctccttctttccagttcttgaactcactgatggaagccatgtaccaccctcctgctccaatcccctcacctcttcccccacagctgctttgccttcttcctattggttttcaccaacctgaccacgtcattccccagtttcatcacatgccagtgcctttaagataaagtcaaactttactatgccttggagaatcttttgcaatcctgcctgtgctcacacctctagcttcactattctcttcctctgcaggctcctgccacttttccttccacttcctgaagtcaccatgttctctctcgcttctgggcctttgcacatgctcttccctctgcctggaacacccccattcccacccacacccccaattcaacacacagacaccaattcatgtttcagctttgaagccgaggtcacttccttctggaagctt

SEQ ID NO: 196091 - DNA, 1000 bp, Homo Sapiens
cataacaaacaaaagaacatagtcatgtacaatctatctataaggtacatttttatatattatctcatcagatgcatagtacggctctcctgaggtagaaatgacaagttttagaatgtagacaaggaaactcaggtttatgcaattatctgacttgatcacttcacacaactgctaattatagctttgaatctgttgatgcttactgagtccagggctcagtcaacaatgccagggtaatgagctaacatcagacagcccagaaatcactctgcttttaagaaattttaatagaatttggtggtgtgtcaaccaaaaaaatcccccaaatcctctctttcttgttatattggaaaaaatatacaacagaaaacaatccagttagtatgactaaatagtgacccgaaagaataaacatgtccctaaaagacaaattttaccaactaaaatacagagaatataacacagtcaatagagaactgactctattgatagagaacacaatacagtcaatgcacaaagacaaagcacagggtaaaactacaactttatatcgctcaacagtttttagttcatcacaaactcaacttactttctgttttcctgctgtgaatcaatttattttccaattcttctagcatactatgctcaattctgaagtcacttttttggttgtagaaatgactgtgtttatctttttccatgttaattactctttaggaaaagaaacaaatagtataaatatgatctaaatatatttttaatagtttaaaatatgaagacactcaataatccgtattttatatttggattaattcatctatggaataaaaataattactttggttaataaggctaaggaatcaaaacattagtcaaaataatagctagaagagttaatttcaatcaaacacaactataatttgaactgctatgtaaatcataaaatgataatttaagaaaatgtggatatacatttgctttgaaaatgcataagctt

SEQ ID NO: 196092 - DNA, 1000 bp, Homo Sapiens
ttctgggacagagcaaaccacaaagcctcattctgtacctgagtttcccgggaatgaattctagttgacacttcctagctgcttgaccttgactttggcagttgtggagattaaatgagattatacaagcactcactctcaggaccaaagtgcaacaaatcagcagtgcaccctggtcaacggcagacaccaggtaggcctcaactgcggcaggaaaccacttcatcaatgcctcctcagtaccctcctgctgcccatctgcctgctctaaattcagttcaagcccctcccctgccacaaagcctttgttagagccccactgccctctccattttcactactgggatttctgtcatctctcttctggcactaagctgattcttcttgaccaatgactcaactctatacagtgattcttttcatggaccagaagcccttgtgggctgagggcataccttagatttcttggtctctctaagtggctaatttagtagtctgtatacagtaggtgcacagtaagtgttgcctgttgctaatgcaactcttggctacaattccgctctcagaagatgaaagagggaaggggaggtaacccctcagcagtcagtcagtcagtctttctctctctctctgtctctctctctttctttatctctctctctttctttctttttttgagacagagttttgttctgtctcccaggcaggagtgcagtggcaggatctcagctcactgcaaccttcacctcctgggttcaagtgattctcctgcctcagcttcctgagtagctaggattacaggtgcccaccaccatgcccagctaatttttgtatttttagtagagctggggttttgccatgttggccaggctggtctcgaactcctgatctcaggtgatctgcctgccttggcctctcaaagtgctgggattacaggcgtgagccactgcatccgcccccacagcagatttccatgcactttctcccagcacagaagctt

SEQ ID NO: 196093 - DNA, 1000 bp, Homo Sapiens
tatggcagagcctgtagggaggcagcctgtagggaggcagcccgtactcctgaccttggctgaacttcaagtccctcaagttaggaagattttccttattcttctagtcagtttgggatccaaaatatcaacttttcaaagttgctgtgatgattagagatcatgcatataaagctcttagcactgagcccagcacacagtaggtacatagtaaatggtagctgtcagtgttactgagttcagtatcacacagccctgcatagaggtagaaggcaaggaaacatctgtccagagagactgcagttagagccagagtcagtgccccccgcagtcaaatctggagagggccagagagagcttcctaaagaattagactctgaaaacaaggcacggccccaaaccagaaccttcattgtctgaggttgaaaaaggcagctggtaccaaggctctctcacctgagcccccacagcagcatgcctaaggggccacatgggcagccatgcttagtgtagcagccttgagggcagctggagcaatggcagcccaccaccccctgagccgccccttcgtaccacttcaagccttgtggaagccaggactggtcccagggtgaacacagagggaccctgaaagttttgccagctccaaagcattcctgtcactcattagagcccttctgtgatcaaactgcatttaggtactcattgtgtgacttgggagatgtgacaccatcattaatacatcaaacgtttgactacaaatctatccatatataaagtatgcctgttccagctccttggtgcctgtgtgtgaactcctccctctgcagtgtggtaaagttcccctattctctgcctgctctccagttgtctctcctctccccacgcaaacccctaatgctctatccatgttcaatgtcgagcaccgtttatgttgttcttccttttcctactccttctgcctgcaatgcccctcccttccttgtacactcagaagctt

SEQ ID NO: 196094 - DNA, 1000 bp, Homo Sapiens
gacacattagctcccataatagttattatccaactcccttcccttcttctgagactgtgggtgtgctccagcttcccatgaaaattcaattacagaccaagaacaccctggatggcagctgagtgttcttgcactgcagccattgtcagtgaagctggtgtgtgtgtgtgtgtgtgtgtgtgtgtgcgcgcgcgcgcgcgtgggtgtcgggggtggtgcatcagcctctgagcttggctcaccgggcctgacagacccacttaagggctggttaatgcggtttctgagcccacatggctgagaccgactccagaccctgcaggacccagtgaggtctctagcagtctctcctgggatttctagtctctgcattccagccacaaatggatctatgtcagacactagcaaagttgaggtttggtttctgtagggacccaaatagtttcccacttgtggtagaggggacacaggaggacagtgcttgcttattagagaaacctcttcactacccttaaacctttttagaggttccacctccattcagaggtgctgtgggaatgttgttagaaagacagattattctgtgagaaaatgataaaccaggaagttacatgaaaagcaagtcaggggtcggcctggggtgcaagacaagaagttgggtaagaatgagttgtccaggatagcactggagtgcacgtagctggacaggggcacccagaggtggaggggaggtggggcactccccaggtggggcagagggactcagggcccacagcccaggcttctgggcatcatggtgtggtgcaagtcacaacactgctcccacccatccaactcagcagttcaagggctgtgagcccagggccaagctagcacaccccctagaggggctgagtccttggccatgaagggagggctggcttgaagctgcatctgggctccgcctaccttcacccctttctttggttctctaggaggaaagtatcaaataacaaagctt

SEQ ID NO: 196095 - DNA, 1000 bp, Homo Sapiens
acaagggtttaaagagacttcagagccagcagcatcagaacaatgagacatgcagccttgttgcctaattcactcttgggtgaccagtcttaaatgatgcaatgtgaaatcatttcaattaattttggtctgtctctgtagtcttctgagggccttataaaagaagtatatgcttaaagctaatacacaggaaggcctgaaagctccaaactgtgcagcttttggtggatttgaggtaaaccctttatgaggaacaagagagaatggatttgcttatggttatagtttctctctctaaagatttaccagcttagaaaatatgtatatatgcacatatgtgagtgtgtgtgtgtaagtgtgtgtgatagttattattttttttaagcaaaacaaaatttccttaattcatccctgatattgagagaataatactaatacatttgggccatttgtgacttctttctcaaaaatgctttttgggatgccaaaccaagctgaaatgtctgccacccttgatttttggtagtaaaaaaaaaacagtttgaagtagcctgaagacgaaacataaatcaatgttattcatagcttacttatgctatgctaatatatttgccataggcaagaagtactcctaactaataaacttactttaaatcattagttgaaatgtctggatattccttctaatgatttccccagcttagttttgtcaatgcttcgcaggtcttcatgccttctacctgaacgtatgggtcatggtagatagacagaacaaaaaacttttataacattttaaaaactgggattagaagatcctaaaaccttgtctgagtgctctgctgttgatttctcagaggagtaaaatatacgtggcaacttcttcagaaagaacatattaaagttgaagtataaggatttttagatcaaaaggataatgattttttaaaatctttactatgtgataaattattctgaaggcattataaagatgtacaagctt

SEQ ID NO: 196096 - DNA, 1000 bp, Homo Sapiens
gcagcctccacctcctgagctccagcaattctcctccctctgcctcccaagtagctaggactataggtgcatgccactatgcccagcaaatttttaaattttttgtagagacgaggtttcaacatgttgccgaggctggtctttgactcctgggctcaagcgatccacctgccttggcctcccaaagtactgggattacaggcataagccaccatgcctggccagaaaatgaaagattttaaattctcctgccaccctgtgtcactgcattactgtcagaatctccaaatatatgctcgtgggtttttgtttgtttgtttgtttgtttttggtggtagtggtggtggggggtttgtatgttttgtttttgttctctttacagcattgttatatattggttttttaacataggctaagaacacataattttgcatcttgatttttttttcacttaacagatttggatatttttccaagtcagtgcctatagatatgcctcattgtctaaacaactgcatagtattcgtgaacatttttgttatgataataaacattggtgaaaaatgacactttactgtttgctgagttatgtaagagttgtctcatttcagcttctcaataatttcaagacatggaggttttatctttttacagatgaggaatacaaattaaaatttacggatgttaatctactctagttaacatggctaagaagtgatagagtaggaatctttctcttatattgtacttacttgtatcctaatatttctttgcttatttgtaggaatgtttcaataggatagatttcctagaagtggaaatgccagatcaaggatatggcagttaaaaattttgatagctagattcactggttattgttccatcactctaaaaaagagttaacatctttctgtactgaaagtattgaaagttcttgtttctctaaagcttgggcaagaatggatataattatttaaacatttatcaagctgataagctt

SEQ ID NO: 196097 - DNA, 1000 bp, Homo Sapiens
ggtcaggatgagagtgggccagactggcccagagcaggaggaagtatggaacattgcagagggaaggcacctgggccggaggagcaggctgacatggctgtgccgtggtgagcaggggacatggctggggccttggggtcatgctcaactactgccaccaggcaggctgccagtgtagccagaacccccatcccaggggtcctaaaacttggagcatttttcaggttagggaagcactggttcaggtcaccctgaccagccaggctgggaaagggagagactgtgtttagaactgggacagtgtcctgtgcacaataaccataggccctttgcagtgtcgtgggtgtcatcccagctctgccacttactagctgtgtgaccttgtgcctcagcttccccatctgtcaggtgggcgtagtagttgtacctaatatcataggtctatgttaggagtatctgagttcaactctgcacggtgctcagaactctgcctcacacatgggaaatactccgctcacattagcacatgcttttctctaggcctgaagcatttttttgcctggcacataataggagctcataaatacaccctgaccaaatggtaccaatagcgaccagctgagcatcctgatctcttggggggctgtttctgctggcacagtcccctgccactgggaggcgttcttgggagggcctgaacaggcctcacctatcccctaccccccacaggcttgaggccagaggaaacagcaactttcttcgctgggaaagtgttgtggggctcaagcatttgggggttttcagagtcaaccgtcagaggcgagggagtttctctgctggcggtggcaagggctgtcagcgtgcacacagcctgcgagcagaccgctgcggtctacagggaaaatgccgactgtgtttatttttcacctgagcctgcaggaagttggggggtgcgggttgggggggtggtgaagggggatgccaagccaggcccaagctt

SEQ ID NO: 196098 - DNA, 1000 bp, Homo Sapiens
attccagaatggtccccaatagcatatttgtaagtattcctgggaagcatggacacattttgcaacctcgatggtccccagcgagtcatgcctcccaacattcacaccctcgtgtagtcctctcctctagaatatgcgctgagcctgtgtcgcttgctttaacggacagaatgagtcagaagtgacacagggccagttccagtcctaagccttgagaaggcctggcagtttccacttttgcaccctcgagagctgtcatgtcagaaataagatgtaagaagtccggctctctgctggaaagatgacccagaaaggccacttggagagggaaacgtcctgagactatgaggaggagaaccaaagaactcaactaacagtgggagccgaggcttcccaagtacgactgcggctgagccacccctggcaatcggagcaatcttagccaaagcaccaaacagatgaagacaccaccctgggcatgccagcctcagcagacatcacatggagcagagatgagccatcccgctgggctccgtctggactttggactgtctcagtcttcactgtcctttgatggaggtttggcagcagtgttttgctgtatcttaacattctcttaactctatcataagaaatggtggaaatgcaatacgatgcagctggcatttggcctctgcacaataaggagcagtgtttttttgttttgttttgttttgtttttgatttttttgttttttgagatggagtcttgttctgtcgcccaggctggagttcagtggcgccatctcagctcactgcaacctccacctcccaggtccaagcaattctcctgcctcagcctcctgagtagctgggattacaggtatctgccaccatgcccagctaatttttgtatttttggtagagagagggttgactacattggccaggctggtctcgaactcctgacctcaggtaatgcacctgcctcggcctcccagagtgctgggattacaagctt

SEQ ID NO: 196099 - DNA, 1000 bp, Homo Sapiens
gggcctttaactgccaggctcctcttcctgtcttgggaacagagggcagtgtaggcctctttgagcacagccccctgagtaatctagggcagcacatgcaatcttgaggcccttggcacagctgctctggggtctggcttcaactctagcctcccttctagttctccgtccctttctatacctgccccactctccggggtggaaatgtggagggctactcagaggattctcagccccatcaacagcttatcttcctattcaactattaggacaaacagacatcaatgtgattccagggttcccagggactacctagaaagagggaaatcagatagtaatgcttataggtgcaggcaggcaaaaggaggctatagatacccaagcatggggttagctgaggcttgcaggcagagcagacatctgtcaaatcaaagaggcatagagacagcccacatgacaatagaaataatgatacccttgaattatgtagcactttataatttctcaagcactttgcaaacatttgatcctccagatgacctcctagggcccaaggaagcagaaagcatcttttataagctgtcaccacctgtcaagttgtcccccaagatggggaaaggcaggagccaggcaaggcagtgagtgagttaaccaaacccaagccacagtgagtaattgatagtttttatggagactttatcctcagactccttagatatcatatttctgttagattatatttacataacagtgcagggtgagagaccctgataaatcttctcagaggcatggggatgaatactgtggaaatgtacttttgttgatagcgatttgttttactacactactgcccttcaatctagggaggaaagagcaaggctattgctttatggagggagggaaggagggaaaggagaaggggaggtatataaagatcagagatctggaacaagaggaatgaatgagaggggaagagacagggctccgaaagggaaagctt

SEQ ID NO: 196100 - DNA, 1000 bp, Homo Sapiens
tcagcctcctaagtacctgggattacaggcgcatgccaccatgcccggctaatttttgtatttttagtagagacagggtttcaccatgttggtcaggctggtctcgaactcctgaccttgtgatctgcctgcctcagcctcccaaagtgctggggttacaggcgcgagtcactgtgcccagccttttttttttttttttttttgagacagagtctcactctgtcgcctaggccagtggcacaatctcggctcactgcagcctctgcctcccgggttcaagcgattctcctgcctcagcctcccaagtagctgggattacaggcatccaccaccacacctggcttatttttgtatttttagtagagacggggtctcaccacgttggccaggctggtctcgaactcctgaccttatgtgatccgcctgcctcagcctcccaaagtgctgggattacaggcatgagtcaccgccccagcctgagagtctttcctaagcctcattctccacacactctatcctccctcccccaaccaaccaaactggaccggaacaggatgttacactctccttccaagaactcctgctgagccagggaaaaccacttcctagcagggcaggggtcccaggcaggaagggacgttggggggcctacaccaggcagccacagcctgggagcagagccggagacatattcacacagttaggagaactagaagcaaacccacagagttgacaaaaagctctgcctcttactcccaaattcccttgtatacctctccctgttttcttcccatttggaatctcaagtcccctccgtcctgaatctctgcatcctcacgcctctgctgtcccctctagatgccccccaaccttccctgtctccaatccccctcctctggagttgttcccttttgacctccactttctcagtctcagttcccctccttggggcctcaatgggctttttactggtgacatcccttgtcccactcccaagctt

SEQ ID NO: 196101 - DNA, 1000 bp, Homo Sapiens
tcgggctccctggacaagtatgaggactgcctcatccgcctgttgtctggcctgcaggagaaaccagaccagaaggatgggtgagggggctgaccctgcaccctcctgtccccaagaggcttcctctcctggtgctgccctccctttctgattgcgaccacctccctcttcgtcaccccccgagtcagtcctcctcgcacccatcccaagtctcctctcctcctccccctctggaggcacgttcaaggttgtagttttgcatgtgggctccaggtcgcactccctgagctgttcctcagctctgccacttgctctgagcttgctctgcgtggctttgtcactccctctctctgccattttcccatctgtaaataacagtgctcacccatgggcctggagatagacttctctacaccccattcactacctgagttggttctgtagcttcctccctatccgtggcctccagcttactcgtctatcctccacacagcagctccaggaacattttattatataaatccttttattacttccccacaaggaaccttccatggttctccattggtcttgggataaaacacagcctccttactgtgaccagtgaggccttatgtgacccaatctctttggctttaccccccgaacattagccacattggccttctgtctgttcctcgaacatgtcaaattcagggcgctggtgcttcctgttctgtccacctggaatgctcttccctcaactctatgtgtgggtggctccttctcatccaccagtgtactcaactgtaacttcaaagcggccttttgaggccaccatatctaaaatacccacacccttctccacccgccatcattccctcccgttcttatgttcagtgaataaagttaggaatccctgtttgacaaacggaagaaatgagtttcagagaggtgcagtctctgcccagatcatccagccgccagcttttgaaccctgttctgttcacctccaaagctt

SEQ ID NO: 196102 - DNA, 1000 bp, Homo Sapiens
tttatctgggtgtttacttgtctgtcttcttccctagaatgtaagctccatgatgagggaaatttttatgcttagcctagcacagtatcaggcacacagtgatcaataaatatttgctgaatgaataaatgataccagagttcaacttcagtctttttataccatatcccaagttcttttgtctccgtatctcttgatttgtagctgtagggcagtgtgattctcttgcaggaaatgctcttgcccttgcctgcagggaggccaggatccaggcaggagggggagtctcaggaattgtaccaacatggtgagctctggctgaggacatcagctcctgtgggaggatagggaattttcccaggcccagaagagggaacctgaggaccaggcaggctcagaaagaacaactgcccacctgtgtctccagccagaaaccaggcatggtaagcagagtagcagcccccaaggatggccatgccctaatccccggaacctgtgaacatgtgtaccttatgtagcaaagggggccttgcagacatgattgaggttaaggacctggagatgggtttgaggagccaggattatctaggtggtcccaatgtaatcacaaggggtctttaaaagcagagaacctttctgtctgcattaaaagatgagacagaagaagtagagatttgagctacgagagggactccacccacggttgctggctctcaagatggaggaaaagggtcgtgagcccaggaagatgggcagctcttagcagctgggaacagtcggcagctgatagacagccagggaacaggagcctcagtcctcaacccagacaagcaacgttcccctagagcctcccagaaaggaaggtaaccctgccactgacaccttgattttagcctggtgagacccacgcatgatgtatttctgacctacagaactgtaagaatacctctatgttgtttaaaatggtaagaatacattatgcattgtgttgtttaagctt

SEQ ID NO: 196103 - DNA, 1000 bp, Homo Sapiens
tctcagctgaatggagggactttctcattctccaactgctgccagactggttcctcattccctttggccccttgtcttctgtgccagcttaacagaagttctggacaaggccaaagccatgactttgcaggctgcttccatctggagagggcatgcaccttaattttcagtcaaaagagctcaggaaagacagagaattcttgatttttggaactgtgtgttctcagtggtgggctcacaggacaagcagcctctcccagaccagccactagcacgctctgacaagtcagctcttcttttctgggccctggttttcccatattcaaatgtggggtttgggtctaggacaaacttgtctaacccatggcctgtcggggcacaggcagcccaggacagcttttaatgcagcccaacccaatttataaactttcttaacacattatgagatttttttgcaatttgttttttagctcatcagccattgttagtgttagtgtatgttatgtgtgacccacgacaattcttcttccaatgtggaccagggaagccaaaagattggacaccgctggtctaagagttttaagattctttgaaacttcattaaaaagaacattttattatactataaaagtttttaaaatccctatagcttctgaatattaatctgcagatatcatgctttcattgaaaagggatcttcattttcaagttaataaaacaaaatgctgagtttacatggggaaggcaacatttgtagactaaatcagatgctgaacttgacaagaacacaaatttgaactgggaaaacaatgacatattgtgggcactaaaagaaatgatcagggtggtgaaaggagccactgagcttatttattggctactatctctccaacagacttcacagaatctgaattcaatttgtccaggtgaactgatgtaagaacaaccatcacaccacaatcttttctctctgggagaacctacctgtaagcagaagctt

SEQ ID NO: 196104 - DNA, 1000 bp, Homo Sapiens
aatattgggtagtcactaagctttagttctcagttctctactccactttcttcaccttctcccttggaaatctcctccattcatgacgctaaactcttgacagaagatagctcttggttttgtattacctgctctgacagcattcctgagccccaatcccatcttcccaactatcttctgtaatagacgccccatgattacttcaacttctaatgctgaaattagtcttagccttacctacccaaaatggcttatcctactattttctccctatcttactacattagtaaaataccatttccttagtcatccaaccctgctaattagtggctagtttccactactacttttcttttctctctctttttttttttttttttttgagatggagtttcactcctgttgcccaggctggagtggaatggcacgatcttggctcactgcaacctctgcctcccggattcaagtgattctcctgcctcagcctccagagtaactgggattacaggtgcctgcaccatgccctgctaatttttgtatttttagtagagacagggtttcaccatgttggctaggctggtctcaaattcctgacctcaggtgatccacccaccttggcctcccaaagtgctgggattacaggtatgagccaccgcgcccagcttccattacttttctaaaagaaatcttcaaaatgttttccctcttttttttccaggataaaaaccttttctagaaaaaatattaagcaaacaaatgtaatatgtcagacaccagactgcattatctataataaaaaattagaaatatgtaaaactaccatcatatattttaacatttcgttttttaaaaatagagatgaggtctctctctatgttgcccaggctggtcttgaactcctggtctcaagctatcctgccttgcccttccaaattgctgggattataggcatgggccactctgcttggtcaaaatatttcattttaaagaacacaagctt

SEQ ID NO: 196105 - DNA, 1000 bp, Homo Sapiens
agatgagtatgaatattagagctaggtcttggaagttggtagaggcaggctcggcgtagtgatacagattggccgcctgagggtgccccagccctgcttgcggagcctggagagacagcaggaagccttggaaacgaatgtcaggctcagactcctaggaccagagaacgttgagaatagagcatcatagaaggctgagaacaaagccccttagaacgtagaacaaaggcccctggaatggaagaatgatgagcacacatcctcctagcacctgggagacaaaagctgcttagactctcttctggtcaaagcatagaatcttccacccagggtcttataattccagaatttggaatgcaatcgatcttagactcttagcagcaagaccggctacatatttggcctagtgcaaagtgaaaataaggggccccttgctcaaaaactaaaaatttcaagacagaaattgcagaacattcaaccaagcgcgaagacccttctaagtggattccaagccggtgaagccggccctaagtagaaacaatttcatcggaggacgtccgtctggttttacagctgagtgtctgggaaggcttcttggaagaggaggcgaagtcagggctcgaccccctaacccttttctccccctgcgcagcctcagaagctgaaggttgggcggggtggaggggtaggagcagctgccaaactgtcacgtgtacccattccctatttatagatcacccttcccctcgcgccggacagtccaatggtagccagcgctcgcccgcaagagggtggaacctgctgcaggaccggccaggcacagaccaatggcattgaagcaagggcgggcttgtttcattgtgacgcgtgggggggcgtggccagggccccgaggcagttgcacggagggggcgtggcgagcggagtgagtaggcagttgcgagcatgcgtcgtgttgggcggtgcggttgcacgcccgagagtcttcgtcaggaagctt

SEQ ID NO: 196106 - DNA, 1000 bp, Homo Sapiens
tggcatattaaaggttctgagaagtcattcaggtcactgatctgtttaggtgtccccaaataacttggccaccaatcacgtctactcctggacattagttcaataaactagtgtatcgcagatgtgctttgcaaaaagcttcatgaaaaagtacacatgtgattccctccagggctttcctcgaggctcctgggtgacctgtctgaccatggctggagaatcagcacagcactcccctagcctcacctcttcccccatttggctgtggaaatggagaaacacagtcacctctgaacttctaaacctagaaacagaaggagactgtacacaggggaatacagaaggcagtctgggatgatgtcactatagaatgactgatgaaaaatgcagattgactgttctgacgctggcttagggcctggggctgaagctggggaccttgagcaaggccctttgactcctgtgatctgtttgccatgttgccaatgaggaataggaacctgcttcaaggatcttatgaggaccaggggagggaggggtatggaaagcctttgatgcaaatgctctatgcagaacaggagttataattatagtctccattagacatgaagcttcctgagaaggatccgaaatccacagactatcaggactggacggcctgctgaggttagttactctagccaccccttttcactgatggggaagctgagcaccaggttgtaaaagcctgggcctgggatcaggggcagtgggaggaggagttaaggcagggagcaggaatgaaaaagaaactaagtgggtgagggccagggagaggaagattaagtcacagatctgattttccagagcctgaagagaaaaacagagcaaaggataagacccggatgacagatgagatctagattcgactctgggaactgctccatgccttggtttcctcatctgtgcagggatgaggttccagctctgatagatgaatggactcacaaccaccaagctt

SEQ ID NO: 196107 - DNA, 1000 bp, Homo Sapiens
tccctacctgcagcaggcatggagtatggagcccgacaaagtggagtgttttgttttttccttttccggctttgctccatttcccagccatgcactgccccatttcctagccatgcactgccccagctgggacctgtgtctctggcctctggtggcccttggagttgactgtcctgctgctccttgaggccattctcagagagaggaagtggcctcattttaatccgcttcccacagccttgtcctttccagacccatgggagagggaggggctgagggtgtggctgagcccacccaagtcacgcgtcactctgcaggtccctctcccccaaggccgtggccttgggagcccgtggatcccagtgagtgacgcctccaccccccgccctactcgggcagtttaacccttgttgttcacttgcagacatcgtgaacacggcccggcccgacgagaaggccataatgacctatgtgtccagcttctaccatgccttttcaggagcgcagaaggtaccgagcagggccaggcaggccctcctcgccgccaccgcgcaatgccgccgctgcctctcgcctcccgtgctcacctcatttctcttgcagacggcagtggcctctctccaactggaagccacccccagctccctggcgttgctgccccctcagccttagctcacacacctattgggtacctcatctgtgccaggcttttccaggcattgaggatgccctggtgactgagtcagacaaggtccctgttctcagggcacttccatgctagtgggagaaacatacagcaggcctgtcacaggagtggaatagagaaaatggggccagatgggggacagagatggctggggtgaccttcagctggtgctgtcaatgtggaggggtgaagtgagcaggtacttgcagcaggagctgctagatgcaggctggggcacaggtgttccaggcagagggtgaagcactacgaaggccctgagacaggaagaagctt

SEQ ID NO: 196108 - DNA, 1000 bp, Homo Sapiens
aacatttggtaattcttccgatctctgatctctattaaaaatactcactttcaaaatgtaaggtaatagatgagccacagactgggagaaaatatttgccaaacataaatctgattaaggtcatgtatctaaaatatacagaaaaacttctaagactcaataacaagaaagtaaacagtgcaatcaaaaagtgagcaaaagatatgagcatacagacacccagacatctcaacaaagaagacacacagatgacaaataagcacaggaaaagatgttcaacattatacatgactaaaaattgcaaattaaaataacagtgaaatgacactacatacctagcagaatggctaaaatcccaaacactgacaacaccaaatgctattaaggttgtggagcaatagaaactctcactcattactagtgggaatgtaaatggtacagccattttagaagacagtttaacagtttctttcaaaactcaacatgtcttatcacacaattaagcaatcatgcttctagatatttacctgagtacaaaacatgtccacacaaaagcctgcacatgagcatgtgtagcagctttattcataactgctaaaacttgaatggataaacaaactatggtacatatgtgcaataggatactattcagtgatgaaaaataaattgtcatcacaaaaagacatggaaaaaccttaaatatacatactaaaagaaaaaagtcagtctgaaaggtaatatgccatatgattgcaactatatgatatcctagaaaaggcaaaagtgtagagacagtaaaatggtccatagttgccatgggttcaaaagtaaggaagagagagagggatggataggtaaaacatagtggatttttagggcagtgaaaatattctgtataatactataatggtggatatatgacattatacatttattgaaacccacagaatgcataaggcaaacagttaaagttaatgtacagtatagacttcagttaata

SEQ ID NO: 196109 - DNA, 1000 bp, Homo Sapiens
tctgctgctgctattttgatttaaaggtgcaatccaatggagtcacagccttatcctttggatcaacttgtaagaaagggaaaaggatgctaacttattaaaaaatgacctcctcttatcccagtatttttcccccaagaaatcaaaatgtataagagtccacaggtgaagtgatgctgaaaaagtagtttaaaccctggatggtggatggtagtgagctgctacttcataaaatataatcaactcgtctatatccaatcttccatcaagctcacatgcaaggcaggccaattccccagttactcagatgtccgtctgaaggaaaagagaaaaaattatttcctcaaacctggaatgagtcagaaaaagagtcctctggagagagagagagggagggagggaaaaacagagggagggagagagagattattttacataagcagctctggaactactgatctcagccattcttcaattaaatcatagcttctctcatgctattttgtgcctacatgtttatctataagcctctgtctccagcaattagtatgaaaaacaatttacttgtaagtctacattaaaaagaaacatgcaattttcaacttccaaatgggaatttttttttcagctggacaggaaaagcaataagtcttagagcttaccttagtgagtgctggagacccagttcttgtgaaaaaaataataataaccatttgtaaagcaatcaaaatccacagccaaactgagtctggatcttgtcaaatcccaaacaggtaaacgaccgaggtatcaatgaaaagtgccagagaggtgtgctcttggaaaataactattatatatatgcatttatataaatgcctatttgtatttatgtatgtatgtaggtacatatgtgttcattccgtatcttaagttaaaacaagtcgcaaaaaaagttaagccctgatgagaggaggttgggttgaagaagtaaagcagagaaaatattcaaccaaagctt

SEQ ID NO: 196110 - DNA, 1000 bp, Homo Sapiens
ccagcccatgtggccagatggagtgagcacagagggtgtggagatggcctggaggtgagagcagagcaggagccagggtgagccacgtagggccggcaggcagcggggacagccccggggagatggcaggtgcagcctccctgctgtgttgggagtgaggggcaggagtcaggcccctgcatcctcctgcctcgcaggcatcttccctgagcctgagcgggaccctgtcatccagatctgctcgctgggcctgcgctggggggagccggagcccttcctacgcctggcgctcaccctgcggccctgtgcccccatcctgggtgccaaggtgcagagctacgagaaggaggaggacctgctgcaggtagctctcgctccacgccccacaccatttcccggggtccccgccagcctccgcgtcctgagccatcagctcctgggtgctgcgacgcccatgtctgtgggtctgggtgggtgtctgtgggtctgggtgggcccctgtgcaattaggcttgagcacttcccctctgggttctgcaggattttcaggggtggctggggttctagaacattctggaagtaggggaatccgaggcagggcaaccaccagggtgacccaatgtgctcccacccccaggcctggtccaccttcatccgtatcatggaccccgacgtgatcaccggttacaacatccagaacttcgaccttccgtacctcatctctcgggcccagaccctcaaggtgagggctgggcaggtgggaggcttctctcagatgccccaggtgtggcctccgggccctgggcctccttcccactccctctccacatggcttggtgcatcttgctctgtgtgcctcagccgattgcctgcaggggcagcctaggcctggtcctgccctgctccaagtcgaaaaagttactgtggcttttatcagaggcaaggagggcgttacggtggagtaagagaaggctgtgcattcaaggtcggcctgaagctt

SEQ ID NO: 196111 - DNA, 1000 bp, Homo Sapiens
ttccatttaatggtgaaaagctgctgtgcatgacccactttatggctagatggatcaaaaagcatcctgctcgtgataggcagttcaggttgcatggtaagttggcaacccatagtcaagcgttcagtttctacaaaagccaagtaacaggccaagagctgtctctcaaaaggagagtagttatctgcagatgatggcagggccttgctccaaaaatcttagaggcctttgctgtaattcacctatgagggcctgccaaagtatccctatctgccactgacacctcaagcaccattggatctgctgggtcatatggctcaagtggcagagcagcttgcacaacagcctggacttgttgcagagccttctcctgttctggactcgaaactggcagccttttgggtcactcaataaatgggctggagtaatgtgttgcctccaaaatctacataggtccactaggcattgtgcctctttcttggttgtaggaggggccaaatgcagcaacttatccttcaccttacaaggagtatctcaacaggccccacaccactggacccctaggaatttcactgaggtagaaggtacctgaattttagtcagatttatttctcaacctctggcatgcaagtgtctcaccaataagtccagtgtgcttgctactgcttgcttataggatccagtcagcataatgttatcagtgttatggaccagtgtgataccttgtggaagggaaaatggatcaaaatctctgtgaacaagattatgacacaaaatcgagagttgttgtacgctgaggtaggacagtgaaggtgtattgctggccttgccagctgaaagcaaattacttctggtgggccttatggacagaaatggagaaaaaggcatttgccaaatcaatggctgcataccaggtaccaggaaatgtgttaatttgctcaggcaatgaaaccacatctggtacagcagctgcagttggagttaccacttggctaagctt

SEQ ID NO: 196112 - DNA, 1000 bp, Homo Sapiens
gccaggtgcagtggctcacgcctgtaatcccagcaatttggaaggccgaggtgggtggatcacctgaggtcagaagtttgagaccagcctgaccaacatggtgaaaccctgtctctattaaaatataaaaattagccatgcatggtggcgggcacctgtaattttagctactcggtaggctgaggcaggagaatcacttgaacccaggaggtggaggttgcaatgagccgagatcatgccactgcactccagcctgggcaacaagagagaaatccgtctcagaaaaaaaaaaaaaaagaatatgtatagggaatctaaaatatccagcattcaacaaagtaaaattcatgtctggcatccagtaaaaaattatcagacatataaggaagcaggaaaataggacacataatgagaataatcaatcaagccacactgacccagaacttgcacccatgtcacaattagcagacaaggatattaaaacaataattgtaactgtattgcattcaaaaagtaaagtagatatcaagatataagatattaaaaatatcaaatcgacctgggaggcagaggttgcagtgagccaagatcaagccattgcactccagcctgggcgaaagagtgagaccctgtctcaaaaaaataactaaataaaaataaaaacaatcaaattggccgggctcggtggctcacacctgtaatctcagcactttgggaggctgaggcgggtagatcacctgaggtcgggagttcgagaccagcctgaccaacatggagaaaccccatctctactaaaaatacaaaattagcctggcgtggtggcgcatgcttgtaatcccagctttttgggaggctgaggcaggagaatcgcttgaacttaggaggcagaggttgtggtgagccgagatagtgccattgcactccagcctgggcaacaagagcaaaactctgtctcgggaaaaaaaaaaagatcaaattgtaccctttttttttttttttt

SEQ ID NO: 196113 - DNA, 1000 bp, Homo Sapiens
tgcacaactctgtgaatagactgaaaagcatttgcatgtacaccttaaaagggtgaattgtatggtatgtgaatgatatcttaataaagctgtgaccgcattacatacaaggggcacagagagtgtagagtagggtttgaatctcaaacctcccacgcactggctgcgggacctggagcaggtcactaaccctagatgagctttgcttcctcaatctctaaagtgatgatcaaatcatagttatgtcttggaatcaacatacaggggaaatgagagctgtctgtgacattgcctggcccatggaacgcactctatgaatgtgtgccttaccaagtccctgttattgccagacataggggacacagagataaatcaggctgcactcctgccttcaaagaggaagcagctgtttggaagacaagtttgggagacaagcagtgacattttagggtcatcagtgctgtgattcaaggacaaaatccatgcagtggaaccagaaaatggaggggaggagggctggagggctcagggaggacaatgccactccttggacccagcttccctgaccaccgagtctccacaaccccattactgcctgtctattgccctcctttgtttctccccggcatcacctgaatgtgttctcattcatttacttgggcgctcccttgatgcctgtgtcactcccacctagactggcagccccatgagagcagggaccttgtcattcttggccactgctgtgtccctggtggccagaatggtgtcctgtgcttagtagacacttggtatttgctggaggaaatacagcattaagatgaggcttggagggtacctgggaactagccaagtgaagaagccagaaagggcattgcaggctgagagcacagcagccaagctaccattgctggagactgcacagactaaggagggggacaggagggggatggcaggggatggagatggagacacagggaagggcagccccaagatgaagctt

SEQ ID NO: 196114 - DNA, 1000 bp, Homo Sapiens
agctcaagtgatcctcccacctcagcctcccaagtggctgggactacaggtgcacaccactgcagctgtgcctggctttcttcctaaccttttatcattaatgtgaatcagaaagagaccttcatgggttaacttggatactttggccaagaaccaagaagagaaaagctgacttttaaaaacatataatgtgtataaatttattcaggtctacatctatctgagctactttccaccctctattccagacacaccctgtgatctcaatagaatggtggcaatgggttcttacaaggttgaaaggaacaggaagggatggaacctcaaagccagacggccctttatgagaaaaggggaggcaagcagtctggattcttgaaaggaaaggaacgctggggatgattcaatccaggagtagcaaacagtttccatttctggcgtcaactccaactgattgattgggaagcagtttcttgggacgcttgtgttcagaggaactctggggctgtttctgcacccagctggaagcagtgctgcattagattcctagggttgctatcacaaattaccataaatgtggcagcttaacatgacagaaatttattctctcacagttctggagaccagaagcctgaaatcaaggctctcgcagaaccatgccctctccaaggctctaggggagaatgtttccttgccttcccagctgctgatggctcccggtgttccttggctgatggcagcatccttccactctctgcctctgttttcccttggcttcttccccttgagtctctctgtcttttctcttacaaagacattagtcattggatttagggctcacccttaaatccaggaagatttcatcttgagatccttaactagttatatctacgaaggctctatttctaaatcaggtcacatcctaaggttctggatggatatgtattttgggggggcattattcaacccagtgagagtgccatgatggtttagcaagctt

SEQ ID NO: 196115 - DNA, 1000 bp, Homo Sapiens
ggaaaagaatgttttgatgttgtaagcatctctgaattttcatagctctgccttgcagtttccatatgttctaaaaatgcatggaaatttccataggagacactaaacctgcccatcactttggtgtaatgggcaagtagactttgtggaaactgtttccttacagaattcatagtttgaaaaatatatctcacttccctgtgggatttgattaagtggaaggaaggtacaacacatctcttaccactattgacatcataaggtaaattaattatattcatgagtcactcttagtacaatctagccaaatcacagagatgtctgaatagttctaactatagccaccatgaggtttcatttgaagtcactgctgcatatttacaaataaatacatttttgctgggttacctctggaaaatattattaaatggggaaggagcttgtctgagatgaattcctttgagcaggagaacatattgaaactactgtgaattctgaattggtagtattttttaggctaaggtccatctaaacagagattcctagttcatttaagtgtgagatgttatgatgaagttattggtttcttcgactattctattgaaagaaaggggagaatttaaaacatatatggaattgctttattttttgagactgtgtctatactagaatgagattgacttcatgagctccatataaaaatcaccttcagcttcctgctattgaatgcagcaccatcctgaacttgagacagcaccatcctgaacttgagacagcaccatcctgaacttgagacacggcaacttattgctgccgtgacattttgctgatcccaggctcccttgctccagctgctgactaggaatcctcctggagtagcctgatcctgtgggaccatgagtgaagagcccacctaacgctaaggatcgtctctgcctggaatgctagacagacagactctacgaccagactgggaacctttagatattagttcaagctt

SEQ ID NO: 196116 - DNA, 1000 bp, Homo Sapiens
cttggctggcggcggggattacagtgctggcggcggggattacagtgctgggattacaggcgtgtaatcccattacagggaggctgaggcaggagaatccagcttgaacccaggaggttcaagctgcttgaactcctgcttgaacccaggaggcagaggttgcagtgagtcaagatccgccactgcactccagcctgggcaacagagcaagcgagactccgtctcaaaaaaaaaatactttgggaggctgaggcgagcggatcacctgaggttaggagtttgagacctgcctgaccaacatggagaaaccctgcctctactaaaaatacaaaataagcctggcgtggtggcacatgcctgtaatcccagccactcaggaggctgaggcaggagaatcacttgaacccaggaggtggaggtttcggtgagccaacatcgcgccattgcactccagcctggcctgggcaacaagagcgaaactccgtctcaaaaaaaaacaacaacaaaaaaaaaaaacaaaaaaacacagttattcttgcctaagcctttctctcctgcctccaccttcccccgcctcgacctggcacgaccacttctcctggcagggccctgacactttgcccatgaacttctgtttcaaaaagaaagaaaagaaatgcaagaaggaaatcttgccagctgcgcatgccggaggggctgcgtcgtcgcgaccaggaagcaagcgaagcctacccagctggtttcctgcctgagtcaacggtggctgggggtgctgcagggggctggcagaagggagggaccctcagaaagctagggtggagatatccacgagctgggggtccttgtctccaccttcatctgagcccccagggtagccccatcttccacgggttgagagcacacgtggtttggggtcaggagctgtacatgcctagacagtgagctcacgctgggcgcgggcaggatcaatctggcttccatttccccaaagcccaagctt

SEQ ID NO: 196117 - DNA, 1000 bp, Homo Sapiens
tgtgagccaccacgcctggccacagttgttaatttcatttactattcactctgtattcaaatttccccaacatacttaaaatatgttcattgtttctcccccactaggacgaaaagtgtctgtcgtgtcccttgccatatcccacaccctatgacggtgactggtgcctgacactcaccagaagtacataaatgtttttatccttgtatggattcctaactcgtgaggttgttgggagcagaagctcaataaatgtgaaccccccccgccatactccctaaacatttgcaccatggctgtgtctgtcccccacttctgaatcctcattctgtacctctgtgtgaggtcagcgaggtgacgtcatttgcacagggccacacagcaaaatgcatggcagggtcccaattccaacctgaatttgttcaactccaaagtcacattgcctggtacatggcaggtgccctataataagaatcattccttttctctgttactgcttgccccagaaagcaggagggacataaacgtgtggcccagggccttcaggaggacaccctccttcctctcccccacgcgaagccctctcccaccatccattaacactccctgcccctcagtccacaggaaacgtgtggatgacacacgaggagatggagtcccttacggccacgaccaagcccgtgagtgccccctgccggccgccttgggggtggcactaaccttctttgggggtgggggcggggaccgagtctgtggccatccctaagtccgctccttgcgtcctcctctgcctgccccttaactcaccccttctctcccctcttcctactaacgggtcaggagaccaaggagatcagctgggagcaggtagggggcgcggggcggggcgtgagcgcatgaacaggctgtgcacgacgcatggatgcccctcctccgagccctgcccctgccttcaccagaacatgccatcatccccatgggggggcgctgcgccaagctt

SEQ ID NO: 196118 - DNA, 1000 bp, Homo Sapiens
ggactttcctttgtgtataacccaatgtttctctccggctgcccttaacattttttccttcatttcaaccttggtgaatctgacgattatgtgtcttggggttgctcttctcgagcagtatctttgttgtgttctctgtatttcctgaattttaatgttagcctgtcttgctatgttgggaaagttctcgtggataatatccttaagagtgttttccaacttggttccattctccctgtcacttttaggtacaccaatcaaacacaggtttggtattttcacatagtcccatatttcttggaggctttgtttcttccttttcattcttttttctctaattctgtcttcatgctttatgtcattaagttgatcttcaatctctgatatcctttcttccgcttgattgattcagctattgatggcttgcgtatgcttcatgaagttctcgtactgtgtttttcagctccatcaggtcattcatgttcttctctaaactgtttattccagttagcaattcatctaaccttttttccaggttcttagcttccttgcattgggttagaacatgctcctttagctcacaggagtttattacctttattatcttctgaagcctacttctgtcaacttgtcaaactcatcctccatccagttttgttcccttgctggcaaggtgttgtgatcctttggaggaggagaggcattctggtgtttggaattttcagccttttatgctcgtttttcctcacttcgtgtatttatctatctttggtctttgatgctggtgacctttggatggggttttcatgtggatgtcctttttgttgatgttgatgctattcctttctgtttgttagttttccttctaccagtcaggcccctccgctgcaggtctgctggtgtttgctggtggtccactccagtccctgtttgcctgggtatcaccactggaggctgcagaacagcaaagattcctgtctgtcccttcctctggaagctt

SEQ ID NO: 196119 - DNA, 1000 bp, Homo Sapiens
atttctactccatggtgaggaaacaggtccagcctgggggactaactcccactcccagggtctttggggctttaagaggcagagctgggattgcagatgtgggccattttctccagactcttaggttttgcaggtgaatcattcaacacctagggcatcccagaatccatgttgattggtgcctaataggcctgtaaccaatgatgagaaagtgagtggcgggaaggctggctaggtgagtgagtgaaccagtgagtgtgaaggagtcatttgtctatttcatggattctttctatttttcaagtagagttggatcactagagggcaatatcggccaagagaaagaagaattcttcaccaccgtttctaggactggtgaaggtaagacatctgtgtctgtggatttaaaccaaaaagggagactctaatttacagagcagttaaagtgagctttgctttcccctgggctttcaggctgatgagaacctttctcaagccccattaacacgtacagccactccagacctttctagacttaaaaccaacagggcaaacgggagaggagggaaatcttggttggcctgaaaagtggatgtttatagataataggaggttttagaaaaagacattttgtagcttctcagacttttacaacattgatgggagttaatgtttcgagaaatggtattatgatgaagttgtatgctgaattaattttccataaataagaccatacatttccacagattgctttgcctgctgtataatgagagtgtgtgctcttgctggatgagcattctctccccttcctccacctaccgcctcttctctccatgagccctagagtaaaagtgatctgggtatgtctccactggttgtaaggccttgagtaagtcacttaattcttctgaatctcagggtcatcaatggtgacattgcaagtttgtcctgaggtttaaacacagaacatgtgggtctccttggaactcctttcaagctt

SEQ ID NO: 196120 - DNA, 1000 bp, Homo Sapiens
attgaggattaagttcaacatgaattttggaggaaaacattcaaaccatagcaccatccttccaacccaacccatccttcatgttaacattttgtcctaattctccaatgagagaacagaaaccctgtcttgttcaccactgtatccctcagggcctcaaacaatgtctagtgggtggaagaaatgtaaatattacttgaataaatgtgagaaaaaaatttctgtaacttataaggccaattattggctctcatgggggagaaaaagatgctattcattcaacagctatttaatgaaggaagattgtgcaaaacctgtgacagtggtcctcaagcctcagcatgtgcatatgaattacctaggaaatttacacatgagacctaagaaactgcactgtgacaagcagtccataaaaggcgattttcttatggaatcaatactagcattctgcagtatgtgccataggtcctaatactataaacacttgctatggtctgaatgtgtccctccaaaattcatgttgaaataatccccattgtgttggtattaagaggtgcgtccttttgggatgtgattaagtcataagggttccaacctcatgaatggattagtgtcctaataaaagaggttgaagggagctgccctgcccctgctgccatgtagggacacaaatggtgccatctgtaaggaagaggccctcaccagacactaaaattgctggcaccttgatcttggacttctcagcctccagaattatgagcaataaatttctattatttataagttatccagtctaaggtattttgttatagcagctccaacacactaagatagaatttttgtatcataatgttattattgcaattctcttctgctgctacatttgtccttcaccttagccaagcctctcagaaccagttatttgcttcacatacctagtacatctcaaatgttagctaaaattccattcctgtgggtagttatatctacatttaagctt

SEQ ID NO: 196121 - DNA, 1000 bp, Homo Sapiens
atattaaaatgtaatgatagttctttaaaaagtaaaaaacacaaattctcatttgaaatccaagtaagcattggcactagaaagaggcagccagtcaatcacagttgagtcattttacagagggtggggaagtttggttaaccttgtttttagcagggaggcatcagtgtttcctcaaagtctgtcactccagtggttgaccaagtacaaaaaccagcttagaacaataaacaaaacaaaggacactcaggaaatttttaaagagaagctctaagtaacagaccagaaaaagatggagacacatcccacagagaacactgtttcttcccccatatttactgattgtcagctatagaagaggaattagggaatattaaatcaaaatccaccactttactgggagacattgtggttataactaagaacattagctttaaagataaacagacttggatgggtttaagttgtcactttgaaactcactcactgtgctctaagttaataatagtacctgcactgttgggctgctatgagcattaaataaatgagattataaagttatgacaacataggtaatgttcaataaatatttactatgagttccagggagagaaagaagatttcctgaagtcacatacttggcctggagcaggattaacatgaggccaccatcaacttcatattcatgccaatactctttcaactcattgaaacaatcaaactatggcccatgagtcaaactggcctgctgtctgtttttgtaaataaagttttattaaaacacagccatactcattcatatatgtactgtctatggttgctttagcaccaggacagcagagttgataagttacaatctgtagaaccaaacatatttactgaatggccctttacaaacaagttttctgacccttatgattagggcatgaggctatttctagacaaagcattccacatctagatcccttagggaaactgaatatgcttttaccataagctt

SEQ ID NO: 196122 - DNA, 1000 bp, Homo Sapiens
tttgagatagggtctcattctgtcacccaggctagagtacagtggcatgactgcagctcactgcaacctctgcctcccaggttcaagtgattctcaccctcagcctcctgagtagctggcattacagggacctgtcgccacacccagataatttttatatttttagtatagatggggtttcactatgttggccaggctggtcttgaactcctgacctcaggtgatctacccacctcccaaagtgttgggattacaagcgtgagccagcaagcccagcaccaactgatttttaaaattttttgtagagataggatctccctacgttgcccagtctcaaactcttgaactcctgagcctaaatgatcctctcaccctggcctcccaaagtgctatgattacaagtgtctgccactgcccctggctttgtttaatctttggtactcctgatttttttgtaagcgccaggagagcaaaggccatatctgcctagtcatcagtacatctccacctctagcacaatgcctagtacatattaggccctcaataatacttattaaatgaataaataattttccatagtctgcttatctctttttttcctttttcttttctttttttttttttggagacagagtcttgctctgtcacccaggctggagtacagtggtgcgatctcggctcactgcaacctccgcctcctgggttcaagcaattctcctgcctcagcctcttgagtagctgggattacagacgcccaccaccatgcccggctaatttttgtatttttagtagagacgcagtttcaccatattggacaggctggtctcaaactcctgacctcaggtgatccgcccgcctcagcctcccaaagtgctgggattacaggtgtgagctactgcacccagcctgcttatctctctcaatccagaaatccacatcaccaccaaagaggtctttctaactagttaatctgataaggtcctgctggtgctatgaattc

SEQ ID NO: 196123 - DNA, 1000 bp, Homo Sapiens
atgtcatgagtgtttcctcctcaacacccacatttcctaatgactgggtagctgtgataattcttgaaccgtgggtgctcgtagctcccaccaacagggaaacttttggtcctcctattccgtcagatgactgcatgattcccataggatgagaggtagtcagccatggctggcctttgccttctaatctaggctgtgtttcatttcctctgcacatcctttcttattgttgagtgatctcccatttctctattcctgactggaactgcctctcagcacggaaccattggctgttaggaatttcacagagcaaaagggactggcagttgactgggtgcaggccaggtggtgagtagtgatccggtgtggggtttggggtgttttgcactttgcacctcttggctcctctggctggaatccctgaacggggcttggactctagcacaggcccctcctgtggtcccagttgtgctttgcttgtccttccctttcttggggatcctcattgcccattgggagcatgcccggacatccttctgaggcttggattcaccccatatggcctttgagacacactctcaaccttatctgtccccatggattgccagttccaggtgtggccaccttggctccactttcagcttgcctttgtcctcgttcccgttgctactggacagcagtgctgaggagaagcaggagcttctggcagccagacaggcatgtttgctgaggcactagtttgcatgacgctactgggacccctcggaggatgattttggtagtagggccaaggccaaacaggttagtagccaggctctatgggacttgggttgtttccaagtctgaagcaagatgactgctgggtctacaacctagatatgggtcactgctttcaaaacaaccctcttaggtcttgggatccacaagggtttcataacctcctacatgaatcccaaggctcccagagagagacttttgccaatggataagtgcagaattc

SEQ ID NO: 196124 - DNA, 1000 bp, Homo Sapiens
gagagagagaaagaagaaagaaagagaaagaaagaaagaaagaaagaaagaaagaaagagaaagaaagaaagaaagaaagaaagaaagaaagaaagaaagaaagaaagaaagggagagaaagaaaagaaaagaaaagaaaagaaaagaaaagaaaagaaaagaaaagaaaagaaaggcttgggtggcattagcagagcagaaatggaaacaaggtctatatttacctgctggactgctccccgtctcctctgctggggcaggccacgtggaatttccttgtgctgcctggcttgacatctttatggtggtcactagcgttccatcagttgctgaaagaaaagggcaataggaaggtttagctatccattacttcagaatgtcagtttttgagctttctttacattgactgatctttctattttgcttcaactcagaggctctagagcccagtgagtgagctggacagctgcccaggtgacctcccatcaaacactagtctaacaggacatggtagaaagcagacaccaggcaccgtcaccagaaagactgacagatctcagatgggaaggggttcattttataagtaatcacaaattaaaatgtgacaagtggccaggcacagtggcttgcccctgtaatctcaacactttgggaggtcaaagtgggaggattgcctgagcccaggagtttgagaccagcctgggtaggatagtgagacaccatctctacaaaataatttttaaaactagctgggcatggtgatgtgcacctgtagtcccagctcctctggaggatgaagcaggagaattgcttgtgcccaagagttcagggttgcaatgagctatgatcactccactgtactccagcctggatgacagagtgagactgtctctttaaaaataaatgaaataaaatggagtaatattctgtttagagcatggattcttaacctctttttattataggtccctttgacaggcttgtgaaccatatgaattc

SEQ ID NO: 196125 - DNA, 1000 bp, Homo Sapiens
gaggtgtccctcagatttgtcatccatggagatcgggaccctagacgcttcctgacccatcgccccctgcccttacagatccagaaactcatcaaggagcccgccccagacagcggactgctgggcctcttccaaggccagaactccctcctccactgaactccaaccctgccttgagggaagaccaccctcctgtcacccggacctcagtggaagcccgttccccccatccctggatcccaagagtggtgcgatccaccaggagtgccgcccccttgtgggggggggcagggtgctgccttcccattggacagctgctcccggaaatgcaaatgagactcctggaaactgggtgggaattggctgagccaagatggaggcggggctcggccccgggccacttcacggggcgggaaggggaggggaagaagagtctcagactgtgggacacggactcgcagaataaacatatatgtggctgtggaccaaaccattcttgggttgggggggatcccgggggcgactgggggctgcaggagggagaaagcggggtccccagcaggtggggggggggaggtgcctcttctcggcgcgaggcaaaggcgagggctggcggctgacacatctgcacggacgcggcgcatctgctcggaggagaactgcggccggggtcgcccccagccggcgcgcgcacgcccagcccagctgccggcagacacgcgctccgccgccgcctccggccgccccccacgccgccacccccggctccccaagggtcccgcatccggaaagcgaggtgagcgagaccgcacccaggtgcggaagggaaactgaggcaaggggacatggagacgggaggaaggaagacacagccatgtggatgggtggatggatggatggaaggatggatggacggatggaaggaagggctgaaagcattgtagtcccggctcccccagacgcaggagttccgggacccacatgggggctcccagaattc

SEQ ID NO: 196126 - DNA, 1000 bp, Homo Sapiens
tagccgggcgtggtggcgggcgcttctagtcccagctactcgggaggctgaggcaggagaatggcgtgaacccgggaggcagggcttgcagtgagccgagattgtgccaccgcactccagcctgggcgacagagcaagactccgtctcaaaaaaaaaaaaaaaaaaaaaagtgacataaatgtaatcacagtatacaatccttttgggattgactttcttcgctccgtttgattccacactgttgcctagaatcaggtctgtttctccatggcggggtggcattccatttgtttaatggtggcatatacttactgtggaatgtccaaggacatgtagtttgttgctagtttggggaatattaccaataaaactgccacgaacaaacattagagtagacgtttcggtaagaacacaagttttcatttttctaggataagtgcccaagagtgcaattgtggagtcatatggtcattgcacggcaattccatggttcatttttataaggaactgacagtcttttcccaagcaggctgtatcgttttacatgcccaccagcgatgtatgagtgatccagttcctcctcgtcctccccagcactgggtgtggtcattattttctgttttagccattcagataggtgtgtagtactatctcagtgtggccttaatttgcatttctctaatggctgatgctgttgaacagcttttcatgtgcttatttgccatctgtatatgttcttcagtgaaatgtctgttcatttgttttgcccattttctaattggtttgtttttggctttatcgttgaattttgagggttctttatatattctagatatgtggatatttgtcagatatgtgctttgcagacattttctttcagtctgtagcttgtctataatttcctcacatgggctttcacagagaaaaaggtttttagacatctcatttgtcagtatttccttttatggattatacttttggtgtcaagtctgagaattc

SEQ ID NO: 196127 - DNA, 1000 bp, Homo Sapiens
caggggctcaagaacctatccatgttcctggtccaccgctgccactactggcattcaagctagcttcctggaagtccaagagttggcccacctggacccactaacactggtaccagtgtagaatgccctggtgctcaaggaagtcatgctttgcccactgctgccaacactgggacctgaggacaggtccatctggcttccccatccccagcaaaacttcatcacagcctccactaataactgcaccctaagccactcaggaaatcacagacaccactgatgctgtttatagctaaagaaatcatatggagactacactactatacacattcagaatcaatctaaatgctgtacccaaccaacaccacagatagatcttcaggaaaaagtcttcctctatgaaagcaaattcaaaagattggaagaagcgactgttacaccaaacaccaaacgtatagacatcactgtaagaacacaagaaacgtgaaaaagcaaggaaacgtgacatcaccaaagaaacacaataattcttgagcaacagattccagtaaaaaaaaaaatgtatgtaattttggaaaaataattcaaaataatgacattagctgagtgtggtggctcacacctctaattccaatactttgagggtcaaggcaggtgaggccaggcattcaagaccagcctgggcaacatggcgaaaccccatctctaacaaaaatgcaaaaaattagccaggcgtggtggcatgtgcttgtagtcctagcttcttgggggtctgaggtgggaggatcacctgggcccaagaggtcaaggctgcagtgagccatgattgtgccactgcactccagcctgggcaacagagtgagatcctgtctcaagaaatagtaatggtaatgatataaaagaagctcagtgagacaaaagagaacacgtaagaaccatacaaagaagtcagaaaaacaattcaaaaaggaaccaaacaaattctgaaactgaagaattc

SEQ ID NO: 196128 - DNA, 1000 bp, Homo Sapiens
ggcactccctagtgagatgaacctggtacatcagacggaaatgcagaaatcacccatcttctgcgtcgctcaggctgggagctgtagacaggagctgtacctattcagccatcttggctccaccccccataatctcatctactagacaagctgaggcaggaaaatggcttgaacccgggaggcagaggtttcagtgatccgagatcatcacattgtattccagcttgggtgacaagcatgaaacttcatctcaaaaaaaaaaaaaaagaattgattgaaaattgttataggctatgccacattcttcacaggtgtagggtttctatccagtatgaattatgtgtaataagggttgagaacttcctaaaagctttgtcacattctttatatttgtagtgtttgtgttccataaattctcatatttagtaaaagttgatagctggttaaagtctttcccacattcatcaaactcatagggtttctctccagtatgaattatcttatgtctagtaagggtagaggagtgtctaaggctttgccacattttcacatttgtagggattccctcccatatgaattatctcatgtctactaaggtttgaggatgaaataaaggctttgccacatttattgcacttgtgtggtttccctccagtatgaattttcttatgtctagtaagggtagaggagtacttaaagtctttgccacattcttcacatttgtagggtttatctgcagtatgaattctcttatgtgtagtaagaatagaggagcacttaaaggccttgccacattcttcacatttgtaaggcttctctccagtatgaattttcttgtgtttagtaaggttagaggagcggttaaaggctttgccacagtcttcacattcgtagggtttctctccagtgtgaattatcttatgtgtagtaagaatagaggaccgactgaaggctttgccacattcttcacatttgtagggtttctctccagtatgaattc

SEQ ID NO: 196129 - DNA, 1000 bp, Homo Sapiens
ggggctccatcagtggatacctacaaagtatgacatggtttttacctttcttcggaccctaagtggtcatttaattgctattacttttggcgtattgtgtttttaaccttttggtaaagtttgtgtctttcaggtttcaatagctccaagtcaagctaatgatggcccaagaattccaacccataacatcccaggagcaccccagtccctacaggtctttaggacagccagtgagagatttccccaccccctaaagttaggcagggacgacatccctgttcagcaggaagtcgcttcagaagatgagatcttcagccctttctccttaagaatagagggtgaaatctctcagggggaaatagagatagaacagaaatggaatggggttgcttcttcataatacttaaccatgccttctacttaaagttctaggaactggccttaggaaatctaactatgaaaccaaggttatggagtatcccacctcaggaaggaacactgaacaactgattgacagtcttcttgccgccagccagaccaccaagtggcccattaaccaagagaaccagcgcaaccagatacgctgacccgcatctcctacctctcatgtgctttgcccagcccagcctgcataccttactcatgatgtcaattcccaagtttcgctaataaaaacatctctgcaagcctcttcagggagccaacaagacagtccttgtgcctctgctgtctccctagtacttgagtacaagccccaaaaacaaaaaccttgtctgggagatttggttggcctcgtgttaattgtaattacatggggagccatagagcctgtgatctgtaataaggaaatgtatattgcattttgcagactgtagaacatgctggaatgagtgccagggcaaaaaaaaagttggtggggggcagtgaacggaaggcaacaccctaaagtgaagtctctggcattcagatctgccatctcttgagagctggatctgaattc

SEQ ID NO: 196130 - DNA, 1000 bp, Homo Sapiens
ttcaaacctctgcagtggtttctcctcttatttagacttttttttttttgagacagggtcttgctctgtcattcagatcgaagtacagtggtgcaatcactcagcctcaacctgctaggctcaagagatcctcccacctcagcctcctgagtagctgggaccacaggtgcgtgccaccatgcctagctaactttttaaacattttttgtagaggggggtctcactatgttgcccaggctggtcttgaactcctggtctcaagcaatccttccaccttggcctctcaaagtgctgggattacaggtgtgagccatgatgtccggcatgcttcccctcttatttagactcagatcaaaactgcatcatctgaccaatgaatatttgtctcaaattatctcccactttttccccatcacctactcattccagcaacactgacttctttgctgtgccgtttcgtctgtctgtctgtctgtctttatctctttttagagacagggtctctctctgtcacccaggctggtgtgcagtggcatgatcatagttcactgcaacctcaaactcctggattcaagtgatccttcagccttggcctcctaaagtgctggtattactggtgtgagccaccacgcctggcctacttgctgtttcttaaactctccaacctcaatacctttgcacttgctgttccctctacatagaatgcttttcccaaatatccacaaggttcccttcctcatttccttcatgcgctcaaataccacctcctccaagaggtcctccaggctcacctcaagatagcacactgtccctttattttcttacgtgttttatttcccatgatctgacatggttctctctcttttttttttccttccttccttctttccttcctccctccctcccttcctcccttccttccttctctttctttcattctaaaaacaaataatcatagaaacgggggtcttgctttattgagcaggctgcttttgaattc

SEQ ID NO: 196131 - DNA, 1000 bp, Homo Sapiens
ccctctggaatctctcttgccccctcatcagcctcataccccatacataagccttccccaaatgtcagccaatatagtcaataaaactcccatatcaatatgccaagaaggagcacttgccattggctgggcagtatctgaagcccttcacagatagatcattaaattgtcttctcataaccagcctctggggcagggataagtaccagttctactttatctatgtatttattcatattttttgagacagaatctcactctcttgcccaggctggagtgcagtggcacaattatagctcactgcagcctcaaactcctgagctcaaaggatcttccaacttcagcttcccaagtacctaggactacaggtgcttgccaccatggccaactaattaaaaaaatctttttttttggtagagatgggggtctcactatctttcccacgctggtcttgaactcctagacttaagcaggcctcccacctcagcctcccaaagtgttgggattacaggcatgagttgccacacccagccctagtttcactttataggtgaggaaacagaggcacagaaaggttaagtaacttgtccaaggtcacacagtgagtatcattcttcaacaatacccaagagaatactcgggtaactgcagtggtaataccctccactccacagcaccgaaataccttgagcacatatatccatctgctcggaatccaccctgagctcggccctgcagcacctggagtttatcccagggtgtggcagtaacaccatgacaatgaggaacacttatcgaattattactgaatgccagccatgattccaagcactttgcatttatatatttccatttatgtattcagttagtcctcacaacaacccagggaagggttgactgttattcttcccattttataaatggggaaaccgaggcacagagaaataacttgctcaagatgacaccagctagaaaaatgtcaaagccaagatttgaattc

SEQ ID NO: 196132 - DNA, 1000 bp, Homo Sapiens
ttcccgcggcccggcctgccttcagctacaaacaatgctgcctcgccgactctcactctgctctccacagaaggcagcggcatttgctctgcggtggaagccggcagccatctgaggatgttagctggtcagagacaaaagcagacctcgccacagtgacgcaggtgcctatgcccaaagaccactcccggagcaagcttcctcacaggggccacagagggaacagcgctgcccgggaggctggagaccaggtccagtgaccaggcctgcccagggtcagtgcctcaaaccacccgggcagcagccgaaggagctcctcagccccttctcagaggcctgcacggcaaagagggcccccgacaccctgccaatcacaaggagcgtgggagggaggcaccagagaggctggggaagcctcgatcctggggacacttagtggggcagagctgggaaaaacacacaacacacaacacacaacacaccctcatcacaaacaccctacacaacacacacacctgcacacaacacggcacactcacacccaccacaccccatcacaaacaccctacacattatttactcacacacccacacacccacatacaccctcatcacaaacaccctacacactacacacacccacacacaacacagcatactcacacccaccacaccccatcacaaacaccctacacactacttacacacccacacataccctcatcacaaacaccctacacactacacacacacccaatacaccacactcacacccacaccccatcacaaacaccttacacatcactcacacaccctcatcataccctacacactacacacacaacacagcacactcccacccaccacacccccatcgcaaacaccttacacacccctcagacacccacacacaccctcattacaccctacacacacatccacacacaacacagcacattcacacccaccacaccctacacaacactcacacacccacaca

SEQ ID NO: 196133 - DNA, 1000 bp, Homo Sapiens
tcattcggtaattccccgtatagttactaatcactaaatgtgtgccaagtacggggctcctcacttcgtacaattacggtatattgtagacacaaagagtgtcttcatggtgggaactggaggagaaacaatgaaaaagtggagaaatagaaataaatgacatcaatgataaattttatgaaagaaaatgttaaaactaaaccatgaaaactaatacagaagcctacttgcctacggtggtaaggaaagaaatcttggagctggtgatatttgcactcaacagtgatatgaggtgtggggagagggatggaagttgagatagagagaagagcacgtgcaaaagtcctggggtgagggaaatgtgaaggatccatttcttttgctgtaaataagacaacatactgtcctgagtgtatgtgggtatttataaagtaataatatttatctaaaacttggagtgaagtatctgaatgaacgtatgcttcgagtaagggttataaaccattgtgtctatttatgtacagatgagaataccacatattccagccctgccgtgaaggaaaggtggaatcagagatgaggaatcttcagctcagataggagacacacagaaaggtttgcatgtggaagtgccagcctgtcaacctctccagaggctccagaagtgaggccagaattttgatgataggagatagactttggaggtcatcacccacatcccctgtcatggtcactgtcattgtccctattccaggcagtcagaaggaaaaatgaaggatgaacataatgcgttgggttcaatgggccagggctggaagcagccacctctcctgggcaaagcctcaatttcacagatcttctcaggtgagaattgaatcactgcaaatgaaaagcttgcccttgggttgtgtcgacaggtttgaagcaggcagggaaatctattcatggcagagatataaacgctccctttattctatgggtggatgtggatcaagaattc

SEQ ID NO: 196134 - DNA, 1000 bp, Homo Sapiens
gtgagggcccattcaaactccgtagctttcaccgtggagctacatactggaaattcaagtgcaagcccttgaactccacattcacgcactcattcacacagagtttataacagttttcttattccctttccaaaacagaggtctccgggagacctgaacgagagaaggagaagagatagagaaagagggagggagggagagagagagagagaaagagagagagagatagagactagtcttaacagagaggcctaacagaaaaccaggactctgtcctccagtgtcctggaacatgggcagagtcaagggagggccatcgtcagggctgcttccctcccagagagacacagaggtgcctaacagaaaaccaggactctgtcctccagcgtcctggaatgtgggcagagtcaaaaagggagggccttgtcagagccgtttccctcccagagaaacagagtcagatctgacttactttcccaggaccagaaactgaggactcaggagttgaatttttgtgggcacacaccagtggtcgatccattcccgtctggaagatagggtcttatggggccctggaacgtcttctggtggtgcctcccctataagtctgctgtctgtccaggggagcctggaatgagtctggctctcacccggtgacaaaaaaatcttgctggggcctccaaatgttgtaactgagctaggtacagagaaatgccacactctgagacgaattcaggagtcctttattagctggtgaccgagagacggctagtgctcaaaattctctcagccccgaagaaggggccagattttcttttatactttggtttagaaaggggagggaggcagtctagtgaaaacaaccttacagaagtaaagcaggcaaaaaagttaaaagaataaatggttataggaaagcaaacagtttcaggtgcagggctttaaatctttcacaaggtgatagacgcggggctttgggtgttatcaaccagatgaattc

SEQ ID NO: 196135 - DNA, 1000 bp, Homo Sapiens
tgtaggttggatttctaaatatggaactacaagatcagccaatgttgtaaactaaaaatctggtagtgacaaattgccatctcaaatcctttaaggccaggcacagtggctcacacctgtaatcccagcactttgggaggctgaggtgggaggttgtttgagaccctgtctctataaagaaaataaaataggacaggcacggtggctcatggctgtaatcccagcactttgggaggccaaggcaggcagatcatttgaagtcgggagtttgagaccagcctggccaaaatggtgaaaccccatctctactaaaaatacaaaaattagctgggcatggtgggtgcctgtaatcccagctacttgggaggctgaggcaggagaattgcttaaacccaggagatggaggttgcagtgagcagagatcatgccactgcgtgacagagtgagactccatctcaaaaaaaaaaaaaaaatatatatatatatatatatatatatgtaaaaaatagatgtgtgtgtgtgtgtgtgtatatatatatgtatatgtatatatatatatatatatatatatatataaatctttaaaaataggccaggcaccaggggctcatgcctataatcccagcaatttgggagtccaaggcagtaggattgcttgaggctaggagtttgaggttatagtaagctgtgatcatgccactgcactctaacctggttgacagtgagaccctgtctcaaaaaaaaaaaattaaaaatccttcagcctacgtagagttggctgaagtaaatgacaactctttttcttctttatcaacagcaatttgtaatggtctttttaaggtttgcagatctgatgggataaatacaatatgttcaatttagttcacattttccgcacaacggaccaagttggacatattttataaatctatggcctgtttgtattttttcttttgtgagttcatatattttctcatttttttcttgtttgtgggaattc

SEQ ID NO: 196136 - DNA, 1000 bp, Homo Sapiens
gtctctatctcatttgcaatctctctttttttctctctctctgtcatcccctgtttcttctctgttgggagcaggcccctcaaaatgtggccataaactggccctaaaactggccataaacaaaacctctgcagcactgtaacatgttcataatggccctaatgcccacgctggaaggttgtgggtttaccggaatgaggacaaggaacacctggcctgctcagggcggaaaatggcttaaaggcattcttaagccacaaacaatagcatgagcgatctgtgccttaaggacatgcttctgctgcagttaactagcccaacctattcctttaattcagcccatctcttcatttcccataagggatacttttagttaatttaacatgtatagagataatgctaatgactggtttgctgttaataaatacgtgggtaaatctctgtttggggctctcagctctgaaggctgtgagacccctgatttcccacttcacacctctatatttctgtgtgtgtgtctttaattcctctagcaccactgggttagggtctccctgactgggctggtttcggcaagtggtgtccatcgtgggggtttgaatccaggttgaagtgtcaccagagcgatggttggaatggaaaactagctggaggacacccgagcactcttaaagcaatccccatggtgagtaagaaggggagcttggaagcatcagggtaacaatgggacaggtgtggggtctggttcgtttcaccttggagctttttcacgctgatgatgatgaggaactagagtataacaaagtaacagaagaggttacagagcaggtttatttgccagctaaagctaaagcagcaaaggagggagaggttcatctctacccttctgcaccccgtcattattattttgaagaaaaagaccctccagatctttcttttccggaggacactgggtgaaaagtagttgccccagtgactgtttgagctcaggcaggaattc

SEQ ID NO: 196137 - DNA, 1000 bp, Homo Sapiens
catacgtcagtgttttcttctatgcacttctaagatcaaagactttaagactttcactatttcttctaccgctatctactatgaacttcaaagaggaaccaggagtatgggaggagaatgaaagtgaaggaggagtgtaagcattgaagcacagcaccacagggaggggtttaggcctcgggatgactgcgggcaggcctggataatatccagccttccacaagaagctggtggagcagagtgttccctgactcctccaaggaaaggagactccctttcgtggtctgctaagtaacgggtgccttcccagacactggcgttaccgcttgaccaaggacccctcaagcggccctgatgcgcgcgtgacagagggctcacctcttgccttctaggtcacttctcaccatgtcccttcagcacctgaccctatacctgccggttattcctagcttacattagtaatgcagcaaagagtaatattaaaagctaatgattaataatgtttataataatgattgataattgtccatgatcatctctacatctaatttgtattatgactattcttattctaactattttgtttattatactgaaacagtttgtgccttcagtctcttgcctgggcacctaggtaatcctccgcctacatatttcccggacctcaggagaatcacaaatacacaaataaatataagccctacaaaattcccagatcaggcccggcgggtggctcacgtctgtaatcccagcactttgggaggctgaggcgggtggatcacgaggttaggagatcgagaccatcctggccaacatggtgaaaccccgtctttactaaaaatacaaaaattagccgggcgtggtggagggcgcctgtagttccagctactcatgaggctgaggcaggagaatcgcttgaacctgggaggcggaggttgtagtgagccgagatcgcgccacactgcactccagcctgggagacagagcgggactccgtctg

SEQ ID NO: 196138 - DNA, 1000 bp, Homo Sapiens
caattataatcatttgtgtttatgtaatcaaactgtgaaacaccggttgggaacttgcttgtgtacacttgatggcgtaaatggtaggggaagagcatacatacaaaagtggcctcttttgctttcttggcagcatgatgttatattcctttggatgtaccgtcatctatgaccagtctcatcttgaaaggcatgcttattttccatttttcccagtgcttggaatttgtttccaaaattgtttctaggaacatgactaatgtgactgacgatgccttaggaattcctagtggggacaaggtgcttggctgggatgcatacctaagaatatctcacaaagaaacctgattttgtttcactattgcctaatggcgcacatagtaggtgctcaataaataaatattttttgcatgagtggtttttgcttgtctggtcatttgccctattgtagagggagagtagtgtgcccactggagtccccacagggtccttttgcctgcatgcctacccctgtggcacccatcaggcttttgattccaatgttgccctgggctctcactcacaggtagatgttttttattgccccattcacaattcagccacctgctgtccgcatgcatgtgcttgccatgtttagatattgggtgtttttccagtttacttaataagttagtggccagactgtacgcttcctgctgcatttttccactgtcttgagagttggcctcgccatctgtgagcaaaaggtctcttctttttattattctcccatggcatgttgcaaaacagtaagcgtgagctggtttcctgtggcaaaaaaatgactttgatttgttctttttgaggttactgtgagtttatcataacaggagtgctaaaaataccgagtctggtatggaaacagcattcacttaccagcatgaacaataacatacaggtttagcctagagcaggaagaaatggacttcatctcaagatgagaatacttatcagagaattc

SEQ ID NO: 196139 - DNA, 1000 bp, Homo Sapiens
tcattgtatttgcttctgttcccccaaacctgtgtcaccacctgatcattgaggacacagaaaatttattttatttatttttttgagatggagtctcacttttttttttgagatggagtcacccaggctggagtgcagtggcatgatctcagctcactgcaacctccacctcccacgtcaagcgattctcctggtcagcctccagagtagctgagattacaggcatgcctcaccaaaccttgctaatttttttgcatttttagtagagacagggtttcaccatgttggccaggctggtctcgaactcctgacctcaaatgatccacccgcctcagcctcccaatgtgctgggattacaggcatgaaccaccgcgcccagccaacacagaatattttaagctgaccatcaacctgctgtaaacattggagatctcagcacaaccctaaaacatccacaccccagggagagtatacagatattaacgtgccctcactacaaggagctccactgactccctttctggaaaatgactcaaatcggttttctggaggactatatgcaattaatagatataaaaataacatgttgtttgcttttatttacatgatttaccatttctgtttgtttttgagacagggtcttagtctgtcacccatgctggggtgcggtggcttaatcttggctcactgcaacctccacctcctgggctcaagcaatcctcccaccccaaccccttgagtagctgggactacaggtgtgcaccaacatgtttggctaatatttaaatttttggtagagatgaggtcccactatattgcccaggctggtctcaaactcctgaaatcaagcagttcttctgattcagcctccctaagtgctgggattacaggcgtgagccactgtgcctggctgatttaactttcataggttgttaagaaagcgattaaccctgtgaaccatggttggatttcactgattctcaaaacttgtagtgaattc

SEQ ID NO: 196140 - DNA, 1000 bp, Homo Sapiens
atttcccttttttttttttctattctctcattctagaatgccttgtagctggatattgaagctttttgcttatctcatacattatttaatttacatcctttccagcacttttctttttaggctgaattctgtgaaacattccttggcttagtctttgagatctttcttctttttgaatttgagtagttactgctatgagttgccttcttttcactactttcactgtatctgtccattcaggctgctataacaaaataccatagactggtggttaataaacaacataaatttatttctccgagttctggagattaggtcaaagctcaaggtacagtcagattcagtgtcagatgagggcccttttcctggttcacagagagccatcttcttgaagtaaccaaatacagtagaagtggcatgaaatatctttggggtgtcttccatgaggggggtaatcccattctgcagagccctcatgacttcatcatgtcccaaaattcccagctcctaatacaatcactttgggagttaagatgtcaacatacgcaagttgaggagacaaaatttatttatttatttatttatttatttatttatttatttatttatttttgacatggagtctcactctgtcacccaggctggaatgcagtggtgtgatcttggctcactgcaagctctgcctcccaggttcacaccattctcctgcctcagcctcctggataactgggactacaggcacccagcaccacactgggctgattttttttttttttttaagtagagacagggtttcaccaccttagccaggatggtctcaatctcctgaccttgtgatccacccaccttggcctcccaaagtgctgggattacaggtgtgagccaccgtgcccagcctaggagacaaaatttagactacagcaacatctcataaattttggtatgccatgtctttgttttcatttgtctcaagatgttttctaatttaccttgtgaattc

SEQ ID NO: 196141 - DNA, 1000 bp, Homo Sapiens
tcatcatcccaaagaaagtgataatttaaatatagtgacagtccccagccagccaaccttcaagacagtccccagccctctgccacctgtcccaatagaccttggcactaagtccctcatccagggacccaggaatcctcagcaagggtgggagaggctccccaccagatggtgctgaggtcctgctgtgggtggtacctggcgggacaggaggccgtggtaccaaggttggccagcaaggtcttctccatcctgtggcacctgcatggagctcttgggaacagagggtgccagggctgagctctgcactttcaacaggcctcagtcttccacatctgtaaaaggggaataattagccctgcttgagtgtctgggtcagctcctttcatcctcttcttaattttggagacagctccatcaaatctttttttttttttttttttttttttgagacagagtctcattctatcacccaggctggagtgcaatggtgcgatcttggctcactgcaacctctgcctcccagattcaagcgattctcctgcctcagcctcccaagtagctgggattacaggcatgcaccaccacacccagctaatgttttttctttttttatatttgtagtagagacagggtttcactgtgttcgccaggctggtcttgaactcctgacctcaggtgatccacctgcctcagcctcccaaagtgctgggattacaggcataagccactgcacgcagacttttttttttacatttaaagagagaggtcttatgtgttgcccaggctggagtgcagtgctattcacaggtgtgatcatagcacactttagccttgaattcctgggctcaaggaatcctctagcctcagcctcccaagtagttgggattacagatgtcaccatcgtgcctgttccaaatataatgcaatcgaagaaaaaaaaaatggctgaagatgacaacatgccaccccatcttgcagaaatgtaattaatgaattc

SEQ ID NO: 196142 - DNA, 1000 bp, Homo Sapiens
agcccagtgtggtagtgcccacttatggtcccagctactcggaaagctgaggtgggaggatcacttgagcctgggaggttgaggttgcagtgagccaggaccatgccactgcactccagcctgggtgagagggagaccttgtttcaaaaataaaatgaggctgggcatggtggctcacgattgtaatcccagcagtttgggaggccgaggtgggcggatcacctgaagtcaggagaccaagaccagcctagacaaggcgaaaccccgtctccactaaaaatacaaaaattagcagagtgtggtggcatatgcctgtaatcccagctacctgagaggctgaggcaggagaatcacttgaacctgggagacggaggttgcagtgagctgagactgagccactgcactccagcctgggcgacagagtgagaatctatctcaaaaaaaagaaaaaaaaaaataggccagccgtggtggctcacacctgtaatcccagcactttgggaggccgaggtgggtggatcacaaggtcagaagattgagaccattctggccaacatggtgacaccccgtctctactaaaaatatgaaaattagccaggcgtggtggtgtgcacttgtagtcccagctactcaggaggctgagggcaaaagaatcgcttgaacccgggaggcggaggttgcagtgagccgagccgagatcatgccactgcactccagcctgggtgacagagtgagactcagtctccaaaaaaaaaaaaaaaaaaaggtggttaaaaatggctgctctggggactggagggagttgggaggatgagacaccatcctgcaaatcaggcctggatgagatggggctgcagggctttctgacaggcacatctgacctcattctgcccctgctcacacagcctctgtggctccctattgccatcaggggagagtcccagctcccctgctccactggattgagtagtgtctggcaagaattcatgtctgagaattc

SEQ ID NO: 196143 - DNA, 1000 bp, Homo Sapiens
cctgtaatcacggcactttgggagggtgatgcgggatcatgatttgattctgggaatccaaggctgcagtgagctatgatcataccactgcattccagtctgggacaacagagtgaaaccctgtctcaaaacaacagcaacaagaatcagatgctggagtgcagtggtgtgtgcctgtaatctcagctactgggggaaggctgaagtgggaggatcgcaggagcccaggtggtcgagaccagcctgggcaacacagtgagaccccatcttcaaaaaaagaaaaggaaattcagagatggaaagcactagggccattcaagagattgctaaatgcttttgtgtcatcattgagcaataaaagggcccttgagacccggttgcagccttgagaattttttccagccatgctcagcttcccaagacaggcacagaagggagaatagattctgcagaaggttctgctggccattcttgctgtctctctctctctctctctgtgtgtgtgtgtgtgtgtgtgtgtgtgtgtcacagtcttgttctgttgtccagactggagtgcagtggcacaacctcggctcactgcaacctccacctcccgggctcaagcgattctcctgcctcagcctcccgagtagctgggactatagtcgtgcgtatcatgtccagctaatttttgtatttttagtagagatggggtttcaccacgttggccaggctggtcttgaactccttacttcaagtgatctgcccacctcagcttcccaaagccctgggattacaggcgtgagccaccgtgcccggctgctagtcttgctttgattcctggctctactggggattcccgatgccccattcttccgttgggtaggtattctgtgcccgcagttcgctcatcacagcttagatcactctgtgcagtgcttgtcaaccaaatctgctgagaccgaccctctcccaccttcctggctcctgctgcaacgcccattccacctctgaattc

SEQ ID NO: 196144 - DNA, 1000 bp, Homo Sapiens
gagccccatagggacatcatttgtgagagccaaggtcttggttaatcccctttgaagatgaagaaaactgacacctggagaaggcagcacagaaggccaaggagagccagattcttcctgtcctcctcctcctccctctcctgtcctgccctagagtggggaggggctgtgggagaggcccctacagacccccagggacaacatcttggctctcagtcccacctccctcccagatctggcagccccaggctgtgtccacagccaaaagccaggcgtggggaccccagaccctcagaacctgcccctgaccttggacaaggagcccagccaagagcgtgaaggagaggagttgcagcaccaggggaccatggccaagacaccctgagagaggatacatgcgtcagcctgccagtgtccccaccggagcctggcccagggagagcctggtctaaatccctcagcaccccaggacccaggaaccccagccccagccccctccactccaacacctgggaatccaggccctagctctaacctccccaggacccagggaccccgtccccagcctccccttccccaggtcccaggaaccaggtacctgcttccacctccccaggacccaggaatccaggccccagcctctacattcccaggtccctggaacccaggcccccagctcccacctccccaggacccagggacccaggacccagcctccccttccccaggtcccagtaacccaggtacctgctcccacctccccaagacccaagaatctgggtcccagcccctacatccccaggtcccaggaacccaggcccaagtccccacctccccatgacccaggagtccaggcccaggcccccacctctccaggacccaggagtctaggcccctgaccccacctccccaggacccaggaacccaggcttcaacttctacctccccagaacccaggagtcttggccccagcctccaccttcccaggaaccaggaattc

SEQ ID NO: 196145 - DNA, 1000 bp, Homo Sapiens
tctgcagagtgcctcggtcacctctcccttggtctctgttgcctgaagagctgtgaaaaagaaagcagctcccaaggacgtttcccgctcagagcctggcagctggaggcactgacacacgcggccagggctagttcaagtccctctttgctgcgggaccttctcaggcctctccctggtctgaacacagggcattcacctgcagctagcaagccctgccctgtgcggttattttacttgccatgaggatgcagtacaccgtctactattcgtcggacctttcctctaaaagctaagtttgttaatcatcacttaacatctgtgttcctcacagttctactgagtagcatctcaagccacctgtgattcttccactctccaaagttctgcattagaatattccacgactgaactcttgggcataaagtggtcacaaaggcttcttggtaaaatggggctcaaatgtagctcctcaggcacaggtccaagatggatgctagggttcagtcagtttaagcagcaggtagaaagtgtgcctaatgcttctgctctagagggagaagacaagacaggaaacatccccaagaagcttgcgtgctgcacaggaagataaagctcatacctccacagaacgagtgtcccaggcagatgggaaccgaatcacctgctgaggagactgctcactatgactgctgtgcgagagtaagacacagtccttcactttacccacaatgcagtgagagtaagctggaacaatcatgcacacactgcgcttcggagagattttcaacaccctgggctgaaagggtgcacgacgaaaagaaaagctccaactgctctgaaaaactgttagtagccttttcaaaaggagagtagaggatttactttattactgaattggcagaaattattaactctgagcctgctgctataggaattcaaatgcatactccaggggctaaaagtgagagcacagaaactactttcctcctaagaattc

SEQ ID NO: 196146 - DNA, 1000 bp, Homo Sapiens
gaacaaggaagaaagtgaaattatagtgcagtataaggctcaactgtgaacaatatttacataggagtcataatagaaactttcaatgttgaactaccaattgtgctataactatattggaatgatgagggaagagtgagtgagtgtgtgtgtgtgtgtgtttgtgtgtgtgtattttagagagagagaggtgggcagtggtggggaggggtgttgggaatattgtaggtagtctaaatccttactctccatagtgagaagtcagtagacaatagtcaaaactataaaccccagaactagtagtgttaagttgaaccatctaaaattgttgatattaaccccctttcgcctacgaaaatggtagcttctgatgattcctgttatttagaaacacggatgtcaataatagaagcgctatcttgaagagtcaaactgggtatctgtgggtaacaagttggaagtggagtggaaagtttttgccataagctttgaagaactatttggcattttaaacaatatattaatttaataaaattaaagttaataaaaaatgagtaagtgtcttacttccaaattacctaagtgaaaagacccaatgttactaggagaaatgattactagcagtaattgatctaattgtgaccactttttctcctttaagatttgtaccttttaaaaaatgactattaggagagcttaatctggaagacaaaaatagtctgttctaatagcctgtttagaactttaattgaaaatgtggttgcgtcttcctccaattaagctaattgaagtggaattctgattgggccctgtgagagaggagttccccagccgaggctcatagaataacagctgactctaaaaagagaaaaatagaagcaaatgcttaggaagactggtgaatcaattctagagggatttcaatctacttattgactgatatatgcagggaaagtagccagaaaagttctgaaaaaacatgtggggttgtgggaagctt

SEQ ID NO: 196147 - DNA, 1000 bp, Homo Sapiens
gagaatggcgtgaacccgggaggcggagcttgcagtgagtagagatcgcgccactgcactccagcctgggtgacagaacaagactctgtctccaaaaaaaaacaaaaacaaaaacaaatagttgatactacaaattgaagaaggagagttggtgtctgcaaattttagaaaggaactgaaattttagtattgtactgcaagctctccagaggtaggccagggtcacagggtggagggtttgagatctcacttcccatatatttggaaaatgcagagaagtaccagttaactggggagtgttgaaaattttgaataagaagtaattaaacttaatgcctatagtactctaagatcttggccaagaacatggaaatcaaattcaaatgctattcatataaagtactaacttatgtgacggtatgtggcctgagaaaacaataacaagttactaatttattgggaaatgaaatatgggcttaaccaggtacaattggtcgagtaacctctgattatacaaccaaaaattttccactgtatggtctgtgaaaataagtaattcaaaaattgaagctgttggaactctaaattatcttgaagtttaaagtaatgtgactctggaattgagtcacctgacactggaaagagccagctggaaccctcccacacttgactacagattaaccatcagacaggcttcactatacctggacaggcctcattatacccgcttcctttaggagtttccacatagccactgacccaccttcatgttaaaacagacatcagccaactggaaacacagactctctgtgacaataagaaaccaaattacaaacaagacctaaggccatgcaaggcaagaggtaagtcaaatcttagaattcacaaaatctaaagaaacaggtcttttgttttgggtgggatgaaatcatatgacagataccagaccctcttcacttaagcaatccttcctaccgcctcgaagttttagacaaagctt

SEQ ID NO: 196148 - DNA, 1000 bp, Homo Sapiens
tgaacctgggaggcagagattgcagtgagcagagatagggccactgcactccagcctgggtgacagagcgagactccatctcaaaaaaaaaaaagaatgatgaccatatgtctaatcacacactgaatatctgcactgtttctcagatccttcaaatgaacatggctggaactcaactcgatttctcttaaatctatcattctttagtcttccattctcatcaaatggtagctttgtccatccagttccttaatgtggaaacccaggaatcactcttaatccctgctccccatttatccattgtatttattcagttaataatatttcactgaagatctaccacttgccaggcaacacaacaatattttcagacacctaggaatataataataaacaaaacaccccctgccctcatgaaatttatattccacctattccattattaagtcttattgaacccatttcctaaatatatctataattcatccatttatttctacatccactgcctcccctttaatccaagccagctcttcttccatttcttaccaggaatattgccatagtctcctatcttatcttcctatttctatttataaccctcataaatcaattctccatatagcagccagagtaagcttaataattcaaatatcttgtcactgccttgtttaaaatattttaatagctcctaagtacaagggtatttagaacaaaatccagaattttaagtgtgatttacaaggctctccctgccttattagtttcatctatttattttctgtttctagcctccctagcccttttaaattgcttgagtcacaccttttattttttaaaaagatctttacacatgctatttcctctgcctgacaatttcttttttactttccttgttacctagataacttctactcatcctattaatctattcatctctctaaatatcactttccgaaaaaaagaaagccttccttgaccttcagattaggcgaagctt

SEQ ID NO: 196149 - DNA, 1000 bp, Homo Sapiens
ctgggtgggatgcagtggcacaatcacagctcactgcatcctcaagggatccatcctgggctcaagggatcctcctgtctcagcctctcaagtagctggaactataggtgcgagccatcatgcttggctaattaaaaaaatttttttttgtagagacagggtttcaccatcttctccaggctggtcttgaacccctgggctcaagtgatcctcttgccttggcctcccaaaatgctgagattacaggagtgagtcactgtgcttggccagtttcccattcttgtagaaaatttctaaaaaaatatttcccttacagcttcaaagttaaaattgtccacactaagcagaacatgttattatttgctattagtcaatggcctaacttgccatttcaaaagtaatttatcctcctcagagatttggggaatggggatcaggagaatttaatccaaaaaaatctccaggttgttgtcaacatagaaacattgtttcaaatttagataagaatgaactggcctgagatgtaggatgtgtgttaattactatctttgactttgcatgatgctgtccttgaaatacagtcagaaagaagttcaatcactgggaggtgccctggcttatattgttcactgttcatttcaactgaattttagactattagtaatgttttgtctcttaccagtgccttgtctgcaggagtggtgagccggctgtagtaatgaattctcttgttcatggcagaggcatggtcactaaccctctgaatgacatgattcacattcacgatgtttgtgggctctatacagaaaggcctacaaagggaatatacacttgacaaaaagtgttcagccaaaaattctggaagtcagcctttgaagaaaataacttcttatcctccattagtaatgggatgcacaaaggcaaggcattgacttctcacttttggtgcaaacagaaaatgttacaaaagaagtattatcctatccacagaataaagctt

SEQ ID NO: 196150 - DNA, 1000 bp, Homo Sapiens
tgatgggctttcctttgtgggtaacctaacctttctctctggttgcccttaacatttttttcttcatttcaacattggtgaatgtgacgattatgtgtcttagggttgctcttctcaaggagtatctttgtggtgttctctgaatttcctgaatttgaatgttggcctgacttgctaggttgtggaagttctcttggataatatcctgaagagtgttttccaacttttggttccattctccccatcacttttaggtacaccagtcaaatgtaggtttgttcttttcgcatagtctcatatttcttggaggctttgtttcctttccttcttttttctctaatcttgtcttcatgctttatttcagtaagttgatcttcaatctctgatatcctttctttggtttgatctatttggctattgatacttgcatatgcttcacaaagttcccatgctgtgtttttcagctccatcaggtcatttatgttcttctttaaactggttattccagttagcaattcatctaaccttttttcaacgttcttggcttccttgcattgggttagaacatgctcctttagctcagaggagtttgttattacccaccttctaaagcctacttctatcaattcgtcaaactcattctccatccagttttgttcccttgctgttgaggagttctgttcctttggaggagaagaggcattctggtttttggaattttcagcctttgtgcattgatttttttctcatcttcatggatttatctaccttgggtctttgatgttggtaagcttcgaatggagtttttgtgtggacatccttttggttgatgtcattgctgttcctttctgtttgttagttttgcttctaacagtcaggcccctcttctgcaggtctgctggagtttgctggaggcccactccagaccctgtttacctatatcaccagcggaggctgcagaacagcaaaaattgctgcctgctccttcctctggaagctt

SEQ ID NO: 196151 - DNA, 1000 bp, Homo Sapiens
ccaggccatctggcactagtccattccttaccactacatggcactctcttaatatttgacacatataccatactcttaaaatgtatcttttttatcatcacaatatttattgtaaaaagtaaaatgacacagaaatacataacatagaatttgaaagtcctccataatcctgtcctagagataattactgtcctttgcactaactacatatttacatatacttatgagttatgctatatatattgctcactaatgtgtacttttcatatttttagccctaacagtatatatgggaatattcttccatgacacttaaagctctacatcatgcctttgaatgaccatattatatggcaataaaaatgtactagtatttctactggtagacatttttttcccattgtttgctattataaacaaatctaaaagatatatttatgtatgtataggtgtatatttgtatatatacttatatttataaatacatattttgtgtaaggatttcaaaagacaaattcttagaagtggtctttcagagtcaaaggttacaggcatttaaacattctattaacttttcccaacatatccaccaaaaaggtgcaatcaagatacagtcccatataaatagagtattgagaaggctgagctccccatacttttgacagagctgggttttcttgcctgtatttttcattaccacaaaaacgataggttaaaaatggcattttatgttttgaatcctgcctgagattggaaatctgtgtgtgtgtgtttattggtcatatgcatttcttcctctttgaagtgtctcctcgtgtctttcgtaacaatgacactggcctctctttcattgaaactttgtcctctgatttcctattttttcctgactctcctaattctcaaggactttttcagagactccttttcagttcctctttctgcgtgatccctaaataatacaataatgataattacaataattaacatttcacagaagctt

SEQ ID NO: 196152 - DNA, 1000 bp, Homo Sapiens
attaattttcatcacttattataattacttttacatcccattgaaatctttataaaagttaatttttttctttttctttctttcttccttctttttttgagatagagtcttgctgtgtttcccaggctggagtgtagtggcacaatcttggctcactgcatcctctgcttcctgggttccagtgattctcctgcctcagcctcccgagtagctgggattacaggcccacgccaccatgcccggctaatttttgtacttttagtagagacagggcttcaccatgttggccaggctggtctcgaactcctgatccacccgcctctgcctcccaaagtgctggattacaggcatgggccactgcacccagccttaattttttttcttgattaaaatttctaaacagaaatgtttattcatattctaatgagttccttagggtagattcccagaattaggctttctcactcaaaatctgtgaacatttttaagatctttaaagtataagtatattgaataatgcttttgataagttcttacaaatttttactcctaaagcatctgagagtattgagtgatcttttcattagctttaataatttatagcaaaagtgattgactttctatatctttgattacctcattgattgggggaacattttcatatgtattatacaattacattatttcttcaatctgctcatattttttgccatactgttttcataaaattagggcagaaagttagcagataatcagcttttgttcggtgacataattttcatttcaatgagacttttttccttttttaaatatgtgcaagaataaatgggattctttttatattgtattcttttacagccgtagcaaacttatataaacaggttttgtcatgcattctcaatctggttttagattatacattagaataactattttgtgcttcctctgtcttgactatgtattttagttatgggcataattatgtatgttcataaagctt

SEQ ID NO: 196153 - DNA, 1000 bp, Homo Sapiens
ggcctgtaaagaggtagagtttggggaacctaggatagtgaacagggattatatcccttatacagcatctgtctgctgtacctgttcttaatagacatagttaattaatggataaagtctcatgtctcatagacagcagtagttgcctgttggttgaaaaaagagcattgtctttagaacctgatgtaaaggtggcgctcacattacagaactatagggcttagttctggatccttagagcttggtccatgcagccattcctggctctgcctcacctttgggattctgatctcagggagcctcactccatgcattgtctaagcaagtcgctgttacgatggatgagggcctgtccctgcagtacgatatggagggtagttggggatgggagcaaggagaggagcccaagtctaatccatcccctttttgagagataaagaatctgataaccacaacgttaagccacttgtccttgctacacagctaggtagtagcatatgtgaaactagaacggatatttaagagcttgacttaacgtttgtggccagctaaagtatgagcacagttcacagcggcacgggggagatgactcaagtagttcaatggaaagaaggacaagtgggtaatattaaaggtgaataacaaggtattttttacttagattttaacacagccaaattcacctgctctttatggttgagactacataatacctaactagaagaggaaatttcatctgtcaactagttactttgttactttgtttaaggaatcaggtgatttttcttcttttcttctccttttgtaccttatattatttcaaaggccttaattggcctgttgcttttaataacatagtcaatattttaagtaaaaattgaaaatcttcgtatattggctgataagcattatgtaaaatttgaagttgaaagtaattcattctttagccctttaatgtaaaagcaatctcttaaaaataaactttcagcataagaagctt

SEQ ID NO: 196154 - DNA, 1000 bp, Homo Sapiens
acatggatggcagcaagcaaagagagagcttgtgcagggaaactcccatttttaaagccatcagatcttatgagactcatttactatcaggagaatagcacaggaaagagctgcccccataattgaatcacctcccactgggtttcccccacgacacatgggaattgttggagttataattcaggatgagatttggatggggacacagccaaaccatatcattccacccctggtacctcccaaatctcatatcctcacatttcaaaaccaatcatgcctccccaacagtctcccaaagtcttaactcatttcagcattatctcaaaagtccacagtcctacatctcatctgagacaaggggagtcccttctacctatgagcctgtaaaatcaaaagtaagttagttacttcctagatacaatgggggtacaggcattgggtaaataccattccaaatggaagaaattggccaaaacaaaggggccataggccccatgcaagtccaaaatccagcagggcagtcaaatcttaaagctccaaaatgatctcctttaactccatgtctcacatttgggtcatgttaacgcaaagggtgggttcccatggtcttgggcggctccacccctgtggctctgcagggtgcagcctccttcctggctgttttcacaggctggtgttgagtgtctgctgcttttccacacatggcgcaaactgtcagtggacctaccattctggcatctggaggatggtagccctcttctaacagctccactagacagtgccctagtagggactctgtgtgggggctccaaccccacatttcccttccacagtgccatagcagaggttctccatgagggccctgccactgcagcaaacttttgcctgagcatcctggcatttccatacatcctatgaaatctaggcagaggttcccaaacctcaattcttgacttctgtgcacctgcaggctcaacaccacatggaagttgccaagctt

SEQ ID NO: 196155 - DNA, 1000 bp, Homo Sapiens
ctatttttcttggtttttagtttcatcagaccaaaacgaataaataaccttcctctcctcttcctcccctacgtttgccaaaggggtgaaaaatacttacgctaggcgataccacctcttacaaacaccagagacctttagcagctcagggaggcacagacaggaaaagattcccaagagcagctcatccggaagggagtcccatgaaacacctttggagggaaaacaagtgtttgccatcaccattctttcaccctatcaagtctactgagtcttttcaaacacataaagaatatacaacatttagcttaaatgaggaatttagcacaaattaaattactcatcctcacaattatttttgtttgaaaaatcatttctgttgaacagaaaaataattgtggtgatgagtaatttaattcgtgttaaattccccattccatcatctatgtaccctgaagtgaccaccacactctctcagcaaatcaaaaagagaaacccagaacacttttcctattcttcccttcagctctagccagccaatcggaggctgtggcatgaagagtggtacagagcaagtcccaccctctcaaatgtcattcaatgacattgtcaattcattgacatcaataagatattgtggtgcttctgggtgcaaaggaaggccttgtttctctctgatgtggactcagtagtgaccttatttaaaaggcaaataaatcttcttccctttctgctatggttggctgtgtccccacccaaatctcatcttgaattgtagttcccataatccccatgtgttgcgggagggacccagtgggaggtaatcaaatcatggggacggttacctggtgataaccgcccctgtaatttgatgctgttctggtgataagtgagttcccacaagatcttatggttttacaagtggcttccccgacccctttgctctgcacttgatgccgccatgtggagaaggacgtttgcttccccttccaccaagctt

SEQ ID NO: 196156 - DNA, 1000 bp, Homo Sapiens
cctatattttacataattaaacaagttcaggcagttttcagtgttggaagagtgtgttgctgataaaactgaacctccgagtcaggagggaatatggccgggcatggtggctcatgcctgtaatcccagcactttgggaggctgaggcaggcggatcacctgaggtcaggagtttgagaccagcctgactaacatggagaaacccagtctctaccaaaaatacaaaattagccgggcgtggtggtgcatgcctataatcccagctacttggaaggctgaggcaggagaatcacttgaacccgggaggtggaggttgcggtgagctgagattgcgccattgcactccagcctgggccacaaagtgaaactccgtctcaaaacaaaaacaaaaacaaaaacaaaaacaaaaaaactcactgaatacaaacaacgtatctcctttcttccaattttaagtctttttctagtagctcctgctgtgtacatgtggtttgttgttaatattggcatattacagtattctaaattattttattttcttttagaaagggtctcactctgtcacccaggctggagtgctgtgatacaaacatggctcattgcagcctcaacctcctgggctcaagcaatcctccagcctcaaccttccaagttgctgggaccacaggcacatgttaccacacccacctaattttttttaaattatgttattcacacttttttttaggatgattagagattagggctcaggagcagtggaacataactttgaggaaatgcaataagttcagaagaagatgtggtgacaagaaagctgtaaggaggctatatgctgtagagataaatgcccaagctttggaagcaaacaagcctctgttcaaatcctggctctgcccttataacgtatgtacaaattattaaagtgcttagtacagtgcctatcgtataacagatatgttggctctcattactttttctttcaacccatatgtggaagctt

SEQ ID NO: 196157 - DNA, 1000 bp, Homo Sapiens
tacctggcgaagttttgtatttttggtagagatggggtttcaccatgttgctcaggctgttctcaaactcctgagttcaagcgatctacctgccacagcctcctagagtgctgggatgacaggcatgagccaccgcacccagcctctgcgtggggtttcgtcagggctgggtctgtgccctgaaggggagctcattccagcccagctccccactgctgcagcttgtgtgtggactcctccagaaggggagcgggagtttccctgtaggagtttatcatccatggtgaggagggcagcagggggcactatttcctcagggtgaggtctttagttaggcctctgagcccaagctaagccatcatatcccctgtgacctgcacgtatacatccagatagcctgaagcaactgtaaaaatatccttaactgatgacattccaatattgtgatttgtttctgccctaccctgactgatcaatgtgctttgtaatctcccccacccttcagaaggctctttgtaatcctccccacccttgagaatggacttggtgagatccaccccctgcctgcaaagcattgcccctaactccaccgcctgtcccaaaacctatgagaactaatgataatcccaccacactttgctgactctctttccagactcagcccggctgcacccaggtgaaataaacagcctcgttgctcacacaaagcgtgtttggtggcctcttcccacagacgtgcgtgacacttcgcatgtgtggttgtgttccagggagggggtgtgttgattctgagcaacaaacaacatatttttaacattcaggattgactcctaaagactcttggtacatgaggaagaaacccggaagaggaagaggaaagcaaaggagtcagggatggctcttcctcaggtgagatgatattctcggtggattgttctgtctccttcctttcagaaaccctgggccttggagttgggaatcttctctgagtctgaagctt

SEQ ID NO: 196158 - DNA, 1000 bp, Homo Sapiens
gacacataagtttctaaaaatttagaacagtgtccagaacacgacagattctgaccacgtatttattaaattaatgagtacattaatatatcttattcctatttttagtcctttattgtttgatatttatgggaagttacaattaagcagaacttaaactctgaaggacagaaaaagaaaaaaatcattcaaataaaaaaattgagtgatctatttaatgacctttgagaagtactttaaatgtttttcaatgaaaccaaagtatttaaaacaaatgttgaaacgtttagagagattgagaagcaacatgtggtaacggccatctagcagcctcttccccaagcacctgtaatggtttagaaggttctcagggcccctccaggctctatctctcattctagggactgcaaaactgcataaaaaaagtaaggtgctgagttcaggataattagtagaacaagcctagggctatgtgagagcattgcagatgggtcactgaatcacatacgtagctttgtagctttactgacctacatgatgagactgtattttaaaactacagtgaagtcacttgaaggatgacatgttctacttttggaattgccatgctatgtacaaggaagagcagtctactgtagttcagaagcagtcacacatctgagaactgtagaagtgcaatttacagctgcttctctaatattttttcctatgggactaaaactcttcgctgaggcaggtgttaatttccaaatcaaattctgctgagtagagggtgactgtttttggaggttttatttgggaaattctgaggaaaaacactagctagaactgacattctctggtcatgaacttattctgctctttttttttttaatcataactttggaaaaatcaatgtagttcagagttaatgaaaggattgtggatggttccatctgtgtaacttgcactcttatcgaaggcaacttacccaggaatcattatgccttggattaagctt

SEQ ID NO: 196159 - DNA, 1000 bp, Homo Sapiens
actgtctctcagaccacagtgcaatcaaactagaactcaggattaagaaactcactcaaaaccactcaactacatggaaactgaacaacctgctcctgaatgactactgggtacataacgaaatgaaggcagaaataaagatgttctttgaaaccaatgagaacaaagacacaacataccagaatctctgggacacattcaaagcagtgtgtagagggaaatttatagcactaaatgcccacaagagaaagcaggaaagatctaaaattgacatcctaacatcacgattaaaagaactagagaagcaagagcaaacacattcaaaagctagcagaaggcaagaaataactaagatcagagcagaactgaaggaaatagacacaaaaaacccttcaaaaaatcagtgaatccaggagctggttttttgaaaagatcaacaaaattgatagaccgctagcaagactaataaagaaggaaagagagaagaatcaaatagacgcaataaaaaatgataaaggggatatcaccaccgatcccacagaaatacaaactaccatcagagaatactataaacacctctacgcaaataaactagaaagtctagaagaaatggataaattcctcgacacatacaccctcccaagactaaaccaggaagaagttgaatctctgaatagaccaataacaggctctgaaattgaggcaataattaatggcttaccaaccaaaaaacgtccaggaccagatggattcacagccgaattctaccagaggtacaaagaggagctggtaccattccttccaaaactactcgaatcaatagaaaaagaaggaatcctccctaactcattttatgaggccagcattatcctgacaccaaagcctggcagagacacaacaaaaaaagagaattttagaccaacatccctgatgaacatcgatgcaaaaaatcctcaataaaatactggcaaaccgaatccagcagcacatcaaaaagctt

SEQ ID NO: 196160 - DNA, 1000 bp, Homo Sapiens
aatattagattcagagactttattattttttagcagtttgcaaaaaatggaagtaaagtaaatatttttcatgtgtttgggatcaaatgttagggtaaattaaaactttgcacattactttgagtgcttttaattttttttcaaatgagttttgccaaaggactgattgcattagaaaaaagcttgaccaaaagatccatagataagacgtattttgaatttcctatcctatggtttaaatggagaatcttggcatatatttttgtggttctctaaactagtcattaaatttatatttactatctgcagtctagtatttagtccataaacagtgtattgcaagaagtttttaattttgtgtttcagtgtttttctgaaaatagaatatatttataacttaataggcaagaaccaaaattgctgtgtaataacattgccaccaacatttaaaaaatgtctccagagatatcaaaaactttaatcaaagaaaaacatattaaacatttcaattacaaagatatctttaacaatttaaatgaattctcatttcatgttagttttttttccagttgagctacatttaaaaggaatatgttactgttaaaaatgtaagtagatttttctttatgttgttgaatacaaaagtggtaaatgacccctttcaaaatggcttaataaatccacgttcaagtaattccagctgttaacaacatattttgagaaaataaaaagatattgtcagattgaaaaacaagataaatatccccatgaacaatcctcatgaaatggaaaaacttaaatgtcatgagcagggctaaagtctgctgagttctgggtggagcttaaggtttgacttctgcaaggataagggggacaaaaagaattggtgcaagacagggaacagaagtcagactcatttgaaattaaagaatagggaagactttcgcacatgtgaaaaaaggttgaaacctctgccagggactattgtccaagaaagctt

SEQ ID NO: 196161 - DNA, 1000 bp, Homo Sapiens
gaatattttatgtctttaaaactaaattggacaataaattctcacatttcatattttggatgttttttaaagaaataaaatattaacatacttgtttggcagattatggtttttacaagtagatttaaaaccaaggcaaatacaaaaacatatgaaaagatgcttgatatcactaatcattagggaaatgcaaatcaataccagaattagataccacatcaaacccattaagatggctactattaaaaaaaataaacagcaagtgttggcaaggatgtggagaaattggaactcttgtgcacagtttgtaggcacataaagtggtatagctagtgtggaaaacagtatggcagtaaaaaatcaaaaacagaattaccatgtgatccagcaattccacttctgtgtatatatgcaaaaaataaaataaaagcagagtctcaaaagagatatttgtacactatgttcacagcagcattactcacaatagctaaaacagtggaagcaacccaagcgtccatggatgaatgaatgggtaaacaaaatgtggtctatatgtactacagaatattatcaaccttaaaaggaagaaaatcctgatacatgccacaacttggatgaacctttaagacattatgctaagtaaaatacatcaatcacaaaatgacaaatactgtatgattccacttacatgaggcacttaggagagttaaaatcacagagacagaaagtagaatggtggctgtcaggggctggaaagaggtcggaatggggaatcatcgtttaatgggtatagagtttcagttttataagatgcaaagaattatggacacggatggtggtgatagttacacaacattatgaatgtgtttaattccactgaactgtgttcttaaaaatggttaagatggtaaaatttatgttctatgtattttaccacaataaaatgaaattgatagggaaaagatgaggcaagtacatttgtaaggaaaacagaaagctt

SEQ ID NO: 196162 - DNA, 1000 bp, Homo Sapiens
tatgttggccaggttggtcttgaactcttgacctcaggtgatccacctgcctctgcctcccaaagtgctgggattaccggagtgagcccccatgcctggccataatatcacccttaatgcataatatttcatcatatagatcctccatgatttacttgccattctattattgttaatccctaaatttgtttcaatttaaaaattatgataaatgatataaaatataacaacaatgtgaaatatttgcacatttttaaagtatttggctcttattgccaaattgcctttagaaatgttgtcacaaatacactaggtgctgcataaagtagctgttttactgatctgtagccaagcaaggaaattatcatttttataaaatcctcaacaatcaaaaggaaaaaaattgtaacttgttggtttttaattttgaatttctatgtttctgatattgttgaacatttcttcatatatttattggccatgttatgtcctcctcttatgaattgcccattcatgatgttttcccaagtttcaattgtggcttttttttctctttttcttattaatgtgtaaaaacttaataaattaagcatatcaggacaaacaattttcaaacgcttttcctcttttgttgttacttttgtttgtttaacaaattatacatgtcaacatgaaggaacatttgtgaatggaaagataagtgaaaacaccagggtcaaaaggcttaacaggaagcatatactactttaaacatggctgtgtttgaaaaacatagccgaagagttcatcactaaatcaaaaagcagaagtctggaagaattgttcttacagttaaaatgtatttttgggagtctctcctatgtttgtattacataagcaaggcattaacaggataaagtctctcccaaaaacctactaagaagtcaattctttgaacgacaatggaaattgttcttttcaggaatgaatatgtcttttggctaaacatggataaaagctt

SEQ ID NO: 196163 - DNA, 1000 bp, Homo Sapiens
cagccatgacacaaccttctcagttcaggcagcccacctatatttttaatgggagtattggtatatttacagtctccatcagaacaaagttctgttattattttgactctaggaccattattttatgtgacagtgactttgtcagaggagagaaaggatgtgactttaaccctggtttttaaaaaagagcaattttcctattataaactagttaaaaactcttgttgaatagcatattgcaattgatgtttggggtaatatgccagttttagcaagaaataacacgaaatagaatgctccaaatttattatttatttgcacctgtgctcacccacttattttccttcagccttcatagttcttcagatatttgatgagtggtgtaggtgatgaatgaatggcacatgtctgtaaaacactaagctcagctcaagacctgcagatcttcctagtgaactaaccaagtggttcagttgataacacaagtatagtatcccaataggtttagaccctgctctggactctggagaacattgtatctgtttatgtcattctaaaacatagccaccctgttgcaaagagtttcaaattttggagaccagagacccctttgagaacgacatgacttataaatctttggaaatgtgagtcttcggaaaaattcacaaacacacacacacacacacacacacacacatcccttttggatgtaattccataaagttcagtatagcctagtgattaagctaagggctttggagttagataacctggcctaaaataatgaccctactgctatttagttttgtgaccttcttcaagtcatttagtctctttaaatttcattttaaaaatgggaatgaaaacagtacctatgtgatgagtctttatgagatttaaaggagataaagcatgtgaagtgctcagcacactgtatgacacttactaaatgctttgtacatttttgttattttaagggagttacagatctccaaagctt

SEQ ID NO: 196164 - DNA, 1000 bp, Homo Sapiens
agagcagctgcttaaaatattaatattttggtttatcgagtttaaattctccccatttttcccccaaccattttattttataactaaaaaaaactaaaataattcagaagtaaaatttggtgcattttcaatcaaacacaaaattttaatcccaaatcgataccaataaccttaggagcaatgaaagggagccagaggctgagtggaaccagtgagaatttacaaaatcccaggctgctttccccaactttcccccaccctgctaagaaattcatcatctcagcaaggcatatttgaagagattgatgccattggcacatatgtgaggctgtgcatgcaggttccacaaaaacatctcaaactaaggcagcaaagcagagcatagaccctaggatcacattcgtttagttcaaatctcagcttcgttacttaaaacaagttcttcaaattctcaaagttttgtttttctcattggtaaaatgagaacaatgaaacttacttccttaaggcttattgtaaggattcaatgagataattcatttaaagtacttatttagcaatgtctgatccacaagaagtgtttattaagtgttcacccttggtagaggcaatatatatataattattatatacctaatatatatatatatatatatatatatatcagacatctttgaatgtatctaaaagtgttttttaatcattatattttaaaagctgtcagttacaagtaataactttataaagttatatttcaaaaatgttgatggatactttataaatgatattcttttcaacataatttattaagcactgacggaatactggatgcattgtgctaggctctgtagggaatataagttaatcagacagcatgctttttttttttacttcaaggggtttatagtcattttgtggaacttggcaaacatctgaaaacttagagaacacaagatataatttatttaagtacctttggcttagagtatttctaaagctt

SEQ ID NO: 196165 - DNA, 1000 bp, Homo Sapiens
agccaggtcatttcaataacaacaggagaccacagttactgctgaatggcatctttcaggctcaagagcttccgcagtctctccacttccatactgattagaagtgcttgagatacatcataacagtgtcagtgcagtgtttatgggggaaattgtcgctgtctctcgcttgtggaaggtgacataatgggatttcttccctttgtcctggtgacaggatgatgagcactgtctgggctccagttcggcgggctttgccattcaggcatccggcgcagctgacaagcccgaggatcgatggagaaggtgagtcttgtcacttggggggaagagggaggttcagcagatgatggggagccagtgggtgcccccaaattcctgtgtgaaagaacacttagaaatgctggtcgactgaacgaaagtgggcggggctagacaccaaagttgggggcagggaagtggctccagtctgtttcctgggaggtttctgaggctctggacccagaagacttaggggattggtaccccaggtgcctttttcagggttggtgtctaggtacagattcaaagcatctttaccccttgtcaattcctcccctactccccaaccccaagtcactgacatgatttgtctgtgtattaatattgtgtctagttccagaaaggttttaagaagtcttgctgtgatatattattaattgcattgagctgcacatttcagctgagacaaattaaacaatatgtactggagtgaggggtatgtggagggagggaaagagagagagagagagagatcccttcattcaccttgtcatttttcccaagtgaactagaccatctctactagtaccacaggaaaagggatgacatagcagtaaaacaaactggaataaaattagttcactgcgagtgcttaggtcctagttatttcaggaattttaaaggatgattttgtgattgccaacctctgccttgattatttcgatcacggcagaagctt

SEQ ID NO: 196166 - DNA, 1000 bp, Homo Sapiens
gccagaaaagcttgtagcaaaaatatttgttagtctgttatatcaggaggggctttcctaaagaagtgatgtttcaggtaagacttgaaataggagtgggaattaatcaacctgaggcctatgttttgtgtgtatgtgtgaaagggagtgtgtgtgatgtctgtgctatgggagggttggggggaaagagtaagagaacattctagaaagaaaaagcagcataaaagggacttatggtaagaacagcatgggttgtggaacagctggatggctgacacacagttagggagagattgactagaaataaatctagtttagactatattaaagtcattagaaatacattagaaagatctaagtagggaagtggcaatggttagtttgcttttccctgttatgctaggcagtttcttcaacatgtcttgttttaaagataactatatacatttcagtcttttcatgagacagtaataactttaggtttctcatgcagaacaaccactcaatactaaatccagtccatgacactgtctgaagatacaggtgtccccttcccagacaagagttatacctaattcagaagatttctgaaaagggaactgaaccacttatataacaagtctctcactgacaacaacctgacaatagccaagttggcaaaaaaaaaaaaaagttctaattgaaattttagtgttgaaggaatatacctcaaaatagtaagagctatatatgaaaaacccacagccaatatcaccctgaatgggcaaaagttggaagcattctccttgaaaaccagcacaagacaaggatgctctctctgatgactcctattcaacatagtattggaaattctggccagtgcaatcaggcaggggaaagaaataaagggtattcaaatacgaagagagaaagtcaaattatctttgtttgcagatgaccagatgacatgatcctatatttagaaaaccccgttgtctcagcccagaggcttcttaagctt

SEQ ID NO: 196167 - DNA, 1000 bp, Homo Sapiens
taaatggtggtatattatatattctattatgtacataagtttttttcttagaattctctgtcaacacataatttgttatttattttcatttttttgagacagagttttgctttgtcacccaggtggcagtgcagtggcacagtcttggctcactgcaacctccgcctcctggggtcaagtgattcttgtgcctcaggctcccgagtagctgggattacaggcatgtgccatcacacctggctaatttttgtatttttcatagagatggggttttgccatgttggccaggctggtctccaactcctatcctcaagtgatctgcctgcctcggcctctcaaagtgctgggattacaggtttgagccaccgcgcctggctaacgcataatttaacctgtctcctactaatgggcatttaggttgttttcaggcttctgctattgaagacacaagtgtgtatacttgtttatattgctttgcagaaatatgcagaaacaactacatagcatttactttttaagtggaatacagggtcaaagttatgtttataaatttaattgagataagcacattgctctcaaaagaagtaaacccatttacgtttctaccaagctgatatattcacatcctacaagtatttattgcatgatatgtattaggtactatttcagatgctagggaaatgtcagctatcaaaacagtcaaaaatttcttcctcctagggacggtgttataatggggagacagacaatgagtaaatacttaaaaaatgtatactatcagatagtgataagtgctatggaaaagaataaagtaagggaaaactggtatagagagggctagttggggttgtaattttaaatcagcttggtggggaaaggtctcactgaatgccatttgaaaaaagatctgaagagtgcgagagtgggcgtgcagcattgggtggaagatcattagccagaaggaacaaaagtgttaaaagccctaagtcaggagaagctt

SEQ ID NO: 196168 - DNA, 1000 bp, Homo Sapiens
ctgctatcaaacattgaatgtattccttctaattgtatgtttgtatcctttaacccacttctcttcatccttacctcttaaaaactaaagatttttaccatttttgttttttgagacagagtcttgctctgttgcccaggcttgagtgcagtggcacaatcttcactcactgcaacctctgcttcctgggttcaagtgattttcctgcttcagtctcccaagtagctgggattacaggtggccaccaccatccccggctaattcttgtatttttagtagggatggggtttcaccttgttggtcaggctgggctccttacctcaagtaatccgcccacctcggcttcccaaagtgctggtattataggcatgaaccactgcacccagccaatttttaccatttttaatatacatataaatctataaatgtttgttcctttatgtgaaacaaaaaactagccaacttatctgagacactaaggtttctacagatgataattacctggtgttttcaattagaaacagacatatgtatagttacatatattgaatagatatatatacatccacacatacatatttgtgaggtaacagcatcattaattacttttggctctttcatcttgtcagcattacagaatgtgttgcccttatgcattagtaacaatttaaaataccttaacgtagaaggaaatcacttaaaagagcccaaataatcaacagagttatttaagattgagtctgtctgtaggaattgagtctaaggttagagagatgtggggacaacagaatcacacttgtcattaaggcctttgagacacatgtattatttggctaaaaaatgcatgactacaaaataaaataaataccttcatataggcaaattccttcatggcagagagacgagataaatatagccatgacacattgtgcctatgtttatgataatcgcgtttgtttttcaaatttcgaaacgaggttcttcctagtctgtgaagctt

SEQ ID NO: 196169 - DNA, 1000 bp, Homo Sapiens
aaaaagccaaatgtaagcacttgtacaaaatgagggcttacttctagtactggtagttttctctggcactaaataagagagagaaacccacgtctgattcctttcaacacatggtctgaagcctccctttaccaaggtcttatcctaaagtaggtagacttgagacacactgacccgccagatgagacaaagttgcaaatctcaggtagttgtcacctccactctgcggcacccaactgctgccataaatttccatcatgggccctgtccaaaaaggagcttattctagggagaatataaccagccacggctcaagaggacaaagcctcaaatttctcaagaccaagaagcacaagatggactcactttctgcctgcagagaggctccttcttgttctcttcggcctttgcatcctgctgcgcagcatctttgggtgtgtttactgctaaaacatcattgatggtggagccaaccaccatgatcttggccccactggtcacttttatttctctcaatgttttatcctcggggacgagtcccttatacatgactttctgcatggcaggcgggagaccttgggaaaaggtagaaggtggacagtgaaaggaaggaaggacagaaaaatgtatggatactacacagctctttggtaacagaccaaaaagtgaatactgcctccaccacctattagctttgtgaacttgggagatttacaacctctgaacctcagtttctagaactgtagaagatttattagagtaagtccttctgtacagacctgtttcaaggattaagagaccaatgcggggcatttagtacggtggctagcattgaataattgttcagtaagtactagctctcattctttccaagttgttcctcagtcatctaaatcattcacatattaagtgagaatccacaggcatcagagctacagaagccaatagggacaaaactcctgttcttaatggagattacaaggctacatgtagaaagctt

SEQ ID NO: 196170 - DNA, 1000 bp, Homo Sapiens
ataaaaaaattttaatgtattaaatacactaaatatgctaaattaaatacatttaatgtacttcgtgcatttagtgtatttaatatgctaaaattttgtattgtataacatacactaaatatactttaatccaacacagaatatcagtctagtatatataccttcactcattacttctaaagtctctttattcaaatggaaataataccaatcttttcctgatttgtggtccttgacttttgtattagaaaaaagttatgggaaaaaataccaagcatatgtcatttatgacttggtggcataaagagctagtgatgttactgttggtttgaatgcttggtttgatttacaaaaagtaaatgattatttaattttgtattgtcttaacctgttttatatcattatcacttagtatttaaaaataccttatgtattataaaatgatagagccatgcagaatcttaagagatcatttgatttagcctcactgcctttcaaataatgtgacatctgaggtccagaaattttgagagacttgcaaaatgtcacatctagcttctggtaaagctaagacttaataatctagaatagtgttctagttttgaaattcaggaaccttacatttttttcctttggctcagagttttagaattatgtgatttaaaaaaaatgtgctatgtaaatagggaattcattcaacaatgttgattgtgcatctaccagatgctgtgattgcagtgagaggtaagacacgtatggtcacgtggctcatgaaacttacacttttgtggaggaaaccaacacaaaattaaaataattaccagttattatcattgctgtgaaataagggttcagatagaagaataacagaggaacagctacttaagaagtacggtcagaggtctcctaggagataggcagaagataacctgcatgtgaagaatgcatggaaagagtgttcagacataggaaatagcacatgcaagggttctggaagctt

SEQ ID NO: 196171 - DNA, 1000 bp, Homo Sapiens
catattggcatatgttcttagcatcccatagctgtatattttaagcagaccctttttatcttgcatagctttcattacattacaggagaaaaagtatttcttgctatgaccaggaacaatatgctagactctgcattttgtatttttctcagtctacctttcatcaatgaataagtgttgctttaactaaaaagtgtggaaaattctgattgaattttccacttcaaagtacacaaaatcatttcatctaacatgctgtgtgagaaaatctatgccccattctgacctcctgttgcagtctatttcaagtattggtgatgcaccatatcatactgcatggctggtgaagtagagtaaacatattgactgagaaacgttttgaaaaccccctattccacacagatcccagctactgtcaaaaatcacaaaaatgtttgcattctgtctgtgcaagagcatgacagagctctaggagaaattcccacagtaaataaaaccagctacttgcataacactccttcgaagcaggactgtgcagggcttactgctaggggaaggaggggcaagattcagcccaaatgatatgcccagaggtatatgggggaagacgttattaactgtgcccttcctttcacctatttgcaaggttaaaataaaatttagcagaagagattaccactagtgagaaggcacaactctgccggcggccaaggaacacatggaaagaaaggtaatatattgattgacctttccttgcaattgcagtctaggcggctagccgtcttttttcatttgaggggatatgatagctgacctagcttattttcctggactaacaaactaggacagtccttggacaagtcaggcagctgagaccaggatacccctacagtagcagagtattacaacattaacacttacaatgaggagatctaagcaataacgcggtaatcaaacaggcttctgggttagagcttttccttcctccaaatgcaagctt

SEQ ID NO: 196172 - DNA, 1000 bp, Homo Sapiens
taattaatacacacctctaatgtatttgtacttacaccacataccatgggatctcacaaaagagcaattttaaagcttgcttggatagccgatatctttattttcagaacatattcttcatgcataaagaagcaaagactctttccttcagtataatccttttgatagaagcgaaaacttaagtctggcagttttcctaatatatgtttttcacacttttcctttattttaggcaattctaaatagacaaaatcaacttgagagtgttcttggatttaatttagaaacaaccccagttaagcttttcataaaacttttaaattgggctggcttttattttaggaatatgaatgttcttggaattcttccagatctctaagcaataatcttttacgcaatcccctttattttgttatgaaaaaagagcctaggtagttcttttaaggtttacttttttgtaaaggtatctttaaaacatccagatgcctctagacattcaagatagaacgaggcactcacaacttctatctgcctatgtttcatctatttttctatgctgttgtgtgaattttgacgttttattttgtcaagaatagtggtgaaaaaccaatgaatttttaagtgattgagctctaacatttcctacattctccttccagaaagtaaatacacagtaattatcattcattattaccttctccatctgacaactgcctttcacccctcaaattattgtgcatttcacattcttttttctacctaggactaatttgtccaatcaaccggacatctgtttttcttccccttttttgaaaacaggctgcttctatgttttcagggccttcctttctagaacatgtaagaacttgttctcagactacttgtaagcaagacactctctgaggttacaagtctggaagcactttctgagaacaattaaaagatctgtctgcctgttagggcgttccatgggaatgttacactctttggaagaaagctt

SEQ ID NO: 196173 - DNA, 1000 bp, Homo Sapiens
atcttgtagtcatcttatttaggaaccaaaatggtgaggcaggttttcgtgacccagttcctagcttgacttttccctttggctaaatgagtttggggtctcaaaatttaatttcctttcacatgatcaacacacagttggattttttttgtcagttttatgaattactgtatgtttcactaggaattttgatgaatttatatttattacagttatatttctattgcttacattctgttgtgtttctatttggcaggcattttttcctctctgtgtctttttttctccttaatattataggggtcagcaaactattttatataaataaagtttttatttttctccttaatattataggggttgtcaccaaactattttatataaataaagttttgttggaacatagccacactcattcaattatatatagcacatagctgctttcatactacaatgctagagctgtatatttgcaacagaaattatatggtctgtagtgactaaaatatttactattaggacatttcagaaaaaaattgtcaactcctgttgtactggattcaagcatttcttgtctcttttcctttgaaattaagagattgtaattttattcctataatagttacctttacattaaaaaaagaaatcaggatctttttatccaaaaacaatttgtcttgatggagggcatctggctgttttggggatactattcctgaccttcttttgactaaaaaagcttcctgcctgccataccagcaaaaaatcaccacgtactccccgtctctactaaaagcacaaaaattagccaggcatggtgacatgtgcctgtaatcccagctactcaggaggctgaggcaggagaattgcttgaacccgggaggtggaggttgcagtgagccacgatcacaccactgcactccagtctgggtgacagagcaagactctgtctcaaaaaaaaaaaaagaaaaaatcaccatgtaccaatctgtccaagctt

SEQ ID NO: 196174 - DNA, 1000 bp, Homo Sapiens
atctcacaccccagaagtgtgcatatatgaacagacatgtacgccaactgcacacatgctcacaatcttgtaggccaggggtgggcaaactatggcccacaggctgagtcctgccctctgtttgattgtataaataaagctttattgagctgggcacagtggctcatgcctgtaatcccagcactttgggaggctgaggcgggtggatcacttgaggtcaggaattcgaggccagcctggccaacatggtgaaacccggtttctactaaaaatacaaaaattagctgggcgtggtggtgtatgcctctaatcccagctacttgagaggctgaggcaagagagttgcttgaacccgggaggtggaggttgcatcgagcccagatcgtgccattgcactccagcctgggcgacagagtgagactctgtctcagaaaataaaacaaaacctcccaacacctgacccccctcctcaacttcagttgcatcatttgcacgtctgtgcatgacagcatggtgtttgcatgtgtgggtattctctcttttttttttgcgtgatcatttgcatgatggcatctgtgggactgggttgaacatctctgccccgggcccccgaggggagcagcccgctgacccccctggccccacagcggacatcgcccgcagcatgggtgccaaaacggtcatcgccattgacgtggggagccaggatgagacggacctcagcacctacggggacagcctgtccggctggtggctgctgtggaagcggctgaatccctgggctgacaaggtaaaggttccagacatggctgaaatccagtcccgcctggcctacgtgtcctgtgtgcggcagctagaggttgtcaagtccagctcctactgcgagtacctgcgcccgcccatcgactgcttcaagaccatggactttgggaagttcgaccagatctatgtgagtgggcaggagtggcatggtgcctgcataggtggtccggctaagctt

SEQ ID NO: 196175 - DNA, 1000 bp, Homo Sapiens
acacattgtactgtatgtgcttaattaatgtatttcccatctctttctttctttgctgctcaaaatagttgagtgaatatctgaaagcaggatggtagaagctgggccaacagcactgaatccaatcaaaggcacaggaaggggtctcagagtgccacatcaggctcacagagagtgtccctcttatatgtgacatacacaatcttctcctcaatccagataagggcaactgagacaaggttattaaatgaaggagcaacagagaccagtaggccagagtattttctgggttagtggggaagggtgaccaacattcttggaaatgttcctgggtccgggactgtggcctcctctaagggctcaggcaacacaggctgtgctaatcaggcacttaagccaaaggggataccaatatgacactgactttgatgactttagcaaaatacaaacgcagttctaactttcactcattcagtagacttatatagatacacacacttcaatttggtgaatagctcagtcagtctataaataacaaaataattgtggagatgttaagttcaaggcaccataccagtgtcgcaggattgcagaagggaaaaggttggagtagtaagggagtataacacacgtccctgcccaaagaccttagtctagtgagacagatgaaacaaagcatatgacaaataaaaatcaggaccggaagacatgagctgaggggaacactcagaaaaggagtcactgcggatatgtgggctttccaaagagctcaatactacacaaacttggacatgatccacaagattttctcacagaactatgagttttggccgtttcccatagccttctactatttatttctacgacaattctcacaatttgaaggtttttcctagaaataaacaacctgagtggtttggcattaatcaattttggagttgtcagatttcttaatcaattcaaaagtattttttttttgagctctagtttatacaagctt

SEQ ID NO: 196176 - DNA, 1000 bp, Homo Sapiens
cgctctagcgcctcggccacgagctcgcgcgccgtggagcgcgccgtggccagcacgctcttgtagttggcgcccgatgccagtccggcgccgaagatcttgaggacccccggaggcgccgtggcgcgggtagccagcgggggctcgggggccacgcccgccgccagctccggcagcttcttctcgctggcccagcgctgcgcgccccccggggtcccagggcctcctgcgccgctggaccccgtggtcccggtccccgagccccggaagagctgggagatgcgcttggcgcggctaccggaggctcccccggccgccttgacagcgcccactcgccgcagctccacgtgcggcgggggcggaggtagcggctcgctgctgcggctccccgtgtccgacgaagaagacctgggagtccgccggggaacagagtcgcgggagagagacccaggacgacacgccaagacgggggtgggggcatattaggagggaagtgggcagagacccagagggaggacagggacccagggtggatggacggggcgggggtgagggtggggacagacgcgaggcaaagagagagagaaaaaataaataaataaaggcaagtcccacagtaggaaattccaagaggtgagcagggaggggaggaaggaaggtgaatcaatccccctgctccttctgtccccgtccccgtgcccatccggcctcactccacctcctagcctagctcttactcccaccgcgccctggtatcactgtgccccaccgtctccccctgcccaccagctcgtttgcccaattcaggatgaggaccggagccaacactttgcagggactgggcagtgaacagggacagatgggaagcaggtgtgcaggggcaggagtcctgcagagatggcactcacttgacagaggctgcgctgggccagcgccgccccagcttcgccagctgcttcctgggggaattgatccacaggcccacggggagatgaagctt

SEQ ID NO: 196177 - DNA, 1000 bp, Homo Sapiens
tcagtcttccaagtagctgagactacaggtgcgtgccaccccactacacattaaatttggggaagcactgctttaactctgtctcactgcagtccaacgtcactacacccccaagtcaggacaatggactctttcaaggcagctctcccactaagaaagggccatcactcttgcaatgtcctgaaaatacttgtctaatgttatatctggcccaggacaatattccagatgagtcccaagtccctcactcctttcagcatcagcacaaaatccacgcctccccctggctggaaatatgtgatctatgaccacagtcaaacataattcctccgtggacagtgagttcatgcctcttgggtttttttgttagtttatttgtttggtttttatgagatggaatctggctctgtcacccaggctggagtacaatggtgcaatctcggctcagtgcaacctctacctcctgggttcaagcgattctcctgcctcagcctcccaagtagctgggattacatacgctagccactgcacccggctaatttttgtatttttagtagacacagggtttcaccatgttggccagactggtctcaaactcctgacctcaggtgatctgcccacctcagcctcctaaagtgctggaattacaggcgtgagccactgcgcccggccgcctcttgtttcttgagaacaaagtgtagctcctcctccccaacttctcattcagcctggctgcctcaccaccaccacagccagtgtgtcctccttggccctggtacactgagcagtccactgtagcccccgccccctccactatagggacaccggctgctcagtctctcctgagctacagaattgaagccccttagagcccccacaacccacgatgatgaaatggtccatgcataaggctgactatgcaacagtctgggcttccacatcgcatcccctctaccctccccaccgccaagccataatggaacagtccagagccaagctt

SEQ ID NO: 196178 - DNA, 1000 bp, Homo Sapiens
gggaggcagaggttgcagtgagccgagatcatgccatcacactccagcctgggcaacagagtgagagactccgtctcaaaaataaataaataaatacataaataaatatataaataaaagagaaagaaaattgttgagaagacacattctccagatcgagtttaattgaaaaaaggcaattactcatatgtttatgttagttaaattctgaagtaacaaaaaatcagaacaaagcattatattgtattcattctgatttctgattttaaaatagtttgtaaagttaacttttaaatgttgaaaatggctgggcgtggtggctcacacctgtaatcccagcactttgggaggccaaggcacgtggatcacttgagctcagttcgagatcagcctggacaacatgacaaaaccctgtctctagaaaaaatacaaaagctagcggggtgtcgtggtgcatgcctgtagtcctagttactcgggagactgaggtgggaggatcacctgagcctgggaagcaggggctacagtgagccgtgactgttgcactccaaccaggacaatggagtgagaccttgtctcaaaaaaaaaaaaaagaaagaagaaaatgaaaaagaacaaattaaatgttgaagatgaaacacaattgagaaactacttgctgttctgggctttgttgagaagaatcagcatcccccattctcttccccacttcctacagtctcacaagtcagatctttcctgaatagacctactgatgaagaagtgaggccaaattaacatgaagtatcattatgataaagaaatagacagtgataccaacacttatgagactggggcagctttgccagatatattaagatttcttttttgcctaaccaagaaggttactgatttgtaagaaccagtccaagttgggtgcagtggctcatgccagtaattccagctctttgggaggccaaggtggtaggattgcttgagttcaggaattcaagacaagctt

SEQ ID NO: 196179 - DNA, 1000 bp, Homo Sapiens
atgacccaaggaggaggggcctcccaaatccgagaatgaaagaattcgcattgtctgacaaggcaagaatggggcgctgtcaccacacaacctcacccatccccacgtgctcagcccagcccttctcatgctcacctgcctctgggtcagagtcacctcctccctcgctgaggactgttgagggacctgtgcctggttccaaccagggcagctgaaaatgccacacagggcacagacactgctggtgcctcccccagtcctgagtcaggggagggtgggtatagaaaaaaggctgggtacagtgtgactgggtacagtggctcatacctgtaatcccagcactttgggaggccaaggcgggcagatcatgaggtcaggagttcgagaccagcctgaccaacacggtgaaaccccgtctctactaaaaatacaaaaattagctgggcctgtaatcccagctactcaggaggctgaggcaggagaattgcttgaatctgggaggtggaggttgcagtgagccgagatcgtgccactgcactccagcctgggcaatacagtgagactccatctcacaaaaagaaaaaaagtgtcctagctggtgaagccagcaccctggaggccccccatcccctgtcctgtcagaggattactacagtcagagagggctctgccgcgtgcagggaggcggggacccagagcagatgggctaagctgggagacaggcctgggtcccatccacctttgccatcaccagccttgtggccttctcttggcctctggagtgggtttctcagccaccatatgggtaacgcccagccccaccttccactcgggtctgcggtcagggccatgcacagagcactgtgaagctgtcctgccagcacttgggcagcacccaaacctaagcagctactggtgcctttgccatgtgaagaggctgcagctggagcctagagtaggtccctccccagagaggccctagaggggtgagggcaagctt

SEQ ID NO: 196180 - DNA, 1000 bp, Homo Sapiens
ctggctaattttttgtatttttagtagagatgggctttcactgtgttagccaggatggtctcgatttcctgacctcatgatccgcccgcctcggcctcccaaagtgctgggattgcaggtgtgagccactgcacccggccttatatatttttttcttatgaaataactgtttgggttttcaatatagccatcatggacaatgtcagagattaccaaaaaatgatgacttttatagctttatgatgcttcttatttcatactattgaataatactattgcaaactttatcttacggcaatatttactaaaatgtatatgtggagtcctgtcagaaagacagctttccatgtgatttgggttattagaactctaaagttgttcatgaaggaatggacatgtattgcaaatctaagtaacttccaattgtaatttttttccgtaataaatagctgtatagctattatgtgattttagaatagcagaatgcttgatatgcagtataaacccagactttggaaatagaagattatacattctgtttatagtctgcattaaatataccgcatgattttatttggctaaatttgttcaattctatgtattttggaaataaaagcaactcaaaaataggaatcaactagagtttaagggatttttaaatattataggtattgttacattttattatttcaattactgggagttgatgggtggcaagataagacgcactggtgggagtaaatttgggaagatgaagaattcatggcttttcaaccataatttaagctactggttatgtggtactatacctacatttaaaagttgccaagtgttgccaaccgtggttgccaagactgtactgcacataataagtacaaaatgtgtgaaagaattcaagtaatatgttaaatgtttaattcccttttcaatcttgggatgttggatgatcaatgaaaacagaagtatctggcaggtacaggcaacattgttaagaaagctt

SEQ ID NO: 196181 - DNA, 1000 bp, Homo Sapiens
ataattggaataagattacttttgcaaatataaaactcatcagattacccacttgaaataatgtaatttgaaacacttgatagtaatttttgccccataaaaatcctacgtgtttgaaccttttgctgtttgccttgctcattttaaaaccaaagtttgtttagtcctatagctaatgtttgtcataggcagcatttgttacaaaatgattttactaatttttcacttgaatttttttctgaaatacagtctgtcctattggtgctagccgagaaacaattacatgcaaatttagtgtaatagaaagtcactgaccaaacaaattcagtttggtactctgttgactaagtggtcataaagttcctgtgtgttttgcatgatgatgtgagtaccaagccacccttcgtttttaagaccccaattgtatatggcttcactgctgagagtggtacggtgtacacaattatttttcttataagaattttgtaaattatttttactttaagagaatctccatttacccattcctctgtttcagtcattctgaatttctgaccaaatttatttgagctgtactccatgcacccctttccactctttctgaaacaagtctcaggcatcattttattttatccataaataggttatctttttttttttttttttttttttttgagacggagtcttgctctgtcgtccaggctggagtgcagtggccccatctcagctcactgcaagctccgcctcccatgttcacaccattctgcctcagcctcccgagtagctgggactacaggcgcccgccaccatgcccggctaattttttgtatttttagtagagacggggtttcaccatgttagccaggatggtctcaatctcctgacctcacgatctacccacgtcagcctcccaaagtgctgggattacaggcgtgagccaccgtgcccagccccataaataggttatctttaaatattcttccttgatatcaaatatcca

SEQ ID NO: 196182 - DNA, 1000 bp, Homo Sapiens
agagaagaatgtgtattttgctgctgtcagatgaagtgttctataaatgtcaattagatccagttgattgatggttacatctatctttttcaccactatattcccaggatctaacagagaacttgacctatagcatgtgctccataaatgcttattgaatgaaaggaagaagacaagcacaggcagggaaaaatgaatacagagatcttatatgttactccccagattaaacactttcaatagttcactataatctacacgatatattttagctattgttccttctacttgctagcaatattttataatccatacactatatttcttctgttgtaacacacaattattttatataccactgtataagaaaaaataaatgctaacatcataagatgccatcaatttcaaaggtgtttaaacatcaaaaaaaaaacttgagttggagaattgatgaaatattgtggttagctaaagtttatctggtcctctagatgaatttatccttatttatctttgtatccccagcaccaagcatagtatgtggtaaagatactcagtaacatcagttcagtttagttatttgattcgttgcttattctgcaccaccagtcacctggctttccttcattccgcatccctgatatcttctatactctaatgctgttggtgttactggctggccagagattttaatttcttttgaaatgcctttgctccacaaaaatctgactcttttccactcttctaataaacttgatgtatgctgttagctgcagtacaactaaacatctgccagactcacttgtgtgttcttgaagctactatggtacattaatgtcctcccccactgtccccgttccctcaatacagttacagtgtggttttagatgctgtggcaaatgagagaggaagagtatttgggcagagagaatttctgaaagcttcaaataaatagataattacacttgtctatttactagactggccattccttaagctt

SEQ ID NO: 196183 - DNA, 1000 bp, Homo Sapiens
tctagccatctctctgtatgtatatatgtatacatgtgtttatacacctccatacacacatatacttttgttaattttaaaaatttagaactgggatgaagaatacaataatgaaaaggtctgtcctataaaagattgatctacattccatataatacaggctggcaatgcagtacatgtcaatgtggggtttttttttggcacagctgtatcataagagttgcattaaaatataaaagcattatttttcattcctaaataatgggtgcagtagaccagtctaattttcactctacccttggcttccaacccgtttcccatgctgttcccaccttatccatgatcttgtcacagaaaggatttcagggaagagttgagcatatctgttttgtactttatgtagtatatttaaaagaaactgaaaaatggaactgttaaggttgcttcggtatactgtatatcctgagtaccctgtgtattcagcattggatctgttggcttgttgacagactattcacagtgagacttacaagctgcctggttttcttttggatgatttgaaaactgtgattgttcttaccatagatatttgctgactatagatttctttcttaacagtgaggcagcagtgagtataggagaaggagcccgcttttgatcagatagtttgaatcctggctgaatagtaattagtaagatgatattgcctggttgtataacacgtctaagcttcatcggtaaaatgataataatatacctgtatcagtcagaatccaaacaagaaacagatgacccatgaaaaatatttttgggtcatccacaattagattatttacaagggtatgattataaggaaaccgcaagtccagtgtagtaacctggatctattagcaccagagctgttatacattcccaggtacaaaaggacacagacaggaagcagtcctgttgggaagccccattggccaaagcctgccagaactagagaacaatgaagctt

SEQ ID NO: 196184 - DNA, 1000 bp, Homo Sapiens
ttatgacagattttaaatacttccattactatgattactttgggtttttttttcttcttcagtcttagcactttgacctgtttgtttgtttgtttgtttgtttgtttctggaaatagttatttttacaaaattacttcttgcttcttagagctgaagaactctatggctgtggccaaattctcagttgaggaaattaagagagaaaaatctgaacctgagataatccctggatggatatattagccacctgaaatggaagtgtttagagtttctattattttaagtcttttaataactagagaggcaactttttggaagccaattctttgaaagaaaaatacatttaaaaagcaaattaaagatctgcttattgaaatattctcttcctaccttgtaaaaaatctatgctacttatgtcttgtaaaataatgcttctcaaacatgactgtgtttaggaatcgactgaagatcttgttgaaaggcagactctgatttagtaggtccggagtgggcctgaaattctgcctttctgacaaattcccaggtgatgtccatgttgctgggacctggaccctcttgtgaacaatatggttataaacaacttttcttccttctagatgagatcaactggcctgagaaggatgaggcacccccacctgatgcccaggatctgattaccttactcctcaggcagaatcccctggagaggctgggaacaggttagagcccatgtgttttaattttgctaatatgcaagaaataatgtctacatggagcactctgaagcttttgttgttgttttgctttttgcataggcaacatctgttagttgatgtagaacatgactgcaacacattatagcaataatattttggattttgttttctgattcaaaacagtgtgtacgctaagagggttggttgtttgtctttgttttttgttgtttttgtgtttggcaaagcagaaattatgcttaatttgtttcaataaataaagctt

SEQ ID NO: 196185 - DNA, 1000 bp, Homo Sapiens
aattttctttttgaaagcagtttgatttctagtgcctcagcaactgaactttttactttaacaggtacgctccaatttccagtttctgtggaaattcaatagagagataaatgttgttttcatcaagtgtttgtaccagctattatttcttcctgaaaaacaaacaagcaaggtaacttctcttaaaaaagatacttgtgttatgaattctttaatagttttcgaagctttctggcttctgatattctgcaaaaggcaaaacatttccagcctaagatatgacttgttacatttggatttggtgaaagaattattaagtgcttgaggggatagcttcacatatcttgaggggatggcctttctcttgtgctactgaagccagtttcatcctttgctttgtttttgtcatttccttactctgataagcttatgaatattattttaaaaagtttgttaagggtcaaccccttatggtttacaaccataaggacaagctgttgtaaatataatgaaagaacaatataagaaatatacattttaaaatattgataagggaaagttgtactggtttttatgagttatgcaaaattaacattgtccttacttttttaaaaacaattttcagcagttgcacatggaataacaattgtccttactttagagatgaggagagagcagagcatgccatgaaggaggaggactgtgattacattagggacctaccaatcatggtaccagtggcatgcatgggcagaaggggagcctattaccagcagccttcacaggatgggccagatttcttcagcatcactgcatataaagtcacacccctaagtatgagaaagtcaaattgtgatggaaatttttctaatgctaagaagtgctggtttcctatagccaattaggtagtgctagcagtgcaacattttataacatttggtagtaacaagtgattttatctttgggttggcgataccctagggcagacattctcaagctt

SEQ ID NO: 196186 - DNA, 1000 bp, Homo Sapiens
gagagacagagagaaagagatcacattcttataacttgtattacaatatagttataattgttatattttattactagttattgtgcattgcttactgtgcctaatctgtaacttaaactttatcattggcatgcatatatagaaaaaaacaaaatatataatagggttcagtactatctgcagtttcaggtatccactgaaggtcttggcatgtattcctggggataagggaggactactgcatatgggatattgtaccaaatatttgagcagcaaatgactgttcatcctattaccgacactgtaaaagaatcctccagtctatgaatggtaggaaagaattccttaataaaatgggaaaaaattatagtatttgtctcgcaaaataggaatttttctcacataaaatgttttcagatgcatgacacttgaaaagaaaactgaatgtgcaattgtgtatagcctaggagactgaaccagattactgtgtgattataaataataatgaacttgctgatatatgatattatcaaataaaatttcacttaagccttgcctttttttactgtcctttccttgtcttacttcaggtggttctattttgacctttagaagttgaaggtgtccagcatcaccttgttcaaataaattatgtgttagtttctgttggctttgtttaaacgcaatgaggttttcaagtgggataagttgtgtttttttgcactacaagaaagaaacaaagcataagaatgacaaattgcaaactcaattatgtaatatttcaacaaaagactgaggaaaaatacatttgtttaaattaaactgtgcaacagttagaacaaatcaaatataacaaattgatttaaactggcaatatgagtatacatatcttagagaaaaagtgatttaaagtgctgaaagtttcaaatgggtcatcctatttcagaaattaagctagaagttctcaacttcctaatttcattcccttattaaaaagctt

SEQ ID NO: 196187 - DNA, 1000 bp, Homo Sapiens
caaagcattgttaaaatgattattattctaagtataactgtgctattaccctgcctacattttctttgtgcttccaaatagattttagaataaaattcctacttttggggttagcctgttaggctcttcatactttggccttaactatgtcttcagcctcattctgaagtggtcaggtaacagaggtgggtttagatcatggactttggaattggccagacctcacttgaattattaactttctcaccttgggcaagttacttagcttgtctaaaatagttctttcatccataaaatcaaaataaaaataataagtctctctcagggttgtggtgagaaaaaaataaagtaattcttacaaagtgatgatcacaatcctgtctcaattacatggtaaatcctcaataaccacatatgtggatggtattaatggcaatcctgagccatagcctatcatgctctgcttgaactaataatgctggtccagccctcccaaatggctggaaggtatgtgtgattggctcatgccttcattctcctgcctggaacacaattctctctcctctgcctctctctaaccactcaattctgtttctagggtgactttgatcaagttacctaatacctttgcattatgacctattaatttgtaaaacagggtccaaattgttacccacctcataaggttatgatgaggattaaataagaaaacaaatgcagaacaccagcaattagcaatcccttcatatttctccttctttgtcttcttcatcttaatgttttaattattattaacacgttgttactgttagtggttttcaaaatgttgtccaaatttccattgtctccttcactggaaagtcgttcctggcaaggactctgctgacagtgattctaccttcaaggaatatgtctggtggagaaaacagataagagagctaatcattcctgtaagatgtgaaaagttctaggttagagccatggagggcacaggaagctt

SEQ ID NO: 196188 - DNA, 1000 bp, Homo Sapiens
tccttacattctgtggactgaggttaccccaggtgctaatggtgaattcaaacccagcagactgctggctgggtcttcagtcaagggtcttgggggttagacaatagaaaaaaatgaaacagtaataccttgtgaggaacaaaaaaatgcaaaagtacccatatctatgaggaacagtataccatactcaaaattttcagtagtttatgaaactgtagatttccatccccctaaccacagttctggattatggggttttttgttttgttttgtttttgagacagagccttgctctgttgcccaggctggagtgcagtggtgcaaagttggctcactgcaacctctgcctcccgggttcaagggactctcctgcctcagcctcccaagtagctgagattacaagtgtgtgccatcatgcccagctaatttttatatttttagtaggatgggggttttgccatgttggccaggctgctctggaactcctgacctcacctgattctcctgcctcgcctcccaaagtgctaggactacaggcatgaaccaccgtgcctggatgccccctaaccacagttctaactaaaatatgatcatatgacaactttttagcattgagaaaacttcctattctggtgggtcttgaggtgctttttatttttctttgtaatttcaaaacttttttttcaactaggacaaaaacagacaaaactcatttaaatctcatcattaatcgatagtgaaataaaaatgctaatgggaaaaaatgtggatttctagaaaatgtcttgcacaatatttttctactagctctgactttagtaagatggttttgaactcttccttaatttttggaaaaatggaatgggtgatatttaatttttaagtgatgtattaggtttgttaatataaaaaagaatatagaaaaaattaaaatggtttataccctccctgactaggtaacacttgttatgttagttacttgcttatgattaataagctt

SEQ ID NO: 196189 - DNA, 1000 bp, Homo Sapiens
aactgcagcttattggaggtgtgaacaaagcacttagggtctttgcttgtttgttagttgaagggtagcaaaggcagttctactgcagaggcagtggcagagaggctttcaattgcccctggaggctctgtccagagagttgccagattgctactggcttgatagctctggggttgggggcagttgctggaggccgagggctggaggacatgcctgatgaggagatatcggaaagggcacccatattacggtctggccacttttccatagggctgttgcagtatgctgggggtgcactccagtctgcagtcacctcagattttccagtacctagaggtatcaccattgaaggctgtaaaacagcaaagattgagctctgtcctagggaggtatggacctgttgctggcccatacacacctataggaggtggctggagatcctggttgggaggccctgtctggtgaggaggaaaggatcggggacctggttaaaaaaacagtctggccacattttcgtagagcagctgtgctgtgctgggggtccacttcagcccctgatcgccttggactctccaaaatctaaaggccagaacagctaagtcacccaaacaacaaagatggcagccccactgtccctctgggagctctgtcctagggaggtttcaaaactctgttggctggagagcactggcaggggtggctggagaccctggttgggaggtcctgcccattgaggaggaatgggattagggacccattttgaaaagcagtctgtacaggttttcacagagcagctgtcaaattcttttttttctacttgctagatttctatcaagctgttgaggatttctattgagtttttcagccagatattgtatagaatttctgttggcttatttttatggtttctgtccctttgttgcactttccattttgttcctgtagtgtttttctgatatcacttagttgtctatctgttctcttgtaactcactaagctt

SEQ ID NO: 196190 - DNA, 1000 bp, Homo Sapiens
ggtaggaattggtaaattatctatctgaagaaaggaaaccatatttgtaaaaataggattagaaaactctgtgcatgtgtgtggtggggggaagagggaggggaaacggagaaagttagagggagcgggagaggaatagtcagaggaagagagagaagagttggagggaggagacagggagacagaggcaggacaactgaaggggttgtctagtgaaaagtcttacatgtaatgcctgtatttcataggcaaaaggaacccatttttgtttaaagcaaaggttgggacagatttgcctggtagctctggagaatgtggccttggaatgagacttggagttggaaggccagccatggaggttgaagcataaaaaacaaacacaatgaagggaagacctggattatgatgctgagaaaaaggaggagtggggtgcaggcagaaaaaacagcaggactttcaaattggaccagaaaaaataattctcatatcttccaaaacaagcagagctttagagaccgaatggcgaaatactaagaagaaagctaaaggaaaggtgcagctgagcaagagatagaagcaagcggatcaacccactccacaaccacatggatctcatccaatctacttattttcctcatgaggtagaatagaccaaggctcaagtggaaaaagggacaatctctgtccccaatccccaacacatccagatgctgagcatttgcagatggagtatgcatctgttcagtttttcattcaaagaacaaatgttgattgcctacatatcgcaggcaccagatgtataaagttcacaaagcattgtccttgcccttaagaaaccagtcagaagccagcttcctaagcaaataactatagcacaaagtgatcagtgctaggagagaggtgtgtccaaagtgctagaggaacacacaagatgcagcgagtggttctgcctgggtcagcaaaggcttccaggaagaagaggcaatgttaagaaaagctt

SEQ ID NO: 196191 - DNA, 1000 bp, Homo Sapiens
gtagcaggacagagagaaagagcaggggaaactacttttaaaccatcagatctcatgataactccctcactatcaggagaacatcataggggaaactgccccatgatttaatcacctcccaccaggttccccctgacacattgggattacaattcaagatgaggtttgggtggggacatcgagccaaaccatatcagaggtggagcctggtgggaggtgtttgggtcatggggacagatccttcatgagtggcttggtactgtcctcacaatggtgagttatcacaaaatctggttgtttaaaactgtgtggtacctccctgctctctcttttgctcctgcttttgctgtgtgacatgcctgctccccctttgccttccaccatgattgaaagcttcctgatgtccttaccagaagcaagtgccagcaccacacttgttgtacagcccgcagaaccatcagccagttaaacctcttttctttataaatgacctaggcttaggtatttctttatagcaacataggaatggcctaatacggcctgcatacacagacacgcacatgtgcacatgcacacgtgtgtgcctgtgctcacaaacacactcaagccagggaaggccctacaaaaggtacagtccatgtagggaaacgaacgcatcttcttgagagattgttggcactacttgagagattcttcagctgtaagaagtccttttgtagggggctacatttctagtcctaagttccaagtgtttgggtcatgttatccattcaagctgagatctggattaaaacccagtcatacccatctggggaaggctttaactgccttctgttgtctgtagccatctccatttacttcccagcttttacagaagaagtcgcatacattcctctcccgactgatccaggctctctaatcttcactgaattgcccagaaaagatgcccctttccttaagtccatgtcatcagagcgaactaaatcacaattacaagctt

SEQ ID NO: 196192 - DNA, 1000 bp, Homo Sapiens
atggcagttgcattaatctgcacttggttactggtatttacattgggtgtcatggactccatcctccagtgttcaagataaatgatggctgacaagagaatttgcttcctttagacttgtatggggccttgctctgacaagagatgtcagagaagacttgaagagcagaactccagatttagctttctgaaacttctcagcttgggcttgaattaaaatcagaaaaataaaacacaccttttttgagcattgccaagactagaggtgcaaactctcagcctttggccctgatctggtccacaaagtgggttttgttcatcctgaacacatatatctcaccatgtggctagctttttctttcagatggcttaattgctatcacttaaaaacttaaatgttgggagaatcacatgaaaatcttgatttccagctcttagagaatttgtaaggcctggcaattcaggacttatattcttgtgtgcaaacacgtgcatggggcttactaactactggtccttttagatagggcaaattcaccacaggctccaaggcactgaggccagtgtcaattgccactcattgtatttgcaattttgctttcttagcaaatagcagcgttaggaacctttaacattgtgcccttgtcatcttgcttcctttgcctattatagttacctgcttgatgccttaggatgtttgcgtttgtgttgccagccttcaactcgatgtgaggcacaggaatgtcagtcagaaagcgagagtgtcccctcatcaaggaactcaggcaatagaactcaggcaatagagcctgttggatttattttgtgtggtttgtttttgtaaaattctggtgtttgaatacttgtggtgtcaggagtaatgactatggtagatgcaaaagagaaactttgttattcctgttagacataagtgattccagtggcagtaatgcactagggttgggggagagtctgaacggtcacagggctgtggaaagctt

SEQ ID NO: 196193 - DNA, 1000 bp, Homo Sapiens
ccttaataacattaatgaggaagaactttcatgacttaattacctcttaaagactttactacctaataccatcacattggcaacgcctgaattttggaagggacacatttaaaccatagcaaatatatgaaaaaatttaagttataaaaatatgtatacttttaatacctaaagcaactagtgaaaaagaaatagatacactcaaaaacaaaaattaatatggaattctaaaaagtaacccaccggaagtaacccacaagaagataaggaaaagaaaacagagaaatgaacaacagagagaatagacagaaaacaaaatacaaaataactgacttaagctctaacatatctgtaattacattcaacataaatggaataaaggattgttggaggtgggtggcaagatggctgaataggaacagctccagtctgcagctcccagtgagatcaatgcagaagggcgagtgatttctgcatttccacctgaggtacttggctcatctcattgggactggttagatagtgggttcagcccacggagggcgagtcgaagcagggtggggtgttacctcacccgggaagcacagcgggtcggggaactccctcccctagtcaagggaagccgtgagggactgtgccatgaggaatggtgcattctggcccagatactatgcttttcccacagtctttgtaacctgcagaccaggagattcccttgggtctctactccaccagggccctgggtttcatgcataaaactgggcagccatttgggcagacacagagctagctgcaggagttttttttcatacctcagtggcgcctggaacgccagcaagacagaagcgtgcactcccctggaaagggggctgaagccagggagtcaagtggtccagctcagtggatcccacccccacagaacccagaaagctaatacccactggcttgaaactttgctgccagcacagcagtctgaagttgacctgggatgctcaagctt

SEQ ID NO: 196194 - DNA, 1000 bp, Homo Sapiens
aaaaaatagtaccaatttttggttatctatgctttataacaaaagaaagagaaatgtcataaagtgtaataatagctttatatgtatgtgtatgtatactgtatgtcagccttgtaggtaacatcatctctcaaaggtatgcgtatacacgcacattgcgcacgcatgcacgtgcacatgtggacaaaaccagtttgtattagtgatcagttttggttttcataagggtgtcacctgaatgttaacatgactaatcatgctgtttgtgttcatgtctagttgaagacacctgtactgaaagaacatgcgtttttgtctgaaggggagaaatttcttatttggtgttagtcaagggaagaaatctagacagcaatgagggaggaagaaactggagattataaaatactgagtctgaaggtgatacaggacataggagaaagttagttgaacagaaaaagaaagggtctgtcccaagtaaaaactttggtttatttttttataacattggttttctcaggaattacagaaaatctattctttgcctcttttgttcagcatctggtagccttttacttccaggtactgagctaacttgagttagttcttcgttcagtagttctgtgagttataggcttaaatggtggacaaatgataatagtaacatccacaacaaaatgacagttaacacttgtgaacagttagcatattctacgtactgtgtgaaaaaagttatttaatcctcacaatcctatgaggtaattaagtattattattttcctctcttttattgagagggaaactgaggcttggaacaattaagcggagttttcatgttacttagatgatatgtggcagagccaggctttgaactcagtaagagtccatgctgttcatcactctaccatcattctgtccttcagggctgaatctcactcctgagattcactgctttgttttcaaggaaaattgtgtactgaattctcaaaaaaattagaagctt

SEQ ID NO: 196195 - DNA, 1000 bp, Homo Sapiens
attattttcatatttatccttaacttcaaagcaaaggaaatggtgtgttaatcttctcattaacccacgtttgagccttaataagaatttaatataaagtaccttttaaaatcttgtggcacacctagaatttatctagtatctgagaggtttagaaaactaaaagatatcatagggtcctggtcctgtactgtccaatactgtagccacaagccacatgtggctgtttaaattttaactaactaaaaataaatgaaattaatgttttagttcctcaattgcacagttcaggtactcaatagtgaaatgtggtcagtggctaccatattggaccacaccaaaatagaatatttctatcactacaaaagagtcctattgcacaacactgttctagaagcttatcaacagttttgttgagaaatatagaagacgtttgatttcatttatggcagctgatgatatattagctgcaagttcccatacatgtttgatagttgtcgtatgttagacaggtttcattcatcatttattcactcagtacaacacctagcaccaaatacttgctcaaaaactgcttaacgactgtttatacaataaaaatggcagctcctatatatctactcaggtgtctagcatcacaataccaaaaaaaaaaaaacaagtaaagatttaattagatttaattggcaggaagggaaacaaagtagtctacattttatgaattctgctgaattcacaaagatgctaaatgtaaatctgtagcaaattgtagacactccctctgcccctgtttggacaactgtggatgacatctgcatcaaatcagccaagagttatttatttttgaattgtgctctgacccctttctaagcccaaagggtaaaaatgtcacctttgttcatttctcaagaaaaacatttttaagatcctgcactgactgtgaaaaaaaaaaagctgatccttggggtattatctgtagttccctcttcacctcaagctt

SEQ ID NO: 196196 - DNA, 1000 bp, Homo Sapiens
agtgagccaagatcacgccactgcactgcagcctgggcgacagagcgagactccgtctcaaaaaaaaaaaaaaaaaaaaaaggaacaaccagtggaatcagctgaacccccatgcacgtctcctagtcctgttgtcccccgctctgcctgacaccccagaggtggccgtgatcttgaatttttctttttttaattaaaaaataaataggggggggtcttgctgtgttgcccaggctgctctcaaactcttgggctcaagcagtcctcctgcctcagcctcccaaagtgctgggattactggtgtgagccaccacgcctggcctggttcccacgtcttgacccttctgtcaatggtgtcctgaaccctgcttcagcagtcgtcctctgtgcactctgtgcacacagccccggggggcttggggagcagagggctcacagtgctcgggcctccctagttagtcagtgctgcagtgtgtgtcctcgtgggcttctggaggcgcacaggggtgtggagtatgagtgaagagggtacttgtcttcagcggccctcggtgtcaccacaggttcctgcccagcagccacatggagggacagaatgacagccctgcagccactcttgcctgcgcctcaggggtgctgcagggatgttcggggaaagtctgccctccccagaaggcctggagaattgggggctctgggaagaacaggcccctctcacgatccctttctcccgcacagttctggtatctctggactcggtcgaaccccaggactggagtttcggtgaggaggaagatgggaagagtccaaggtcccagaaagaaccatcgcaggtgagcccggggcccccagctccgtgctcctgcaccccagggcatgcgtgccgcttctgggacggcctcaaggatgccccatccaaggactgtgtgaggttgtccccagcgctcccaggaagcccggcctccaaactccccgcctgccccacagattccccaagctt

SEQ ID NO: 196197 - DNA, 1000 bp, Homo Sapiens
ctttctttttccttaagaggtgagatcttactgtgttgtccaggctggtcttgaactcctggcctcaggcgattctcttgcctcagcctctggagtagttgagaccacaggcatgagccttggcctggcttgactaaaagtcttgagaaccagggtgtttgggttgggctgtctgtgacggcctctcccactgggacacacccgtgactcccgcctagtgatgtcactctcagactggcctctcagctgtcacctctcccacccctgggccttcccctgactccatcatgtccttgcccccagagaaggagctagtgcgctgctcagtgtgccctcatccccatccccctcatccagtttccagcccgcttcccaggttcctcaagggacgggctactcatgtttccctcccgggcctagtgtatggacaggcaggggtgcaggacagccatgctctccttccacccgccttgctcagcatctcacacccatgcccagctgaccaatgtcccccatagcaggacgggcctcaggtctcacactgctccgtccagggattgggtttagccgggaacccgggactggcccttgggtggctcagttgaggtggcaagagaagatgccctctgggcttggctgctggggccctggcccttcccatacagggaccccaggcctgcctggcgagcctgtggataggttcagctctgctgtatgagcctgggcagtgttctggcctcatttgattctgatggcaatttggggcccacgggaggggtgtaggaccttagagtggagtatcccaagacaggagtgaggtgacagcagcagcatggagctggcagggggtggccacaggaccctactccctcctggcatgaaggagaaggcatgcaggctgagctgggcacctttgcagcaggctcggccacgaggcctgctgtcacagcgggcccagagacagcagccaggagagtggcccctgagcccagggaggatc

SEQ ID NO: 196198 - DNA, 1000 bp, Homo Sapiens
agtaagtggaagagcctgtgtctttttcagtttttctggcctgtaaacaaagatgagagctttcatttaccaaagaaagataaatacaaagaaaacctcaaaaacagggcagctgccagattaaatgtgatggtttatggacatcagctgcataaagatacttaatgatgaagaggaaaaaaaacctctatagtgcaaaaatctgtaagagagtttattaagcaagtgagttattaacatcaaatgcactcgaacaagtttttatagtgtgctgatgcacccagaaggacacagcatcactactgagatatggccccccactaaagtaaattacattctcaatttaaccataagaaaacatcggttatatggaaagtccaagatagagatattttccatgttctacaatttttaatagtgactttaagtagtctctctttagcacccaaataagcaggtatctcctggtaatttttttttttttttttttttttttgagactcagtctcgctctgtcacccaggttggagtgcaatggtgggatcttggctcactgcaacctctgccttcaaggttcaagtgattttcctgcctcagcttccctagtagctgggactactagcacgtgccaccatgcctggctaattttttgtattttttgtagggatggggtttcaccgtggtagccaggatggtctcaatctcctgtcttcatgatccatccacctcagcctcccaaagtgttgggattacaggcataagccacatcacccagccacttttctcagaactttttgggtaataaatgccattctgtttaaatgagcaatttcttaatggtgtaatgccattaagaacacagaaggaacctcaacattacatgttctccatctttactaagaatcccaggttttccccatagaaatctagagtatcattgctggatgctgtggctcatgcctataatcccagcactttgggaggctgaggcgggtggatc

SEQ ID NO: 196199 - DNA, 1000 bp, Homo Sapiens
taacctgggcaacagagtgagactctgtctcaaaaaactaaaataaataaaataggccgggcacggtggctcacacctgtaatactagcactttgggaggctgaggcggctggatcacgaggtcaggagatcaagaccatcctggctaacacggtgaaaccccgtctctgctaaaaataaaaaaaaaattaaaaaaaaaattagctgggcatggtggcaggcgcctgtagtcccagctactggggaggctgaggcaggagaatgacgtgaacccaggaggcggagcttgcagtgagccgagatcgctccactgtactccagcctgggcgacagagcgagactccgtctcaaaaataaataaataaaagtaaaaaataaataaataaataaaataaagaaaaaatagtaatgctgctgtgaccattcctagtgatatcttcttgtgtccatgtgtgagagttttaagggcatgtaggtaggagtgggattgctgggtcgtgtaacatattttgacattattgggtagtaacaaattgttattcaatatatctgtaccatatattcccaccagcagtatatgagaaggtctcattcttttttttttttcttttgagacaagagtttcaatttgtcccccaagctggagtgcagtgatgcatacacagctcactgcagcctcgacctcctaggctcaagtgatcctcccacttcagcctcctgagtagctgagaccgcaagcacatgccatcataccctaatttttttttttttttttttgagatggagtctcactttgttgcccaggctggagtgcaggggtgtgatctccactcactgcaacctctgcctcccaggttcaagcgattcctctgcctcaacctcctgagtagctggaattacaggcacacgccgccatgccaggctaatttttgtatttttagtagagacggggtttcaccatgttgtccaggctggtcttaactcctggcctcaagtgatc

SEQ ID NO: 196200 - DNA, 1000 bp, Homo Sapiens
gacagagaagggcaggcactggctggcctgctgacagacaaggagaggaatctcagagagaaagtggacgagacagggacagagggacaggcaggtggggcaggagagaggcagggcaacgtggagctggcagaggggccaatgggagctcagaatggagcaggctgcctgggtttcggcctctgtgcctggcaccctgcctgccaggctgcccactaccccattctctggaaccctgggagcgtcaataggggcaggggtctcgggtggggaggtcgagggcctgtgggggcggctttctgatcctgtgcgggctgcccgttgcaggagaggagccagcagcccctctccgcagagggcccccacctctccgtgcctgcctcggtcatagtcagcgccccgcctcccgcccaagacccagccccagccacccccgtcgccaaaggagctggcctcggccctcaggcccccgacagccaggcttccccggctccggccccccaggtagagggaccccagcagcctgtgtccgcagcacagacccagcctcgcccctcctgcccgctctcccgctcctcgctctccgccctgcctgcgtctctgttctgctgacttggaacacagagctctccttcaccccccaagtgtctcctagtgatcatggatgcctgagaccagggccggccctgggggagcccacgcgctgcaggaatgcaagacacacacggaaggaaatctgttctttcctaaaattataattttcaaatctgaataagtaatacattcagataattcacatttcaaacggtacaaaaagatgcatagtggaaagcccccgtctcctgaaccgtggcctcctgttgtcctcccaaggtggtttcttgcatttgttatctggatagggaaacagaatcaaatagattcttttccttcaatttttacaaaaagggtagcatcttctgcctgcggtattgcatcttttattatttaaaaattgatc

SEQ ID NO: 196201 - DNA, 1000 bp, Homo Sapiens
ggttcatcctctgggcatcagccagcatcagccaccccacggcaggggaaatagatagttccatgaatggtgtggccatggtggcaaaagtcaagggaggcatgagcccaacacaagttccctcttgctagagatgacctggctgctgccgctactgaatgccctacctgccaaccacatggactaataatgagccctcaagatggcaccatttcacaaggagatcaggcagtcacagtgcaaagttcattatatgagaccccttctgtcattgatgagacagcgatgagtcctagcagagtgaacaccgactctggatatggattttccttccttgcaacagtgccttcactggcatcaccaacagagcacttacggtcgtctctgatttattggcaggggatttgaacaacactgcctcaagccaaggggtctgttttacagcaaagaagctatggctccaaggttcctctggaagcagcaggcctacaagaacatcaggatgacctgtgccaaggctatgccagggtgaaagcgtgagcccacaccctgtataattgggatactatccttgaaactgtggtgtacgtgccttaccaagagcagacacatggtgctatgatcccaaaagcagaaagacatggggctggaaacccagggggtggcggggggagtgagatcggctgctctcaccatcactcgcagagaccaccttgagaaatgtgtgcttcctgtgtccacagctttgggtggggctctagcaaattcgacgtcttagttcttgatgggggaggaggagcggagagtggactcctccaccagggaacatcaccaattctacagaacttgaaaatacaaatactccctggtcctcttgggcttctcaagtcagtgggccagaggcaattagcaacaattaggataacggagtttctacatgcaaaagaatgaagaggtagcccctacattatacggtataaatgttaactcagcatggatc

SEQ ID NO: 196202 - DNA, 1000 bp, Homo Sapiens
ctggcaaactgaatccagcagcacgtcaaaaagctttattcccaggatgcaaggctggttcaacatacaaaaattgatgtaattcaagtcagctttattcccgggatggaaggctggttcagcacacaaaaatcgatgtaattcatcacataaacagatctaaagacaaaaactacatgattatctcaaaaatgcggaaaaggccttcgaacaaattcaacatcccttcatgttaaaaactctcaataaacaaggtattcatgaaacatacatcaaaataataagatctatgacaaacccatagccgatataaaagggcaaaagctggaagcattccccttgaaaactggcactagatgaggatgccctctccccaccactcctatttaacatagtattggaagttctggccagggaaatcaggcgagagaaataaataagtgatattcaaataggaagtcaaactgtctctgtttgtagatgacatgatcctagatctagaaagccccattgtctcagcccaaaagcttcttcatctaataagcagcttcagcaaagtctcaggatacaaaatcaatgtgccaaaatcacaaacatttcaatacaccaacaataaacaaacagagagcgaaatcatgaataaactcccattcacaattgctacaaagagaacaaagtaccaaggagtaaatctaacaagggaagtgaaggacctcttcaaggagaactacaaaccactgcccaagaaaatcagagaggacacaaacaaataaaaaagatagaaagaatattgtaaaaatggccatactgctcaaagtaatttatagattccatgctattctgactaaactaccactaacattcttcacagaattagaaaaaaaaaaaatttaaaactcatatgaaaacccaaaagaccccatctagccaagataattctttttgttttttgagacagagtctcactctgtcacccaggcaggagtgcaatggcatgatc

SEQ ID NO: 196203 - DNA, 1000 bp, Homo Sapiens
taacaagtggttctgaactctggcaacttaatagaattatctggaagctttcatctttttttttttcttttttttaacttctcattttgaaataatttcagactttcaaaaatgttccaaaaatagagtccccatatacttttcactcaacttccccaaatattgttttagataaccacagtgcaaacattaaaatcaataaatgatcactgacattgtacagtaaataaattgcagaccttattcaaatcccttttatcttcccagtgatgtcctctttctagaccaggatccaatccaggatcacacattgcatctcatttttctgtcctctcagtctcccttaatctgggacagttcctcagaatttcttttgccttcatgaccttaacatttatggagagtattggagttattttgtagcatggccctcagtttgggcttttctaatattttctcctgattaaactcagattatgcactttaggcaagaatagcatagatatgatgctgcgccttctccatgcattgtattaagatgccctaagatgcagatatctctgattactggagatgttaactttgagcactgggctaaagttcctccactgtaaaatggctattttctttggaagcatttttaagtgaccaataccccaggccacactatggaccaatcaaatcagacactcctgggaaaaggcacaggcattggtaggttttaaatgccctacagctgactgtaaccagcatccaggattggaaacccacagcttagacagtgaagattagaatcctggaaatcagtcaggaagccattctttgggcctaacatccagttccagacacaacatttggcatgggcccatggtaggggaatggaaggccaaaaatctcctgattgggaaaatgatgggtgagtagactgctgtccaataaaaatagaaggcagggccaggtgtggtggctcatgactgtaatcccagcactttgagagatc

SEQ ID NO: 196204 - DNA, 1000 bp, Homo Sapiens
ggcacaattaaagctcactgcaaactccacttcctgggctcaagtgatcctttcacctcagcctcctgagtagttgggactacaggcgcacgtcaccacacctggctgagttttttttgttttgttttttgagacaaagtcttgttctatcacccaggctggagtacagtggcacaatcttggctcactgtaacctgtatctcccaggttcgagcaattctcctgcctcagtctccaaagtagctgggattacaggtgcacaccaccatgcccggctaatttttgtatttttagtagagatgggatttcactgtgttggccaggctggtcttgaactcctgagctcaagtgatctgcccgcctctgcctcccaaagtgctgggattacaggcgtgagccactgcacccggacattttttaacatcttttgtagagactgggtctcactatgttgcccaggctggtcttgaatacctgagcttaagccatgcttcctcttctgcctctgaaagcgctgggattacaggggtcagccactgtgcctggccagaggagacggatgtttatgaagagctgattgtgcatggggttcacgctaaggataaagtcagaatatggtcagctgcttgctgaaccttcatagtgccccagtgaggaaattagtcacagagaggctgcatggtcatggttggcataacagtattcacgcctgggtctgtctggttccaaatgcgtgtcttagtcaccattcactcatttgaaaaatatttattgagcgcctgctgcatgttaggcccagttctaggtagtccccagtggtcacagcactgatcaaaacagaaaacagtatccacccttatggagtgagcattctggtaagagacacaatcaggctgggcgcggtggctcacgtctgtaatcccagcaccttgtggggccgagatggaaggattgcttgaacccaagagttcgagaccagcctgggcaacatagggagatc

SEQ ID NO: 196205 - DNA, 1000 bp, Homo Sapiens
ttcctgagttggaagagaaattgagagttaggagggacaaggcctgatttgcttttaccaggaagacagagctgggacctgggttgtttgccttcatggggccccaacgttccccaggaatattatgctggacatcaatgtagccaggcgtgacacctgaaaataaaaaacactttggctcacaggggcaggttctttgggggctcatggcctcctggggggaggtcctccgtagagaaaggaggtgacctgatttgggtgctcacgggcgccccctggcctctgtgcggagaactgaccgtaggggtaagggcagagcgggtggaccaggaccgaagccattcaccgcaccaccaggcaggaggtgatggggctggctggaccgggagaggtcggagcaggtggggcgaaagtagcccaggatttttttttttttttttttttttttgtcttgagacagagtctcgctctgtcgcccaggctggagtgcagcggcgcaatatcggcttgctgcaacctcggtctcgggggttcacgtgattctcctgcctcagtctcccgagtatctgggagtacaggcatgtcccaccacgcccagctaatttttgtatttttaagagaggtggggtttcactatgttggccatgctggtctcaatctcctgacctcaggcgatccacccaccttggcctcccaaagtgctgggattacaggcatgagccaccgcacctggctgatttttttttttttttggctttgttttgttttgtttattagagacagggtctcattctattgcccagcctggagtgaaatggtgcgatcatagctcactgcagcctcgacctcctggactcaagtcatcctcttacctcagcctcccaagtagctgggaccacaggcacgcaccaccacacccacccaagaatacatcttggggccgggcacggtggctcacacctataattgcagcactttggggggctgaggagggcggatc

SEQ ID NO: 196206 - DNA, 1000 bp, Homo Sapiens
ttttttttttttttttctgtaacctcatatcagaagcgatgctttgaagtccagattaaagttactggactttaatctccatgagtgcccagccctacgtgtcttgttggtggctgggtccccagtgcctaacagagtgctgggcatgctggaggtgcccaggaaatctctgctaatgaaagacacaggctgggagcggtggctcatgcctgtaatcccagcactttgggaggctgaggtgggcagatcacttgaggtcaggagttcgagaccagcctggccaacatggtgaaaccgcatctctactaaaaatacagaaaattagctgggcatggtggcgcacgcctgtcatcccagctacttgggaggctgaagcagaagaatcgcttgaacctgggaggcagaagttgcagtgagccgagatcgcaccactgcactccagcctggacaagagttagactctgtctcaaaaaaaagaagaaggagaaggaagaagaagaaagaagaagaagaaagactgaatgaaaacagggagaggttaatgggtctgggagctcttaaaccctaggcctggtttctgacacaccatcagcagacccacctggtggacaggggcggtagggagttctgccctaggaggaccaccagattgcccggggcagctcctgcctttggcccccatgtctgccctctccccactgcccaccgcagtctcagactcttaagggtacctctgtgaggggtcgaggccgtttctccactgcaaactccgtgtggcacagctcgcagtagctggtgttagatgaggaaagccacttctccagacagctcttatgcacggcacccagcgtgccggtgcagccacacggggacagcaagcactccccgttcgctccctcatggcagatccggcagaaaggaccatcactggacacagagataggacccatgagcaatgattgggctttctgtctatacctgcttcactacccactggatc

SEQ ID NO: 196207 - DNA, 1000 bp, Homo Sapiens
agtaggcagaatgaaattttcttttctttttttttttcttttgagacggagtctcactttgtctcccaggctgaagtgcagtggcctgatcttggctgcaacctccaactcccaggttcaagtaattcgtctgtctcagcctcccaagtagctgggattacagttgcatgccaccacacccagctaatttttgtatttttagtagagatggggtttcagcatattggtcaggctggtctcaaactcctgacctcaggtggtccacccaccgtggcctcccaaagtgctgggattgcaggcgtgagccaccacaaccggcccagagtgatgttttcaaactgctaatataatcctgtcaaatccccaacccctcccagattcaaacccttcaaaagccttcacttggcttttaggacaaaagacatcctttgctgctccccagctttcaagcctcaattcttcctccctcctccatgctctgcatccctccacactggccttcttttggctccttgcagggcacattctccctccctcaccttggactatatacttcccccaccatccactcctactcacctttcagatctccgcatagcttccttaagaaaaagcctttcaggatttctcagtctcgagtggctccttccttctaggttcccagataactatttttttcagaccgcatctctcccttcactattatacattctacatggggattatgtgatcacaggttgcctcccttggtaaactgtaagctttatgaagttggatattcctgctgatgctcatcagtgtacttctggaagctagcacggggcttggtccccagcaggtactcgagaaatatatatcaagccaataagtgaatgagggcattcagcaactacttatttattcatttatttatgcaacaaaaattttattgagagcctactatgtgtcagactctgggctaggtgctgtgtattccatagtgcacataacagacaagatc

SEQ ID NO: 196208 - DNA, 1000 bp, Homo Sapiens
gtatttttagtagagacggggtttcactgttggccattgctggtctcaaactgctgaccttaggtgatctgcttgtgtcagcctcccagagtgctgggattacaggtgtgagccaccgtgcccagccccctccctcttcttaaacaagtgggcctggcaatcaccacccctgggtgacttggtgcagtcccctgatctcccgagactccctgagctcatctgtaaacggagcagggaggtgcctgcaggataggactcacaagcactgagtggatgcagggaggggggcccctcggggctgcaccccaagccaacttcatcctgcactaatgtccatcggggttttacctctgatgaaggctggggccaggagctgggggctccccggggtccctcagcagccctccacccccacaagaccttcagtctccactgtgtccaaagagggggtgccctggagccctagaggcccggagggtgctcggggccgggccacgagggaggctgagccatggagctccatttgcacctttacggaaatgaagttttctaggactttgacaaaagggccctggaaagggtgccagctgccagccaacgaccaccgcagcccctcctggggtcccaggcaggagtacccaaccacggaggtcacagctgggagcacccctggttgcccagggtctgagcctgaggagaggcagagccactcagggctgggaatcggggagaagcgaccccccgcatttagccaccccacccccacctcctgggaaactgaccctagagtgctcaaggtcgccaccgtggccgcctgccttggaggagttcatgggaagcagccatggggaaccctcccgcccccaccaccctgccctggctccctggcctgctaacatgggctggggctgctggggtcccagacaagggggggcagcgtttctgagcctccagatgacagtcccaaccccgcagccccagccgggctggtggggaattc

SEQ ID NO: 196209 - DNA, 1000 bp, Homo Sapiens
gccacagagatggtctcgatctcctgacctcgtgatccacccgcctcgacctcccaaagtgctgggattacaggcatgagccaccgcgcccggccgcttttttgactctttattttattattattatttttttgagacagagttttgctcttgttgcccaggctggtgtgcaatggcgcaatcttgactcaccacaacctctgcctcccaggttcaagcaattctcctgcctcagcctcctgagtagctgggattataggcatgcactaccatgcctggctaattttgtatttttagtaaagaaaaggtttcttcatgttggtcaggtcttgaattcccgacctcaggtgatcggccctctttttcgactctttaaagactatgttcaaagtaatcaataaaaataagttcatttaaaaaactagaaagaagatatgaaaatgtatattaatctctagtggaagctctaattaaagagaataacaaatgatggttaacagaagtgggaaggcacaataaagttttcctcctgattaagaaaagagaatcaccagtctgattggcctctcttgcatctctaagtcacaaagataataaagaactctaaagagaaggaaataccaccctttagcaggatacttcagttgttacgtatgtgagaccttttattatgatggaagctaacaataatttcagctctaagaattcaggaagttgcacaaactggggaagttggttattaaataaaggaagtatggggaactcaactgaatagctgggctgtctttgtaattagagtaaatgattacgtctagcatgccaatttgatatttagcttctctaaagctccaaagttttgttaactgtgaacaggccccaacaaatttataaagattcaggatgagtgaatgttacttaggcctgaggaaaaaacagggttagacgaaagagctaccgaagcatcctgctaaagggtgatattttcttctcttcagaattc

SEQ ID NO: 196210 - DNA, 1000 bp, Homo Sapiens
ctcagcctcccaaagtgtagggattacaggcgtgagccactgcacctggatggctcaatagttttaattcagctgagaaatctctaatcctttggcctatagaaggcagacaatgcttaccacagaagagaattaaattttcctaagttttcaaatgaaaagatgggcatatcattcagcaaaaagtttgggcttagctacctacttatcacctagattacttaaattgcaaattcctaaaccctatctccagagattccaaagcagtaggagtagaagcccaagaaataaacatttcctatatatattcatgtacataccaagggattccaactgaggtgatacaagaacagaatttggggaacattgttctacattcctaagaatggtcctaactgtactaccaagaaagaaaaacagcaacaagaagcaatctgtagacttctagacattgtaattgcaaacatattttttctattgttttaatataaaagatgctctcatagttgctgtgcagaaatgtgttatggctcctatatcctttgaatcagatgttgacctctgaaagtggtattttctggacatgttcaatatacaaatcaaggccacgcttcgttcaaattttaccataataacacaagttattaagagtaagcaacaacaaaaaatgatggctggttacctccagggaaggggaactaagacactgagagcttgagacaggaagaaactttttacagaatactgttttgaactatttaattttttttttttaaggattcaagaatggatagtacatgtgttaggaggagaggacaaacaaccaacagttgttacaaagtgttttaagaaccatttcattcccctttcagaaacaattcaatagttcagagtagcagtctagcaacatggaagagttaatttacacaaacactctggattgcagggcaacagatggcagacactgttaagcaagcaatctcttgagttaatagaattc

SEQ ID NO: 196211 - DNA, 1000 bp, Homo Sapiens
aaatcatgctggtctcagccgggcgcagtggctcacgcctgtaatcccagcactttgggaaaccaaggcgggcagatcacctgaggtcaggaattcaagactaacctggccaacatggcaagtccctgtctctactaaaaatagaaaaattagccgggcctggtggtgcatgcctgtaatcccagctacttgggaggctaaggcaagaatcgcttgaacccgggaggcagaggttgcagtgagccgatcgtaccaccgcactccagcctgggtgacagagcaagactccgtctcaagaaaaaaaaaaaaaaaaattcatgctagtctcacccaagagcagaggtttgggaactgctgaggcctgggggtgcctgagtaccatcctacctatgaccacccctcttctctttgggtatgtgaaggggcagaccagctgaaatactcaacctgccccgtggagacctacagccttccctcttcctggaatttctcctcccctctgttgtcatgacttgcccaaagctctctcttcttccaggcgcacctaacgtgcctcctccccagcagaaaggcctttcccgcctctcaactcccctacctgtacctgtcacctgaggtcagacagcctggatttgaagtccagttcatcatcctgcttgctatgtgactttgggtcaaaatgcacacagtatctctgagttccagtctgttcattataaaacagtgacaatcaccacacctcatagggtcattgtgttgaatacaggacagaagagtgtgtgaagaggtcatttttagaccaaaaacacagaagagtcatctcactcaggattcgagttaaagtcagcttgaaaatcaaatatcagagagctttggactgtctgtcttcctgttcaacttctggctcctctttaaagcgtccccagggccctcagttctccagtgttttaatcatggctgggaccagccaacctctatccttctgtctggcagtgaattc

SEQ ID NO: 196212 - DNA, 1000 bp, Homo Sapiens
aacctcaaactcctgggctcaagtgatcctcctgcctcagcctcccaagtagctgagactacaggcatgcagcaccatgcctggctaatccaggctcttttaatcttttcattctgctattctcttcagggcatcagctggctccactcatggttcctaatatactgaccttaattccaaggtgagaagattatatccaggagcagaaaaacattccttccttgtgcccttgctcaagaatgaaagaaatctccctgtacacccttcattggccagaattttgcaacacactcatccttgatcattggcaagggcgatggcattctgatgatcactttagactaaaccagactcagtattgagtccaggaaggagcccagttttaccgcttccctggcccatgaatgcagtcatgactgcattggcacaaaagatgctgggtgtgtgtgcatgcgtgtgcctgtgtgtttgctgatgctggggtgagaagaggagttttataagcacccaagaatgcctgccatccaccctcactgtgcatcaataggctagtaacatgcagaaactcattagaagaaatattggcatccaaatactgtgtgtagccatggaagaaaagtgcaatttgccttaaaaacattcctatttttcagggtcattcagatggcaatggagtgctgattaaatccactgaagtcagtaattcactgcagacaaaaaataaaaaaaaggggcctcatagttactttcactgtaattcaaatattaatgccctcattttcagaaatttaaaagaagtcagattacacagatttagtgactaatataaaaaccaaaagaaggtgaacattacaagataccaagtcaaaatatttaccatataacaacaataatagcagcaagtaacattacgtacatagtgtttattttgtgtttcagtgccaggcactggtagtggtatactggcattattttacctgatcacaaatacaaggaattc

SEQ ID NO: 196213 - DNA, 1000 bp, Homo Sapiens
tgggaggccatagccagtaagctactaagccctgatgttcttattacgtgatcagaatgaaaaggtctgttgaagtttttttattattttagatctgtccacctcaacttctagagagggaacaccgcttaacaacagtaattcttcccttttacttgtaagtgccacttcctcttttgtaaatacatcgcttgaattgaaaatagttacttaagtaaccgagttatttgaatgaacatgacagtctcccttaaattttgtgtgtgctgcaggaaattgtgttaaagtaagacttctggaacatctagtaataacggctctgtgtttaagacttgatctgtcatagcaaattaatcggtattgcagacaatgtaagaggctttagcacagcataaacaaatcaaggaaatataagatcggggcatgtaaagcgtgtgtacttttgcagtagaacttattacttataatatggaggatcaaaaaagtcggggggtgactagaaaccaaaagagagaaaaatgtagaaagagacagtttttaagatagaagagcattaaggatggagtagtactgacctcagtttatgaagattatcttatttttcagatgaattcagttcctttcttcagtgataatgcaatatttgttggctgttttttttttttttcttcttatttttcttgcagatgaatggaccaggtagtttgtttgcttcagagaatttcctgggaatttcaagtcagcctagaaatgactttggaaacttttttggaagtgcagttaccaaaccatcttcatcagtgactccaagacatcccctcgaaggaacccatgaattgagacaagcttgccagatctgttttgtaaaatcaggtcaggaccaaacaaacacgcagagagtattaaactacttgctcataaccttgaaagttcttaggaatttgtaaatacatgttaacaacatcagttattatggttcttcaatccctattttgaattc

SEQ ID NO: 196214 - DNA, 1000 bp, Homo Sapiens
gtgccgtggcgcgaccttgggtcactgcaacctctgcctcctgggttcaagcaattctgcctcagcctcctgagtagctgggattataggcgcatgccaccatgcctggctaatttgtgtatttttttagtagagatggggtttcaccatgtcggccagggtggtcttgagctcctgacctcaagtgatccacctgcctcagcctcccaaagtgctgggattataggcatgagccaccgcgcccggccccagtttatattttgagaaagaatccctctggctgtccttagagagcatatggagggggcctagtggaactgggggagcaagacaggaagcaagagcaagtctcgaaggagagaggtggtgagtagtgagagggttggtggctctgaagaggtctgagagatcttcagaatggcaagtgtccctgactccttggtgattggctactggaagccaggacactcaaggataagaaggaagaaaaacaatgaccctgagacgaacactatggtctcagtgcctccacagatatagacagaaaaccaagcccacgttggatgcttttttccaaaactgatttttcactcactccctcttctttcgcaggaaaaggtgaattttaccaacagtctccgacatacccctggagaaacacactgtcatttatttaaccagtacctgactgcggccatttagctgtctctatttttgcttttgtaaacaatgccacaatgagcactcgtgtggctaaatatttgcgcctgcacttacagatgatgtgtgcttacagacttccttaggagagatttctcaaagtgaactgtttcagctgcattttgccagcctgccctgttcccatctgagggtgggcatcgatggaggaaatcttctgatgcccataaggtcaaagctgtcttacctttaatattcagtacctgaaaaaaaaaaaaacccttccaagaccaatatgttgaccaaaggctactaggaattc

SEQ ID NO: 196215 - DNA, 1000 bp, Homo Sapiens
tatacagttaccgagaggattacgaaactcatacacctggtacttagcaggtataaactattatttatcaaatatattaggtcacagtatacttcacagagcactacaaatcaacagaagtttatggagataaagcagtaagcagatttgctactcaaattcttcccaggatgctcttacttgagctggctggcaaaaaaaatcattcaagagttttaaaaatagacaccacttacggaattaggacagtatcttttcatgagttcgttgatggcaatgtcattcttgtgtagtttagggcctgtgtggtaccagccaactattctttccctggctaggaaggaaaaaaattagcaggctttaactatttcatgaagatctatacaactccctcaaaaaggataagaacatcagtagttatgtcctttacctctttgaaaattccagacatatttaccctggtggtactaaaactctaatggaagactgactttactggatagttcttcacttttctgccgcaatgagaggttatttccccttgtacccaaacccaggtcgcctatttggccttaaattgctactctagtttttcatgtattctaccttattcctctactaccactagtcttactgaagtgtagctaagtgaaagggcccttgatgttaaagaaaagcgaacagaagacccccatacacacagttcaattctatgctgtaacaccttagaacatcaagacataccattgactttcttaaacattccatacatgttttccaaataatcatggtctaaaaaccatacagaatcgtctttgtcatcttcatcaaaaggaactaaagaggaaaaaaaaagttagtttagggtgcttgatagaaacctagaacacaggtcacaattgaagacccctaggccagttctgattcacttacgtgtttcacttgcccagcaaagtattaaaaaattttttttgagctgccccaaaaactgggagaattc

SEQ ID NO: 196216 - DNA, 1000 bp, Homo Sapiens
gaccagcctgaccaacatggagaaaccctgtctctactaaaaatacaaaattagccaggcgtggtggcacatgcctgcaatcccagctactcaggaggctgaggcaggagaatcccttgaactcaggaggcggaggttgcagtgagccaagataatgacattgcactccagcctgggcaacaagagcgaaactctatctcaaaaaaacaaaaacaacaacaaagtaaaactatgtaacttttacataggaaaatacactatctttgtaatcccgagttaggcaaaaaagagttcttagatatgattccaaaagcacaacccataatagaaaaatttgacaaactggattttattcaagtttaaaaattttactctgcaggccaggcatggtgtctcatgcctgtagtcccagttactacagaggctgaggcaggaaaattgtttgagcccaggaagtaaaggttgcagtgaggtgaaatcgtgccactgcattccagcctgggcaacagagcaagactctgtttcaaaaaaacaccaaaaaaaattgctgtgcaaacactattaagagaatgaaaagacaagcacagagacaaaacactgcaaaacaagtatgtgacaaaggagccgggggtggtgactcaggcctgtactcccagcactttgggaggccaaggtgggtggatcacttgaggttgggagttggagaccagcctggcaaacatggtgaaaccccatctctactgaaaatacaaaaattagctgggtgtggtggcgagtgcttgtaatcccagctacttgggaggctgaggcaggagaatcgcttgaacccgggaggtggaggttgtggtgagccaagattatgccactgtactccagcctgggggacagcgagactgtctcaaaaaaaaaaaacaaaacaaatatctgacaaaggactatatccagaatatataattccaaaactgaaaacaacccaatgttttaaatggacaaagaattc

SEQ ID NO: 196217 - DNA, 1000 bp, Homo Sapiens
cttcaggaggctgaggtgggcggatcacctgaggtcgggagttcgagaccagcctgaccaacatggagaaaccctgtctccactaaaaatgcaaaattagccagccatggtggtgcacgcctgtaattccagctactcaggaggctgaggcaagagaatcacttgaacccgggaggcagaggttgcagtgagccaagatcgtgccactctactccagcctgggctacagagtgagactctgtctccaaaaaaaaaaaaaagcaagagagaaagaaaaaaattagaaattctgttcctcagtcacactagctcaataatcacacgactgacggctgccatgttgaggagaacatttctgtcactgcagaaaattctactggacagtcccgtattagatcacaaactccttaaaagcaaacactctctcactcatctctgtatcttcggcacctagctgggtgcctaatatcatttcaaattgggggaaaaaaaaaaggcaaggtatttgctgatcaagaggcaatatggcacaaaggttaaggaagtgactatctgggttcaagtccacactggcacttaccgactatgtgagcatggacaactgacttgagatctcagtgcctcagtagggatggcaacagagttcggcgtaaatgagttattgtacgcgaaggacacagagcagcgcctggcacacagtaagtgctgcatgcaggctgacagctactgtcaataagaaaatgtttacaaggccgggcgtggtggctcacgcctgtaatcccagcactttgtggggccgaaccaggcagatcacaaggtcaggagttcgagaccagcctggctaagatggtgaaaccccatctctactaaaaatataaaaattagacaggcatggtgggggggtgcctgtagtcccagctacttgggaggctgaggcaggagaactgcttgaacctgggaggcagaggttgcagtgagctgagattgcgtcactgaattc

SEQ ID NO: 196218 - DNA, 1000 bp, Homo Sapiens
agcacacagaggtctgggatccccatgtggccttccaccgtcaccctcaggcaggcgagcggctgcctgagctccacacccagtgacagggaagaggcttatgggagttcattctgatacaaatttcatagcccctaggcaatattttgctcatgatacagaatgtgctagaaaatggctttaagcctcaccgagcacctctaccaccccaacccctggccaagtcccacccagcagaggccggcctgaggtgaggaggtggatggactgagggccatgggaccccttggcctgcaacgggcttccaggaggagacaggtatcccctctgccagtgccagcagcgatgacccacaggcaggtgacagccgagagcccgagagcccacacctgcacccagacactgcggggagaactaagaccatggcctggggcccaggcccatgcccatgccctgcaggatcctagcccccacccaggccctcccaggctgccccaccccagcaccctccacaaatgccccttgttccctttcagctacaacaaaaaataaaccttgttgagaagaaagcccgaagaaaaacgtccattctagagaatacgaaaaggccaaaaccaggagtggtgtctcccccaacccacactgcggcccttggggacagcctggggaggctgctgcccggcacgcctggctctctcggagcggcaccccgagggggcctggggatgcgtgcaaccagcccgtgctcatacggggcctggggacagaatgcaacctttccacccctcgtcaccggctccccctgggctggccagggaggacacgggcagacgatgaggtcatgcaagcagccccatgcactgccacccaggtgctcacggggccaagctccagggtccgtgccccccacccgacagtcccgctacctgcggaccacatgttcagacacactgatgctgcggcaccggaaggcctcggctgcagagctctccttgaattc

SEQ ID NO: 196219 - DNA, 1000 bp, Homo Sapiens
ctaggacatctgcctccctcaggatcctgtgcctggacccagccctcctagggtaagataattatgtttctaaatttgggtttcttttaggataccatgtttctcatcagaaacactggtgcctcatcagtgatagcaatgctgtcaccagcttactgtattatttccaaagtgcttgagctcaccttctcatctgtgctgagcaggtggacccaacggcagggcccttcactgcacccccatctccctggacactggagggtcggctctatctgacaacatgaggaagccacgtcagggcagcctgacgcatgcccgttatatacggcgtggactttccagctgcccatctggcttctggctcggttcagccaaaggaaaatggaagggggacatcatgtactgactgctctgggccacctctcccctaatgggaggccacgtcaggctggctgtggccacctgcccaagggcactgcttttctcaaggtggacttgtttacccagctccttcctccccaccctttgggctgttgtcgccagccttgtttactgcacgaccccctgtgcgttatctacggcccaggccttgtgaacagcctgcttattaagccctcctcagattatcaccacctgagtgtgtcatctgtttttctgttgggaccaagatgacgcagacatatagaaaaattctcagctttgttattagcgagagccccagttggggaaggatctggataaaggaaaagaaagaaggagccagtataaagggggcagcaaataccacattttcatcagagtactgaccccaaacctacaggctggtctatttaccggcaaatagagcaacattccttcccagtgctctgcccaacaccacccctagtctgggaaggggaagcaaggcagagctgagcagggacagaagtcggaagccaactgtcgctttcattgtatgaattcccttcatgcaaaataaagaagacacaaaacagaattc

SEQ ID NO: 196220 - DNA, 1000 bp, Homo Sapiens
taacccaaggacatgagcagactgaaagaatgtcgtattcttaagacacataaatgaagtaattttattctgcctttaagtcattttgttccctggttgaataagacggtgttgtgactcacactttaaattataattgtgtttctatatccctctagttataaatatttcatttttaggcttctttaggaaaaatgaaggtcttccagctaactttattcctcattcaaactttacaaatacatattccccccaccctctcccccaaccccaccaactccaggcctttgcaggtgttttgctttaccaggaagtagatttgtgttttattcaaataactctgaatatcgatactaatgaaaacacttggcatctgttttctgttgaaatgtgaatgcttcagagcaatatttacaaaacccacttcccaaccactgctctcagatttgattaaataacagtaaaacatgacattccaaagcagagtcacaatctgttcttgagctgtgtcagggccaagcctctatattttctaatttgtgaaacatcacttacccagctgatagaacaaatgttctctcctctcactcagatgcaatacagtttgcgttttcctaactgaagtcccaaagttccttccacacgttttaggaattggaggtaatatggggaataattcaaatattggtagagtgtgcagtggggcacatttgtgagttgaccaaccttttagtaagatgagctgccgtaaacaaatcaaggtaattcatggtagaagcagggaagggagcaatctcaaaatttttatcaaacttgggtctccattcagaacagagaaaattctctctggagatcctggcagacaggtagcaacttctacacatcccatgacatagccacagcattttatctaaaggaagtccactattaataaatattactaggtgtagttagctgaataatggcaccccaaaatatcatgtccaaatccctggaattc

SEQ ID NO: 196221 - DNA, 1000 bp, Homo Sapiens
gagacagagtctcactctcttgcccaggctggagtgcaattgcatgatctcggctcactgcaacctctgactcccaggttcaagcaattctcaagcctcagtctcctgagtagctgggattacaggcgtgcgccaccatgcctggctaatttttgtatttttttgtagaaacagggttttggcatgttggccaggctggtctccaactcctgatgtcaagtgatccgtccgcctcagcctcccaaagtgcccggccaattataacatactttaaaaaataactggatgaagagttacatactaaagggaactagctatttagtcctctaaattatagctaccttataggaagtcacatgatgctagcagaaaaggattagtttcaggtaaaacaggaaaatacagttgctgtttcacaataggaaaatataaaacataaagtattttaccactatagaagggaacagatgtctgtagttattaccctgtgtaaagccagattggtatgtaccataaattcaggctaaaaagtgcctattagagattgaaagtctcaggaacacaagctccatgtctttggaagactaaaaatatgcttaattctaagatacaactctgagtagaggcagaattaataggatataaggttaatttatggtcatggagagaaaaatgggtaaaaatacctgctgcaataagctcttctagaatgttcctgaaagataacgtggtaggcagaattctacaaattctctcccctcaagatttcccaccctaatccctggatgaataggatgaaatataacatccacaaatatgttatattacatggtaaaagggactttgcagatgtaattatggttattaaccagttgacctgaagataggatattattttagataatctgggtggccctaatcaaatgacgtagtcttctaaaacaaacttgtcttagctagcagcagcagaagtcagagatacaaagcacaagaggaattc

SEQ ID NO: 196222 - DNA, 1000 bp, Homo Sapiens
aggtagactggcaaactccctgatctttgaaagcatttccccaagctacacacaagtccagtggcaaaagatggaagtctgctgactcaagatgtttgggtaaaaactctgaccagtcattggctgacggctgaactatgctgatccaggaacaaccccccagaaagcaagacttaaaaaagacagctgtgcgcagtggctcatgcttataatcccagcatttggggaggccaagatggcaggatcacatgagcccaagagttaaagaccagcctgggcaacatggtgagaccccatctacacaaataattttaaaaattaaccaggtgtggtggcatgtgtctgttagtcctagctacttaggaggctgaggtggaaggatcgcttgagtccaggagctcaaggctgcagtgaactatgatcatgccagtgtactgcagcctgggcaacagagtgagatcctttctctaaaaagaaaaaaagagaaaaactgagcagtgacatcagaggctgtgcactgctgtggaaaacagactcctcagaattagtccaggcgagtcactaaacaaacaaacatcaacaacaagctgaaagcaaggatcagaagtcagagttgctacagtatattatctaaactgtctggttttcagcaaaaagttatgagatatgcaactatgaaaatgcaacttatacaaaggtgaaaaagcaagcaatataaactgtctttgagggggcccaagtgttggttcttagtgagaaagacttcaaagtagttgttataaatatactgaaagaactaaaggaaaattctttccttttaatgttaaaggaaattatgatggcagtgactaattaagtagagtatatcaataaagggatctaaattattaaaagaatcaaatagaaattctggagttgaggctggccgtggttggctcatgcctataatcccagcactttgagaggccaaggcgggcggatcacctgaggtcaggaattc

SEQ ID NO: 196223 - DNA, 1000 bp, Homo Sapiens
tccgccctccaataggctccagtatgtgttattcccctctatgtgtccatgtgttctcatcatttagctcccacttataagtgagaacacgcggtatttggttttctgttcctgcgtttgtttgctaaggataatggcctccagcgccatccatgtccctgcaaagaacgtaatctcattcttttttgtggctgcatagtattccacggtgtatgtgtaccacactttctttgtccagtctagcattgatgggcatttaggttgaatcatgtctttcctatggtgaatagtgctgtgatgtgtctttataacagaatggtttacattcctttgggtatatacccagtaatgggattgctgggtggaatggtatttctggtttttggtctttgagaaattgctgcactgtcctccacgatggtttaactaatttacactcccaccaacagtgtataagtgatcctttttctttgcaacctcgccagatctcggtggtcaactcctcccactccccaggcaatgctgatttgctctgtgcctatagttttgcctttcccaggatgctgcgggaatgggatcatacggccttttggatctggctccttttagttagactgatacatttgagacaggtccctattgttgtgtgtatcagtagttggtttcttctttttttgagatggattctcagtctgtggtccaggctggagtgcagcggcatgacctcagctcactgcaaactccgcctccctggttcaagtgattatcctgcctcagcctcccaagtagctgggattacaggcacatgccaccacgcccggctagtttttgtattttttcgtagagatgggatttcaccatgttggagaggctggtcttgaactcctgacctcgtgatctgcccaccttggcctcccaaagtgctggaattacggcgtgagccatggtgcccagcctgcatcacaggttgtttacccaatactcaccagttgcagaattc

SEQ ID NO: 196224 - DNA, 1000 bp, Homo Sapiens
acggagtctcactttgttgcccaggctggagtgcagtggtgcaatgtcagctcactgcatcctgtgcctcctgggttctagcgattctcctacctcggcctcctggttagctgggattacaggcacagaccaccacgcccagctaatttttgtatttctagtagatgggggggttttactatgttggtcaggctggtctcgaactcctgacctcaggtgatctgcccgtctcagcttcccaaagtgctaggattacaggtgtgagccactgtgcccagccacagccattgtatcttattttaagtaaaatgtatcattagtggcagaataattctgggaaggaaatgtgtatgtatgtatttataattattagattgaaccatatgaaacagccagtttttgactggttttgacctgcataagtctatagacttaggaaaaatgaaaaagacatagaggatttctaagttaaccactcaactatgacatttttttcctcttctaaacaagtacaaatcctcttccttaccctgttgatgactgcaatctactctgcaaagaactccaatagattttacctccaccaagctatctggaagacattttcgcaccagttctcggaaatcaaacttcttcaggatttctacccctgggccaatcatatccttcttcctagcctgtatggggattacagaggtaagaatgcagtcctggagcccagtcattgcaaatgtggggtacaattaattttccaaataccccgtaccaagacctatgagaaagtggacgaaggtcagctggcgttttgtgataacggccatacctgtgggcgtcccaagagcctattccctggacttcatctaaggaggttcagttacatctgttcacccaggcccatggtgctgattcccactgatgagcttcacgaaaggctgacaagcaagaatgagaatggattcagttacatcatgagaggtaactggagtgacccctggaattc

SEQ ID NO: 196225 - DNA, 1000 bp, Homo Sapiens
gagagatactttttttttttttttaaagagatagagtcttaccctgttacccaggttggagtgcagtagcacgatcatagctcactgcagccttgaactcctgggctcaagagatcctcttgcctcagtctctcgagtttatcttgagtttatatattttaatgagtaaatgaataagtgaggaattcattgcttcatttctaagagtccagcaggaagcccaataaattgtagttgtagataccggggaagtgaaacacattaggtaagggaggcccactcctcaatgggaaaaggggaagtgaggagaaacttcagaatagcaaagaggaacctgacaacaattcagttcagccttgtggaatccagtgatgtgagataaaatcactcggtgtttaacagacactgctgagcttccgattaccctgccctggagctcctgtctggcctctttctgtgataggattcatgggctattgtttaagttgtgatctctgttatttgtagctcaaagcatcccaacagacataatctctgttgtaaatacttggcatataatcacataactttttttttttttgggacagggtctcactctgttgcccaggctggagtgcagtcacatgactgtggctcgttgcagccttgacctcctgggctcaagtgatccttctgcctcagcctcctgagtagctgaaactacaggtgtgtaccaccctagacaactaaaaatgcttaatggtttttgtgaaatgtgttttagtgtttaaaaagctatattctcttcctcctttttttttttgagatggagtttcgctcttgttgcccagactggagtgcaatggtgcgatctcggctcaccacaaactctgcctcccaggttcaagggattcccctgcctcagcctcccgaatagctgggattacaggcatgcgccaccacgccggctaattttgtatttttagtagagatggggtttctccatgttggtcaggctggt

SEQ ID NO: 196226 - DNA, 1000 bp, Homo Sapiens
tctttttttttttttttaaagagacagggtcttgctctgtagcccaggctgaagtgcagtggtgggcacgatcatagctcactgcagccttgaactctgggcttcagtgatcctcctgcctcggcctcccaaagtgctggggttacaggcgtgagccaccgcgcctggcccttttcaacaatttaaagttaataagttgataagccttttcagaccatgacagaaagccattagagggatccaagggcagttccagaattttctgagggaggggcacaaggaccacagtgtggtggaagggtggggtaggggatgtgtctggagtctgcatttgcgctctaagctcactgccttcacttgaatgttatgttcatggggtgcttatggggagagggctatgggagattataaagtccccagagcatccccttgctcactcctggaggagagaaggaagaagcagggcaggctgtgtggctggtgacagtacagcagacatctttacaggctccagttcttgtaatcctcccagccctgcaaagggccgtaattagactcttttaagagcaggaggttgaggtcagagagacacagtaatgggctccaaccagtaagtgactgagttgggatctgaacatagctgagtgggatgctaaaacctttgctataagctactctgtgtgtcattgtgttatttctggttgaagagccataatgtgtgttactgcatctggggggccacttccaagcaaccagcgtggactcccagccatgtctgcctggatccaatagccctttgttttgattctggggatgtcttcctctgacactgtggcttgactactgcactagtcccaacaaatgtgtagcccctcacatatgccccaggagctcctgctaccctggggacatggaaaactagctggtgacacagctattaccccacaggatgagggaaggtcaaggaaaagtcccaatgcttatgaaagatgaagaattc

SEQ ID NO: 196227 - DNA, 1000 bp, Homo Sapiens
gggccatttttttgtatttttagtagagacgggatttcaccgtgttagccaggatggtctcgatctcctgaccttgtgatccgcctgcctcagcctcccaaagtgctgggattacaggcgtgagccactgcgcccggccaatttttaaatttttttatagagacagggtcttgctattttgccctggctggtctggactcaagtgattctccctgcttggcctcccacattgctgggatcacaggtgtgagcccctgcacccagcccccatgacctgcttctagatcatgtgtgactcctcctcaccccaaggcccctgtgccaagtgctcctccctgaccttcagcatagctggttccttctcgacctccaggatttgggttgaagttggctcctcaaatgaaaacgtcgcttacctctcattattctctgtctatccctttttaaaattaaaaacattcttactttgcaattcaagtataatgtatgtgcagaaaagcaaagttgtatatatctaatgcaaagcgtcttcacaaaacaaagccaccaatcagatcaggaaacggaacaagaccaacaccccagagatgctcctactgcacctccgtgggacttccctctcctcttcactaaaggcgctgccattttcacctctatcaccttgagttagtctcgcctatttgaactttatatgagtggaatcatatcacgttattcctgtgcattaggcttcttttgttcaatatattttttgtgaagagttattcattctgttacatgtagctctagtttataatttttattgctgaatagtatctcattttgtgaatataaaacagttcgtttatccattctgttgtcgacggatttgtttatactgcccgggcttcactgagattcttagaactgtaaatttatgttttgcaccaaatctgggaagttttatgtcatttcttcacatatttttccagtgactttccctctcatgcctctggaattc

SEQ ID NO: 196228 - DNA, 1000 bp, Homo Sapiens
tccggaggcccacaccagcctccatgctggctcggctggagagaagcagcccctcggagtccactgacccctgcagcccctgtggtaagggtgaaggcagagccacaggccttccagcctgccccacctctgcctccccagacccgcaagctgggggggccccaaactgaacagagccattcaggtcccagccaccacctagtctgtgggtctggtcttcctccatcgctgatgttttgtctctctccttttccacatcgcacccctatcccctccccaggtggcttcttggagacatacgaggctctgtgtgactacaatggcttccctttccgagaggagattcagtgggtgagggtagggcccttttgaagggctctggagacatctggtcccccatgtgtgctgagcccctccctgccccttgtggccccaggcgaactgtaagcatctccttctcacccaggacgtggacaccatttaccatcgccagggctgccgccatttcagcctgggagacttcagccacctcggcagtcggtgtgtggcctgccaggatgggagaggaggaagatcccggggcccatatccctgggcctcagtttctccatggaggggctgctgggcctgggacctggctggagggccctgagctctgcctctgttcccaccctcccaccagggacctggccttgagtgtggctgccctgtcctacaacctgtggttccggtgcctctcctgtgtggacatgaagctggtgagggggttcggggtaagggcagggaggggccaagggtgtgggccagggtgcagcccgctgagggccagggtgcagcccgtgagccgccgccctctgcttctcagagccttgaggtctcagaacagattctgcacatgatgagtcagtcatcacacctggaggagctggtgctggagacctgcagcctgagggggtgagggggacagggcagggcttggagaggagagtctggaggcttg

SEQ ID NO: 196229 - DNA, 1000 bp, Homo Sapiens
cagcagtacccacaaacaaagaaaacatcctcaatttccaagtccaagtgtgttgtcggaatgtctaaatgccatatttcacatgccactgccaagattaggttagcttagtctaaaccagtggttggcaaactatggcccactggccaagaatcgcccaacatctgattttgcaaataacattttattggaacagaactatgttcattcatttacatgtcatctacagctgtttctgtactataagagcagaactgagtaccaataaagaccagatagcagcctaaaatacttactgtctcatctttttaagaaaaactacccactcctcattctcaacttttctttatttagaactctttgtttgtttgttttgagatggagtctcgctctgtcacccaggctggagtgcagtggcataatctgagctcactgcatcctcagcctcctgggttcaagcaattctcctgcctcatcagcctcccgagtaactgggattagaggaacctgccatcacgcccggctaatttttttttttttttgtacttttagtagagacgggagtttcaccatgttggccaggttctcgaactcctgatctcaagtgatctgcctgcctcagcctcccaaagtactgggattacagccgtgagccactgcacccggcctcaagatttttcactattcataaatgaacataaatatccttaaactaaaatttggtgtaaaccaaaccttgattcacaaaaacagttactgtatctataataaattggatgttaacgaaggaggaatgtttctctcatttatgtatcaagagagaaaaaatttcaattctgatctggttaactagaagataataccagatagacaaagtctctcatcttacttaactttaatcctatgccatattttatgtttttaggtctttaacactgtattactaaagcctaacctatcctcaatgccctgagcattaactgatcacctcgtagaattc

SEQ ID NO: 196230 - DNA, 1000 bp, Homo Sapiens
gccaccagctatgggtatggaggcaggaggtggtgggtgccagggagaaggcgttctgtagtagggggagccaactcaggatcagtgtggtgcactacaccatggtatgtcctccaagccaagccaatgcccagacccaatgcagagggtgacttagcatggcagtgaagggcagaaacagcatttctagaaggcagctgaggagactttatgcaccggacccagaggaaggctgggaggtgatggcagtgagggggcccaggccaggcacaggccatgggacagaaacacccggtacgcaagtgttgggaagaagtgagaattgtggacagctcacaggcttggggttgggacagagggacagctactgtgttcccaggatggcagaggaggacttcttccaaggcattctcatccctaagagatgggaacccctagacagaaattggtactcccatgctgagggcagacttgaggttagcactacttagataggatttttgtgccacccacatgatttttagtgtctttttaaaaacgtcctgtttactttaacttcatcctaagcaataattatctgtaaaactatggttttgatgtgttaggaaccttttgtcctaaaacacattaaaataaagtgtgtatttgtataccactaaactttcaggctacacttggggaaacctgcccctgtgactctgctcccaggtgtctgcccctagaccccaggcttgcttactgagcacgtctacggtggagcccaaagctgggtcagcagccctgaatgaggtctggggccaggctccttgtcctgtgacagcctcagtgctcatggtctggtaatgctgatatgggagagcagatgcagagctagggccaacgggaagccccagcaatgagagcctcctccactaggagaccagcaaggcaaggcagcccaacatgttcagtgtttgtctcctgtaaaccaaccagaaataactgagtcttcctagaattc

SEQ ID NO: 196231 - DNA, 1000 bp, Homo Sapiens
tgaggaagaatcaacatgcacatggaaattgatgttttgatttttaattttaaaacgacgacagaactgaaatacctcccctaactaggtccactgaaaccagtgaggagataatcattttcagttaaatatgcatgtaatttaataatccacagatggaaaatgcatttgaggtggactgaacacagccaggagtttttgcttatcgacagcactgaatcctgccttgactagagagactcgtcatgtgatcaactgtggccagagggcatcctgcagacagctcctgtcacaccacactgaccagactcttatgagtatttaagcatcttcagggaagcgattgactgtcttataatggtcttacaagtacggaactttattacctgctaataatcagagcacatgatggcacaatagaatatacgagtgaagttctaaatgcaaggttgttcttattctgtgagtggcaaaactcatgcagtgagcagataaagctggcaggaggcattggcgccctaatgctgggcactaaccacctgcccggactgcgaatatctgttgggtcctttctatatctggtctattctcgtgtttgattatatcctggtggcaagaatagcaaaatcaactctccttcctatcccatgtggagaggcatgatttgagtcagagagcattatcctctctgcgttatccaaccccatgtcccatgatgcactttgtagacaagcaagtgtccctggtggagaatccacagccacacatcctcattggttgcaaggatcagtgtccaatatctactgccatgatcattctcagttttacatccacagagcttcatagaattctaacaccacaggtccaagtagaggttttggcctcagagtgggctagattccacctctgacagcagctgtgggactgtttttccatctgtaaaatggagacaagagtatcacctacctcatggtgttggtgggatcgttaaacagaattc

SEQ ID NO: 196232 - DNA, 1000 bp, Homo Sapiens
gaaagataatggaaaaatatccaactatttggaaaatatgtgctatacttctaaataatccacaagtcaaagaggaagttttaaggaacattaaaaatattttgaactaaatgaaaataaaaatatatcaaaatttaggtcaggcgtggtggctcatgcctgtaatctcagcactttgggaagccgaggtgggtggatcacttgaggtcaggagttcgaaaccagcctgaccaacatggtgaaaccccatctgtactaaatacaaaaaattagctgggcgtggtggcgcatgcctgtactcccagctactcaggaggctgaggcaggagaattgcttgaacctgggaggctgaggttgcagtgagccaagatcatgccattgcactccagcctgggcaacgagagcgaaactccgtctcaaaaaagaaaaaagaaaaaagaaaaaaatatatatatattatatataaatttggggatgcagctaaagcaatgcttaagggcaacgtacgtcattaaatgtacacattataaagaggaaaggtctcaaatcaataatctaaagcttcaccttaagcaactagaaaaagagaaaagccagaagcaagtagaagaaaccaagaactagtgaaactgaaaacagaaaaacagtaaagaaaaatcaatgtatccaaaagtgacttctttgaaaaaagagccataaaacagataaacttctagcaaggataacaaagaaaaaagaaacagaagacacaaattaccaacatgaggaatgggagccacataacttcaggccctgaaaccattaaaaggttaagatgggaattcccttattaaccttttaatcaaccttttaatggtttcgtggcctgaagggaaactctacataaagaaatttaacagattaaatgaaccaattcctcaaaaatgatatgtaccaaaaatcacccaagatgcaacagatgacctgaacagtcctataagcactaaagaaattgaattc

SEQ ID NO: 196233 - DNA, 1000 bp, Homo Sapiens
agcatgttgcatggtatacatttttccatctctttacttttaacctatttatgtctttgtagttaaagttggtttcttgtagacagcataccgttgggccttgctttttcatacaatctgacaaccttacattatgttggaatgtttagaacatttacatttaacataaatcaatatagttgggttaaaacctgctatcatgctatttgattttcaatttgtcttatctcttctttgttactttctccccattttcttgtcttcttttagattagttgcattgcctgtctgattccaatttatctatattatttgcttgcagatatgtaaaaagttgaagtttcattagggatatacataaaatagatgatttttctaaaataatgaggccaatcatgagatgactcattaaggaaaagatcaattgaaaaatgcatgtttggaaaaaaattgcatgtttggacttaccttcagttatcattaggaaacagaataaaacctagaccagaagttaagtattttttttttcctaagctcacaattatagtttctatgatttgaatcatcagaagagcaaacttgataatcctggaaatttaggagacatgaggtcatggaaggtcgtggaaggtcctgaaggtgagtattctgtcaggaacggtgtgttcaccttccttatcctcctgctaagccctctctctaaagttgtgtattctgctcgaaaacttcccttgccagaggatacttttcatgaataaatgctctccagttcttgtcattgctaagtacagttcttgggttactttgcatgtctctccaatatcaatttgatggagtatcttcgaggaactgacaacgtgccaaacactatatgcagggatttgcctacattcaatcatttaatcctcccaacaacactgtgagactgacaagattcttagctcccctccatggctgatgaagtggcatctcagtgaactgaaggaagttgctggaattc

SEQ ID NO: 196234 - DNA, 1000 bp, Homo Sapiens
atttcccttgtccctggcttggttatgaaaaaagaccagatgtccagtctatattatagatttaactgaagtgcccctgtgcatggttttcgaaccaattcataactaataaaaacatttaacattctactactaaagctgaatcagaagttgcatattatttactcttctatacatatataagttggatcaagttcttgatggtccctgtaatactatcatttatatttgcattctaacttgctttctaaacatgcagtgttgctctgtggttaagaacttgggctcagcagttaaaatgcctgtgtttgactcaactctgccatttattctatgtccatacccctgactctgcaattacttgtacatcaacctaatagtaacagaaattgtgcttctcatgtgagtattgaatagtaaccccttcaaggatgtataatacttaacagtttacaaaacaccctaagtatgtattatctcaaggaaactatccatctcttttgtggagaaagatgagatattctaccatttctcaggcctttacaatggcaatttctccactttgaatattctacttcctttcattgtccttcagacttcagctaagataacacgacgtccagaagaaattgtccttaacccagaggttaacttggagccatgaaccaccatgaagcccttgtcttctctgctgtagcactcattcaaacttcactatcattgtttgcacatctaacctccctgcaagacaaaagtgcagtgaaggcaaacagtacgtgtatctcactcaccattatatgcccagagcttaatacaatgactaaacctaaaatatatgtactatttctttaatgcatgcactattcaattagtaagttagtttaaatatgtagaaattgacacctagttcctacagacacaattattgttcctttaatatatctgtgctccccaacctttcccagcctccttgcattaggcaaggccatgtaatgaattc

SEQ ID NO: 196235 - DNA, 1000 bp, Homo Sapiens
gtactcccccacaggcctgtggtagtggtggccatgggatgaggcttctctgcttttggaaaggggagagaagagtgggaagggctatgtcttgtagtttgagtgccagctcagctgcaatgcagtagaacaccaggtagacttctaaggtttttgactctagtccctggttcctggacagcacctctcaatccacctggggcccgggggaactcattgccctgaagggaggatcataggactggctttgccacctgctgattttagagccccagagccttgagcaaacataaacagtagccagggagtatttccttgggcaagacccagtgctgtgctggctttagggctgacccagcacagtcacagtgttggtggccatggaggtgcttgtgtcactccacctccagctccaggtggctaagaagagagagagagactctgtttgggagaaagtaagggaagagaataagaatctctgtttggtaatccagagaattctcctagatcttgtccaagaccatcaaggcagtgcctctacaaatctgcaggaactacagtgttactgggctttgggtgccccccaaagcatatccagcttagatcacaacatccaagaccttttgaacatatggaaatccctctcaagaaggatgggtatgaacaagcccaaactgtgaagactataataaatacctaactcttcaatgctcagacacagacacacatctacaactatcaagatgatccaggaaaacatgacctcaccaaatgaactaaataagccaccagagaccaattctggagaaagagagaaatgtgacctttctgacagagaaatcaacatagttattttgaggaaactcaacgaaattaaagataacactgagaagaaactcagaattctatcagataaatttaccaaagagattgaaataattaaaaagaattaagcagaaattattgagctgaacaatgcaattggcatactgaagaattc

SEQ ID NO: 196236 - DNA, 1000 bp, Homo Sapiens
acgtgagcacatgtgcacacatgcacatacatactggcacacgtacacacacatgcacacatgagcacatgtgcacacatgcacatacatactggcacacgtacacacatgcacacgtgagcacatgtgcacacatgcacatacatactggcacacacgtacacacacatgcacacgtgagcacatgtgcacacatgcacatacatactggcacacgtacacacacatgcacacgtgagcacatgtgcacacatgcacatacatactggcacacacgtacacacacatgcacacgtgagcacatgtgcacacatgcacatacatactggcacacgtacacacacatgcacacatgagcacatgtgcacacatacacatgcacacacatcctcattccctctctctctctctcgccctctgtaggttcctgctactctcacctcatcagagttgttttctaccaggaaccagccccagccccagccccagcccctgctggcagatgctccggtaccctgggctgtggcttccaggctgtgcgtgactccagggcagggctgtggccaccagggccaggacgagggtgaggagggggaggcatcacctcaggcacaaaattttaggggcagcaaagcactcccatcaccagaatacatactgtgtccatgcagtgttcttacacatcaaaattcatgaaaaaaaatccagaatggaaaaaatatcaaacttttattataaacacagacggcatcggaagtcctggttctcctcttcccatcagccccaaggcactgctctggaacctgtctgggtttatcctggcttttttgcattcatttagattttttttaattgcctcaaaatattattttgtttactggttttggttccctcttaaagtttgcactcaaaggtgcacccccatcccccgcccctcgagggtggcagacaggaggacgagggcgggcgacaacaacatcaacactgaaaacaacagcga

SEQ ID NO: 196237 - DNA, 1000 bp, Homo Sapiens
acttgggggcagcaggaagcaggagtgaggcagagagctgaaaactggggcagctacaagtttctctacaaaagggtgggacacccaggtcctctccaagccccacacagcctggctacctgcccgctcccagctgcaggagacgagagatggagtcaagctccaagactgaggacctgagtcaaagctgcaggctgggagaaggagcaggggaggaaagcaggagaaaaggtaaggctgggggcctgggctctgaaagctcggttccttcctgctgtctgtccccaggaaatctacatgcaggcgtaccctggctcaggcacgtcctcctccccaggcaggagaccggaggagtcatctctagagaaaccagtcaccctggaatagacagccccgaacagtaacatctggggcctcagtgaagaggctcacttgccacccgatccctttacagcaaaggccagcaggtgagagacccacccctgtgatgtcttccatggaaacaggaggaggcaaacatgttgcctaaggagctgctctttcaccggctctcctgtgctcctttgctctttcctgcctaatgcttctgcagctacccgctcctgtccatcggggcatccacacttctacggtctgatcttcgaatggcagtttgggactctggcctgggtaacctaggaagatcacacagaccctgttcagaacccatgaagtgggtttggcttggtgagtttccatctccttagtcgtttgttctcgaagccatagcccaggtgcacagcagcggcagtttgcctttgtctctgtttgctggtttgcatgaaacgggaggaagcagtgagctggccctgtcccctctatgctggagtttattcagaccccttcagcccacagcagctgaactctcagcccgattgccaggccccacatgcaacaagcccacagcttcattctcgtcccacgttttgcgcttttgctgtgtttctggcgtgtggaattc

SEQ ID NO: 196238 - DNA, 1000 bp, Homo Sapiens
ggaagccaagacaggtggataacctgaggtcaagagttcaagaccagcctgggcaacatcttgaaaccctagctctactaaaaataccaaaattagccaggcatggaagcatgtgactgtaatcccagctactctggaggctgaggcacaataatcgcttgaaccgggaggtggaggttgtagtgagccgggatcacgccattgcactccagcctgggcaacagaacaagactctgtttaaaaaaaaaaacaaagattgagccatgaaaaaaatccaaaacctggctgggtgcggtggctaatgcctgtaatcccagcactttgggaggccaaggctgacagatcacttgaggtcaggagtttgagaccagcctggctgacatggtaaaaccctgtctttactaaaaatacaaaaattaggctgggcacggtggctcacacctataattccagcactctgggaggccgaggcaggcagatcatctgaggtcaggagttcaaaaccagcctggccaatatggtgaaaccctgtctctacaaaaatacaaaaattagctgggcatgagggcaggtgcctataatcccagctactcgggaggctgagacatgagaattgcttgaactgggaggtggaggttgcaatgagctgagatcatgccattgcactccagcctgggctacagagcaagactctgtctcaaataataacaataataatacaaaaattagctgggcacagtggtgcacatctgtaattccagctactcagtagactgaggcatgagaattgcttgaacccgggaggtggaggttgcagtgagtcaagattgtaccactttactccagcctgggtgatggagtgagactctgtcccaaagaaaaaaaaaagaaagaaatccaaaacctgaacagaccaataacaagtaacaggattgaagtcataacaaaacgtctcccagttaggaaaagtgcaggacctgatggcttcactgctgaattc

SEQ ID NO: 196239 - DNA, 1000 bp, Homo Sapiens
tggaatcgagcctttcccacggcagtttgggaaccgcctgggatttctaggaaagtccacagaacacagaaatagttaaagacctggatttgcaactcagctctgcttctaacttgctgtgtgaccctgggcaagtagcttagcctctctgagcctaagcctctctacctgttaaacgagaagagcgggaaggataaatggagacaaggcaggaggcattttgtaaagtgttgtctgatgatggcagtggtggtgattgtgcatcgcacaccattcaggggctccgcagcttcatctgtgtaaagagagttactacacgtttctcctggtcccagctcaagcactctagggttctacgtaggcacataaatagggttccaaagagcgacgccaactgcataaggcataagtccactgacagccgatgcctgccagacccccacccacaaaacctagtagaaaagtcaccctccagaatgtggccaaccaacaagggccaggaacaggagctgctgggaccagaagggacttgtgagccctgagcctctgcagggtaaggtgctgtgctaactctggggctagaagactttcccaagggtttccagcagggctggagcccacaggcatctcttcacctttcccgaccccgagctgtcccagaattcttcttcttcttctttttttttttttttttttttgagacggagtttcactctgtcgcccaggctggaatgcagtggcgtgatctcagctcactgcaacctccgcctcccgggttcaagagattctcctgcctcagcctcccaagtagctggtactacaggtgggcaccaccacacccggctatttttttttttttttgtatttttagtaaagacggggtttcaccatgttggccaggatgatctcgatctcctgacctcatgatccgccccccttggcttcccaaagtgctgggattacaggcgtgagccaccgtacccagcctgtcacagaattc

SEQ ID NO: 196240 - DNA, 1000 bp, Homo Sapiens
caaacaaaaaggaaaactaaatcagaatattcaagagtataaacatctctctagaaagagcaagtcaataacaattcgggctaacagatttttttttttttttgaaatgtagtcttgctgttgcccaggctgggagcgatgcaatggcgtgatctcggctcactgcaacctccacctcccgggttcaggtgattctccagcctcagcctcacgagtagccgggactacaggcacctgctaccatgccaggctaatttttgtatttttagtagcgacgggatttcaccatgttggccaagctggtcttgaactcctgacctcaggtgatccacccacctcggcctcttaaagtgctgggattacaggcatgagccactgtgcctggcccacatcatttcaaaaaatgttttttctatcttctgacttttatggaagaaaggctgtgattgctttttatggctatataggtaggcccatcatcctagtcacttcctggcctaggtaggccccatccaacctagggcttagatgccaactcaacaccgaaaacttggtttgccagcacatcattattttaaatgatcagattggaatatgttaccgttatagaaattggtttgctattacaagtctaaacttctttgcaagtgatctacatggtatttaaattttataattcacatacaatagtaacagcaaatacatctttagtgcttactttgtgccagtctctgttctaagtataattatgtgaatttgtctcatccttacactaactctgtgagggtacttgtcctcattttacaaaggagaaagtgaagctcagggaacttgccccaggcacagaggtaggaagtggcagaggcagaatttgaacccttaagagtctacctccagggcccaggctctcacctcagtcctgggctgcccttcatttaccctgtagtaaatgtagtgcagtttctactaaacacactgctccttatttaccctagaattc

SEQ ID NO: 196241 - DNA, 1000 bp, Homo Sapiens
agacctcacttagcaattttggaatttaaaggaatgtttctgacttgtgagaatgtggtaataattatgatagtgatcaactcattttaaatgtttccaaagactggaagggcaccgtgactcatgcctgtaatcccagcactttggaaggctgaggcgggcggatcactcgaggccaggagttcaagaccagcctggccaacatggtgaaaccctgtctcaactaaaaatacaaaaattggccaggcgcgggggctcatgcctgaaatcccagcgctttgggaggctgaggtgggtgggatcgcctgaggttaggagtttgacaccagcctggccaacatggtgaaactccatctctactaaaaatacaaaaattagctgggtgcggtggtgggagcctgtaatctcagctacttgggtggctgaggcaggagaattgcttgaacccaggaggcggaggttgcagtgtgctgacatcgtgccattgcactccagcctgggcgacgagcgaaactccatctcaaaaaaataaaaaataaaaaaaattagacaggcgtggtggcgagagcctgtaatcccagctactctggaggctgaggcaggagaattgcttgaacctgggaggcggaggttgcagtgagccgagattgcaccagtgcactccagcctgggtgacaacgtgggactccatctcaaaaaaaaaaaagtttgcaaaatctgttctgtatcttgactatcaatatcgagatcctggttgtgatattcaactacacctttggggaaagctagaggatatggtactccagatttctctgtattgtttcttacaacgtgtgaattacatgtgaatctaccattgtctcaaaataaaaagtttaaatttaaaaaagtttctgaagttttaaatgtaaaacaatgcccaggatgggcacggtggctcacgcctgtaatctcagcactttcggaggccaaggccggcagatcacaaggtcaggaattc

SEQ ID NO: 196242 - DNA, 1000 bp, Homo Sapiens
ttttcagataaggtcttgcttacgtagccctggctggtcttgaactcctgagctcaagcaatctcgtgcctcagcctcttaagtatctgagactacgggcatgtgccaacacaccctgctttgtttttgtttttgaagcaggcaactaccttgcttggttcaggggttagcctaaaaagtaggcagagagaactggggaatcttctctttggatctttcccttccaaattgcctctcttctgtggcttccccacactcaatctcctggttcctcaggccagaaaagctgtgatctctctgccagtgcccctactatatcgcatgccttgccaagtatacttgtccctaggttaaaacaagcaaatggaacttatcgtgtgcatcacctctcctctaagcatgaactccccatcagaactggcctgcttctaatccctctccagggatttcaggtagcccaccaaactgctgggattacaggcgtgagtcaccgcacccggcaaaaataagtttttcaataacaaagtgaatgcagggccaggcacagtggctcagttgaggtcacgagttcgagaccaacttggccaatattgtgaaaccctgtctctactaaaaatacaaaaattagctgagcgtgatggtgcaaatctgtaatcctagctactcgggaggccgaagcatgagaattgcttgaacccgggaggtggaggttgcagtaagccgagatcatgccactgcactccagcctgggcaccagagtgagactctgtctcaaaaaagaaagtgaatgcagtatttccctccaatgtggatattgtgttggctgcacaaaactctggctacattcaaatgggaaagaggtaaaaactgcctcatgagttaggggcgttgatgtttcccctctctgatcccatgctatctcctgaacccctacctccttttccagctgccacaaccacagaggcccttggctgacgcatccacaagcaacagagaattc

SEQ ID NO: 196243 - DNA, 1000 bp, Homo Sapiens
cgcacacgcacaagcacgcgcacacagcacacttctgttccaagtggaagtgaaggccagacatcctggcttgctccgctctccaaagagggccctctcttgtctacttccccaaagccaagctgctgagtctccactcactcaccccacctcccctccgagccacaagcctccttgactgcacccggctctccttcgccacattctctcccacatctgccccagatggctcctgtccctccactaagagctagctatactgaggctgggcactgtctctgttggtcacatccagctacggaaaaggcctgggagcaaacggcagggaggagagcctaatcccccactcccactccattcaaactaggtgcagtgcagtggcacgatcatggctcactgcagcctcaactgcccaggcttaagcaatcctctcgcctcagcttcccaaggaactgggactacaggcgcacaccaaccatgcccggctaatttttgtatattttttgttgtagagatgggggtctcactatattccccagcctcgtcttgaactcccaggcttaagcaatcctcgcacctcagcctctcaaagtcctgggattacaggagtgagccactgtgcccaccctgattttttttttttttttttttttttttttttgatgcagagcttcactcttttgcccaggctggagtgaagtggcctgatgtcacctcactgcaacctccgtcccgcgggttccagggattcttctgcctcagcctcccaagtagctgggattacaggtgcccgccaccacgcccagctaatttttgtatttttagtagagacagggttttgccattttggccaggctgctctcaaactcctgacctcaggtgatcctcccgccttggcctcccaaagtgctgggattacaggcgtgagccaccgtgcctggccagactgatttttttctttttttttcaggctgattttttaaaaaatggatttgaattc

SEQ ID NO: 196244 - DNA, 1000 bp, Homo Sapiens
tagagctccagaattgtgttcgaatttggtggcatgtttaaaaaatcatccccatgcatatctctcccctcctccctcacccacaccatgaccatttgccaggccaccatcattccccagtggatgactgctacttcctcctagtggtgacccagctttcagccttgattccctcccctcctcatcttcaattccacattttgcaactaaattatccttagaatgacggacatggctgtgggtgatcttttttttaattgttctaagcacactttacttgtttatgtttaatcttcaatttttgtaggtacatagcaggtgcatatatttatgggttacatgagatttttttttttttgaggtggagtcttgctctgtcacccaggctggagtgcagtggcgcaatcttggctcactgcaacctctgcttcctgggttcaagcaattcttatgtctcagcctccatagcaaccgggattacaagcaaccaccaccacgcccagctaattttttatttttagtggagacggggttttgccacgttggccaggttggtctcgaacccctgacctcaggtgatccacccgcctcagcctaccaaagggctgggattacaggtgtgagccaccatgcctagccagataaaacagatggacacaggtatgcgatgcgtaacaatcacatcaggttaaatggggtctccattacctcaagcatttatcctttgtgatacaaacaatccagttagactcttttagttattttgaaacgtacaactatattgtttttgactatagtctccctgttatgctagcaatactaggtcttattcattctttctattttttgtgcccattcaccatgtgatcttaacaccttcaaaggctgccacgtatttacttgtaaaatactatgctaaaaccagagtgcaaaattatgtgttgggcattcaaagctatgtgaggatgaggagcatacttctggagcatcagctgaattc

SEQ ID NO: 196245 - DNA, 1000 bp, Homo Sapiens
ctccatgccacctgctcttctccagacacacaatctctcacaccactgttcacggtacacacgatatgataaaacacaagcatgctcatacactccaaagcagaaacgttctcttacttcacaaaccccgtcaatacaaacatcatttttgtttggggagcagggagttccatctttcactttgccggacattgcaaaaaaaaattcaaagttctcagccttgcagtacagtttgcatcgatcttcctctagaaacaaagagatcaagataggaaatggtcaagaggaaactaaggaaaaatgataggattgtcaaaagaatgaattaaatttacttagaaagctatcatgatgaatatggaaaatgtgtgtgtttgcacatataagcccatatgatgtggctttcgaagcatgagtcccatgtaacaatccatataaaactaatttaagagtaatacgtaacaattttatttttctcatccttagggatagtcaccatacacatgatcgatgggttactatccagcctccctggatagtaaacctttcaggtttcaaaggcctgatggtcagccactgacaatacagaaatgaagtagtgtggctgtgttctaataaaatctgatgaaacaaatacacaccagatttggccagcagcccatagtttgatgaccctgatttagagcatggattactttagatatttactcagtctgttaagagaaaaggtttcaggcaccagggagaaaaggcatacggttagtcatgtttgtaaaacatatagagaaaaaaaaccatgtcataaaaatgaagagaaagcaaataaactcgtcctgaaggctacaaaaaggtaacttctcttggcccttaagtccctgagatgtttctgatatcaaaggcaaaaattaaaaaaaaattatatttatagagctcttgttatcagaaaggagttcctatgccaatttctcaaatagaaagagctcttcttggccaggaattc

SEQ ID NO: 196246 - DNA, 1000 bp, Homo Sapiens
cgagattacaccactgcactccagtctggctgtcagatcgagactctgtctaaaaaaaatctatccagatctatccagaagagaacaggagaataaaatacgaatgggaaaatactgaagtaagaggtaactctcacagtcctctatgctctgactaaagagagattctactagtgtgattagttcaaaagcgtgtaataagcccaacagaatcattttaaaataagactctaatttcaggaacctaaggaagtctgcattttaataagatatttcattatatccctaatacgaaaccattgtttgcctgactctataatttattgttagacagacactgcactattaccaaagcaaaatgaaacagatgatgatttcgctaataaaacaattggatcatgaggcaaaacccagctcggcacttaaaacagggctgaaaaactccgagtagggatctgcagagtctaatattcccagttggaatgtcacctttccctactcttccgcagagaaaatcattgaaatagcctgctaacaataccattactgtctccctaacttaatcctttgttccttccagagaaaagacttctgctgattatgaatattccactctacaatttccatcaattaatatactaccacattcttattatggtattcatagcttcttgatttacattagaaagtatatattttacaccacgggtaaagctatttcttcccctttaacggaaagtgcttatataaaaagaccttacaatttggaaaatggcggtggggtatgtgtgtgtgaataatggcttggagataatagattctattctcctttctggtttttttcctttctttttttttttttctctctgctggggaattcccatgcaccagtcaaggaaggcaacacagttgccctgaacctcctctgtcttacccgtttctttctagagctaagcctgagtgtctctccagaatctgtctccaacagtttatagaattc

SEQ ID NO: 196247 - DNA, 1000 bp, Homo Sapiens
tagtgccactgttgaaaaaccttgccctagaatagtttcatatgtgggtatttcctgtagcaccacctcatctggccttgtcagctaggttacttggcactttgggcaatcctaatggctacctgtactctttaataaatctcttcctttgtaaactagttggaggtgattttgttgactgccaccaagaaccctggctaagaaaggtagcaatgggggagaccagagtagaggacaaagaagacttacatagcatgtccctactagtgagggctggggtcctttccaagtacaagtctaatcaggtgtagtacaatcccatcaaggtaatatgtgcatcatttgttcataacatgaacgtttttataaccaggttaatcacttaaataactctctaatatgggtacatctatatctcccaatcgtcttataagcactgacattatgatacacctatttccgcatgacggcagcagctttcactttaatgtgtattctgccaaattgtcatggagctacagatgggttagaataggggtagagccacattaacaaaagaaaatatatgagcaaggatacctctgaatgccagttgtatttcaattttatgacaacattcttgaccacaaattcaaaacttgaccaagaaattggctcaaaaaagaacaagttatatagtatgaaatgtgagcaaatactcagaaggtggcagtgaggtcctttccatgttctgaggccaggaacacaggtggttccagttacctgttctagaattgagtgtgatagacgtatcaaggttatctttatgaagatgagatgagaccatcatctgagtatttggcatggagccttggcacactgtaaatgttcaagacatgttcaccccaacattaatagtaaaaatacatcttgggaacctgtttagccctcatctaattcatcagtgaagacaagataaccattttcataggtctgtgtatgtcagggatctagggaattc

SEQ ID NO: 196248 - DNA, 1000 bp, Homo Sapiens
aggcctgcggacacctctgccccctctgccagctccgtggatccctctaaataatacaaggcttgtttgcaatcaagttagaacatgtttaatggtgaataaatctgatgctgaatcgggataattgcactggcgtcacagagctgactcaatacctggccaaggcatcccatatttagaagggtggagacatttttagctcgcctttgtgtgtgtgcgctgctcattatacacacgtggctccaattaaaggccctgccacctgatcggggccccctggtctccggctgcaggtgcacgtttgtggggctggaagacaaggcctgggacaggtgctgtgatctccctttgtttgctgaaaccaacaaacagcaaggtcagcaccttcaggtgaaggccaggtgctggagggagtgaagggagtagggagagtgacatcagtatgacctggtgtcgggagcatgcccaagctctgtccttccatggcctttggcatggtgcataatgcttctaagtctcagtttcaacatctgtgaaatggggatttcacagactatggtagtcaggattcaagatggcccccaagacttccatttcctatagaatcccctctcttgagtgtgggcggcaactgtgaatatgatgggataatttgcccccctgagtgagttaggctaccaagcaaagggggaggaatttcgcagatgtcatggaggcctgaacgcagttggttttgcattaatcaaaagggattcaatcctaagtgggactgatctaatcgctaggcccttaaaaggggctgggccctcactgaagagagtgactcagagcatgggggagcctccttcagtcttgaagaagccaacagtcatgttgtgaggtcatctgtggatagggcctgagagcctgagaatagcctctaggggctgcaaggggccctcagtcaacagccagcaagaaaacaagcacctcagtcctacagttacaagaaaatgaattc

SEQ ID NO: 196249 - DNA, 1000 bp, Homo Sapiens
gctttccattgtgagcataattgacccgtggaagctctaagcctacaaggaaatgaggaggtggatgaagcccctatcattgggggctgggagcatccacccttcctgtcagattgggtagcctttcctcagaatccgtttccacaccaagatccttgagcttgatttagagcctgcattggatcaaaggtggtcaaaggcaggggagggagcctctggtaatttaattaccccagctctattagagagtccaggagcaaggtactccagacctaggttttaagtgtataaacatctttaattatccaacatagaaatcaaagagaattgcatgattaaaatcagaggctactgcaatttcttaaagctttttttcaaaaaagtgctgatgtgtatatatgtgtgcgtgcatgtgcacatatgtgatgagaaatgggaagctggctgggcgcagtggctcatgcctgtaatctcagcactttgggaggccgaggcgggcagatcacttgagttcgggagtttgagaccagcctggccaacatggcaaaaccctccctctactaaaaatacaaagaaaattagccaggcatggtgccgcatgcctgtaattccagctactcaggaggctgaggcaggagaatcacttgaacccaggaggcagaggttgcagtgagccgagatcgtgccacttcactccagcctgggccacagagtgagactctgtctcgaaaaaaaaaaaaaagaaaagaaaagaaaagaaaacaaaacaaaacaaaaagaaaagaaataggaagctgtgctaggcatggtggctcatgcctgtaatcccagcactttgggaagctgagatgggaggatcgcttgaggccaggagtttgagaccaacctgctcaacatggcaagaaccccatctctaaaataaaaactaaaaaataaaacagaatgggaagctgtggaaaagggtgtcaatggagaacagttaattaaatctggtgaattc

SEQ ID NO: 196250 - DNA, 1000 bp, Homo Sapiens
cagagagtgataagtgctatgaaaaaaataaaaagaggctgagcatggtggctcacgcctataatcccagcactttgggaggctgaggcgaggcgggaggattgcttgagtccaggactttgagaccagcttgggcaacatagccagacctcttttctacaaagaaaaataatttaaaaattagggttggtagtgctcacctgtagtcctagctacttgattctttgtgcccagaagttcaagactacagtgagctagattgcaccactgcactccagcctgggtgtcagataaagaccctgtctcaaaaaaaaaaaaaaaaaaaaaaaaagaaagaaagaaaaagaaaaggaagctgacttgctagagtgactaaaataggacaaggggaaacaggctggtcagggcagaccttacccagacaatgacactggagtgttgataaccttctcaagaaatgtgactgtttaacaactcttactccatttatgcatcaagcatcatctactgactgaacaaataactgtagatccatttttcaaatgtgtgatatataaatgatgctaaattcattgtcattctttgggcattttggattttcttaaagtgattagtaataactatttgcatggtcatgatgggagctatggaatgggttaggaaaaagttcaccaaaaaagaaaagagttaaaaatatccatctcaccaaagaagaattgagagcaactaatgtattagatctcaaatatttttggtccaaatacttttttaatttcttaactttaccctcctcacccctctcaaaggttctgtatgccacagatgtttctatttagcccctgtatctttaagtcggcaggctgagccccgtagtccccaaatcacctctcccatcttgtttgtagcttcttctctgcaccccaatgtcaacccatcctgcacctattgctatttctctctgtgtctctcaaatctcttttacctgaacccctaagaattc

SEQ ID NO: 196251 - DNA, 1000 bp, Homo Sapiens
cacaggggaaggacaagtggatggctgggcagcagatctatatatatccacccctgcagctaaaaggagaatgaaaaacataacctctctcattctacatggcatacctctcttaatgcagcccagggtcacgtcatcacttcacattgatgactcacaacagatattcagggggatgtttttccttatctaatatcgcttggtttcactccctcatcctctgccaagtcagggatgcaaacatgcacatgggtcctccctcttcacctctgtcccaagcacagtgaagcttctgggggcatggagatgaacagactaggcctgtggcctgctccaccttccctgagtcattatccttctctcccctcagagtcaaagtgattcaaaagagacagctcaggcccacaagcaagttttaccgccaacatggctggcacaaacccagggctagaaccaatgctttagggctagaaccaatgcttttgagggcaaaataagcccttctgtttcttcacagagttggattgtttgccttgagtgcataggtgaccatctgagttattagcaaccagggatttggtatataatactgtgcatacataaataacaacaacaaaattggtccactgcccagagagctctcgatccacagagctgccagacatcatgagatttcaaaagatcttggctctaaaatcagaggatgtttggatataaattctagtacaacccagtcatttgacagatgagtaaaccagggatcagaagagtccaggcatgtaattgccccaaggtcactgagtaagtgagtggccgagtgaccactgaaatttagtccatctgagagctcgcccccctgccctgtgcggtgtttttacaagagtgagcacgcaggttccagggtggtcaagaggtgtttactttcattttgtagtcggccttcatacaaggtgggggctgggaagggaagagcagtccaggccattacccccatgaattc

SEQ ID NO: 196252 - DNA, 1000 bp, Homo Sapiens
acattaggtatttctcctaacgctatccctcctccctccccccatcccatgacaggccccggtgtgtgatgttccccaccctgtgtccaaggtaggtggtactggcagtattctgtaaatcacaggtttggtggataaaaggatatcgcatgtaattcatcaacactcacctgtatgtgagtgcttagctttggggcattgcattccaggacagctttctgacactatttttggagtgagactcaagtcttttaaattcagatgcccagctggcctaagtcctgtattcccaagaataaaaccacatggtaatgcggtgaggtagaaggagacacaggaggaagaaccaagagtgtgcgtgacacctaactttattttaagtaacagaaaaaataataaatgacatttggattctgttttcattgaaaggtgtaaaccaaatttacagtctacttcaaaggtaaggaagaagtctccttggatgttcacaagctgtacttctgaatagccaatgttaggccagttgcctaggcaagtagattctgatctctttcctcaagggattgtagtttacaatataagcagagtcaaagggctcttgtaagatgagcttgtagtatggggacagtgaggccttcaggtgagctgaggggagcatgaacaggagggcatgaatttcccaggctttccttgccctctgttgtctctgggcaccctggatcttgccactaccttgcttagtgcactgacattaagcagttattgttttgatggcaacagaggagggagaatgttattttcaaaggaaggacatcactggataagaaaattcatctctccacatcctcacacgcagagctaatcggctgggaggtggcacagaggtcactgggaggtggcggagaggtcactggtattgaaataaaggtgacgggaagtcaggaatggatctctgttattttcccccctagcagactttctccttcagtttctggaattc

SEQ ID NO: 196253 - DNA, 1000 bp, Homo Sapiens
aaggtcagtcagctagatctcatgtccaaatatcattgttaagtacttcctgtagttttgtctgaaaaacacaatcctgaataagctctttacgttttcggacttttgccaatggctgttccacaaagctacacaaatctgattgtgtattttatttcatcgtctctaaacatctcttcatatattttgctttctgacatatgttttggtcaacttcaataagcatattttattacccacatctccatgtggctccatccaaacaaacttaatgtatctagaatttatgaacacgttttatattcttaatggatgaatatgaggttagaatataacttactgttaatatctgtgaaaatatctggatgagaaagtagtttacatttttatatgtttcataatttatttttaaataaatatggaacaaaaataacatgaaaattccatgtacctattgacaagtgtaatagatgataacattttgctgggactttttgttagttcttattgattctcatattacaagtattacctctaggttttcttttcattttcctgaagtaacccttttagtatttccttcaacaaagatatatgaatgttaaacttttcattcactgcctaaaaaatatgtcacccttgcataatagtttacctgggtaaagaatttcatgtaggtggttagttttgctgttaactctgaaagtaacagtctgttatgtttctttattgagaagacaactgttatttataattgttgaacatttttctcaggtaatcttaaaagcaaccagaaagaaaggatatatattccccttatctctgatatcttgtagttttactatgatatgccttgtgattttttttttaattctgactgggatctacagtgattctacacctgaagattcatatatttcattattactgaaaattgtgagctattatatttggataattccttttataccattctctctattcacccattatggaattc

SEQ ID NO: 196254 - DNA, 1000 bp, Homo Sapiens
tcagccaccgaccagacaaacgtgccgagtccacacatgccatggcctagagctctgtaaggaataagcacactgtgccttctggcaggaaacaggggcactcctgttctcctgctggactgctaatgtggggagagtcacccacgttctctgtttttctctgaaaagcatgaacagcaatttgtctttggcatctgttataggtgtggataggtgtggtatggggaacaactcaattaggcttatattttttaaaagagaaacccactaagccagtggtgggataatgatggcatttaaccatcactagcctgctggaccatgggatgctggaggggtgggggcggtcccaggtctgaagatcaggacgaaaaagacaaatcctggacagcatatttgctcccatcgttgagcattcacgggttttgacattttcatcacaagggttccagttctgcttgtctctgttgcccccactaaccttgaaagtcctgagcagcggctgaatgggctctacctgtgactcaccgttcctctcctggtaggcagcaacaatatgggtgaggtcgtagtcataggcaaaggggctggtcccgttgatcacggatatctgggacacgggaggaggatgtggtgtgagcacctgggagactcctccccttttccttctacccttctgcccacccaggctggtcccacagagcaccctcttgttcttggtggcctactgcagtatcaataatcttttcttcaaagatgaataaaacaggctgctgcccacccaggctggtcccacagagcaccctcttgttcttggtggcctactgcagtatcaataatcttctcttcaaagatgaataaactctcttgcaacaatttaagcccatttactctcagtctttctttctgtggatggaaataaggggtcagtgtccatgttttacaggttttaaagctatttttaaaatacccctctttatctcagcgggagaaagaattc

SEQ ID NO: 196255 - DNA, 1000 bp, Homo Sapiens
ctctcctgtagttgtggggaagcctttagagtccggagctggagaagcctggcagaggggccttggttaggcactcgctcagggccacctttgcactcacggtgaagtgacacttttataggagtcagggcgaagatgtctgctgagtgctgcttgatctgtgtccagtcttccatgaaacagttaaagaattatgactagagatgagagaagtttctgtaaagagaaaatgttttttctctcgtttcttgcagggaaagatctctacctagaggaaaactcatgaatccagtttataagaaatacttataaagtaatcattagtaattaaagtgattaattgaatactcaactagttgaaatatccaaacaatctctcgagttattttagccgcttgaaggaaataaaatcggtggtgtttgatgtaacctgagtccttagctccagaggttaaagtggagaagagaaaattcattttaccaggctggggagaattcagtgaggttatgaaggtaaagttctcgacatagtgcctggcattagctgctcggtaaatgtccactttcccccccacatcagtctattcagaaatccagacaataaaatatcacagagtcaagtttgtaaaaaagatgtattgctgcatcatggagactgtgtgagtgtgaagctcttggtgtttgtatgatcggcttgcaaaatgacagcatgtccctcaggtagggccatgtttgttgccctaagtgacttgcaggtcttcacctgtctgtaccttttaaacaagagacaaaacctgctgccagaatgatttttagttgtctttccttttctttcccatggcttcctacagttgggttgccgttctaattaatctcttatcagtgcagtcaggggtctcctttggagcctcttgtgggggtcccacttcagtagttactagagcagctttctgttacagaggttaacttttgagtaggttcataaggaatgtgagaattc

SEQ ID NO: 196256 - DNA, 1000 bp, Homo Sapiens
atttatttattttttaatttgtttttgagatgggggggtcttgctctgtcacccaggctggagtgcagtggtgcaatcttggctcactatagcctccacctcctgggctcaagcaatcctgcctcaggagtagctgggactacaggcccgcaccaccacacctggctaatttttctatttttttgtagagatggggtctcactatgttgcccaggctggtctcaaacttctaggttcaagtgatcctcccacctcagcttccaaaagtgctgggattacaggcatgagccgttgtgcctggcccagaaactggtctttgaatccaggtctgaacgctgaagctcatgctctcttccttgcgccccagctgtccgcatagaggctctgatagatcaggggctcaggcaagtctggggagggggcctcacctccctcccagcccctggagggagtgttggaccctctcacccccctcaaagcagttccattgctccctttgaccttcaaagttggcatctgcttgcaggaatctgtctctctcctcctggaattcagcctccagatgtcagatccgaggcggtggcggcagcatatggctcccctcagagtgaatcagccacattccaaaggtgcacacacagacgccacaccctcagcagcctggctgcagacttcctcccagccccagcacccggcacccgccccagcccccacctcttcccagccagacccgacttcgggcttcctttccagagactttctcctggaactggaacagagagaaagccactagggctggagacaccctgagcagccctgctctgctcactcgctcccaaccgctcacagctgttatcaatatatctatggtgcatccactcaacaggtgtgcactgagcacctatgatgtggcagacaagatacagacaagccccgaacctcacggaactcagctgggcaagagcccaacaaaatcaggtccagaggcagaaaagaattc

SEQ ID NO: 196257 - DNA, 1000 bp, Homo Sapiens
ccagatttacccagacgtacttgtaggtcagtagatgattatttggtttctcttttgctggggcaaaggttaaaactggattgttctcaataaataagtaaatattgggttttttgaagagactgaggaaagatggggaaggaacttggaggaagggacagggatgtctactagtttctgctggggtttgtaatgtggttccgttctctgatgtccccacaaagttattaatccatcatcttcagtgtgctgtagaggtggatctcttcttcttcttttttttgagatggagtcttgccttgtcacccaggctggagtgcagtggctcaatctcagctcactgcaacctccacctcccggattcaagtgattttcctgcctcagcctcctgagtagctgggattacaggcatgcactaccacaccaggctaatttttatatttttattacagacagggtgtcaccatgttggccagactggtcttgaactcctgacatcaggcgatccacctgcctcggcctcccaaagtgctgggattacaggtatgagctattgcgcccagccacaaggtggatctcttttgtaatgtgacaacctgctaagcagcagccctttagaccaggccagggcagcttctgcctttgctttaatggtctctgttcctcctttggccatgatcctccccagcaggtgaggaatctgcagggccaaggagacagaccctgcaagtaggttcaggcctgtttatgtggaaattatggggtctgggtgctgtgaccctgtgcctttgccttctagaccatattctagatacccaagtccccagaattctctacctaaatggtcttagtccgctttcagggcctctttcctgggtccatcctcccaagagtagaccacactgccggtcagtgtactcctaagcctgaggagtgacaaaagatgactgattgcatggggtgtggacaaagcatggacattgggctggagtgagaattc

SEQ ID NO: 196258 - DNA, 1000 bp, Homo Sapiens
ctttgtaacaccatgattcaattacctcctcctgggtcccccctacaacatgtgggaattctgggagatacaattcaagttcagatttgggtgggcacacagccaaaccatatcatggagcaaaatgattagcttgcatattgtatgaatttggcctttacttctcggtgtttcagttatctcactatgagataaggaagtgcctccttcatcggttgtacgttttagttgtaaggattaaataaattaatacatatgaaatgcttaaaacagcactagatttataatattccataattggtagccattattattattattattagagacagtatcacactctgtagcccaggatggagtgcagtggcatgatcatagttcactgcagcctcaaactcccagggtccatcaatcctccggccttagcctcccaagctgggaccacaggcacgtataaccatgcccagctattttttcttttttaagagatgggatcttgccctgttgcccaggcttgtctcaaactcttggactcaactgatccaggcaccttgtcctcccaaagtgctgcgattacaggagtaatccaccatgcccaggcagctattatctttattacctaaatagatttacttgattttatgacttttatattatcatttaccaaagttgtaaatttttgtatttttaaaaagtttccattctcaaccattttggtatgaaattcttcacccatagtaatttgaaaagtatatgttatgtgctattctcgtgatagtgaataagtctcacgagatctgatgggtttatcaggggtttctgcttttgcttctttctcccttttatcttgctgccgccattatcacctcccaccatgattctgaggcctccccagccatgtggaactgcaaatccaattaaacctctttttgttcccagttttgggtatatctttatcagcagcatcaaaacaaactaatacaccccatgtctggaattc

SEQ ID NO: 196259 - DNA, 1000 bp, Homo Sapiens
atcaagagatggagtaggatggatggcaacttgggtcaaaactcgtaatactttggacctttcctttgtcttaatcatggcacagtcctggttaaaatgtaaatattcttgggagaatgcctgtaattctcaatcaagtatatttttataaacctttcagagacatttttttaaaaaatggaagacggagaatgaatgttactagacatgtaggctttaattagcacagagatgcagagatgatgtaattccagaaagcacagactattacctgggtaaagtatgcaccaagacaaacttcataacgactcatgataatagtcattcatatatactagctatacgccagaggattttctaataactttacatgtattaacaagcttaatccttacaacaaccttataaaaggtggtactgatcattatcatccccatatatcacatgaggaaaccaaagtacagagaggtttagcgacttgctcaaggtcacaaagctaattagtgactgggtcagaatttgaacccagatagtctgcattcccaactatgtgctgccatctcgcatctatgttactcatccactttctactacaattccaaatcagtgcatcctcattccaccaataatcataacactgtcctgtttcttagaataaatgccctaagaatgtgaaagcccttttcagctctagagtagcaacttctcacataaccctctgcaggaagtatttttctatacattgtggtccaaaaggtgatcctcagattgtctgaatcagacctggatatagaattcagtaacaacgtttcctgataatttcttctgaaaatgtctagtacaatcacatttaattgatatatatatatattctctctctctctctctctctctctctttctctttctctctctcttagactaagcacaggcctagaagaaagtatacatgatcttcaatctcaggagaagttctgataaatactgtgctcaaagaattc

SEQ ID NO: 196260 - DNA, 1000 bp, Homo Sapiens
gctgcaaaattaatgttaaatatctaaataaatactagtgtatcattctttaaaataatccttacttagctctaagttgggatgaatatgtatgaagtactacatatttttgtttgctgtggctctttaaagagaaaagtgtatttaatttagtctttctgcctgatgatttccaaagtctaatgatttaaatcaacatgtatctgatttatgcatgtatgtatttgtgtatgtgtttatctcatggatacttatttagcatttaactctgtgccagacactgccctaagaaaattagtacatgtttatctaaaaataactggcacttagatagaacgtacaatgattcaagcactgttctaaatgatacatatgtatcttcctacagcagtgagatacgcacagtaaatgtgttaaacataagcagagaagttaggtcgcttatctaagttcacacagctcctttctagaattgctgggaaccagtcactgcagcctggctgttctgaagtgtccgtgttcttatcgagcctatgtgaaacattccattttacttacttttgtttctaggcagcatccgtgggactcaggccaaatggtgtcgtcttttcagtattaggggtgcgtagaggctttccataaagtctggaaattctgtcatgagaggggtaataaaggggttattttgagagacaaggtgtttatttagctctttgtgaatttatgagtggctatgtggaatagtgggtgggattatgtggcgattatgccccaaagccttacgtaacagctctagttatattaaaactaagctcaggctacaacctggaaatgtggctctgcagttgttttccttcctacctcctctaaccttttatgcttaggtagttcactttttggcgttttgttatcatcagcatcagtctgtgaagttctttggtggtttgatactgttctagtcatacattgtatgaagaatatccagagagcctgagaattc

SEQ ID NO: 196261 - DNA, 1000 bp, Homo Sapiens
aaagacttacattttaataagaattagttgtgcagctgcaaccctggcaacaaggcctaggagaaaagaattggggcagcattccagaaatcagggcaggcactggtctcatgtgggactgagctaatgaaacataaaaatataaagcatgtagtaaaaataagaccaatactttctttggcatggtagatactgacatttttccacacattttttttaaaaagtccaaaagctcataagctgcacattcaataagagtagctatattatcttctcctttagtataaaaaaataccccagatactcttggaagttaatatttctgtgaattatatccaaaatgtaattgttcttggcccactcttggtgaagtccagacgttttcaaaacatggggtacgaaatttgtcagataaagtttagaaacaaggttttaggttttaaactttaaaaatcaaatgctcatatcagttttaatgtaaatttctcatagttactggactctttagatgcccttaaataataaaatttgttaaatatattctctgaatactgtgacaatggctacataatctattatctaaccataatttaattattacctggttgttacgtgtttaggttgtgttggagttttccctcttataataagaaatattgcaagaaaacatttttgtgtgtataggtattttgctttcttttggactagtcaggattacttttggatttccagaagtgataatgatgcattaaatgtgaaaattttgaatactttctaaaagcactaccaatctacacagctactatagtgtgtatgcagttgctagtttctctgcttctttatcaacattgaatatttgaatagatatgaaatggtagttgaattttttaatttttcactttttaaattagaaacttggaatattttaaaagcagcttaccagcttcccctttgtggattttaaaatttgcgtccttttcccatttatctattggagatc

SEQ ID NO: 196262 - DNA, 1000 bp, Homo Sapiens
atatgaaagaaaaattcttcagtgaaacagcataaataaaaacaatcagaacttctggaaaccaaggacacacttagagaaatgcaaaattcactggaaagtaacagcagtagaattagcaagcaaaataaagaacctcaaagctcaaagacaaggctttcgaattaacccaatccgtcaaagacaaagaaaaaagaatttaaaaaatgaaaaaagcctccaagaagtatgggactatgttaaacgtccaaacctaagaataattggtgttcctaaggaaaaagagatatccaaaagtttggaaaacatatttctgggagtaattgaggaaaactccctcaattaccttgctagaaatctagacaaccaaatacaagaagcccaaagaacacctggtaaattcatcacaaaaacatcatcacctaggcacatagtcaacaggtaatctaaagttaagacaaaagaaaatctgaagagcagtgaggcaaaagtatcaggtaacctataacggaaaacctatcaaattaacagcagatttctcagcagaaaacttacaagctagaagggactgaggtcctatttttagcctccttcaacaaaacaattatcggccaagaatcttgtatccagtgaaactaagcttcataagtgaaggaaagatacagtcttttccaaacaaacaaatgctgagagaattccccactaccaaaccagcactacaagaactgctaaaaggagctctaaatcttgaaacaaatcctcaaaaaaaaaaagaaaaaaatagaacctccttaaagcatatatctcagaggaccttaaagcataaatctcacaatacatacatgttgtgtatataacaataatacaatgaagaaaacacaaagtattcaggcaacaaatagcacaatgaatagaacagtacctcacatctcaatactagcattgaatgtaaatggcctcaatgcttcacttaaaaggtacagaacggcagaaaggataa

SEQ ID NO: 196263 - DNA, 1000 bp, Homo Sapiens
gtttctaggctgacttgccaaacttccacagaaccagtcaagaaggagacaatgagtccaatgggttcagatagtttattatttacacagacagcaaaagcaagatggtgtctgctcccatgtccccagcccagcaggatgatgatgaatcatagctcatgatgatgaagatagcgcaagtggtggactgctctgccatggagccaaatccaaactacagccaaggtgttttacagacttacacagaagtctgcagctgtaccataagttagaataaagtggaaagttccgtgctcaactgaaattagacaagttgatgagaaatggccttgtagcagtctcccaaaaaatagggatcagaaactgccttacagtagctccttaccgggcatattgccttttgcatcaggagcaatcacagggcattctactgaaaagtggggaaatagattttgggggtgcctgactgcaatatacatgacctacatggagacgtgcatggttgccaagatgccgtggcagaccattcctacactcatcatatgccataatgacattttttcttttcttttctttttttttttttttagatggagttttgctcttattactcaggctggggtgcagtggcactatctcagctcactgcaacctccgcctcccgggttcaagtgattctcctgcctcagcctcctgagtagctgggattacaggtgcctgccaccatgcccggctaattttttgtatttttagtagagatggggtttcatcatgctggccggactggtctcgaactcttgacctcaggtgatccacccgcctcagccttccaaagagcagggattacaggcgtgagccactgcacctggcttccataatatcttaagtcacatgccataacaacaaaaatgcactaaaaaatcactagcagaatgaatttgtgtaattcactgagcttgaaatttctcacataaaataaaagtagcatctaaatgaattc

SEQ ID NO: 196264 - DNA, 1000 bp, Homo Sapiens
ctactaggcttctagattggaggcattgttttgaagaacaaggctaaatgacagaaactatcagaaatcagaatttattatacatctgtattaagacagtatagaattttattagcacaaagaaagacaaatagaataactaaatagagacttcaaaaataggcccatatttacacaatcacgtgatttacaatttacaaccaaagttccatcataaaacattgaggaaataatgtcttctcagtaaatagtgaggagtttactcagtatcagtataacaaaaaataaactttcaaccctatctttcacttcacacaaaaatcagtttagttggatggtagaaaaagggtgaaaaattaaaaagataaacacagcttctataaggtaacaagtataattcttcatgtctttatggtaggtaaagatttttgtaaacaagggacagcaatagcaataaagggagaaattgaagaattgtactcaataaaattatgagctttccttcatcaaaagacagcattaagatagaaaaaatatatagaatggaagagatatttgctataaaagtttttgaaaaagtgctcatattgaatatatagagagaacgcataaaatcaattttaaaaagataacaatattttaaaatggacagaattattgaatacacacatgatttttcgtaaaaagttatgtggaagttcagctggctagatttctttttttacttatagttcagattattttaaacaggtgcaagctgaaatgttcaataatatgtcttttctgcaaaatactagtgattcaaaggttgctctttagcacaactcctaaaaaaagctgcaccaactttattatggcaatggtaatgtgagttcttgaatgattagttttttccttatttattaataaaactagtgacaaactccataaatgttagtcgaaaataataggtgcattttattgaatacttattaaatacagaaaactctaataagaattc

SEQ ID NO: 196265 - DNA, 1000 bp, Homo Sapiens
tttgttttcttgagatggcctctcactctattgcccaggctggagtgcaggggcatgatcttggctcactgcaaccttcccctcccaggtttaagcaattctcttgtttcagtctcctgagtagctgggattacaggtgcccaccaccacacctagctaacttttgtatttttagtagtattaagtacattccaattattgggcaaccattgtaatcacccagtgggttcttcctgcctgctgcacaggcaaaatcaatccactgagaccatggcattgcagtaaagaaagcatgtaactgatgcaaggctagctatgccatgagcgagacagagttattagtcaaatcaatctcccagaagtctcagaggctagggtttttcaaggagtttggtgagcagggggctagggaagggggcattctgattggttggggatgccatcacagggtgtggaaaacagtccagtcctggtgtgatgagtcggcttctgggggaggaccactagaggtgtcgctggtctgggtggggccatccagtagccagaaatgcaaaagcctggccatgcaggaattacacgtataattccagaactttgggaggctgaggcaggagaatcacttgaggtcaggagttcgagaccaacctggccgacatggtgaaaccccatctctactaaaaacacaaaaattagctgggcgtgctggtgcatgcctgtaatcccagctactcaggagggtaagatgtaagaattgcttgaacccaggaggtggaggtcacaatgaactgagatcacgccactccactctagccagagtgcgactctgtctcaaaagaaagaaaaaagaaatgcagaaacctgaaaagatatctcaaaaggccaatcttaggttcacaatagtgatgatatttacaggagtaattgaggaagttacacatcttgggacctccggagtaatggctggtaatcatttaactatgcacatatcttagcagaattc

SEQ ID NO: 196266 - DNA, 1000 bp, Homo Sapiens
cactcttacttatttttaatgggaattatttgcacctgtgggtacattttaaaaaaatattacttttaatctcacaatgaattaagatgcagctgagattaaaacctgctaccttgaactataacagagccttgacatttggcagccttgacatctgtaaagttggcagtcatggaattagtgactgaggatccattccacacagtgatttttgctgaggcataaatttgaatcctgtggacagcaaggttagtgtatgggagtgaatccattagctagtgagtgcagcattgcccaccccctcatgtcaaagtagcattaacattttctacttgacttcagagttcctgtaatccttgggaacagagaaaagtaagtttgaggataatggccccagaaaaaaaacaccaattgctggtgatggcagtaaaaagacaagttgtctgaggataagcatccttagccaagttcatacatgactatagagaatcattaagaatatgaaggtcctgggactataaaactacttgctccaggacattggtgtaggcaaagattttatggctaagactccaaaagcaccagcaacacagcaaaaatggacaaatgggactatattaaaccaaaaaccttctgtacagcaaaggaaacaatcaacagaatgaagagacaacctgtggaatgagggaaaatatatgcaaactattcattcaacaagggactaatttctagaatatacaaggaactcaacaaaacagaaagaaaaccaccaaataatcccactaaaaagtgggcaaaggatctgaatatacatttctcgaaagaagacacacaaatggccaacaggtatatgaaaacattctcaacatcactaatcatcagagaaatgcaaattattataagaccaccatgagatatcatcttaccacagttacaatgtctattatcaaaaagaccaaaagtaacagatgctggggaggatgtagagagaaaggaattc

SEQ ID NO: 196267 - DNA, 1000 bp, Homo Sapiens
ctcaagcagttcagtcatcatggaagactgtaagagcctagacatgaggatagtaacaatggccaggatggactaaccatagggatctttcattcatcttataatattagataagcctcatagtcttatcatcccttccgaggtaggggaaggagtctgattattacataggctggttcccagctcttccaacaatgtgggagctgatgatgtgatttaatttgcttcatttcatttctgcctatttatgttccataatttatttatttaatgtataaatgctttattatgtctttgaaccacatcaacaaatttattctgacctattttcaggctattctctaaaataatttttattcgggtgaattactgtttctgaattatactaccaagtcttctgttccttggctgtcctttgagaaattagacttcttcatgtgtttttgaactttggtttgcaggctcattttgagcatccccttcaaacttttccctccctaagaatttagtggttttctttacctagcccagccctttcactcctaaaccagaatcaggtttacaatccagcttgggatgtactgcccctaggggacattgtggagtatagcagatccattaccgagtctgcatggtgctggctcggttcctgggagtcacacttcgtcttcgccctttgtctcttcaggtttgcagcttcatctgaagccatagtcataatagagcagcgagcgttgtttgcctctggcatcacataggaagcctggctctgctccaggtctcactcacatttaaaactccttttcccatagggaccaaaccctcagtcactagtgtctacttccagagctcagacaacccacgatttatggttttcttttgtttctggtccacggagatgtttatcttgtaccagagcctagttagatcttcccgctttttttttctttttaaaaaatatttcatctgtcattgctttttgttcacagaaggtgaattc

SEQ ID NO: 196268 - DNA, 1000 bp, Homo Sapiens
gagctgagagatgggtctgggaaagtgtgctgggttagatcacaaaaatctttgtaggcatgttgcgaaatgtggactttatactaaaaagcaaagggatcttagttggggaaagtgaaggaacagacatgttttggaaagctttttctggctacagtgtggcgaatggattgcaggaggccaggttgtaggcagggtggggtgttggtggggcactgtgttcccataattctaagggatgatggcagccctgaggatagagggaagtggtgatggggatgggtggggaaatattgtcatagtcagctttcgactctcaattctatccttgactgctggtgatgggctgcagccctgtgaagaccagaatgagtgtaagccccatcctatcttcccatgtcctttggtgagcttcagcttccccaagcccagtagtcactgcaagcagatatggctcctcccacctcaaaatcttccagtggcccaggggaagtttctgtctgatgacagtcagatcagagaagtgaggaggggatgctggtctaggaccaatactgccatagatgggctgatgagatgcttgagccctcacctccaagtcttggctccaagatagcttctcagggaactcttctccaatccccctattgcaaaccaacgctgcctcccccaccacgccgccaccggctttatccctttcactctgctttatttctcttcaccatttgacatattgtctacttcacttatttatttatcatctgtctctccccagtagaaggtaagttacatgagggcaggaattcttggtagttttgcttactgctgtatccccagtgcctagaacagtgtctggcacagagacaatgctcagtaaaagcttgtgcttacatgagtgttcgatggaatgactgagtggcaagggttacacaatggcctcattgtgatggtgtggtgctgggtgctgggcacacagcagttaataagataaacactggac

SEQ ID NO: 196269 - DNA, 1000 bp, Homo Sapiens
aaagtgctgggattacaggcgtgagccaccgcgcctggcccaggctccacttctaattctagttctctttctctctctgccatatcatcaattacttccttcactgaaggcttgaaccctgcaaagtcatccatgagagctgaaatcagcttcttccaaactcccagtaatgtggatatttgatctcctctcatgaatcacgaatgttcttgatggcatctagaatggtgactcctttccagaggctttcaatttactttgttcagatccatcagaggaattactgtggcagctatagccttacgaaatgtgtttcttaaataatagtaaggcttgaaagttgaaatcactccttgatccatgggcttcagagtggatgttgtatttgcaggcatgaaaatattaatctccttgtgcatctctatcagagctctgaggtgtttaggtgcactgtcaatgagcagtaacatttttctaagcagtaggtctcagccctgggcttaaaatactcagtaaaccatgctataaacagatgtgctgtcattcaggctttgttgttccatttatagagcacagacagagtagatttcacacaatgcttaagggccctaggattttcagaatgacaaatgagcactggcttcaatttaaagtcaccagctgcattagccctaacaagagagtcaggctgtcccatgaagttttgaagccacacattgacttctctctagctatgaaagtcctagatggcatcttcttccaataaaaagctgttttgtctacattgcaaatctgttgttgcgtgtagcccccttcatcaatgatcttaaatatcctggataacttgctgcattttctctgtcagcactggctgctttcatcttgcacttaatttatgtgatggagctggcttctttccttaaacctcaggaaccaacctctggtagcttcaaacttttcttctacagcttccttaccactctaagccttcatagaattc

SEQ ID NO: 196270 - DNA, 1000 bp, Homo Sapiens
aattcaaagttggccaagcaggattcagaatcatgccacgaaaaaaatcaggaaaaaaaaaaaaaaccctataacatcaatatatagttcactacaatgcttcctaagtgtttccttacctttacttaaataacattaaaccagtaatgtttgtgaatatatatacaaattaaccataaggaacaactataaacaaaaataaaaaaacctttctcactttgaaaatatttctcttggctgggcacagtggctcatgactagattacaaccagcactttgggaggcagaggcgggtagatcacctgaggtcaggagttccagaccagcctggccaacatggtgaaaccccaactctactaaaaatacaaaaattagctgggcgtggtggtgggcgcctataatcccacctactcgggaggcttagacaggagaatcacttgaacccgggaggcggaggttgcaatgagccgagatcacgctattgtactccagcctggacaacaagagcaaaaccctgtctcaaaaaaaaaaaaaagaaaagaaaagaaaatatttctctttcaaagtgatttttttcatctttagcttgcttgatacagtcaaataaaaacttcaaaaaagagaattttctaaacagtatagcataaactaaaaaggcaaggttcacacatttcccaatcttccagattccttctccccaagccaaagcaaccatattaacagtttttgagaatacttgcttttttcactaatgtcacctgcatttttcagcccatgtaaatctatctcattcatgttaatggctagacagtactcctttgtatgtcaagatacaccataactaattttagctggtcccacgtgaagggatattcagtttgtttgcctttatgtttcgtgtggcaattacacacgacacagtgacaaatatccttgttcatttagcaatgaatacttgtagctaacgtatctttaggaaaaattcctaaacatagaattc

SEQ ID NO: 196271 - DNA, 1000 bp, Homo Sapiens
ctgcaagctccgcctcccgggttcacgccattctcctggctcagcctcccaggtagctgggactataggcgcctgccaccacgcccggctaattttgtctttgtacttttagtagagacggggtttcaccgtgttagccaggatggtctctatctcctgaccttgtgatccgcccgcctcggcctctcaaagtgctgggattacaggcgtaagccaccgcggccggcctatttatttattttgagactgagtcttactgcgtcgcccaggctggagtgcagtggtgcgatcttggctcactgcaacctctacctcccaggttcaagtgattctcttgcctcagcctcccgaatagctgggattataggctcgtgccaccacgcccggctaatttttgcatttctagtagagacaggtttcaccgtgttggccaggctggtccttaactcctgacttcaagtgatccttctgcctcggcttcccaaagtgctggaattataggcgtaagccaccgcacctggccgggatttcctactttttaaaaactattacgaccatagtgggtgctgtgctgtgccaaccacatccgccttcaagactggggcactcatttccccggctgccgggagttttcctgctgatgaattgtcctcagccaagtgggctgcctgataccccatgcctgacatggttaatgtgtgtatggagtggggtgaacaaaggcctggctcccatgcctcagtggtataactccaaagggccactccagctgcagagctttccaaggaacctgcaaatgctctcattgcaatgctccccagcctcacccctccctctgttcagtcttgctgccttccctccttacagcggctgtttcccaatgaacctcctgcacacatctctgtctgtctgttttctgggacagctgccctaagatgatcacggatattaaaaagtttttttttttaatattttttgttaacagttgttactagaattc

SEQ ID NO: 196272 - DNA, 1000 bp, Homo Sapiens
catcctcatacttcaattacctcccactgggtccctcccacaacacatgggaattatgagagtacaattcaagatgagatttgggtggggacacaaagccaaaccatatcacaacctatgctttgaataaagacaggaaccagagcagcaggaattgtcctaccagggcactgccagtggatatgaacaaattggcaatccctttgacaatcctttgagtccaagtccaagagagtctggtcgtccaagctcaagtcatacacttgccccaagatgctatcagggtggtgagaggaagccccctacaacagcttccaaaggcctcattggttaccatggtggagagccaggcaccttgatgtacagcccctcaaggctacacacaagaggacagaggtcattcctaaaaggaaaaacagggttttggatgcatataggaatatagcacagaataatgcttaagtgcactagacagggggttctggaattcaaaccctggctccaccgttggctggtggtgacaccctgacatattacttcattatcctgtgcctcagtttccttttctgtaaagctatggatagtaaaagcatctaccttataaagttgtgataagaattaactgaaaccacatatgtaaagcacttcacagttcttggcaagtaggacctcatattaatgttgaaggtatatcattgagcacctcccagatatgctttttctgagagacacttaggatcttgcatttctatgggttttatgccaggccgggaagtcaatgttttagatctctcctccccagcctttcttgtcttgatttcaccatctatatattgggttcgtataacacaagtgcttttgctaaagctgttttgagtcattgtaaaagtgcatgatgaaacatatatgagaggcattaattgttcgagagatgctaaaaccaaccatactaatgaacccagcaccacaatgggaataaccattcaccatttgtgaattc

SEQ ID NO: 196273 - DNA, 1000 bp, Homo Sapiens
aaaatgcccaatgccttgtttcctattaccttagattgcaaaccagtctagggaagtctatgagaaagtagcatttaattaaagtttaaaaaaaaaaaggttgggcgttgtggctcatgcctgtaatcccagcactttgggaggctgaggcgggtggatcactaggtcaggagttcaagaccagcctggccaacatggtgaaaccctgtctgtactaaaaatacaaaaattagctgagcatggtggcgtgtgcctgtaatctcagctactcaggaggctgaggcaggagaatcgcttgaacccaggaggcggaggctgcagtgagctgagattgtgccactgcactccagcctgggagacagagcaagactcagtctcaaaaaaaaaaaaaaaagcatttttctgttttaatgtttggagacttttttttttgttctctccctttcctgaaccctattctgatcctgaaccaaatttatagcaatataattagtgttaatctaaggcattactcatcaaaaaaattgctgcagtctttacagttgaataaataaaaacaactgcataaatatgcccacttttgtttcatagcagcaagtggtttcatttcattatgtttttctttgggcctcatgggggtagaagtcactcagacagcttgttccaggattaaatgagggtatctgattcccaagtcatttgtctgccaccactgcgtagcttcagaaccaaattaaaatatgaaagccaggaagagcaaatgcagttgttcctagtgagaaaggatcataggatagggaatggtgactttccaaaggagaacttaaccactttaagaaaaccacagctctccaggctctcccaggtaaccaaagtttataatggcactgctctccccaactccctgtcccttgactgagtattgaacgtaaccgtataattgagctcctgcgtgtagcaggtggcatgggtgccagacccttccaccccacactcaccc

SEQ ID NO: 196274 - DNA, 1000 bp, Homo Sapiens
gtgtccatgcccagggcaccgttctcacttttgtgagcctttccttgtttttaagatatctataactctataagttgtagcaaatagataataacgcaaccgattcttgtccatagaaatgcaaatgaaggccgggtgtggtggctcatgcctgtaatcccagcactttgggaggccgaggtgggctgatcatgaggtcaggagtttgggaccagcctggccaatatggtaaaaccccgtctctactgaaaatacaaaaattagccagtcatggtggcaggcacctgtagtcccagttactcaggaggctgaggcaggagaatcgcttgaacccaggaggcagcagttgcagtgagctgagatcacgccactgcactccagtctgggcaacagagcaagactctgtctcaaaaaaaaaaaaaaaaaagaaatacaaatgaattgtgtctggtggaccacaattgattattgcctggtggatattgactggttttgtccctaattgtacattcattttagcattttggcattcttgattgcctacatatatgtgtgttctttgaatttttcttataacattgtactggttccctcattaattaatgagttaaataaaattttgacacattcattttatgtgtgtacaaattatcattttactctttaaaaatgtatcctttaatattctgagtatctcttaaatttgcattattccctccacctgaataaccccttctagcacaggtcattatcaacctttacctagattattttaaagcccactaattgtacccttgtctgtggtctctctatcctattccacactctccattaaccagagcactttcccagcatgtaagtctgaacatactgctcaatttcataaaatctcctgctcccagaacaaagtgcagccctctaggcctattttgcttctccagcctcatgtgtgacattgacctgcagttctcagtcagattcatttcagttctctgaattc

SEQ ID NO: 196275 - DNA, 1000 bp, Homo Sapiens
tgactatttcttctcaatctgcttttttgtagtctatagctaaaatcctccattaggttttattttctcctgtttccacaccacatacttgtattgtttaagattagattcaacaggaaataatagtaagcccaccaaaacaatggtttaaacaagataaaagaccattttttctcatgtcaaatgtaggcagtccagtgatggactgctaaactgctccacaaaccttttagtcactcaagctacttctattctggttcttcatacttcatagcttccatttccaaggtcactgaggtttaaataccacagatatcacatgtgcacatcagcttccaggaaggaggaagggatgcacaaaaaaagggcaaaaggcagctgccaaattctaaaatctgcctcctgatacatctgattataattggccagaacttagtgatctggccacagccagctgtactggacagtggaaaatgtagtttggctcagttaaaaagtgaagatatggggaggctggccaagatggccagctagaagcagctagtgtgtgctgctctcacagagagaaatagaaggggagagtaaatacagaaacttcaactgaaatgttcaggtatacacattgggatttatcaagaaaacaactcaacccatggagaatggggaaaagcaagtcaggatgactgcgcgcccaggagtgacatggaatggagctaggggagcctcccccactcagggaagcaatgagtgagtaagtgaccccaggaaccctgcttcacccatggatctttgcagctcttgggccaggagatccccttgtgattctacaccaccaaggcctgtggtctgatacacagagctacatggcagagaagcttctcaggcacatgtggagctccaggcctttcagatatccgggcttcccagaaaaagcaactgcacctctggcaaagtgggaggttagactcctgtacatgcccttaggaaaggggctgaattc

SEQ ID NO: 196276 - DNA, 1000 bp, Homo Sapiens
gaaggcatgttttaaccctgttcctcatagcactcggcacggtagtgggatcagaactgacctgtggtcagttccctccctgaaatccaattaaacacaactcatctgcagagaagccttcagaactattttcccgcatcaaactacagctactgcctcctgaaaactctacaccagaaaccattagacacatgtggttatttaaattggaatttaagttaattaccattaaataaaattacaagttcagtttgtcagtatcattagccacatttcaaatgttcaatggcagcaggtgccaatggcccccatattggacagagtggattgagaacactaccatcactgaagagagtgctattagatggtgctgccaagagtgcagctccattagcgccagggaatccatttctgtcctcctagagggatttataggtatactgagattaggatcaagctcacctctgattgggcacctacaaaaaaaattcaaagttcttggcatcaaattcaaggttcctagcagcctagacttcagcctacttttctaactccatttctttcttccccactcattcttttaccaaatcatagaatgtcccatcaacccttggacttccatccacctggctattcctgactggaaggtacttccaggtcttttccactggaaaaatctaatgtctatcctttaagacttaattcaaattcctcagtggtgcttgccaagtggccccaaaaaagttagccactccctatagggtcccatgtccttcatacctttcttattgcacagatcctttgaaacatcatctcttttctttccgggggacaaggactgtgtctggcttatctagccccccagcacagtgccgtgaacacacagctcagtaaatattcagtgaatcattcaaagagtgaaagagagtaacctcatgaccttttcccagcttccacaggattggacagctggacactgatatctgaaggacatgaattc

SEQ ID NO: 196277 - DNA, 1000 bp, Homo Sapiens
aagtaaggaagtcttcacctgagatctctagacactcccaatgcattttcttctcctgctattgctttatttgttgcctgtaataaagtataaactgggtcctatggatcccttcaggaatcaaacacttgataaaaataattaatgtaccttttgataaccctaattgaatgatgttcattggtagttcatacttaaacataaaagctggagattgtcaggcaagctatgctattactgattcgaattcactcttggcatataagcctttctcaaaagtcagttgacttcagataactgagttaactaacctcaagtggatctgccagttagcataaaatgaaagagcaattattggtccaatcaatatttcccagcaagctttggtcattctttacttatttttaggatggattgagactttttcttgccagaccatcattaaagactttgaatgcttttccttttactcaaaaactgtattgttcttatacccaatcttcaggaaaatgtagagaaaataaaggattactaaaactaaaaattgtcaaagttctaagagtcactggaacttacatgtaagttcctacagtattccatttaccttcatgacataggctctccccttaagagttaataacagaccatgccatgcatttcagaattttgctctgatcctagtctttgccccactgcaagttgacataactaaatactacatcttatcattaaacggatacaagctgccttttcaaagtaaccatttacacaatctttgagcctgaaacctggagattttgtcttctggaagagaaagcaaaggaagatttgccttgagctttgactaacaggactgtatcaggtactgttactaattaacactgtggtgagactctaagatagtaatccctgcattcatattttcagttcaaaagacatacatcctttttcctagatcaggggacttccatttcactggtagacctcaagctgagaattc

SEQ ID NO: 196278 - DNA, 1000 bp, Homo Sapiens
tggccccagttgaaataagctatttcaacaaaacttgcatgttatcctcacagtggtatttcaagtaatatttctgtgagatgattctgaagcatgttgagttttccctcctttgagacttacaagtatttggggcaaatttgttatttttcttctctatcaaaatgaaaaacggatccatatttcctgtatcttacagttttgttgacataaagtagaattgatagtctaatatatctaaagtggatcatactgctttgtttttgtttatgggtttggattagtcaggactctccagagaaacagaacaaatagaatgtggatttatataggagatttattataaagaattggctcttgcaattatggaggctggcaagtctaaactctacactgtgggccagcagggtggagacccggaaaagccaatgttgcagttccaggagcctagagaatttcctcttggttgaggtggctggtcttttaattctactcaggccctcatctgactggatgaggcccacccacattatggagggtgctctgcttattcaaagttcactgatttaaatgttaatcttatccaaaaacaccttctgagttgatacataaaattaactatctttgtttattttttagggcagactgactcagggataaatggagtgtacatttgcagccttgccaaatccctggaattatttatttttcctctttaagaatgaaaacaatatctaaaactcatagctacctcttagtaataattatatcactcttcgctttaaagaaagttaacagagatttctgaaagtgccagtaaaaactgcatttattgaaattccccactcacctcaaaccttgccaaaatttccctaaattccagaaagaccagagttttaaattgttacaaactaacagtaagaacattcactatgaaatacagcagggtgctccaagatttaattctgtgccagagcctgacattctaactgtggaattc

SEQ ID NO: 196279 - DNA, 1000 bp, Homo Sapiens
aacctattgaatgcagaagactttattgaggccactctttcctaaaattaatcagcaggcatgttctccagaaactagtttgaaattctgtaatttaaaaaatgtgaactgcttgtataactccatcctctcccacttttctgttttctagtgtctttttaggtagaattctaaagaacttaaaattttggctgccgtggaaaagaatattactgggaaatgggtcttctcagtcaaatagaatcacagttttaatactctttccactgaatgggaaccacttttttttttcctgcaattttgcctaaatcaacagtgtgttttgtcaatgatgttacacctgagacttgtgagtccttgccttacttgggttcaatgagagggtgagaacattcacgtacagggtctgacctccagagatacttcaacaagtgaaagcttttgacaggaaatgttctgtttaatcttttgttaacatatctgtccaatataccttgtatcatcccagctctggacctccgttctcaggcttaaatggtctcctgatgtccaatgatgctgcctccatgatccttccccagtcatagccagactgaaaaggtcacacccatctctgaactacttttgtcatttgcacctctcttaagtcccttattacatgcctccagatactttcttttgtttcttgtcttcctactgtaccctttggggagagggaacatgtcttatagccccagtcgaatggtgcctctaattttcacccagttagaatcacccaaaggcatttcactttgctagaacttccttgggtattgttgaattcctgtcattggaaatgtttctgccccggttgagcaagcactgaacaggagtgttttagagggaattaaaacttcaaaaaggagaatagagaggctctaccatttaaatgcaagtcgcttgaaatctgtagaccacagtagcaagcacgaagcaggtattcaataaatgtggtgaattc

SEQ ID NO: 196280 - DNA, 1000 bp, Homo Sapiens
tccataaatcattttttagagggaaagtagaatatatatgaaatctagtatcatcagtttgctctttaaatatacattttattatgtacaggacttaccacaggtgaaatcttatgtgatatttgcatttcaaaagtaagaagtaactgcgtgattggtacagctgtgtccttgtgattctaattttccgtatcactttaatatcttgctatctatgttagattttcctaaaattgaacatatgcaaaagcaaaaggctgaactatagttagggccatgggattggagaggaaaaagtagacagaagatatgaggaccaagaacaagtaggacttggtggttgataggttctcaagagaatcaaaagtgcttctgaatttggatagtgagaagaatgaatgacaactcatacaacagaattgtacataattttcttctcatatccttggccctagtcttaaagacatttgccaatctttttaaaatatctttgccaagttcatgccttttaaaataggcttttaagaattaaaatattttgtgttctttttaaatttaggaagttatggttgctgatgatctggaaagcgaggtagggtgacattttattttaaaccattaaaattgttttaggaattgaagatgatatagtagtaaaggtttaagtcctgaattgagatagagaccaggattctatttctggttattaaagggaaattcaaaatctatagatgactaaaaaaggatgttttgaatgtagtggcatagattattgtaggcattttgttgttattgcctctgaaagtcttactttctgtgaaacttgtcctgaaaataatataaaattctaaacataaagaaaatgtctgaaaacattaagattgaaaacagagatttgaattttttatgattttgtttatagatattgtatgtttcattagtatatttgtagaaattatcaactctattagtagttaaagttcaccaggttggagaattc

SEQ ID NO: 196281 - DNA, 1000 bp, Homo Sapiens
tcacagcagcttctcagcccccttatcctaacagtgcccgtcagcacccaggtatctagggtcctggatctgggaagccactctgggcagtgttgctctctctgaccccacctgttctctgggccctaatgaagcaggacaactcaaggcttcaggccaagtccttgtgtccttatcaaaggcaacatctgtcccctccaagaggataacccctggggggaggagggtgagacaggcacaagggagaaatcctgatcttgcctgggccctcaccccagattccactgcaggcatagattgggggtgaaagccaagacagtcacagaagccctcacacacacatgcccctgcatgggccttcatgcctctgagcccccacatatgaatgcccctcttgggctcacccagctacctgggctgctgctgctgccaagcggccttcttttattcatgcgttgttttattgctggcaaatgctgctgcttgctgctgttggaggcgttcctgccaaatccatcccaacatcttggcctggcatcagggcggcatgctaatgtggaaatttaaagagccgctcggctttaaatcggaattttaaatgagcagcagtgctccgaggggacctgggcaaaatcgaacagtatctgatccacccttcctcctcccacacccacagcatcaccccaagttcctcccacccctccctttgatttggacattagaggaggtattggcatgggacatcctaagggaagaaagaggtaccagggcagaggaatttgttcaagatgggggtcatctggaccagtgaggagctaggatcactctggaccaagaatggatctactccttgctgtcataggcaaatgaccaaatacaggatgttccacaagggagaagggctagaggtaatgaaactgaagttactccctcacttcccgttttaccaggaaacaagaagagaaggcctgctctgcagagaagagggaaggtggaattc

SEQ ID NO: 196282 - DNA, 1000 bp, Homo Sapiens
tgtcttggatttaagaagggacaccttgtgtttggagactgatggaaagaggtatgattgggtgtagacagaatcattgtaaggaggtaggtggattcaagaggctagtccctagtggctaccttttctcagtcaagtaggaggttgggtcatctatccaaaggtaataggtgagcctgagaaggggacttgaggagagaggtgcgaccctttaacttgaggacaataaaagagttgactgtccagttgagggtgatgactttgagtttgtcatggcaccattctgcagagctgtgggtactttctctacagcacgcagtcacctggggaaagaaaaagtcatacatattaatttaaaccaaatctttcaaaatgtggtcaacagtagaaaactatttttggggagctggagggattcatggtaatgaaaaacttgtgggtttctggagttgtaccgaactttcaaggatcagttaatttctatcttatataagttgttccagaaagttagaaaagaccaaagttgcccagatcattttatgaaaccaatataatcttgattccaaaatcagtaaggacaaagcaataaataaatgtattaagttcatttcacctatgaatgcatgtataaaaatcctggccagacacggtggcttacacctataatcccagcactctgggaggccaaggcaggcagatcacttgaggtcgggagttcaagaccagcctggccaacatggtgaaaccccgtctctactaaaaatacaaaaaattagctgggcatggtggcatgcacctgtaatattagctacttaggaggctgaggcaggagaaacgcttgagcctgggaggcagaggttgtagtgagccgagattgctccattgcactccagcctgggcaacagagcgagactctgttaaaaaaaaaaaaagaatcttaaataaaatagcaactaatctagttatatgttttttgaaagtaggtttatcccaggaattc

SEQ ID NO: 196283 - DNA, 1000 bp, Homo Sapiens
ccaagaacatactttgtattatttttattctcttaaattatcaagtatcatatcaatgtcagataggtgtagttgattatgtcattcaggtgtactgtatcatttttaattttctacttattctgtcatctctgagactctacttagtctatcatcactgacaggagagtgtattaaggcattcatccctttgttcatttctcctttcagttctattagcttttgcctcatacaggagaattacatcttccatttagaattatgtcttcttagaggatagacctctttattattatataatgtctttctttatccctgacaatattccttcttcagaagaatgctttgtctgatactaataaaactaccccagttggtttgttttgtttttgtttgttgagacagaatcttgctctgttgcccaggctggagtgcaatggcagtggcacaatcttggctcactgcaacctccacctccctgattcaagtgattctcgtgcctcagcttccaaaatagctaggattacaggtgtgcgccaccacacccagctaatttttgtatttttagtagagacggggtttcgccatgttggccaggctggtctcaaactcctgacctcaagttatccgctcacctcagcctcccaaagtgctgggattacaggcgtgaaccaccattcccagcctccttttgattagtatttgcataatatatatccttctccatcctttttcttctctgtttatatttgaagtgggattcttgtagatggcatatacttaggtcttccttttttactgagctacatgccttttaaatggtttagatcagggattggcaaactatggcacaagtagaaatttttaattttacatttatatatttaattttcaattgtcttcatttccttatataaatccatgttttaatctattatatttctgcctcaaaaactcttttttacatttcttagaaaatagatcttctggcaatgaattc

SEQ ID NO: 196284 - DNA, 1000 bp, Homo Sapiens
gcaattcgattttgctcaaccacagggagagtggattagaaaaactacagacatacagaaattggctaggtggttactgctttaaaatactgctgaggtgtcttgtttgagcatgtacttccattgtagtgtagaataattgttaaaataaaatcacaatatatttatgcaatcctttttatgcaggttttacaaataatttttagagtacttagaaataaatattagcttgttatctatcagacctggagtttgatagtagtgcagattacatttatatctgctcaccagcagaaaaactaaacatggctgttaaaatacggagtttttatctgtcataaatttgaagttgaatgttttctgacatcatgtcattatcatgtataaaaattgaggtcttctctaaatcatgatcctattaggtgtgatttagcttttcagaggcaaaaactatccacaaaaacagtaatagaaactgatatactagaccattcagaatggatagcttctgattcttgctatatgcctatatttcaatttatttacttttttttaactatatgtgttgttactcaacatatagataaaagaggttgaaaaatccttgattgttattagctttatgaattatatttgatgcctcttaagtttaattctctattttaaggtacctttttagtaactcgtaagtaattcatttaagtaatgattactgttttacaaatataacaattatctaataaagtcccctaccacaatatttacaagtaataattaaagcttaattttaaatataattagaattctattttgtagtattagttcaacttaggttttatgatatcttgactcatgtgatggtggctactttgaaaaaggaaagtataaacataaacacaatgaaagaatgcattctcaaaatagagtaaataaatgtaaatgtaaataaatgagtatgtattttatttttggttatccttttgtaatgtttaaaatggca

SEQ ID NO: 196285 - DNA, 1000 bp, Homo Sapiens
tgggaccaggcaggagggaggcacccagggttcccctccacacacagtgcgcctctgcactctgctgccctcagaagacagttggggcttcttagcatggtgccccagcccttcaggacctggctcctgccacatcttcagccataccctgccccttctctctgtccctcccacactgaggacagcagttctgctctcagttctgggggctttgctcatattgctcttcttgcagggcacaatttgctccaccttttagccagacctcagttcagggaccatctcctctaagaagactttgctgacaactcccccaccccctcactcaacatatacccccttattatcccaggacatcgggcacatttactgcattgtaacaggctcacaacatttatgacatcatattgtggttgtctcttagctgactgtctacttgtgtggggtagtggtgaaggtgcattctctggagccaccatgtctgggttcacatctaggcactaccacccatcagctgagtggccttctacaagttccttaacccctctgtgtccctgtttcctccaactgaaaaatgaagatgaccatagcacctgcttctcaggtgggcatgaggatgaaatgaggtaatagccatagagtgctgggaacaggacatgcatacaataagccctacaataatgtgacattattattagactgtgatcaccttgagggcagggtgatctgctttatctgtctctgaatccatagtttccaactaagccccaaattaatgatgaatagtaatagcactaacaatgataagagcaatgaacatctgcagaggttacactttatagcctataaaatgttttcacaaactgtatttcatttagttgtcagcacactgctgtcaggtacctaagattattcccatttcacagatgaagcaactaaggctcagagagtcctggatgagtccagtatgttggaggattctagacagccatctgaattc

SEQ ID NO: 196286 - DNA, 1000 bp, Homo Sapiens
gtattcaaaaggaaaagagtataaagtaattgaatcatgaaacgatgttccagcccattgcctaacagaataaagctttgaaaaataaaagccaaggttgacaacttcaacacagaactggaaatcataaaaagtgacaccactgaaaaaaattgccaaataggaattctaggaccaaaaaataaaataagcaaaattaagaattcaatggaccagtttaatatattagctgaagaaaggaaagggaaaaccatccagaatgaagcataggaaacaggaaaaaacaaacaaacaaacaaaacagaagcataaatacaaaagagagaataaagtttacagtgaggtgtaatgtgcctttaattggaatcccagaattagaggacagaaagaaaggaacagaggcaatacttgaagagataataaataagaattttccaaaagtggtaaaatatctttccacagatttttttttttttttttttttttgagatggagtcttgctctgtcacccaggctggagtgcagtggtgtgatctcagctcactgcaacctccacctcttgggttcaagcaactctcctgcctcagcctcctgagtagctggaattacaggtgcccaccatcatgcctggctaatttttgtatttttagtagagatgaggtttcaccatgttagccaggctggtcttgaactcctgagctcaagtgataggcctgcctctgcctcccaaagtgctgggattacaggcatgaaccaccacgccctgcccaatatcattccaaggatttaagaagttcaatgaattccaagcaaactaaataggaaactcatatgtagatacaaagtggatatgcaaaaacctcaaaacagaaaatttcatgagcagccagagaaaaacacatgaattacatccaaaggaacaacagttagaatgaaactaacttttctatagcaatacacaacaataatataccctaaaatttgtttgttccaacaaagc

SEQ ID NO: 196287 - DNA, 1000 bp, Homo Sapiens
ctagagtaccttccaggataaccaaagaaagtgaagcatgatgactacacctcatgaaatgtatatttcagtttcaaatggtgacctagaataagcacaaggatttctgctaactagaaaaaatcagagcgcttttgaaacgaaaatagaggaagatcccacacccagctcatgatgaggaacaaacttaacaaaggtgccaggctttagctctgcttagtgcatggtacaaagagcagttggtcccttgagtgtgaagatgatccagaggctcagggctgcagaaggaagcagggccaagctgggagtggggctacaagggggaacaggcgagagattgacttcactccagcccgtctcagctagcggggtccataaagggcacagctagttggcctgtagctgaacccatgggaatgcccactttcacggtgtggcctgcttacagaggaactgtttctttccccttctgttcacacatgttcttagaagccctccaggaccttgcgttgggaattccaaatatttcagccccatcttttgaacagtacacctgctgttttctttcccactcagatcttggctgagggactcttgagtccagtagcacttacagttgcagaaaagaactagttttggccaggtgcagtggctcactcctgcaatcccagcactttgggaggccgaggcaggtggatcatgaggtcaagagatcgagaccatccaggccaacgtggtgaaaccctgtctgtactaaaaatacaaaaattagctgggtgtggtggcgtgcacctgtagtcccagctactggagaggctgaggcaggagaatcacttgaacctgggaggcagcggttgcagtgagccgagatcacaccactgcactccagcctgggcaacagagcaagactcagtctcaaaaaacaaaaacaaaaaaaaaaacactagtttgatcaagagttgatgtggaaagacctactgctgcccaggatgaggaattc

SEQ ID NO: 196288 - DNA, 1000 bp, Homo Sapiens
ttaagagttgcataagttagcaaaggcacattgctcattacatagtagtaaggaagggagctatctattgttgctaaaatccagacattttacttcattcccaataaataggaaataggaattgtatttctgaaagagggagagcattaactgattgactcatgtttgggttgttactgtataatcccagtagatacaaatttaatgtacataaacttacctagtctctatagttttctagttattacttgccacaggttttaggttttctaaccattgttgttctaacatatttactgggcatctgatatgtgcagtgcattgttgcaggcgctgtgaatatagcagtgaacaaaagaggcttgatggagcttattttcttgtgggagagataattaagtacatagtgtagtaagtgaagaccactaaggagaagagcaaggaccggagagtgctgtgagaaaggaatgtaaggtggtcagagaaggcaaaggaaaggacatttgaacagtgatttgaaggcagagtaggagttacccatgtagataaagaaccagacaagagaactatgagggcaaaaggccctgctctaatggttgtgtacctggttggtgttctgggaactctgggcagtatgacagtagtggagtgaatgagagtgagaggaaaagagggcccaatcacataggactatggcagggaccattgtaaggatggatttttactctagattacatggaaagccatatttgaaggtcttgttttgttttttgtttgagacaaggtctcactatattacccaagctggtctcgaactcctgggctcaagcaatcctcccacttcactctcccaaagtgttgggatgacaggcgtgagccaccacacccagcccctaaaacctgggattttacttgcttaaaatgcagaagacttcgtggtaatgttcagtatgacacagtaactcgagtgtctcataaatagctttattctgatgaattc

SEQ ID NO: 196289 - DNA, 1000 bp, Homo Sapiens
atatctagtatctactgaagatcattctgagattattagaacttcattttcattttatatttcaaggaatttgcaacttagtcattatttatttatccctccagggatagaaattggttaaaaaaagagttctctgctattgtttggtgatacgcttttaagactgtactaatttggtaattgtgatacaacagtttcaaatttgcttgaatgtttgcagcatctgtattcctcagtacaaacttgtgtcttttttcattgctttattctcacagtcactgcaataacatagcaaaattaatggattaacaatataagggaaactggcatttaagacaccaaaggtcaactatattctcttaatttcttaaaacttagtggagaagtttctggtcagtataattttataatttgcatttgtccctttgatttgtatcaacacttccttagtgtttgtgtactctaaaaataaatttagaagtgtgtttatttgaaagacacaaaatcttaattttttaagttagtatgtatttttaaagaatcactttaatatagcatctgttgtatcatttgtgcttttttttttccattaaggaataaatgctaaattacagttttgatccttactgaaggatcaggaaatcatagattgaatccttgactgaaatgtctttaaataagttaatctttaaaacttctgcggtgctttaagtgtcttgaatcactgatgtttgtaacaattacaagtacattcctggagccagtttgtatctcataaatcacaatacctgcaaaatgacaatgtgggcaactcatatctatttatattatcaatggatggtaaatatatgttcatgtctatcagtgaatatcaggctaactggtttttatgtcagcagactgagaactatgagcagagaatacgtgaacaacaggaacagctgtcacttcaacagactattattgacaagctaaaatctcagttacttcttgtgaattc

SEQ ID NO: 196290 - DNA, 1000 bp, Homo Sapiens
ggaggctgaggtgagaggatcacttgagcttgggtgaggtgaggctgcagtgagtcctgatcatgctgctgcactcaatcttggacaacagagcaagaccctgtctcaaaaaaaaaaatatatatatatatatatatatattatttttatgaggtgaagtgcatcaaacttgggaaagatttgaggaggctgggaacctcctggaaaaccactccttgaagaaagatatgagagacatttagaagtgattcctgctttcagaaggaggtggattcaaatacatcaaaagtcccttcctctgctaagtgtttatagttcaatgaataatttcaatatttgtatgtgttcttgtcattttatttttttctgaaaaacttccaaaaatttgaaaataaaattacagccttttcttcttataaaatttgttactgtgagctttaattggtacacaggaaattggtttattttctaaggatatttcacattggagaatcagttgcctgtgcttacgggggtgaaaagagagttctcgtataaaaataaagatcgaaggtataaaagaaacatttagcagattaatgattgagttggaagaaaagcctagaaatcacttaggtctttaacactttatttctattaggttttaccagctagttaaatttttccaggattttcattagtcatccagtgttactgaatacttttttttttttttttgagacagggtctagctttgtcgccaggctggggtgcagtggtgtgatctcaggtcactgcagcctcccggggtcaagcagttctcctgcctcagcctcctgagtagctgggatcacaggcacgcgccaccacacccagctaatttttgtatttttagtagagatggggtttcaccatgttggccaggatggtcttgatctgttgacctcgtgatctgcccgccttggcctcccaaagtgctgggattacaggcgtgagccactgcactggacccactgaattc

SEQ ID NO: 196291 - DNA, 1000 bp, Homo Sapiens
tggtatttacaaagtattatacatatttgttaaacgaaaataaacctcagcaaaatttttacagcaaattattagacagatggtttttgaacacttggaggaggaatcagtggtcatgagaaggcaacatgggatccttaacacgccacattaaattaacctaatttcattttttaaaagagctaattagatggtggctagggggaatgggatgaacttaatgaaccttgacttcaatgaagcacttaataaagtgcctgtgatgtccctgtgaacagacagcaaatggtacgtagataattatgtggctaggaagttccacaggtgattaaataaccatacaagaaatgttaacctggagggaaggtctaaatggtatggaaatgattctgtctttggttccaccgagtacggtatttcattgatgacttagacagaaatacagaaaacacatttataaagcctgtaggttgaagataggtggctggaaaaggggctagtttaaatacaggctcctagattattaagttgaacattacacctaatacagagtttactctaaaataatccaaaacatataatgctcgccttgaagatatgacctggaacttatcagcattttctccttttaaactgatctaatttctagactgttcttcctctccttgtgtcaaaaggcatcaatgtgatgactaccacgtggttagaatagtggccaagaacacagagtgcttcagttgagtcccacgttttctacttattagcgatgtcactggaggcaatttatttaacagttttgtgacttgcttgtctcatatttaaaatgaagataatgtaacctacctacataagattgttaaaagattaagagttttcatcttcatgagattgggtcttagctcaacaatgcctggataatggtaaatatttaataagttattagataatattaagcagaacaagttttgtacatggcctgagaacctctccatgagaattc

SEQ ID NO: 196292 - DNA, 1000 bp, Homo Sapiens
aactcaatcatgcttgaagaaaagtatgctacacaatggaaagctaaatagtttctttaggcattgagataaatcatcatataacaacatgtaatctgctaaggctgggaggaaccttattttatggatgaggaaactgaggtccataggaaggaagagctacaagcaggaggttgcgtggtggctcaccagaagagctgtcaaggaaaccctggtctcaacccaaagacctccataaaggagacagctgaaacaagctagagtaagcccggtgcctgtcaccgtttgtaaccagagacaatgaccacactgttcacccattgtttattctccaaatattttgtaaagcaaaggagaacactatgggatctgctaactataaggcctttctactttcaccttgtttcacaaggtcacaattaaatgggccctgttcaaaaaatagaaggaaaactatatatagattgaatccaaaccgaaagatgaatctaaaccacaaaatattggcttgaacatagggcctcatggtgcctgagttttaataaacataaaattctttctttggggaaacaacatgatggggatacagattaaagagtacggtttaaagggtattgcaaagaccctgaggcttggaatgaggagtgtcagattgtggagatgctttcaacacttccactgactttctctgtgacctcgtgcaagatgtttctttcttagccctcagtttttccattcacacaaatgacaaggttggactgcatatcatgcaggccctttatgggatctgaccttctgtgacattaagtgttctctttatttttcatattttcacccctgatggaagaacaatttgttgacttactaagaagcagactgtcataaaagccaatcgtctgcttaactccattacaattttttgggcgacaactcccttcagagactggcttgtatatattgacaccacctcaatttaggcactgcgatggcactggaattc

SEQ ID NO: 196293 - DNA, 1000 bp, Homo Sapiens
gaagctactcaaaattcaaaattttatgataaagtgcacgttataaaaacgaatcaatatgaaatgtagcacagaatattaacaccaggaaaacccagatatgcaagaatacagaggatcattttaatgtgtacaaagcatatatataaatatgtgttcgtgagagcatatgtatttgtgggatggggtgggggagtgaggggaacacacagtatttcctcccaagaaatgacaatgaaaatagcctggcaagatattttaatctcagcaatagatttttgggcattgcagtgggaagacaaatgtattataaaagttaatgtctagcctgtaatcccagcactttgggagcccaaggtgagcagattacttgaggtcaggagttggagaccaacctggccaacgtggtgaaaccccatctctacttaaaatacaaaacttggcaccacatggtggtgtgcacctctaatcccagctactcgggaggctgaggcaggagaatcacttgaacccaggaggcggaggttgcagtgagccgagatagcaccactgcactccagcctcggcgacagagcaagactccatctcaaaaaacagaaacaaaacaaaattaatgtctaaacaacactgtccagtagaaacacaagggaagccacaaatgagagccacatgtgcaatttcacattttctagtggctatttaaaaaaagaaattaattttaataatatacagtattttatttaagtatccaaaatattatttttacatgtaattagtataaaattattgcagtatttcactttttttataaaaatgtaatatataatggttgtacatattttacttttttttttggtatgaagttttgggaatacagtgtatgttttacatatgcaacccatctctatttggtcaagccccattttgggtgctcagtagccacgtgtggccagtggatattgtgttggaaagcataggttcctcattattcatttgtgaa

SEQ ID NO: 196294 - DNA, 1000 bp, Homo Sapiens
tgctgggattacaaagtgctaccatgcccagccaagagttttaaaagggaactcgcaaagccccagcagaatggaggttcacaataaaagttaatgtttttcacctgtggcccatctgcagttttttttttttttttttttttttttgtttttttgtttttttgtttttttgtttttttgtttttttttgactcgatgtatacttgttatgggcaccttaaggagaaaggagggctgagccaccagatcccagaacatttctgcaggctgtgactgtggtcatacaggccacagatgagacagaatcagagtgtttgtcctttctgcatgccacctgcataaaaatgctcacactgaggatcagccctcaaggaggaggcccaaggtcatacccttcattgtaccatccctgatgctgtccttacagtggtggtgtgctggcacccagctccatcactagacagagttgactgcagctaagggatgtgggagcccagggctgaggagcacctggctcctgcatgactgatatggtttgggtgtgtccccacccaaatcttatcttgaattttaactgccacaattctcatctgtggtaggaggaacccgttggaaggtgattgaattatgtgggtgggtctttcctgtgctgttcttgtgatagtgaatgagtctcacgagatctgatggttttaaaaaggggagtttccctgcacaagctctcttctctttgcctgctgccatccacgtaagatgtgacttgctcctccttgaattctgccatgattgtgaggcctcaccagccacatggaactgtaagtccattaaacctctttttctttcccagtcttgggtttgtctttattagcagcgtgaaaatgaactaatacaatatccttccactgtaacgtgcagcactggctcctctacgtgaatcaactgcagctgggaggtgtggggcccagggccagagacttctaagatctgacgtgtggaattc

SEQ ID NO: 196295 - DNA, 1000 bp, Homo Sapiens
caggagagcagtgtgtgtgagcatgtggagagaccccaccacgggaacctgggcatatccagctggaggcagcccatgttgcctggtgcacaatgaataaggaggagaatggtatgagatgaagtatgtgagttgatcaggggcctcaggcctcatggctttagtagctagtcatgaggagttctatttagtctaaaaagtgataagtataccctgacaatgactgaggtgtctctatggaatgagtatactcactaagaaaaataagtagcataatgtgatttgacttgctgccagtcacagtgagtgggtgatgaggattaagacttggttcttagcagccagtgcagtggctcacgcctataatcccagcttgaggccaggattttgagagtagcctgggcaacatagtgagacctcacctctacaaaacattagaaaaaaaaagacttggttcttagaaataccagcccacattctgtccatttagcacatgaagcttttttttttttcttttttctttttttccttgaactggaggtagggggatagtgtagagaaagaatagaaaagggtttatagtataatggtttagagttacgaactcagactgcctgcatttaattgccagagttcccatttgccatctgggtgacaatggataagttacacaaatctctacacctcaacctcctttccctgtatgtcaaatcaggataataaagtgtgtactattatctcagaggtatggtgaggtttaaataaaataacccacattcaatacttagcattgttcctgtccagtggctcgagggatctggaacatttgggccagaaaagagaggagaccactcacaaatatttgaaagttttgctgagaagaggaattatacattatttgcatgtcctattgaggacaatgaagagttatggggagaaattcaagggcaagggcaacccaaggtaaggaagacccaacacagccaaggatcaataaagg

SEQ ID NO: 196296 - DNA, 1000 bp, Homo Sapiens
ccagcctgggtgacagagcaagaccctgtctcttaaaaaacaaaacaaggctgggtgcggtggctcacgcctgtaatcctagcaatttgggaggccgaggtgggcggatcatgaggtcaggagattgaaaccatcctgcctaacacggtgaaaccccgtctctactaaaaatacaaaaaaattagccaggcatggtggcacgcgcctgtaatcccagctactcgggacactgaggcaggaaaatcgcttgaacccaggaggcggaggttgcagtgagccgagatcacgccactgcactccagcctgggcgacagagcgagactctgtctcaaaaatcaatcaataaataaaaacaaaacaaaataaaagaaaaatagtgaaggctttggtggctacaagaaaaggcacagcaaggaaaatattttggtatcttggtgtaaaaaaaagcacaaatgaaaatattacaatgcaataagaatttttaaaaaactgaataaaaacagtaagattttgactatggtatcaggaagggaagaaaaggagaaacttaaaatatggacaggaatacagacacttcagcaacagtcaatgtcctctgcagacagtacatacaatattattcacaaagtgggctaactctgtaacagtcttccagccaagagtctctgaaaattatttctaaaactttacaacttgctactataagggggaggtacgcaaccaataagtctaattaggattctgaccatttctcatatgcaaaggcatatcaacaaacccatctgcagtgtacagctcatcctcatctgggatctgggggcacaatttactctcccagcacaccctccctccctaacctgacgatccaactgtgtttcacccaggattcagatcctgggaggaatcctaactatcagggctgttaagcttttaaatacgccaccctcagagaaggccctcactagatgggtaggggctgggtgtcatgataagagaattc

SEQ ID NO: 196297 - DNA, 1000 bp, Homo Sapiens
gtgcctgagtgatgatacaatcgctgtttagttactagatgaacaaatccacagaatgggtaaagagtagaatctgaactatatcttgacaaatattattcaaacttgaatgtaaatatatacagtatgtatattttttaaaaagatttgcttgcaatgaccttataagtgacatttaatgtcatagcatgtaaagggttttttttgtaataaaaattatagaatctgctgctctctgcttttcttacactctttaataatgattctctttctttaaagttgattcagtttcctgtatttgaattttcttgattctgctatgagaatttgtttatgttgataacttttttttttttttgacacggagtcttgctctgttgcccaggctggagtgcagtggcacaattctggctcaccacaacctctgcctcccaggttcaagtgattctcctgcctcaccatccccagtagctgggattacaggcatgagccaccatgcccagctaattttttgtattttttttagtagagacggggtttcaccatgttggccaggttggactcgaactcctgacctcaggtgatccgcccacctcggcctcacaaagtgctagaattacaaacgtgagccaccacgcccagccgataacttttaaaaataatacttcctacaggttgtgtacacacccagcaagttatgggcaattagtagtttaagagagaaaactactctgccaaatatccaagtaactatggaaatactttccttaccttgagtgccctaattttatggtaggtgtgtagtctgcacatttaactcaagtgttaggtgcctactgtggaatgttgtaaagccaaggagacacttcagggagatcttgttcttttgtctcctgtcctcacaaaaggaagaggaaaggtgacctgaagactttgtttcttggttagtgttccctgagaaaggcagctgcacatcaaaaagttctcagtggctgaattc

SEQ ID NO: 196298 - DNA, 1000 bp, Homo Sapiens
tcactctgaggacaagaaaggtataaatgctaataataatatctttacaaatcagtggcgtattttagctaagtgttaatacagacattttttctaaatagttcttaaatctgatcccaggacatgcgctttacatagattgtctcatgcaaacctgacaataactccatcaggttggtacaattatccccattttccagatgagaaaactaaggccctccaaaatgaaataatttaccaggtcatttgagcttgtctgtggcactgccagggtcaaatccaagcagccgagctccagaggtaatatgcttaacagctacagtacagtgatttgcaaatcactgtattaacgtactgatttccagatcactgtattgaatgccttatgaaaagagatcaccatctatacaaaacaattagaaggctttgtgtaggaggtggcatttagcctctaattgaatactattaccttccctgaacctacaatgagatatttaaaagttattatatattaaaaattctaattatatattttacttagtgtaagggggatgagatttaagcccattttaattacaaacaaaagcagatccacatgtcagctgtctgtgatgcctttgtggatatccagacacttgttcttaaatctgtatattacaaactgaaacaacaacaacaaaaccagaagaaaagtaacacaggaaaaattggctaacaagtcaatgaacctgtgactttactgatacagcaattataaaggtcaaagcttattttcaccctatgtaaattaaatttaaatgaactcctaaactatatattacaagatccagaattaaatttagattagccagagactttgtttgtagaagacgctcttaataatctttggcttttgtccagcccagattcccacttcctctaaagatgatggagaactgcttccctggataaattagcacaactcctgcctccttccccttcagtccctgtggaggaattc

SEQ ID NO: 196299 - DNA, 1000 bp, Homo Sapiens
gttaatgaccatctggtaaaggtgacagcctttagtcctcctaattcttaactgtctgaaaaaatgtgcccaacctgccacggcttgtgactgaattataaaccatgaagcataataaagtcattaagtttcaacatgtcaaaatggactcaaattgcatcttgcccagaatttgatggcctttccccagcacttaagagagcagggctgtgtactgttcaaaaagcactttgtcatttctcgaagtactcttagctttgtgtggctgtctggacacaagcatcagcatctccaggagaaggaggaaatcgagtgaagtgagagcatggaggggccagtatgccacttcctagggaaaggcaaaggcatttcttctcaggaaaagagcagagaatgatgctgtacctcatttggttattgctcaccctcctgaatatatgattcattttacagtgggaaaattttggataaaagcttgtgctttacaattccgattacccttccccttttatcccccactatcaaaaataatcatattctataaacgtcagtggaaagtggtgagagtgcaactacgttttggagaaccaggtgtcagctctgtcagatttctatgaataggcacatctatatacactttttcaaagaaagaaaggtcactcgccaccctacttgtaaaactgtcagaggatttaggaaagaactaagttaggctgtcttttcacatgggaaaggaaatctggttctcaagatatttggggcattgcagtgaataagggatattaatagaattccacccccggcctctggctaagaacttatctgcctagaatctgaggaggaaaggaatctaagagttacccaaggctcagtctcactgcaataggaggggataacactgaacatggtggggcagatgtgggctttggtatctgttgctagtttatcctcccttcacccaccagcgcagtactgccatttcttctttcccctggaattc

SEQ ID NO: 196300 - DNA, 1000 bp, Homo Sapiens
gcaatattgttgcctatttgctacatatgtaaaggggaaatacagcctaattcactttgaatcagatgttaagcacagaaccttcccacagctaattctcttggctctgtgtactctgttgtagaagtaaagtaaatcaattagaagatatttacggggcctgtgtacaatattatgttttagcattgagcaaggaaaaacactaaattttggagagaatgattgaacctcaaaatttttggtaggagtagaaaaaacattattagaaaaatagaattcgttgaggttcaagaatgggatggaattttgcattgaaatagaaagtatgagatgcctagaaaggaatatttagatatataaacttgggcaccagaaatcaaggaaaggccaagttatggtacacctggcctccgctgtgtcaatcattatagcattagcatactgcaaaccccaaggcttgtgctttaagtgtgagaaaccatgggctgagtgacacccactgtaactcaaagcaagcaagtttctcgtggcacttattacattacacagctgagcatttctgcccccacccagtgttgcagtgtaaaaatgcctgcctctttgctaaaagcctctacttgcttgagaaacttccttttgtgatttgtagactgggcttatgttactgaggagattaaaaacagatttcattataaaagtttatgatgttccagtccgttcaatatgtgtgcagttggaggaacacatcctttcttatccataattccttatttgatcttctcttgcccactgtcctaccctttatatatccacagacccccacctcatattcacacacctgcaaacctgtccatgatcatccccacataaaggggcctggtttggtttcagactttgatttctgatacacaagaaggcattaaagtgaatgtctcctggggatatttgttattaaaacagcttttagcaaatgaaccaatctagccagtgagatgaattc

SEQ ID NO: 196301 - DNA, 1000 bp, Homo Sapiens
tgaaagatttacatgcacatttaaatgtttacacaacataatcttaggatagtttgatttttatgttgtagcagcacactacccatcagtggaatgtagcttgtcaatggcatgctaggtaatatttgttaaaaattatacagaaggccaggcgtggtggctcaggcctgtaatcccagcactctgggaggccgaggtcggtagatcacgaggtcaggattttgagaccagcctgaccaacatggtgataccccgtctctactaaaaatacaaaaattagcctggcgtggtggtggacgcctgtgatctcagctactcgggaggctgaagcaggagaattgcttgaacctgggaggcagaggttgtcgtgagctgagatcgcaccactgcactccagcctgggcaacagagcaagactccatctcagggaaaaaaaaaaattatacaggaggtcaacgttttggtagacaggttagttttctaaaccatatggtgaagggggatggattttttaagccccatatttagaataagaggctgaagaattaagtctagcttagtggatgttgtcaaatgggctgcagttaagcaagtgctatcagccgtgtttggtggtttgtcaggttagtttccctaatctttgatgtagttcaaggattaactgagccccaagatttggaccagaagtttgcattctaggatggttccatcactcaaaaatattccttgtgctatccttttgtggccatacctttccttctttcctaaccactggttaccagtgtaattttgttccttggagaatatcatataaatggaatcattgcagtgtataaccctttgagattgacttgttttactcagtataatgatgcctttatggttttatccctgttatgtcaatagacctattgcgaagtagcattctgtggtttggatgtacaagagtttatccattcattcattgaaggacatttaagtgtttccagttgtagtgatc

SEQ ID NO: 196302 - DNA, 1000 bp, Homo Sapiens
aagaatgagcttttccatttcattttcaattgctttgacagcttatacttatcctcctcaacttgctttttgtttctacactgtcaaaagggtgtctccaagcagcatttgagatgcagttcttctccttttgttagttttgattaaagggaacgaggagctctgagtagggcagcaaattcctaattgttccctgccagttcactcactggcccttctgggacctcagctgcagcctgtgctagcctcaaaggagtcccagactgagccgcagaccctccgctccccattcctgcactgctgtggctgaagaactctttcttccgatggctaggtcctgctcaccctagagggccctcctagaccacactacctaaaccagtctcctcacatggcaaagtctggaattgttactacttatttgttatgacttgttcttagcttgccatccgtctctcccaccacagcgtatgctccttaaggaggaggaggtctgcgttacaacctggcatctgcccaggggtatagtaggagctggaacactggaaaagatgagattttgaaatgcctatgggatgtggcttctagaagttaaatcacagataaggaaatatgtagaagacaagggaaagatgaggaaggaagaaaagtcttaaattaagaacaaaattatgagcatggaaagactacattttttattctgcagaccaaacaccaggatacaatctacctttaactctgctgtattttcagcagtctctaaactcactgaaaccacatggatttaggttagggagaaggaattccttaaaataaagctgctgagaccctagcaagggaccaaatgaagtctttttggaaaatctcttaagggcaggcacttttctttctggaacaatgaagagtaactgcccaaatgcaggaaggaaaaacagggaaaaccgaaattcagttgagtgttgggtgttaggaggtgccaggcctggtgctggatgtttca

SEQ ID NO: 196303 - DNA, 1000 bp, Homo Sapiens
atgtgtttgtaagaacaggcttagtctatgtacgagactgtgaaggccatgattagtagagccagtgtgggagcaaagccccacattcacctcctctggttttctcattgagggccaagaggagatagaagccccgagaggggaactgacttgcctgggatccacatggagtagtgacacagagcgagcccaggccttagcacaagaaaggaaaggagtgacttggaagcttttgtttccaacaccataaagaaatgcctgttaatctttagaaaccgctcctgctggaggcatggtaatgcagacagatacttatttatatctgaaaagtagaagcaatgtgtctaggtaataatggggaagctagttaaataaatgtgatagacaacatgaggttttgtcctgccattaaaaatgtttatgaagaattttaaggacatgagaaaatggcaataataaagttaaaaagcagcatattgaactgtatatatagttgtctgatcttcctgacatagtctcattaagggggaaatttagggtggatggtagaattctagagacaatgcacctgccaggttagataggggatgccagcgacacgactgggacagaaggagcctcagagagaggatggggtgagcagatagactgggcattgatctggagacctcaaacaagtgttttcccttcttctaggacaaagaggagctggatgaaaagatttcctacttcaaaacctacctggagaccaaaggggcagccttgagccagaccacagagtttcttcctttctatgcccttccttttgttcccaaccctatggtgcacccctcatttaaagaactcttccaggtaaatgtcagcttttaactcttgtgtcagatcctgggtgacattgtggttttaccttctgtatgctgggggcttctgaatgatgctttaaaaaaactaaaatttgcttacattagtattatttttagttataaccataatttgttta

SEQ ID NO: 196304 - DNA, 1000 bp, Homo Sapiens
catcagtgatctcaggactttacttactaaggcccagtctgaaccaatcacaccccagcctaaaattcagctttgcatgttgtgctgcttcctgctggctgttggggagcacagcagtggtaactggtaaagctgcccaagattagggttcagttgtctgtttttttactccacgcctggtggtggtatagtctagcaagtccactgttgatggagagagagcacattcggtggctgaatatgttcttaggagcagggtgtctcaagaagagctgtggtttctatctggaggcctcacggtgattggaccagatgacttgagaaccccttagtcttgcattctgtgattctaggtaaaaacaatagatgcagcatagaaaaatgtgtgtgtgtgataccagataagctgggtaggggcagaagatattttacatctcaactaagaaccgcctagcagatgacatggaatatgtattagcatttaacatttaaaaaatactgtgcgttcaatgagatgaattaattctgaagcttttcccgcagatgtattcaaggcagactgaaacaggaatcttgctatcattttttttggcagaggcatctgtcagattctccttccttaggtttctctgcttctctaggactgggccttcgcaaaaaaaaaaacaaacaaaaaaactatatagctttgtttaaggttatcacttaaggcctcctggcattttatatcctgtctcttacaggatgcttggaattgaatatgcaagtataatatacaatgtcaacatggcttgtatgtacaacatagaaactgctctcccaccccaccccacatcactgctgccatcctctctagaggagattctttccctgagcattcacctggtgtgggatcacaggactgagctgcagggattgatgtgtctcagttaaagccgcttctttcttcacccagggaagtgatgcccccttagtaaatctactgaattactcagaattc

SEQ ID NO: 196305 - DNA, 1000 bp, Homo Sapiens
tcttctgtcaaaacatggtagtcataagggtggaccatctccaatcaaacctcccacaaggtgcaacagtgggatttcatttgggaggttttcaaattaaaaatagaaactaggccgggtgcggtggctcatacctataatccgagcaatttgggagggcaaggcgggtggatcacctgaggtcaggagttcgagaccagcctggccaacatggcaaaaacccatctctactaaaaatacaaaaattagccaggcatggtggtgggcgcctgtaatcccagctactcgggaggctgaggcaggagaatcggtcgaacccaagaggtagaggatgcagtgagctaagatcacgccactgcactccagcctgggtgatggagaaagactctgtctcaaaaaaaaaaaaaaaagaaagaaaaagaaactaccacagtatcaaagttttcctcaaatgccgggtgcagtggctcaggcttgtaatccccagcactttgggaggctgaggcggcagatcacctggagttcaagaccagcctgaccaacatggagaaaccccatctctactaaaaatataaaattagccaggtgtggtggtgcatgcctgtaatcccagctacttgggaggctgaggcaggagaatcacttgaacccagaaggcggaggttgcggtgagccgagatcatgccattgcactccatcctggggactcaaaagcgaaactccgtctccaaaaaaaaaaaaaaagttttcctcaattgagctacagaagaagaggatcagtcttctggatggagaggactgaattccacctgctccaaatgttccctccacatcttgtgatgttcctttcagagaggagtatcagccaaaagctaaagaagcattctttcagctcagatgacaggctactgggacttgatttacgaaacaaaagggacaacagaagttagctatgtcggccgggtgcagtagctcatgcctgtaatcccaacactttggg

SEQ ID NO: 196306 - DNA, 1000 bp, Homo Sapiens
tgcatgtccatccacccacccagttgctgcctctacttcataatacgctctcccacatctctgctttagcctcacactttgaatattcttatttttgtggatgcaactgctttttgtgtgagcatatctacagcttcattaacctttattcctttgaaactcaggttcctccttaggtttaatttatgtctttctgcttttgaattttcaaagatgggcttgaataacaatgggagcatttgggaaaatctaataattatcccagcttggccactaccaaattgcataattgcaagcaaattatcctacgttgctgaatctctaacttactgtcaggaactgatgacaattaaccactatttaactcgaaatagatgattcatttcgatatttgtcctttaaaatgctagaaaaacctattatggctgataagagggctataaaaaacagtgtggcgtggagctttgcatcagaaaagctgtgtgcatctaggctctgccatttattgacataaaatctgagacaagtagtttcatctctgcatttgtttcttcaaatatggactggggtaattttactaatcacagggatgttttgcgaatgagatggggtcatgtaaacaagtgcctagcacagtactgctctgtagaaagggctcagtaaaaacttaagttggaaaacattaggtacgaaacccaagttcccctgcaaagggcatacagcagtgaaaaatgacagtcctataagtgtcagctgtctgtttgttgatccagggtaattcaaaatttattctgaataatgaattctgatttaataattcctattttttactactttttgttttagagatagggtctcagtggcacaatcctagctcactgcagccttgaactcctgggctcaagcatcctcccactgtagcctcctgagtagctgggactacaggtgcacatcaccatgcccagctaatttttatttttgtagagacagggtttcgcta

SEQ ID NO: 196307 - DNA, 1000 bp, Homo Sapiens
aacttgggaaaaactgatatcttgacactgctgagtcttcttatccataaatacaaaacgtctctccatctgtttagttttaaaatttctttcattagacttttgtagttttccaaatatagattttatacgtattttattaggcttatgtaaatggcattgtgtttttaatttcaaattccacttgctcgttgctggtatataggaaaatgatcagcttctgtacatcaaccttgtatcctgcaacctggctataattgtgtattagtccagatttttgtgcgtgaattcttttgtatttttctatgtagacaattttgccactgcaaacaaagagggttttatttttttcttcccattcaatgtatcttttgttttctcttcttgtcttattacattggctaggacttccagtacaatgttgaaaattggtggtgagacggggcatccttgccttgttcctgaccatagtgggaagagttaggtctctcactatttagtatgaagttagatgtagggttttataaaaattttttaagatattttttgtccagttgagaaagttcctctctcttcctagtttgttgagagattttatcatgaatgggtgttgaatttgtccagtgctttttcctgtatctattgatatggttaaatgacttttcttcttagcctgttcattttatggattacattaattgattttggacattgaacccctattgcatatctgggataaatcccatttggtcatgttgtataattcttttttatacatgataggtttcaatttgctaattttttttcaggatatttgcatctatattcatgagacatcttagtctgtagtttttttccttgtaatatctttgtctagctttggtataaggctaatgctggtctcatagaataggttagaaagtattccctctgcttctatcttctggaagagattgtagaaaattggtttaatttcttccttaaatgtttggtagaattc

SEQ ID NO: 196308 - DNA, 1000 bp, Homo Sapiens
tttgggactggatgtgggaggaataagtaggcttcctgatagaacatgtgtgtgcacagttcacaccacacggttgagtgcgcaggcgcccagaggagcccttggggtgctctcctctgccatgccatgtgcccgcaggaggaggccagtgattgtccagcttttcccatgagcgaaaaacccaaactttagtttggggaaatcacttcatttaaacaagagaggaatacaacggacaagacagagaatagaaatgtaaagagcggaggaatatcactgaagctccatccgtgattctgcatttcaatctggctttagtctctgccccataaatatttcaaatacaacatatataaaatgaaatgtatgaaatgtatcaacacctgctctggagaattttcagttaaacatggcatattgaatacactcatggacttaccacttcttgctcacaaaatgtttcaaaggcacaaagaagcccatctctacaaggaaagtgagaaaaaaaaaaaaaaacaacacattgacagcagcaaaacttgagaagctactgggttaacagacaactggaactgacttagcagaattgataaagctgaaatttaaatgggtaatttgggaattcgtgaaacaagccaatttgcagcacagaatcccaggaaggctcaagagcaggaggcctcagatgtgtgtcaaaacatgtgaaaacagtgctccaaaaaaaagacctctgagaatagtgaataagacaatttcacatcccctgacaccatcccctacttgacaggagaggcactgccattcccacattccagcaatagactggaggctttctctccagagatgctcaattagactatgggatgctgggctagcctacattgagattaaaagaaaatatacattctgaaaggtggacctccaaatctccttttcctacttggctctgagaattcttacaggaattcttattacactcaggaaggatattagagaattc

SEQ ID NO: 196309 - DNA, 1000 bp, Homo Sapiens
tgtttcatgctactgaatatttttttgctctaatttttactcttagtctattttgggaattttgtatgtttacaacttttaaattactacatctaataaaatgatttgtaatactcttaatatcattttaccttaacctactttaaaaaatattttaagtctgtatttcttttgtgaaacagtattttaaagtttttattttttttggtattgcctctttaggttttttgtttgtttgtttgtttgtttgtttttgagatagagttttcactcttgttgcctaggctggagtgcagtggtgcgatctcagctcaccacaacctctgtctccctggttcgagtgattctgctgcctcaacttcctgagtagctgggattacaggtgtgagccaccatgcccagctaatttttatatatttagtagagacggggtttcaccatgttggccaggctggtctcgaactcctgacctcaggtgatctaccctcctcggcctcccaaagtgttaggattacaggcgtaagccaccgtgcctggccaatgttgcctcttcagcttttttgcttacttgtgtaatgtattttactgttgccttgtataacttgaactctgtagcttttaaattttattttgatttaatttgtcttttaacctgctttatgtttttatctgtagcctccttaaagttgctattacttctaccattattctcaacatattttaatgtcaacttttacccttaaaatggtatcaaggtatttacctacctgcctacctatttagctatttctaagttatatttcttctcttggcttacttaattgcaagtaacatcatttatgccaggatctgctctgaagtgaatccctttctctctttcagttggttctatgatgaatgtctgcttactcactgcatacttattaagttcctaaattctggagacaaaattctggctcacaaaaatatagcctgagaaattctaaacactagggaattc

SEQ ID NO: 196310 - DNA, 1000 bp, Homo Sapiens
agtgtaattaaaccagcttttcttctgcttgtctttaaaacttaaaaaaaaattgtatttatagaaaggttgcaaaaataatacgaagaatttctgtatactgcctttacccagctttaccaattgtcatattttctttatcattctggctccctgtcttcctctctgggtctctgtctctctctgtacacacacacacacacacacacacacacacacacacacacacgcacacacacacacacacatcttttatcctactcctcatttaggaacctgacaacttgtaattttttctaagttagatggaatttaaacattggggttattttattttattttatttttgagatggagtctcgctctgttgccaggctggagtgcagtggcgcaatctcggctcactgcaacctctgcctccagggttcaagcgattctcctgcctcagccttgcaagtaactgggactacaagcacttgccaccacacccggctaatttttgtatttttagtagagatggggtttcaccatgttggccaggctggtctcgatctgttgacctcgtgatccacctgccttgacctcccagagtggtgggattacagatgtgagccaccacgcccagccaacattggtgttatttttagttagctttttctttgtggaagtatgaacacttgttaaatttaatgagaaagtggggtagtatgtagcttaggtttctaattttcataaattaatttttctaaatatgaggctaagagtacttaaaactttgaatctagatattttctattgtgacaagatacagaaattcaagattataaattttgatgagttgagaaatgtgttttgcggtttaagttataaaagcattcttctgctaacagaaatgcttatctggattgtaaagtcagatctttaaagaagtggctcaaacagacttaataagcaaaattgtaaaacccagtgataggtgggactaaagtggagtaagctt

SEQ ID NO: 196311 - DNA, 1000 bp, Homo Sapiens
gagtctcactctgtcacccaggctggaatgcagtggcacaatcttggctcactgcaacctctgccttccaggttcaagtgagtctcctacctcagcctctggagtagctgggactacaggtgcccgccaccacacctggctaattttttgtatttttagtagagatggggtttcaccgtgttagccaggatggtctcgatctcctgacctcgtgatccacctgcttcggcttcccaaagtgctgagattacaggcgtgagtcactgcgccgagcctggagactgcatttcttaccagctctgaggtgatggatgatacttgcttctgctgctgatgtccctgttccagagaccacacctttaatggcaagggtgaggggattctggaatccgaatacctgagtctaaatcctagctctaccccataacaactgcatgaccctgggcaaaatacttaacctctgagagcctcagtttctgaatctgagaaagggggaaataataggacttagcgaattgtgagaatcacataagataaggtatagaaagcacttagcacgatgcctggcacatagtaggaactgtacactaagattaataagcagattgggcctcgtgcggtggctcatggctgtaatcccagcactatgggaggccaaggtgggtggatcacctgaggtcaggagtttgagaccagcctggccaacatggtgaaaccccatctctactaaaagtacaaaaatttgccaggtgtgatagtggttgcctgtaatcacagctactctggaggctgaggcaagataatcgcttgagcttgggaggtggaggttgcagtgagccaagattgtgccactgcactccagcctgggagacagagtgagactccatctcaaaaaaaaaaaaaaaaaaaagagcagattgggcctggtgaagtggctcacacctgtaatctcagcactttgggaagccaaggaggcaggatcactcgaggccaagaattc

SEQ ID NO: 196312 - DNA, 1000 bp, Homo Sapiens
ctttaataccctaagatgttctgagaattccaaagaaatttaatcatttatagctattacctttagaagtaagatataggttttggtttctgaaaagttaagagactagcaccatctgctggtatgctggcttattcctatgaatcccactctacagatgacgctgaggtaatataaacattgctggatctcaaaaaccagttcaacaacacttgaagacattgataatggtagggcatctttagggatgcacagagcacatgaaagccagagtctactcactgatgggaagtataaactagggttaaaaattctacttgggtatactttttactaggctgaattttcttatgcagattattgcctatgctatcactactttagtgtagaacctaatcagcagtgacagtgagataccagactaaaacaagatagcagagagggaggtgccctacttatgtaagcagtgcctacggacaagtgtccctaagaaacaggagagagccacatgtgagaaaaacaccaagtatggctgagctcggtgtatgtccatctctcactctctaaatataccagcattttatgattatagaagatttagcaaatgggaaaaattaaagagatatttaagaagcattaatatgggaaagggaaacacatactgacaagaaataacctcattcaagaaaaatcagaactaatcaaaaaaaactttaaacagtcataataaatagcctcaggcagacatgaaaaaatatcagaaatacaaagcaggaataagcagttaagagaaagaaaatattggctgtaaaaatatatataattattgcaatgaagaattttaaaatggtttgaataagaaaatgaacagagttgatttaagaattaatctaggaaatgttccaaagggtctcagaaagcgacaaaaagatgaataaagcgctagttaaaatatggtggggaaagtagtattagtgtaaatatctacccaaaaggaatt

SEQ ID NO: 196313 - DNA, 1000 bp, Homo Sapiens
ataggctttcaaaggtcagcaaaaattgtgattgcttgcagattgctttgacatttttgaacaagttcacaaataaaaatatgcatccgatcttgtgtcctttcactgaatattttcccttttcctattctcactttcccaataacattttttctcttactcttttttggctcttatttctccctctagccacaattgtcctctgaatttaagatccacaacagcagtttactctgtgtctcctaccatagttctctctgtctcttttcttgatcactccttttctggtaggttttcttagactcaaggaggaaaaagggcggacagactgatgaaggaagcaatagaatattgttacagctcatcaaaagtggaaaaaaaaaaagagaggggtacaatttgcaacataaaaacaattgttcctactctcaaaaagttactctaggatgaattacaaatagcagttcactattatgaagtggatgggggtgtggagggagtgaggaaaggagagagagagggagaatatgattacgctgggatggggccagtccctcaggaagaacccttgagtataaacttcctacaatgtctttctataatcttcagatttgaaggatgatttgacaaaatataaaatctttggctcataaatttattcccagcctccttctggaaaagttgctaatttccatcatgctttgattttttgctatgggaaagaaatcttataccatcctgatttcatttcattgtaaataaggtggtatatttcttttgccaggaaacctagattagacaagctttacatggacattttctaattttctaacttttaagattctgattagagctgttcttttacatttgcaaacgttcatttattaatatttaattttttgttggagtattttgtagtcactttcttctgcttcatggttcatattttgggaagtattctcatcagctgaaaaattttttcttcattttccacctcatt

SEQ ID NO: 196314 - DNA, 1000 bp, Homo Sapiens
agaaggggtctgtcgaaggccacccagttaataatgacaatctctgcagctgttgaatggtcaaggttaaaatattctacatgtatgatcacactttcaaatcttcattttctgatttccaatgccagacatgcttgttataaaatttcaaagattacagaaataatgcctggagaaggtgaacagccgtgtgaccccactctgggagacaaccattgttcacagtcagctgaagagtcgcgttttgttctcttcctatattgtgaccattttcctttttttttttttttgagacggagtctcgctctgtcgcccaggctggagtgcagtggcgcgatctcggctcactgcaatctccgcctcccagcttcacgccattctcctgcctcagtctcccgagtagctgagactacaggcgcccgccaccacgcccggctaatttttttttttttttgtatttttagtagagacggggtttcaccgtgttagccaggatagtctcgatctcctgacctcgtgatccacccgcctcagcctcccaaagtgctgggattacaggtgtgagacactgcacctggccgtgaccattttcctaataagcagatttgtgggcaaacgtttttggactcctaacaggtccgtgaagcagggagtattgctgctggtgggccaggtcaggttcttcccttggccgcacaaaagaaaaagtttattgcaaagcaaaggccaccctgaccaacatggtgaaacctcatctctactaaaaatacaaaaagtagccaggtgcggtggcacatacctgtaatcctagctattcgggaggctgaggcaggagaattgcttgaacccgggagatggaggttgcagtgagccgaaattgagccactacactccagcctgggcgacagagcaaaaactccatctcaaaaaaaaaaaaaaaaagcccaccctgaggactgctcagagggagagacggcagcttgtgccttaagaggaattc

SEQ ID NO: 196315 - DNA, 1000 bp, Homo Sapiens
aataccatcacattgagggaataggtttcaatcgatacattttaggggcacgaacatttagtctattacagcaactaaacaagaagaaagcaaagctttgtttcctttttcctttttcaatagcttgacaatgaagttgaaaagacagcaaatcttgtcattagcaactggaatcagcaaattaaggcaagtatccacaaataccatttgtgtaaactcagtttttagaattgaagtgttttgctttcatacaaatgcgatgacatgttctagcattagtacttctaagtgctaactgaagagaaaaatgtttccttacctggttgttacacagatatatttttcaccaaaccaatggaagtgcatggctctaactatgattatttagcacttattatgtgctaagtgctatatatttatgtatttaatcatcacaacaacccaatgtcatatgtcattgtgcattgccccattttacagattgggcaatggagacacagagagtttcagtaattttcccaaggatacagagctggttaatggttgaaccaatggttgtcacaagttgggttccagggtcactgctcttaatcattccattatactgactacctttctgtataatttgtaacttacagaatatgataaacaccacctgggttttgtttttttcatttgtagaaaggtgttagtgatctctacatcattagtgagagtggcccagtgaggggtgggtagtgatatgtaaaaggggatgcgtatatcaatttcatgagtatgtggggtccactttttgtgcacaacactattctaagacataatttttttcaagtaatttaaaatgacgtgtgcaggaaatagggaatacattctaggaggaattacgatctggcgtgggaagctagagcatatctgtatgagttcttaagcagagaaaataacagatgggatccatatgcacagaagattattctagaacaatgtagtataggaggaattc

SEQ ID NO: 196316 - DNA, 1000 bp, Homo Sapiens
ttcactagaaacccattagaacaaataatgttcacttaatgtctttaaaatttctttcagtttcaatcattctctaaataatcagaaacagtagattctacaaatataaattaagtctaacataaacataagtaaaacatcaacaatgtaaatccactgtatgaaaactataatttgatctcaatgacaaagattttttttccacaagattttatcctgtgccatgttggcataactagaaattgactctgagattaagttcttctggaccagtaattaaccctggtatatacaccaagtatgtcacaagagtgactgtgctgaccagggcactacgaattcattactggattcctcatactcatattctggagattataccataggcaagggcacgaaagtctgaagtctaatctctttccatatgtttggaataatgccaaattctgctatattaacacatcaaataagccagatgtgaataaatccacttcaccattagtctatttctaaacagagacaatttattaataacaagctgtataatattgaaaaggatatgagtttcatacatttaaggtttttcacagctatgcttctagtaccagataaaaactcattaaatcaagtattcctaaaactaggccataatagaattcctaaattgtttaactatagaaactatacgttaaaagaaatgtaagactcttttctatcctccacaacctcaccatgtttcaatagttcagaatcaaaaaatttcactccaccccaagaagtgttgtgaaattttcaagatgtgaaactcttattggaggaatagaaataaacctagattgaggaccctcaaccttttcccttttgcttcttgatagataattctctggactagtctagccacaacatctaggcctttacgatttctcagagctatgattctagaactggacaaaaaactcattaaatcaagtactcccaaatctatgccataatagaattc

SEQ ID NO: 196317 - DNA, 1000 bp, Homo Sapiens
tttgccatgggttcgaacttcttcctttagctcggagtagtttgatcgtctgaaaccttcttctctcaactcgtcaatgtcattctccgtccagctttgttctgttgctggtgaggagctgcattcctttggaagaggagaggtgctctgatttttacagtttccagtttttctgctctgttttttccccatctttgtggttttatctacctttggtctttgatgatggtgacatacagatgggattttggtgtggatgtcctttctgtttgttagttttccttctaacagtcaggaccctcagctgcaggtctgttggagttttctggaggtccgctccagaccctgtgtgcctgcgtatcagcagcagaggctgcagagcagtggatattggtgaacagcaaatgttgctgcctgatttttcctctggaagttttgtctcagaggagtacccggccatgaggggtgtcagtctgcccctactcgggggtgcctcccagttaggctacttgggggtcagggacccacttgaggaggcagtctctccattctcagatctccagctgcgtgctgggagaaccactactctcttcaaagctgtcagacagggatatttaagtctgcagaggtttctgctgccttttatttggctatgccctgcccccagaggtggagtctacagaggcaggcaggcctccttgagctgcggtgggctccacccagttcgagcttcccggaggctttgcttacctactcaagcctcggcagcggtgggcgtccctcccccagcctcgctgccaccttgcaatttgatctcagactgctgtgctaggaatgagtgaggctctgtgggtgtaggaccctctgagccaggcgtgggatataatctcctggtgtgccgtttgctaagaccattggaaaagcgcagtattagggtgggagtgacccgattttccaggtgccgtctgtcacccctttctttgactaggaaagggaattc

SEQ ID NO: 196318 - DNA, 1000 bp, Homo Sapiens
aaaaaaaaaaaagaaaatcaaggttttagttcaactaaaatggaagaacagttttcttttaaataattttccagtttttaaaaaatcattccattttgttgtttttattttattattgttcactctcccttctcatcaatacctacactatttccctaaaggtgattaatcatatatacattttaaaattatttcagttttgcaaatcaaccactttatgatatttcatataactcaaaacaatactagggctaagtaatgtccattttttattcctgtaagttcctccgagaagcagtttcattgctcatttctcctgtggatatttaggattagaacttccagtcacagagacaaaaatatattaatcgtctgaacaccaagggctctttaaaattagaattgctttgacatccatgacctgttaaatgttgaattctaaaatgaacctctaaagttgttaagataaatatccagtgaagtgctgaaaaggtaagaagcaaagcaacagagataatgtaaaattcaattgaggaacagataaggttcattcacaagctgataatgtacagctacagcgcaaggagataaaagagcacaataaaattatattctattcacattcaaccagttggacatccagatttggctatgccttatagatgaagctgcctcattatggttctcttggtatgttctatagctgcacactttgtatcaatagaaggctcccttatttatgatctgatgatttacgtaattaaacaaggacacctaatctaggtttttaaattatttttggtaaatagaatgtaaaacctggatgctaactacatagttctaactctgcaacctagactttcaaataccatcagggaatattcataagtctaatgtacatatggtgccctaacatcacaacagagacttagtattctcaagttaccttcagtttttgacatgaaaaacttttaaaacatactgctatatcactgaattc

SEQ ID NO: 196319 - DNA, 1000 bp, Homo Sapiens
attggatgtgttggaaaatcctgtagttctatggaagagggctcactcagcacatgagtcaaagacttgccgagggtgtatgaggaaattttgccactaaatagcaaaggtcactctgcaaaatcctgcaggggctggcatttttggtttcatgtatttgtatggtatgagaagaagaaggaatgagtagggtgtgtgaatggttctttatagtgggctattgtgactgttttagaaggaggctaagaatgaaagaaatgtatataatgcattagctaaggccctgattaaaatgggtggaatatttgtgtttcgtgtgggtgagagaggcatggggcttttttcttttatttacccctcaaccagtgtcactgcgagacctgagaacttcagatttctatttcctttcaaccccaatgtccctatctggcaatggcaatatgtattatgttgctccatttaattcatgcaacattactgatctctttctatccaatttacacaatgttatacgtctctttctcattataaactactgtggagttataaagttggataaagcaacttgcctgtcctcaaagagcttataatcctagtagtggagaaaaagagggatggcacaaaaaattatgttgcaaaataaaacaatgaaagtgccacaaaagagaggaggagaaatgaaaccgtcagctgctaagaattttatacaccagacacttttatagggtgtctcatttaaaccttatggcatccattaatgtaaatagtgtcatatccttttcacagaagaggaaaatggggttcaaataagcaaagtaacttgtccagagttgcatagcgaggagccactggagctaggtttgagggcgggtcttctgacctccacatccagagtcatactacttccaacatagtgctccaagatgaaataaatgacagaaatttcacctagaaggaggaggcaggggttgaaagtgggaaaaggaaaatgctggaattc

SEQ ID NO: 196320 - DNA, 1000 bp, Homo Sapiens
acttgcccattcctgccgtgtacaaacttacttctctcagctctgaatatttaaagtacttattttttatgttaacttttaccatcatttattttgctgtcttgtattgtaattataaaagattgcctgagataaaatgctccagattggacaaacagaacaaaaaccaaaccaaaccaaaaagacccccaaacacacccactttgatgggaacagtagaagctacaacaactgttatttcaaaatggatgcactctgtcttgcaagaagagatagagatttgagcaattctaggtgtacgttctttatttcggggaagaaaatggaatgggtcctttagttgaagtggaactcttgcaacaatatacatttttatcctgtaatagtgcagtggcataaccagaaaaatatgtgatgatattgctatcttgagataacaagaccattacatatggtgagtagtatggctaaaaatcttactctctaaaactctgagtatgtatctcttgaattatttaacaagaacctgcaaggggtggagcattatgctgttgtctaaaatttatgcgtgtctaggaaatgatgtctgtatcttgtgagcaccagggatattcttacatttacctaaatttttgtatgcagggtagagggaagcctgccttacttcctccctcaaatgttcaagcctgaatggaacctctctggcactggtatttcatgcagtatcagctcagcttgaaacaatgaaagtagcatatctgatcacaagcagttgatccccagacatgtttattgatggcactatgaaggaaaacagcatactgacatacaatacaaagaaacttggcagactttatagtggcaattcagttttggcatttatattggtaaaaacagattacaaggcttagtgtaactcaaaccttatttaagcttgcaaaatgtctgatttgatcagttggcattccactgagagcaacacctctatctctaggaattc

SEQ ID NO: 196321 - DNA, 1000 bp, Homo Sapiens
ttcatatgcctctgcttctcttccttctaattaacttccaaactcagggtggagacttagcattggtactgtaagaaaaagccagcctaaagcattctcctaagtgacaagaaaaaaataatgtcatggacaacaagaaaaaaacacatttttgccttagggcctgaactagtctaggccatttagcctgcctgataggtcagactgccaaataagagaagcaagagttgggagagatatctctgcttcctccctttttaggggatggtaatctcaccaacttgtaaagcatgccctaccccaaaacaccagaccgaacaactgtcttggtttggtccagtgctctcaccaaggtcctcaagaggtgatcacaggaagttagtgggaaaagaaaggggagtgaagtagagatgggggaaagcatgcgcaaggctgtctaattgagctgattttcactgcgcatagcagcgggttactactgctgggggcctgcaaggaacagtggagaatgtgattcaaaattgctcctccaaatgacaagtgaggtctgagtctggcagaattgtggcacagggacctatttcatttgctatgactcccaccaatcaggtgagcaattcttctccctttggtgagcatatgggggtgagagtggcatccaatgtcattcaccatttatcaaggcaaggaaagaagccctggttttactgtacagtgcctaaaaaataaagcatctagaaaagctaaatattatatcggcctaatgtgcactctatgagtagaggcttgtctgcttttcattttgaggtcttctgagacttcctaacatggccaagaaaactcttggatatactttggtgtttgggttgtaccaagcttatagtcccgcttgaaaataatggtatattagttatctattgctgcataaccaattacccctaaggttggaggcctaatacaacaaagattcatgatctcaaagtttctgagtcaggaattc

SEQ ID NO: 196322 - DNA, 1000 bp, Homo Sapiens
gcagccatccaatacccttcagccattccaggtctgacttgtacaagttctacatgaaggagaggaacacagagtggggaagagtcaaagttgcccataagagtttgatgcttgcaaaccacacatcacctctgtttaaatcagttaggtggctaatctcataaaactcaaggatcaacattaaatgttaatattgggtgttatctctctggcacacatgggagaagtttagagtatcctgcaggaattggaacagggctcacaagtggcacttggtggaacggcagccagcaatggcacataactttgtatgcttggattagtttctacactcaccacttgaagtctgccttttatgtaccactggaagtaacatcagtaataacatcagttggattttaggaggtaaagaaccttagatgtatgcgtaatgagaaaaaaatacatacctgtatctatatccatcctgccccccatctctctctctttctgtgtcaagtaaacatgaaatccaacatttccttatgcttacatctacttatgaaatatgtatatgattatgcaaaggtaacggctcagagcagctgcaactgaaattttctacctaattacatagaataagagactgattttcatcttggtaaataaggtcttgctaccataagaaggagtcctctataagatagaaaatgtctggggaaaactctgctaccatgaattgtacagaatatgttaggttctattaagattaccatttaaattatgcctctggggaatgcactggatttaaacacacaaatacacatctccccggggtctggcgataatatacgcacatcgctctgcaggtcgtaggctttcttggcctggatcacatcgttctgatctggcagacacgtccactggtgcagataattgcgataatcaatgtcgctaaccaggacctggcatttcttggcttgaacaattgacatcatgtccaacggtgtgttgtgaattc

SEQ ID NO: 196323 - DNA, 1000 bp, Homo Sapiens
agaatcagatccacacatgcataccttggggtaagccctggagtttataaacaatttaatggggttgttttcacaagctttcatgtctgcaatctcctttggtgctttctggatccaggaagctgcatctttagttatcttatgcttccatgtacctccatggttgcacttgactaggcccaagtggtggtgaactaaaggaaaacacactagtaaacttgccataggttcagaggcaccttaagttcttgtcttcgtccttatttcttctgtattatttacttttcagactccccaaacagctgctccaatatattctacctaggatttttagctgcattcaatgggtgagacaggaggaatgtgcttactccatcttaccaggaaccagaacctgataatcgtgatttttaagtgagtatatagtatctgttatttagatatactgtaatttagtcattaattccccacatatatttttaggtcattcacttatacaataacaatgtgattaacatttttatgtttatattacaaaaatgaaatttaaagttatggcatttttgggcttttgttatatgttgctaaaattagtttctgaaagattgatactgatttacaaatttgactatcacaaagaatattgaccacaattcattaaaatacatcaaatgatatttaaaaatccatatgaacctcccctcccctactacccaaacagtggccactactgggggttgctgggttaatttattatcctaaaaactgataaatctagggaagttatcaagcatttactctgcctttcgaggtaactgaatagttgataaggaaacttttattatgtatagaagtactcaaacttataaatgcagaaggagttacaaaattagaaaatcatcatttcacaacccctaataaaataatctaggcaatgttcatcagtgatttaaaaaacatcaggtgaaaggttgatggggaagtttataatggagaattc

SEQ ID NO: 196324 - DNA, 1000 bp, Homo Sapiens
accatggcttcgttttgcctgttcttgaacttcatataaaatagaatcatacagtgtacttttgaacgtctggtttctttcatatataacatgatactttgagatccatccgtgtcattttaggtagattttaaaaactgcaattgaaaattctggaatagaaaattattcctggcttttaaaaatagacatgccatgtacaggaaggatggggagattttctaggtcagcagagggtgcagcgttgtctcctctgagaccggagatcttgattcaagctgcagaatgtgattctgtggctgatccaaagattttatgaacagtgagtaaggcaaggaggaaggggagaggggaaagagcgggaagggaagggtgggtgaggaagaaggcaggggtgctggggagctgcgggagcttgcgcttccttttctggcatctactgttctctcagatcaagtacagttgtgtaaacagatctgtgcctggaatgtaaggaaggagggaggggagccaagtaagtcagagactgctggaaaacaggaagaacttgcctgaaatagactagctcgtgccttcaggatgggactcctggagaagccatcaggcctgtgaatcaggcacagcacagtagaagcactacctggcattgtgctgtccaggcctggggtggcactgtgcctgtccgggcccctgtactaagtagtcgagtattaatgggctggcagagcaactagccaagcagaggcccccgtggcttaggggctcatctttactcagcgagatgagtgtgggactggcggggactgtcccttccagtccccactcgtcttcccctcccactccacccccagccagctgctctcagcatcagggtgttgaaaacttgcatcacactacatggaacgttgtaattgtgaaatagttcatgagagatggaaggtggacttttacctttgaatctttgttcataaacaaatggtgctgtacccagtgggaattc

SEQ ID NO: 196325 - DNA, 1000 bp, Homo Sapiens
agtagaggaaaaagtaaaggggactttgtcttgcaccttaggtaccagcttgtacacagtggggtagagcaacaagcaggctctaagggtccctaagtccaggcctaggctcttggacagaatttctggacctgccctgggaggggctccagaggggagcccactgtcctgagtgtgagtcccaggcctggcagcattcaccataagctgataaaagagtctttgggcttgaactgaacatcagctgtggcctggcagaacctgccatggactgttggtggtgctggccacaagaagaagctccgctgcctgtggaaaggagaggaaacactggggaaggcctctatattgtggtttgagtgctagcttagccatagtaaaataaaacatcaggtaaattgctaaggctttttatttttatttttttcgagaccctctgtcacctaggctggagtgcagtggcacgatcacagctcactgcagcctcaacctcccacactcaagcaatcctcccaccacagcctctcaagtagctgggactacaggcgcacaccaccatgcccgagtaattttttttgtatttttctgtagagacagggtttcaccatgttgactacactggtctcgaacttgtgagctcaagcaatccatctacctcagcctcccaaattgttaggattatatgtgtgagccaccacacctggctgtaaatttctaaagtttttgactccaatccttggctcccagacagcatctctggatatgccggggacctggaggaactcgccaccctgaaggaaaggtccttgggcaaggcccattgctgtgctggcttcaggtctgacccactgcagtaacagtagtggtggctagaagggtgcttgcatcaccatacccccagttccaggtgactcagcacacagagagagagagactccgtttgtctggaagaaagtaagaaaaaagaacaaaagtctctgcgtggtaatcaagagaattc

SEQ ID NO: 196326 - DNA, 1000 bp, Homo Sapiens
ttataaagaaaataggccaggcacagtagtgctttgagagaccaaggcagcaggatcacttggggtggcaggatcccttggggccaggagtttgaggtctgtcttgggcaaggtagcaagaccctatctctatggaaaaaaaaaatgcatttttttttgctgggcatggaggctcatgcctgtaatcccagcactttgggaggccgaggtgggtggatcacgtgaggtcgggagttccagaccagcctgaccaacatggtgaaaccccgtctctactaaaaatacaaaattagccgggtgtggtggctcatgcctggaatcccagctactccggaggctgaggcaggagaatcacttgaacccgggaggtggaggttgcagaaagctgagatcgcagcattgcactccagcctgggcaacaagagggaaactctgtctcaaaaaaaaaaaaaaatgcatttttttttctaaaaaataaaaagataaacctcctttcccaagtaataataataaacaaagtaaaagatgacaacaacacctctctgtgaagcagataaatttcgtagtaagaaccacaaatgtaaccaaactatgttgaaaggatctcatgtttcacctttgactttcttttagttctctggtttttaaccctttctccttcctaaggtaaaatgttagcatggtaggatgtatcttctttaaataggggaaatgtacttatgaagaagatattatttaacaatctgtcattcaagaagaaagctgaagcttgtaataataaaaaaaaaaaccaaacacatattctctccaagttaaggactgtttatcataggtggttctcaaatcttggtttggggtaagttttcaaggttttctgtttttgttttgtaagataagagtgaacacaccctctgcttcctcccaatccttctcccttctcctacccaaagataatccaaacaatatatttctccccccacccccttcctgggatgaattc

SEQ ID NO: 196327 - DNA, 1000 bp, Homo Sapiens
ctcctctttgaagatctcttctgatagccactagcccttctcccactgaagtcctgattttaagagcaaggcagtggaagacagcactgaaacctggaggattttgcagacttttccattatccttgggttggcctctgcacatgtggccatcgtcctttcttactgatcctgttcttcaaccatgttctctttctcttatccctcttccacatcctcccgcagtctcatccgtatgaaccacccttccttgtctgctgtgcactacctgtccacatttttcacctgccacagcacttaaaaactgaagtttaaatacggtcctctctcccgcttttctacactacaaggtctttgaggctggagagccacagtgttttttgtttctagccccttgacacacagaaccaagtcagacactcaaatttctggtgaatacttactcatggaagacatgtagtgaacccctgctgagaaacgaggtactctgaggagacacaagatgtcctcattcaaggaatattgcttaagatcttttcatatgccaggcagtgtgcccagtactgtgggatatgtcagggaaggaaacaagacaagccttgacctccagaaggatacaacacacaaatgcatacagaaaatgtgataacagctaaaacagaaaagcacagaattgcagaatgaatatataatgaggtgctctgattcactttgctttactctggtactgtgcctggcacaagattttaataaatgaatgagtgaatacagccagggaatgataaattaaagaaagctaccacaaaacttaatgcactttatttattaaataaatgcacatgaacagcgcagagcaaatgtctcttataatagacaccaaaagtcagaggaacaaataatttgtcgaagtcacttcagagatcatccaaaacactagctcttaaccactgagccccctttgaaaatctaaaaacaaaccaatattgcacacaatggaattc

SEQ ID NO: 196328 - DNA, 1000 bp, Homo Sapiens
aatgttggtggcacgtagagctgattctctggtagcgtggtcgcgtaggagccatcttacaggaggtccaggcagatggcagcaggttctcagaggaatcgggttgggaggcaggggagcttgcatttgccactggggccccttattctccctaagttattaaaagaaagatgaaagcgcagcccgactaaataaagttacatcacgtggcttctggttttaaaccatgttttctatgagccattgcttttctacttcagtccagtccattacggaatgttatcctggcgcaaaagatctgacaaaattggctcataaatgtctgcaagaagtagcttttcttgtcaccccctttctccacctaccctgcccccatcatctgaggactattaagagagaccacacgtgcggtttggctgagcgcggtggctcacgcctgtaatcccatgactttgggaagcccaggtgggcagatcacgaggtcaggagttcgagagcaccatggccaacatggtgaaaccccgtctctactaaaaatacaaaaattagccgggcgtggtggcacgcgcctgtgatcccagctactcgggaggctgaggcaggagaattgctggaacccgggaggcggaggttgcagtgagccgagatcgcgccactgcactccagcctgggcgacagagcgagacgccgtctcggaaaagagagaccacttgtttcctatgttctctcactgaacattgcaattagaaggcccaccccaaataataataggaaggactttttgtcttgctaatgaattcatcccaggaagggggtggggggagaaatatattgtttggattatctttgggtaggagaagggagaaggattgggaggaagcagagggtgtgttcactcttatcttacaaaacaaaaacagaaaaccttgaaaacttaccccaaaccaagatttgagaaccacctatgataaacagtccttaacttggagagaatatgtgt

SEQ ID NO: 196329 - DNA, 1000 bp, Homo Sapiens
ttcacatactacgtcctcaataaatatttgatgaatggatgaactagttgattaactaagtaacgtttaaatgacctggcctagaggctggttaaaaatcatcataacagttggctaactagaaagtaagctgcttaggtcacttttgctagaattttactgattaagctaatgtcatgtgaatataagaaactgtcaaccagaaaaatatgaaggggagagaagagaatcaatgttgctacataggctcagtcggtagatgaatctaaggccaggttggggaaatagtatctctacagcattttgaacagaaaacttgacattggtttgttctacattcattactagattgtaccagcaactaagaggccatgtctgaaatggaccattaaatgtagtcctttgcaaatttaacacaaattatatcactctgaaaagtgctttgacataacttggagttaaacatttgctataagtggcactgtttatggtaataattgacaaaccatgcttaggttagatgtgtgtaagggtaggagttgttttattaactgacaacattatcgaattcctgataaattgcaaattctggtttgcttttaaaatcattgaataaacattgcagttgtttaataggtgaatttaccggtctactaaatacagtgtggcagatattaaactctattccatagttcctttcacacattttaccggatttttcttcattgtaaaatattaaaagtttagaattctaactttcaaaattggttatgcaaagtattacccaaacctttgtgaatgcatgaagaataaatactcttagttcttcttttatatctcactttacatacctcccttcctactttcattttgggctgccaagttttctcagtttgtacataaatattagagtcagtattatattaaaaataataatcaagaatgctttttgagctgttcgctttgttgttttaaatccagaagaagtgatgagagaatt

SEQ ID NO: 196330 - DNA, 1000 bp, Homo Sapiens
atgctgacatgcagctacagacacaaagattttcagagccacatttcagagtccaatgggaaagtcataaacattgaaggaaaccagtcagccagtctttcagcttctgagacatgccctcgaaaaacatctctcctttggtgctaaagatgaacatcttggacacaagcagaagttgaagagggagataggaagaggaacagaggagaaaaggaaaacaagcaaatatcaaagacttactttgtataataccagataccatagagggcaatttatatacatcatctactctcaaagcatattcacaaaaagagtttggtctgcattttcctgttaagataatgaaacttagagaattgaaatgccttatccaagatcatacgggtgctgtatggtagggctaggcctcaacaccccaaggcccatctctttcctttaatccagttactgacactgaattcaattctttccccaagaaattcatttccaaaagctatctaatcaagtcaatgcaatctaacgccaaggtcatataaagagattttaacaaaatcaatagttaaggacaaagaaaaagtaagcattccacttctgcaggtcagtcttcttgacaacagcttacctggccaatttattccattcaatcagtaaagccatccaactcacggtttggtatgtcaggaagagacttttcattgaggtgttccgggaccatgtgagaggaagaccaaacaggaccacattttctccctttccttgggacactggggcctgtactgttgtttatttattttttacatcatgctaagtgcaatgttccacagcctcactacctcttttatttcaacaatgacaaaaatcgcacaaatatctgagcacatctttcaaacatgaagaaatatctatgcttcagaattcacaaatgccccatacaaatcatttgtttttgtaaccttgaactttcccatttaaaataaaccatgcactagacaaagaattc

SEQ ID NO: 196331 - DNA, 1000 bp, Homo Sapiens
ccagcagtgtataagcattcctttttctctatgacattgccaccatctaatagccattctgactggtgtgagatagtatctcaatgtggttttgatttgcatttctctaacgattagtgatgtcgaatattttttcataagcttattggccacatgaatgttttcttttgagaagtgtctgttcctgtcctttgcccacatttttatggtgttctttgtttcttgcttgttaatttcttaagcaagttccttatagatgctggatattagacctttgtcagatgcatagtttgcaaatattttctgttttgtaggttgactgtttcctctgttgatagtttcttttgctgtgcagatgctccttagtctaattaggtcccacttgtcaatttttgattttgttgcaattgcttttaacatctccatcatgaaatctttataagggcctatggccagaaaggtattttctaggttatcttccaggattttatagttttaggttttacatttaggtctttaatccatcttgatttgatttttgcatatggtgtaagcaagaggtccaggttcaatcttctgcgtatggctagccagttattccagcaccatttattgaatagagtcctttcccccttgcttgcttttgtcaacgttgtcaaagattagatggttgtaggtgtgtggcattatttctgggctctccattttgttccattggtctggaagtctgtttttgtaccaggaccacgctgttttggttactgtagccctgtagtatagtttgaaattggggactatgatgtctcccgctatgttctttttgcttaggattgctttgggtatcagttgtttatcagatcaaggagcttttcggcagagatgatgaggttttctagatatagaatcatatcattcgcaaacagggagagcttaacttcctctcttcctatttggatgccttttatttctttctcttgcctgattgtgctggctaagaatt

SEQ ID NO: 196332 - DNA, 1000 bp, Homo Sapiens
tactgacctggccctggttcagctctgcaggatcatttggttctcattacaaatcagcatttgctcattcatctcgttaacactaggtcctaaaacatctatgtaagagttttgcttcagctcatctatttagtgactgctcatctactccaggaagccctccctgactccaccgcagccagcctcagactagagaaggtctgtccttcctcaggggctcctacagaatcatgagcatgtttaccacagccccagacactcatatcataatcctatgattccttacccaaaagactgtatagtcccgtaacttctctatctccatccctagtacatagtgctcttggcactgatgaaacgaatgaacaaatatacaaacaatgactatggagaatctttctaactgatttttaaaaataaatctctaactttagctggttggaactcatctgaaacatcatgcctactctctttagacttctagggaaaaaaggatgtattgaggctgcttggaacacgggatgcacgtggaagaaatctgcttttcctaaagtggtcaaagccgagccaaaggtagactggagggagctctggatcctgagtgcttatgctgagatttcagtgaatgtgtgtaggaatccacaaggaacagtgagaaaattcacgattgaggaaagaggagggggagagggagatggagtgattgaccgatggattctgaacaggcaagtcacagagaagcagcagcagttgggccaatgtgattctgtcaccccccagctcagcaaccacaagcacctgacgtcgcctctcccagcctgtctccccctctagaatctggaggggtcataaggatgcccgcaggctagcatacatgcaacatgtgtgccatccacttgcgcatacttgtgaatgagctcacagggccgtggccgctccagctgtgtgtgtcgtgccagcaagctcacatcgcaccctctcccaggacctctaggaattc

SEQ ID NO: 196333 - DNA, 1000 bp, Homo Sapiens
taagtggaggggaccagggaggcacatgggaccagagaacctgcccatagggactgagggttagagtagcatggaactgtggtgtgagggatgccaccagctgatgcacttgaaggcattttttagggacatggagatgacggaaataatgaaaggaaactaacagtaaaggcaccacctatgtgctaagcactttacaaacactgagtccccacaatagacacattagtctttacaacagataatagagtattatcccattttacaaatgtggaaactgaggcttagagagtggtggattgcccaaagccacaaagcctcagtgtagtctgtgtctaaacatgtgcagagttctgcggatctaatctctcattctatcccctcaacaatcctgagatgttaagcaacctgtcagacgtcaatcaagactccaaggtcttggctgggcatgataaggccagacgtcctagggagcctgtgcctagaaggtggagctgaggtgtttggctggatgaggacagctgacagtccctctgtctgcagtctgcaggtgaggggagctatggaagtttgaacaactggatggaggctacgacttaaaaggtcagtttgtgaccagaccagagagaggccttgtagtggcccaggttctcactacccacttaggtgtggctgccctgtcaggcagtggcactgattgatgtctgctgtcaataagtgtgcttgcagctgctcccaagcctttctgcaagggcctgattgccatcataccagaggaagcacttggaaggagaatgcatctgattagtcagtaactaatgaacacagggagaaaaaacacttgaaaaattcctagcagggctctgacatttggctttctggcagctagtagagattgtggttaaaagttgttcagatctgggttctaaggttggagagagtgggaggaagtgctgtagaaagggactcaattttgttctgaagtgaccagtaagaattc

SEQ ID NO: 196334 - DNA, 1000 bp, Homo Sapiens
aaagcagaggatagggtcagacagactgaaaattctcagagggttgtgttccagggcagagactgctgttggctcctccctgtctggccctggaaatgtagaggtttacacctgggccattagtaaatgccccataattcctcatagcagatctagttccccaaccttactgcagaggcatgggagccgcacctcattggcctaatggactccagggagttggtcaaggaggtgcagccctctccctggaaatttagagtctcagggaacttctcactgtcttcatctcttcattattcaagtgggaggcctcaacaaccttgtcttctttccacacttcctgcatggccgcatggccacagctgatcccctcactcgcctcaaaccaaccgtgcaaatctccttgggaagcaacatgccactccctgccaagcctcctctggacagcgcctgcgagttccttccctctccactggacaaaagtttctctcacagcatttctgtaacttctgaaacccaacctcctccaagaagccattctagattgattagagagaaatgcaaataattcctgtgactacaactggagatatatctatatctatctatatgtatagatagatatatatgtgtatgtattgggagttattatcttcaacagccaccaagtttcttggtgtctcctcactgtcatccacattgaatgctgttattcttttaaaaagtgaaaataacttcaatgtttgagtgattataaaaatgttatatgctcacttaaacaggtagatatgtaagtgcagaaatctattcagaagaatgtgaaaatcacacaaaccccactacacacagagtaaacttttctttatctgagaggtaaaaatggtatgtgtctatggtgtacaacatattttgatatatgtatacacagtcgaatggcaaaatcacagcaagctgtttaatatgcattacctcacagacatcatttttgtgatgagaattc

SEQ ID NO: 196335 - DNA, 1000 bp, Homo Sapiens
agtaagagaatcacatttctacaaagtattttttggcccaaaattacattaccacattctaattgttcattgttccagagcattcctgcttttagagatttaataaggaagtcatcctgcaattaaggccaggacaaggtctgattccaaaaagacatagcccctgtattccaaggtctattaatctgtataacatttgatccaaattttttaagttacctagtgctttaaccataaaagaatctctaaaattggaatgccttttgttctaataatctattaattaagtagaattcttaagtaataatcagatagtaacagaaatgaggctactaaatatgacattgcttttggtcactatagatttcaagtgaccaaactataaatgttattaaatcaaagatactcattaacagaaagaaaatgacaactttgaatcttaaatattttccttaatgtataatttattttgctttgacaaaaaatataatatagatataatttcaaaatgtataatatgaatacaatttctattcctttgtttcataaaacatcctacaaagcagacagaaaaggcttaaacctttggattcactattcaacaactggaaagatatttctcaaatttatgcatcagtctgtgtgtgtgtattcaagcaaatttctatgagtcagccttaatgaatagtattcttcacatataggaaaatgtgataaaaaaataaacagaattgatttaagttaaaaaaaaaaaaggtaatatttaacctccgtgggttttccaatttactgaaagcatgaggaagatgcttagccagatccatcacttcctcagagattgaagtcaactgtttgttcatgtcgctaagtaggatttcttcctctagggggaaaaaaaatcaatattaattttcaaaccacaaagcagagatattcatttagccacttcattaaataatattagggatcaaattttcattttctttccttaaatgaattc

SEQ ID NO: 196336 - DNA, 1000 bp, Homo Sapiens
aggctagcaggacatagtgttctttttgaagtcaaatataatccagtcactggggattcagaattttagatgagttgggtacaatggcaaatgaactctcagctattatgataatacaacttaatgaaaataggacctgagtaatttactgaaacagttatgttatggatttttttcctgaaatctgactttccataataaagatttcactttcaaatagataggccaattgcacttttaattgacaagagcaagctttgctatctttgcttaacttggattctcctgttctcttatggcttcacaagagaaaacatttgttgtggcaatgtttgcttattttaatgttgggatttaaaaaccaagaatgaatgaacttgatggcaaaacctgttcctacttggtatgattgtgtatataagttaatccagtggttgcccatggtgctgttcttccaaggacagagaagtgctgtgtcattccttttgggccaaatagcattgtatttctcagtgcctctctgctccacatatttcgtgccacaaataataaaaatgtgctagaatatttgactttaaatgaagctaggactatcttttaactctatgtgtatccaagatgtgcaaagttaaatctgcttcaagtacctgcttgcctttgtctgattttgtagaaactgagtagtatttatcatattgtgtgcacattgagatgaatttgcaaatggtaggacacttacgggacagtgacctacagtgtgttcttggaagtgaaatgggagttctgatgctggatgacctggcctatcctgtgcccattcatgtagagggtaatttttgattttggccttacccatataggttgttgggagttgccactaaacctcacttttgatcactttcctctatttacccttgttctcttggccacaagggtggttagttgtcatgaaataattcatgtttctaaaatccagccaagctattgaatgagtgaattc

SEQ ID NO: 196337 - DNA, 1000 bp, Homo Sapiens
aatggagataatgtaatatacaaagtaccttctttgagaaaattgctcatgtaattcctggcctctgtctccttggaaaaataatgaatggtcccaaaccataagagaaagccattgtacaacctcaacacacatgtctgggcagccctaaggagaaggactgccaacgccggagaaatacagcgactttccattggatttcagggtcatgcttggcccagctgctgtctcttttttcttctctggtggaggccaagggacccttcagatggactctgggatttgttgctacagctgtctcctagagcaatggaaaatgaaccagatttggaaatgcaagacctggggacaggccccaactcccctcttactagctatgtaactggggcaaatcccttagcctctctaagcctgcctacctatcctcacaggctggaggtggaccagatgagatggcatgagaaagagcctgctgggttctaaaactctctgtctgggctgggcgtggtggctcacagctgtaatcccagcattctgggaggccaagctggatggattgcttgaggccaggagtttgagaccatcctggccaacatggtgaaaccctgtctctactaaaaatacaaaaattagccgggcatggtggcacatgcctgcgatcccagctacttgggaggctgaagcatgagagtcacttgaacccaaaaggaggagattcctcctggacaaaataaaactttctgtccatatatagaagatcgtaagtggcactggctcagcacaaggcttcaggttcctcaatttggaacattgaacagatcaggttctgagtcctctgcaggatcttgaagacagaattgactattctcagttgacccctgggcttccctcgggacaggctttatagcctcacccgcttaatgcatccctgaagcctctcaggcacacagcatctcacagcagtgctattgagggtggactgtctgtgggtatgggaatt

SEQ ID NO: 196338 - DNA, 1000 bp, Homo Sapiens
attctcctgcctcagcttccagagtagctgggactacaggcgcctgccatcacacctggctaatttttgtagttttagtagaggagggtttttgccatgttggccaggctggtctcgaatgcctgacctcgggttatctgcctaactccgcttcccacagtgctgggattacaggtgtgagccaccgtgcccagctggaatatgcattttaaactttaaaataaaaaaaaaaacttaaattgtcagatcaccttccataaagcagtaacacttcacacttcaaggaacgagatatgaaagcaccctttcccctacatccctactagcaataggtgttacagcgctttatgaattttttatagtttgatgggtgtaacataaaatcttgttattttaacttatacttccctaactactagtgaatttgaccacctttttaatatgctcactggtcattcggacttgcttttttccatattgcctattcatatcctttgaccaatttttatttttttgagatagagtcactttgtcacccaggctggagtgcagtggcgcgatctcaggtcaccgtaatctcctcctctcaggttcaagggattctcatgcctctgtggcccgagtagccgtgattacaggtgcgtgccaccaaatatggctaattttttttgtatttttagtagagaggccgaggcaggtggatcacttgaggtcaggagttcaagaccagcctgaccaacatggtgaaaccctgtctctaccaaaaatacaaaaattagccgggcgtggtggtgggcgcctgaaaccccagctactccggaggctgaggcaggagaattgcttgaacccgggaggtggaggatgccatgagccaagatagcaccactgcactccagcctgcgcaacagggcgagactccgtctccaaaaaaaagaagacaggagaagaacttgtgaacttgtgtagaccattgaaataaaggtcttccaagcaagaattc

SEQ ID NO: 196339 - DNA, 1000 bp, Homo Sapiens
gccttaggctgggaatagataccgtgaggagtaggaaaaggacctggccaggtcaaataagaagttttcaagtagtcacaccacttccctcaattctctacaattttcctttgccttcaacagattcttgatccaatgaggcgactctgcctcttagttcactgaaaaacagactatctgatgactactctcccagctttcactcacataaatctccctcccacctacaaaaaatgtatttacacacatccttcttttctaactgagatgcctgtcctctccaagattaacattctacctgtgctctaaatgttacctgacctgttgcgacaccccagagattttactcagtgatttttcttcatctttaaacatctcttcctctaacactttcctttagaatacaattattgaagtctttcccatcaaaaaaggacaaacctctctgaagagcttttgtctctctctagttaatattaataccattttttttaaagtcaagaatatagtctacctgtattgtctgcaattcccagtatacaaatctattgcaaattggaatttctcctggcaccatgccattctaaggtcattaagaacaccctattatacgaaaaacattcataatacaacaatttttattataaaaggtcatatagtctttaaaaaacctagaaaatatagatgaccaaaaagggtgttacctaatatctcacctaacttccattaacattttatttctttctttttctctaagcacaatacagaattttcccacaaaatacaaccataccattttgctcattttattttttaaattattaaatgtatgtttgttacacataagtcagggaaaaaaaagtataatggaaaaccaaaagtgtaactgcactctccaaaaagaaagacatatcataaacaatgatcaatctcagacatttgacactactgatcatgaatcttgaaactaattttggagaccataatactactttctctt

SEQ ID NO: 196340 - DNA, 1000 bp, Homo Sapiens
ggtggaagtaggaaatggggtggagagtaaaggtgagactggatggggggcactctgtccatccccacttctgaaaagctttggcataattcaaatcaattgtttcttcccaggctattttgcagaagaattaacaccaaaggagacagaagaattgagccttttaaaacaagtttttgtttttttttccaggagaaaggtggggagaaaaataagagctggaaaacacatggccctaaacaggtgagaagtaataggccctatcttttgtatctgggccagccataattcttgacaaatagtgtgcatttcacaaatgttcatcagtgagttgaaagaacatgggctctcaaagcagatccacctggtttggggcctggctctatcacttctgtttcataaacggtggcctttttttccatgtgtccactctgtgctgggctcctgcagtacagacacgaaggaggtaattactgcacatttgtctctgagaaagtcactcaaggcctctgatcctcatttttcctatatgaaaatcttctctgcctcccttaaagggccatgaggattacgctggacagtgctctgtccgtgacaaagggctgtggcatctgcgtgcagttaaacagcagaagccctcttgagcaacctgcaatggaccagcttgctagattaatgtagactctccacactactcagctagcactgtgcccatgcctgggatacactaaacccttgaagctagcagctccaactgaagcttctctccagttttcctgggcacatatgtttccattggttgagctgtgtgtgcttactgagggctatttgtatttcttctcaacctgtacctgttactctgattaaataatgcaatccatcatttcataatgcaatgaaatatgagtgcaaaaacgtagagttgtttctttgcaagctaaagtgagtgctttggagagaatcaatgcatgctataacggaacaacctcctggtgaattc

SEQ ID NO: 196341 - DNA, 1000 bp, Homo Sapiens
tactcagaaggctgagatgggaggatcacttgagcccaggaagtctaggcttcattgagccactgcactccagtgtgggtgacagagtgagaccctgccgagagagagagagagagatgaggctttacatgtgttcatgtatttttcagttaaatggttaactaaaaggccatttttatctctcatccctgttgctgaaaaactttctaaaggtagtatttttcttctttatttcaataaggtttctttgccaaagatgtcagccttaaaaaatgttggaacttgtaggatttcagtaatcattctgaaggccacttctaatagcctgtgttattgccactgaacactgaatatacatattaagcttaaaatatgtctcttaagatatgccttaagctgggcgcagtggctcacacctgtaatcccagcattttgggaggccgaggtgggcagatcacttgaggtcaggagttcaagacgagcctgatcaacttggtgaaaccctgtctctactgaaaatacaaaaattagcctggtgtggtggcaggcacctgtagtcccagctacctgggaggcagaggtttcagtgagctgagatcacgccgctgcactccagcctgggcaacgaagagagactccatctcaaaaaaaaaaagatattccttaaaatgtcttgatattgcttcattcagtctgctttgtgttgggcccactgtgatagggagatgagacagtcctcatgctcaaggtcctcgttgtttgtagggagacagcaaaacaggtagtgttttgagaaatagtctgctgtagggacatggttagagaagcttccaatagggcagagaaaattctaaacacgttttctgaggcatattgtttatttttctaaactgatatcagagactgggttcctgagtggaagtgtgccacctgagacaagaaatcttcacttgctggtaaagagcgtggatcagaatctggcagacctggatctgaattc

SEQ ID NO: 196342 - DNA, 1000 bp, Homo Sapiens
tgatcctaccgcctaattctcctgagtagctgggaccaggagtacgtgccaccatggctggctaatttttttattttttaaggagatggggtctcatcatgttgtcctggctggtctcgaattcctgggtttgtgtgagcctcccatctcagcctcccaaagtgctgggattataggcgtgagccacagtgctgggccaaacttcagagttcttatcaacagtaaacaatagtgagacttgcctgtcaggagtcataagactcctgaaaagatcaagatatatgttttaaaaattattttaaaactgtaaaaatgctttataataagaaatgaattattattactactaccgctactactcttatttgccctgcaaatagcgtatcaatcaccatagcactgtgtgatgaacttgggacacgattctgcacaaaatgatagtaaagggacattaagaatgctttgggaggctgaggcaggaggattgcttgagccccagcagtttgagatcagcctgggcaacatagtgagaccctgtctctgcaaagaaaataacttttttttttaaaattagctggtgcagtggcatgggcccatggccccagctgcttgggagactgaggtgggaaggttgcttgagaccaggagtttgagggtgcagtgagctacgatcaagccaccacactccagactgagcaacagagcaagaccctgactctgtaaaaaacatttttttaaagatatattaatatgtcttaaaaaaaagaaacaggtgtttcaagatagaagttatgcttcattttctattataaagtctaaaggaattccagaaaaatcatgagcttttaattcaggcagacaggaatttgaatgtggactttacattttattagctgtgtgatggtgggcaggttacttaagctctctgagtttagggaatcctacctcataggcttgttgcagacattccattgtgtaaagtgtgtagctcaatgaattc

SEQ ID NO: 196343 - DNA, 1000 bp, Homo Sapiens
ttaaaataagtttttggggctaaaaataacatatgcatgaatttttcaatcaaaccaaaaacttagaggaaagatatcattacactgacagttttcccataacccgcaagatatacatttacacaaagaagtgggtattgtgaaagaaaacatatgtgagtaaagcatctattctcatcacataagcaggggtcccatctattctcctcacataagcaggaggggagcacctgtgcccaactctgaggtacagcatcagttgtttggccatgggctgtgacatttgatattaagggacagtatcctgcatgatcttgagaagaaactaaaatcaaaggcagacagacaattcaactgcataaaacgaaaactagagaaaatatttgcaacaattatgaaagataaaggttaatggccttaatatagtaaaaggatacacaaagtattacaaagacacaaactcaaataaataagttctttttgaacagacatgcacaaaagaagaactataactatctaataaacataggaaaaataatttaacctcaatcattaaagaaaggtaaatcaaatgaataacaagatgtaacttttcaaccaccatattaacagatttttaaatgataatgcaactgctatcactcccatacgcattcctgtacatgccatgcaaattggtataactaaagcaatatgattaggtgtatccagagacttaaaaatgttcatctcctttgagtaaataattccatttctagaaattaattccaaggaaataactagaaatggattaaaaggtttaggcaaaaagattaagctgcaatcatatttatgtaactgggtgcccaggctaaaatttcatccttaagattattatttaaatttttaataaattagggctgggtgtggtgactcacgcctgtaatcccagtgttaccagaaaggggtcctgatccagaccccaggagagggttcttggatcttgggcaagaaagaattc

SEQ ID NO: 196344 - DNA, 1000 bp, Homo Sapiens
ggtagagcagtaaactgccaaggggaggcttggcagacccagctgctaatgcatgcggcctgcacactgagtgctatgggtttgtattttattaaacatgacttgccagaaaattcttaggatttccaactactcctcagcaattgtttgctagttcaatgttcacacagaaccttcagatattaagatttcagaacttcagatggacttcctaagacacacagaaacacaagggataacataggaacaaattactatcccccaaaagctcttatccaactgaatgactgattttctaattttctcattttaattaccacataacttattattctctcatacataatcccgtgctcatgttgcatttgttaatctgtggtgagtcaagcccacttattagaactgattacagtgtgtgcggtgtcgtttatctgcttgtaatcacttttagagttctgcatgcatcctgtgctctaggaaaagactttgacctctcctcttaatgtggttctcaaagatatgaagttataaattataaagatataaaaagatcaaaaccaaatgggggaagaagcatgttgtaaaaattttaaaggagctagtccatgccctaatattaactagaaaaaaactcaagttccattttgctgcaagatcaaagcctttgaataagttaaaaggcagattgaaatcatagctgaaaaataacagctacttgaagtaaaaattatcccgaggcttaacaatctttcaaaggaaaatgttctcctttttcatgctcagaattatgaggacagaaaagcgatttgtaattgcctaacctttcttgaaaaattccttttggggagaaggagaaaaatgcctccctctgtagccacacaggcaagctctgtagtatagaatttgcttttctgtagctgctcctttccccaattcttgatcatagcattaaattggcaggacatgttggagggcacacaccgagcattaccttgaattc

SEQ ID NO: 196345 - DNA, 1000 bp, Homo Sapiens
gtcatgctgctttaaagaaagtggtcgaaggagcatttgaatagacttgaatcatgggcagagcctgcaatgcgaagatctggggaagacaattccaggcaaagaggccagcatgagtcaaggttgtgtgtgaggagtgaaggtggtgctttgaaagattagcaagaagtcacagtggctggagcataatgaattaggggtgagtagtgggatttgaggtctgagaggcaagaggtagggacatctcacaaagggacttgtaatatggttagacatttggactttttttctaagcgaaataaaaagccattgattggaagggtcttaagttgaggagttacatttgatcatgattcacatttttaaaagatcactgtggtggctgtgtgaaaaatagaatgtagaggggcaagagtaggaacaaagagaccaggtagctgactattacagtaatccccttgagaggtgatggcagctgggattagggtggtggcagtggagctggcgagaaggggctgtgtagggatattgcaggatttgtaggtgagttgggcatggtgtgataaaaaaaagagataaattgaggttgatgactaagttttgccagagcaactggttgcatggggtggccatttgtagacatgagggaagacagggaaagggtcaggatgggggtgagggaggagagaaaataaattcatgttttggacacgttaagttttgaggtgcctacctggtctccaaatgaatctgtcaagcagctacttggatatttgaatctggagcaggggagaggtcaggactggagattagctaaattttgccagaggtgtagctagaatcacccagagagagaatgtgtatagagcagaggaggcctggagctaatctctggggtaccccgatatctagaggtggagatgaggaggagagccaccaaagagaaccgaggagcagcagccagtcaggtaagaggtcaaattccagagacagtgaattc

SEQ ID NO: 196346 - DNA, 1000 bp, Homo Sapiens
ctgctttcagtctcatgttgccctaggactccctgtaaaggagcccatgctaacatccttgaatataggaagccctgtggaaagagagtgaggcctagcccactctcagccatgtcagtcatcccagctgggcctaagcaggtgagtgaggctgtcttggttcctccacctccagttgaggtaccagctggctgcaagtgcaagagtgagtcagctgaaaccatctgttgcagaaacaagttgctcagttgagcacagcccagattgctaattttaggctactaagttttggaatagttgttttttttttttttcatgtagcagaggctaactgaaatagaaatttgaaataggagtagaggtgctactgtagcaaaaatttaaaacatatggcagctgggcacagtggctcaagcctgcaatctcagcactttgggaggctgaggcaggaggatcgcttaaggctaggagttcgagaccagcctgggaaacatagcaagacctcaactctaaaaaacaaacaaacaaacaaaaaacaattagctaagtttggtggctcacccctgtagtcccagatacttggaaggctgaggcaagaggattggttgagcccaagagtttgagggtgcagtgggctgtgatcctgccactgcagtccagcctgggtgatagagcaagactctgtctctaaaaataagtaaataaataaaataaaaataaaatacacagatagactttgggacttcatggcagctggaggatggaaggatgacaaagaaactgttattggacaatgggagaacagtgaggaagctgttattggaggctggagaaaaggcaacctgtgttatataacacaattagtgttgtttggaggatagaaaatgcagctaataaacctgtggatctagctaaggagatttccacagagaatattgaaagtgcctactggcttcttttagcagcataagataaggtatcataagggagggaagaattc

SEQ ID NO: 196347 - DNA, 1000 bp, Homo Sapiens
ctggagcggcagtgccctcttttacactcacaaccaacccagcctttcaagtctgtcttttaaagggatcaccttgacaatgcagataaacttttggaagaaacggctgcatacttatttgtagatctcctcagaaaaggagctggaggggctaacatatttatatggccagtgagcgaggcattagatccagtgttagggcacaaaattatgtctgtccaagtgaacagtgtgtcaaggaggggcgggccgaagtgagatgtaaaatattgtgcattgaaaatatcgttacattcccaaaggctgtatacattttgtgggttacttctttatgcagcacattcttattaaaatttaccaagccatcaggggcattaaataagttcttacgtagttgtgcttttctttttctgaaaattttaatgcatcctgaagtgacagttgttcagtgaaacagggtccctcagtgcccgttatgagtgattcaacgctaattagaaattgatgaaggttcattttgtatgtacagttcccaacttttaaaaaccctaatacgtatttttaggcctaatgttcatgggatttgatggggaaagtgccgcgtagctgctacacagcaggaaggcaataaggcacggaatgaatactcgcagacagggctcgcttcggcctcccggaattgtgcaatcagacaccacgtgaatatccagcgcggctcctgatctctgagccctggtggcccggggcaccatcaagtctacatggtcttgtcagtaccactgcgctcaacacagacagcacggctctcgcagccactgctgggtcattacaacgtacgacttccaagagccagagagtactccggtgaccttggaactttccccaagtacctaaagcacaaccagagcatgggtgtgtgggaggacactcgctttccatgctgcaccttctgtggccaccgttcgcctaagggcagcaggataaagatggtaaggaattc

SEQ ID NO: 196348 - DNA, 1000 bp, Homo Sapiens
gtgtacctacctaaaaacttggtgtgacacttgagtacgtttttttgtcatggatttagggcaataaagaatattattttcactaagcttcaggaaccattggcttttctacccaaacataaataaaaagacacataggcatagtaatcaactgaaagaaggcatgagagaactgtgaaaagaagaagttggatttttgtaaaaaaaaaaaaaaaagctgaatctcttttagacatgtgtaaaatgtctaaaacataaaatttatgatttatattataaaatcatataaaaatatgatttcagaagatattcatttaacacaatttagcagctactcctaataaaattattgttattttttacatctaggaagagagtacattatcttaacactgacaaagttttcccagcctgacagacaacctcatccttgtatgattttctgatcagggaccctacagttgattgacagccgtagtgaggttttctttgcattcagcaccagagatttgcattagtagggaaatgccattttctaggaaaataccttgctaagcctgtgacatcaggtaaagacttaagaagcaaggcctgtagggagataagaaagcaaaccactaaccactctatattagaaatacccacggaatttagaggagaatagacaaaagggcagagcctaaatagaaaagaacaaaaaaagagaaaaaaattcaaaatttagtgcatgggccagagcctgagaacaacaaaagtcactaggaaatccctggcatgtggttgggcaaattctgaggttttaagaagtatttttaatattataaggctttgttttgctgtttttgctttctagttcctaccatccactctcacctctttaaaagtccagtgaggcctgataggcctatatatttctgtaaggtggtattttgatcagtaaattgttaggactgtaaaagactgcacaccgacacacagggaaagaaaggcccaggaattc

SEQ ID NO: 196349 - DNA, 1000 bp, Homo Sapiens
tgtgatgctgggcaagttactttccccatctgggcctcagctatgtcatttgtaaatggggctatgacactctgtggccacagggacgtgtcagtattagatgagaaaagccatgccaggcacctgtatccaggaggtatttggtgtctgcagctcagaaacacagttcaaggagtccagctccagactctgtctcaagtgactgagtcctcggacatactcttcttcccaggggactctccggagttgcttcccaaagctgcattttggacctgtctccaaaggcgttgaggaaattaaccagaatgagaagccccaccaccagtgttttattctaagcacctccagccagagctgagtggattaggaaaggcagaaaaaaatccctgtgatggggtgagggctgctggtgaagatgcctgccacaaccccacccccaggtaagaggggcaaggtgagatcaggggctggcaccaccctgacgccccaaatagctccagcctaaagcaccatcagcctgcgatgttctagggtgagctgctccatgcctgcatcctttaaaggttcttttctcctttctcatttctttgccaaatctcaagtcctcgttgcatccctcacttgtcttgcccttgcaaagagcccacaggacctctcaggaccagttctctgtcttcctagctgatccgaaagccaaattcatggcctatggagttcatgggctgatatgtcaccttcctctcccagatcacctatgcatttccacatactttaacacagagcagtgacttgaaggtagggttttctggccagctactgataatatatatacaagggccaagtgtgatctgcatcacactgggtttgctctgaccccctcactgctcacaccaggaatggaccttggagagtgtcatttctggggcacacacaataggcagcttaatcccaccgccctatgccaatcccagttcatggcaatgcttttgagaattccgcg

SEQ ID NO: 196350 - DNA, 1000 bp, Homo Sapiens
gccccggcctcccaaagtgctgggatggattataagcatgagtcaccacgcctggcctaaaaaaaatctgttcttagttttctacgcagccaacagaggaatccagcaaagggccctctcagcccatcctcttctctctctttctgtctctgtctccatctgtttttctctgtttctgtctctgcaattaattctgtctctctctctgcggcatccgtgggcccggtgcctcctgtcctggcccaaatctgcctctccttctgaattgctgtttctcagagtctttccaggaaggaccccttgtcctagaatcatctgcaattaatctgtctgtgcaattaattgtagtattcagcaataacaacatcccaaaactctcagcgatgagggctccaccagggggcactctgaatgatgcaatgcagcccccttccctccgctctggggacaggtgtggatagatggaccgaccactgactctgcccgcctgaggatggtcctgaggactgtggtcaggatccaggcttcgaagacagggtagagaatgcagcccagctgtgggaagcacatacataggacttagacctggattcaggtctgccacactggttcagtggatgtgagttcaggcaagcaacttgacctcccagaccctctgtttcttcttctgtgaaacaggaataaagctgcccatattgcaggggtatgaggattagatataaagggctggggttggtcttctaatgggagccttttgaaaagtggagggcagggttggcgggaaggatgtgcaggcagctgacctcaactagtgacgaggacttgttgctacaagtgccgggagccagaggatgctaggaggggggaaggtatggcaagatgccctgtgctgggcattttccccatcaatgggtggcagcactggtcatctgaggttagaaacaccttcaggccacgtcttgtcctccgtgacctcccgatcagaaaaagctcagaattc

SEQ ID NO: 196351 - DNA, 1000 bp, Homo Sapiens
gatcacggggatggtttcccccatgctgttctcgggatagtgagtgagttcttacaagatctgatggttttataaggcagttttcccttgctggctctcccctgcctgccaccatgtaagatgtgtttgcttcccgttctgccatgattgtaagtttcctgaggcctccctagcattggggaactgtgagtcaattaaacctcctttgtttataaattactcagtctcgggtactatctttacagcagtgtgagaatggactaacacacctggctaatatatatatatatatatatatatatatatacatatatatattacatataaaaccctgtccccactatatatagtatatatagtgtgtatatatatatagtatatacatagtgtatatatatacaatatatataaaaccctatccccactacatatataggttttttttttttatgttgcccaggctggttttgaactcctgggttcaagccatctgcctgtctcggcctcccaaagtgctgggattacaggattacaggtgtgagccactgcacccgacgaccttcacatttttgaagagtaatggtcaattatcttgtaaaatgtccctcagtttgtccgctattttctcatgattaggttgaggtaatctgtctttgtcgagaatactgccatgttcttagtgcatcatatgaggggatgcatgatgttgatacgtcttatttattagtagtgatgctaactttcatctcttggttaagaaggggggaactgtcaagttcctcctggttaaattgctatttttccttcacaattaataagtattgcaggaaaatgctttgagattatgcaaatatcctatatcttaccatactttacctattgactttagaatttctagatggttcttgcctgcagcaattattaatgcggtattcgtttgcatagttgtgattacctattttcatcttttcatctctcctacattttaaaataggaattc

SEQ ID NO: 196352 - DNA, 1000 bp, Homo Sapiens
aaacctatatgaattgggtttctggcacttgctaccatcatgagtcctgaactatgggagaaggctaggatgggatgtacacagtagtcatctcatcaatgaccttgatgaggctgggcctttaagaggagaccaaccctggatgtgtactgccgctccagcctattcctcctcccccaacctctgcccatgaaacaaaaaaaggtggggtcacctgaggagcacaccaggtgtctgcatcccttcttggccatctgggaagagaaggaatggggttagcggctaacccaagcaggtgtcatgaaggcctatgtggaatggcgttagagtctccccatcccactcccaatacgcctttacccctcatcctgcccacagccctgcccttacctttcccctcccatctgcacgagttcatgtttcccctcctgcccgaacccgtccccagcccacacccctcactcttccctccctcctgcacaacctcacttctcccctccttcccacacaccctcacctcctggcagaaatgcccaatgccccgaatcttgaaggagccgctgggctgcacattctcacacttgaggaagacaggcatgcccgccacctgggacagcgcccagctctccaacagaggtgtgaccacgtgaaagggctcctgcttggcatgctctgccacagggccgtccattctggagaccaggtagacagcctgcaggaggacacaaagtcaccacccaggcagtccccatcaagagttcccttaaccaggacagggaggggaaggtggagaaagcccttggcttaggtgcccttcacttcatccagctgctgagctgtgagacccccatcaagtatctgtgactctctgggcctcagtttccccatctggtcaaagaagtttggcctggggtcctttcattccataagtgtggctgtgctggggatgtagaaagtggccaatatatggtgagaaatgaatgagagagtgggagaattc

SEQ ID NO: 196353 - DNA, 1000 bp, Homo Sapiens
tgctatatataaccacttgttaaatgtattttcattttgtatataattatttttaactgtcaagacctcctatacaggtactgttattgctcatttgctaaagtttttattcagtatgaaatatggtaatgataagaagtactaacacttttaatcctcacataactataaaaggagttatcagaaaatgttttttttataatgtgggtagaaatctgttcatttagagtttgagggccctaaaataagatcattctaccatattttactactacatattccaaagcatcaccctaaaatattgactctgatggtgaagtataaacactttgtgcactcctaattaccttccttgactccagagcagcagctcttaaaggaggaaggtgggtgggtttcatcacccttcccaccccacccttaggtctttgctcaccatgctttggtcattggctgaagcagcctcatgccctgtatgtatcccagctgtgaggggacagaactcagttgtttacagcctgtattcattgattatgggccatctgaacagtgtcatttttatgtacaggcacacaggaagttctcaggcaatgcaattttcatgccagcccattagaggaccaccttcccaagaagtatcccaaaactagggccatttcctcccatatttcactgacagtctcactcccaggtgaacctccctaacaaagtgattccccagttttgttttcttaagccacatcttccctgagtccccagccaaaacaacagaagttggcagtgcctgtagtttaggctctggatgagggaagttactgagcactgtaggctctagagtcaggtagacccgaactccacttcccagcactgtagctctgagctgcatgatcttgagccaggccttaccactccagagccctattttattatttgtaaaattattaattccctaccacatatcataagaatagtacataccaaccacagtgttagggaattc

SEQ ID NO: 196354 - DNA, 1000 bp, Homo Sapiens
gaggggacctccagtaaactccaacagacctgaacctgaggctcctgactgttaaaagcaaaactaacaaacagaaaggatatccacaccaaaaccccatctgtacatcaccatcatcaaagaccaaaggtagataaaaccacaaagatggtgagaaaccagagcagaaaagctgaaaattctaaaaatcagagcgcctcttctcctcaaaaggaatgcagctcctcgccagcaacagaacaaagctggatggagaatgactttgatgagttgagagaagaagccttctctcaagtttgttataggtaataacaaacttctctgagctaaaggaagatgtttgaacccattgcaaagaagctaaaaaccttgaaaaaagattagacgaatggctaactagaataaacagcatagagaagaccctaaatgacctgagggagctgaaaaccatggcacgagaactacatgatgtatgcacaagtttcagtagctgattcaatcaactggaagaaagggtatcagtgattgaagatcaaatgaatgaaatgaagtaaaagggaagtttagagaaagaagagcaaaaagaaatgaacaaagtctccaagaaatacgggactatgtgaaaagaccaaatctatgtcagattgttgtacctgaaagtgatggggagaatggaatcaagttggaaaacactctgcaggatattatccaggagaacttccccaatctagcaaggcaggccaatattcaaaggaaacacagagaacaccacaaacatactcctcaagaagagcaactccaagacacataattgtcacattcaccaaagttgaaatgaagaaaaaaatgttaagggcagccaaagagaaatgtcgggttacccacaaagggaagcccatcagactaacagtggatctctcagtagaaactctacaagccagaagagagtgggggtcaatattcaacattcttaaagaaaagaattttcaacccagaattc

SEQ ID NO: 196355 - DNA, 1000 bp, Homo Sapiens
tctaatttgtagagatgagatctcactataatggccaggctagtctcaaacttctaggctcaagtgatcctccagcctcggcctcccaaagtgctgggattacaggtgtgagccatggcacccagccctggatggttgcttcttacagtggtgaacagcttaaaacaggatttgtcaactctgaaactattggcattttgaactggatatttcttgttataggcagttgtcctatgcattatacgcagaatgctgagcagcattcctggcctctgtctattagatgcaagtaatacacatgcacgcccctttccagttgtaaccatgaaaaatgtctccagatattgccaaatgtctcctgacggcgacaaaatcactgccagtaaaaactactggtttcaagaaagagaacaacaaattcaaattcctaaacctcctataaaagcacagactgaaaaccagagactttccaagaacacattcaaggagtctctttgtttgcagctgaagggctgagagggccctttaaaagactttaaaagcttaattccgtgagttgccgaattagggtgttaacttaattcataagctcaccaggtctcttatgtgaaaataggacctagagaattttttttttgagacagagtttcgctcctgtcgcccaagctggagtgcaatggtgcgatctcggctcactgcaacctcagcctcccaggttcaagcaattctcctgcctcagcctcccaagtagctgagattacaagtgcacgccaccatgcccaactaattttttgtatttttagtagaaatggggtttcaccatgttagccaggctggtctcgaactactgacctcagatattccgcccaccttggcctcccaaagtgcagggattacagacgtgagccaccgcgcctggccaacttagagaattaaatggtgacatgagagggtgtagatgaatcagactacccataaatctccatcttcaatggaattc

SEQ ID NO: 196356 - DNA, 1000 bp, Homo Sapiens
cagattcccccagggaagggtgagggacaaatcaattctctgttcacacaggggcaggctcaaaataatatccagtgaatgtaagccttccatctccttagatgcagagatcctgaccccttcctctctcctacttgcactctcctacttgaattccacttccaatctgaggccctagacaggcctacatgggagacattaggacaaaggagagaatggtaaactaacaaaaacattttgcccccattgagataaattgatagtcttcattgttttttgttttgttttgttttgtttttttgagacagggtatccctctgtcgcccaggctggagtgcagtggcctgatctcagcttgctgcagcttcgacctcttgggctcaagtgatcctcccacctcagcctcccaagtagctgggactacaggcgcatgccaccatgcctggctaatttttgtatctttttgttgtagagatggggtttcaccatgttgcctaggctggtcttgaactcctgagctcaagcaatctgcccgccttggcctcctaaagtgctgggagcctccgtgcccagcccttcattgttaaactttccagaatagatgccaaattgcttcactcatagacttcttcatgtctttcagattgctgtttttttcatagctctgggaaggagggtattatatttactaggaggtctgaaagtaattttttttttttttttttgcaaaatttgaaagctgtccacccacacctccatttcccaaatgtcaaaaaatatctccagtttgaaaacaaaaagcttgagttttttgagtcttgactgtcttttttaaaaatttaatttaagagatggggtctcgctgtgttgttcaggctgctcttgaactcctgggtttaagggatcttcccaccttggccttccaaagtattaatactggaattacagacatgagccaccatgcctgcctagtcttcattcttcacaggagggagaattc

SEQ ID NO: 196357 - DNA, 1000 bp, Homo Sapiens
ctggatatccctgggacagccccataggacagtggccagagcagtgcccgggcctggctctgtccctcctgaggactggttcccaggaagcactccagggagaagctgaggacagatgtgagcaaaagaggcagaggaaaagtctattttctgagcttttatggtgcgctgggccctgtgccaagcagctcacagacagtatctcatttaatcaccataacaaccctgtgaggaaggaatcccggcttccattttcaaacaaggaaattgagactcagagtgaaacaattttcctgagttaacacagccttaatttggtcgcaggactatgtagtctatgttgcctgagattcagggaggagagaaagatggagagaataagaaattacagggaagttgaggggacagagtcctcacagggcaagggaggcctgaaaaaggaagagaatctggaggagagaggtgaagaatgaggcctctgggagagtccaggttagcagcggtgaggctgaggatacagacatgaaagatgtgaggaggtgaaggtaagaagacttggtcactgactctccaggaagatgagggagtggaaggactctagacttcggcctgcctaccagggttctggccaggttactaaagtggttccatttggacactgcagaggaaaagccattttggggggtgactgttgggatccccatgtgaagatattcaagcacagctgggtttgcaagcctgcagcttagcatagagaccagggttggagatgtggatttggacaaatcatggggtaactgaaagctgtggccttagagactccatcagatagaatgtgtagagtgagcagagagtcttggacagaaccctgagaactagttacattaagcagtaggttgaagagacctttattcttcctggaggcagtatcacagaagttaagggagaaaacatttcaaaaaagaaagggatcgataatgtccaatgctgctgagaattc

SEQ ID NO: 196358 - DNA, 1000 bp, Homo Sapiens
gcaccaagctaaaagtaatggcaaaagccgcaattacttttgcaccaatgtaactgcaattacttttgcaccaaaagtgaaactacatttcacttttatttgattttatttcaatagtttttggagaacaggtgggtgtgttttggttatatggataagctcttaagtggtgattactgagattttggtgcacctgtcacctgaacagtacacactgcacccaatatgtaatcttttattcctcacccccttcccaacttttctccggagtccccaaattccattatatcattctgcctttgcatcctcatagcttacctccaaatcctcatactgtctcacttataagtgggaagacatgatattttgttgtccatttctgagctatttcacttagactaatggtctccaaacccatccaggttgttgtgaatgccattatttgttcagttttatgctgagtagtagtccattgtgtgtgtgtgtgtatatatatatatatatatatatattttttttttttctttatccactcattggtcgatgggcatttaggctggttccaaatttttgcaattgcaaattggactgctagaaattacatttcattttgaacgtaagtgcttgtttgtcatcgtctctctaagccaacaatcttcttgatgacaaagaccaagacgatcttggcctggagcctcagaagcagatacattaaagtacttactccatgaatagtttttaattactttttcttcatactccagggaaagatttgggatcaaagcaaactaaaacaaaacaaagacatttattttcagcttaaattatttagatcattgctcaaactgtccgttgggtaccaggtgttatttatgctctttttagcagtagttcagagacttacttgataacctgaatatcaaacattgccagtttatacatgtttattcaactttgggtaatgattttaattttgaataataaaaagttatttgaattc

SEQ ID NO: 196359 - DNA, 1000 bp, Homo Sapiens
agattgcagacgcacagcactacactcggctaatttttgtattttttgtagagaggggagtttcaccatgttggctaggctggtctcgaacccctgacctcaagtgatccgcctgcctcggcctcccaaagtgttgagattacaggtgtgagccaccatgcccggcctcacttctgagcccttactctgtgccaggcactctgctagcaccagataacatgaggataacatggttatcctcaagtggagaactcagccatttggatcaataactgtagagtaacaaggacagtgattccttgaggaatcactgatactcagtgagagacagggagtctccctatctctcagctccgtgtctcacatagttgacttcaccccatgcaagctctcctttcattgttctcaaagacaatcccagaaactccaggctaatatcctaccaatttagcaacctcagccaaaaaagtgctctaattacttagagtcccgttaagagttccaggaatgaattgcgttggcctggcttagatcacgtggtcatccatgaaccaatcacttcggccaggagtcagaatactctgattggccagatggtcatgtgcccatgggccttggaaatgggggtcagcctcttgccaattttatacacatagcagaggaagagcatttttcaaaggagaaattagggtaagtcacacaaaaggcgaacgctgagcaggaaaaattgtaggtacccactatgtatgtcgggctgggtcacggaggcatagcaccacagtttaatgcacagatccgggccctgtatccctgggtttgaacctgccctcaccacatttccagaccttaggcaaatgagattctcaccaaacaacaatttcctcatctgtaaagtgtgtaggaaactagggtcagctcagagattcacaaacatcagaaagagtgccaacagaataaagcatctatcacatagaaggtagtaaggacagtaaatattatt

SEQ ID NO: 196360 - DNA, 1000 bp, Homo Sapiens
ggagcccaaattacttaaattgatgccatatcatctgaagaggcgacactgggatctcacaaactgaacgacaattgccatctagccaattcatggccctggactcctgtttcccacctgctccaacaccaatttaagcaattccgaactttgatctccacagcagaatgtctcagatttattgaagcgtcaggtcccaattgtgctaacatccaccctggcagggccattacaaggtgtgaaatctgggtgcccatcactccggccacgttcagcacagtgacaatcagaaggaacaaatcaatctgcctctctatagtcatcatgagagccttgcaatttactgtaatgatggccatggaggaaatgcaggcaaagggatcattctgttctctgggaacttgggcatgtgctgaaggagctgctgagcccaccaagagaggccttgtaacactcagccaagaggcagctgctactccttacatggggctatttcaggacttgcctgtatcctgagagctgctttaaaatggaattgtgttaccctcctcctgtgttttgcaaacagcatcaaaactgttggttcctgctgcccctgcttctcccagctgtcattattaattacctgtcatctgcaggtctgcctcaccagggctgagagccagggagagctcagcctcatggtaaataggaaaacccctcccaacagagaggaaagtttattttcaagtctcaagtgtgggagaatggagtgagggaggcaagaaccagggtccctttgtgagcctccccaccgacctctactttgcagggccaggagttctaattccacatagagactacagcagcctctgccccttacttactcagctagggtcgtaacctgcctgctacattctgccaggttctgtccccaggactctgaatctgagacctcaccctggactctgaggagtctccttgattcaggactcaggcactcaagagatgccaagaattc

SEQ ID NO: 196361 - DNA, 1000 bp, Homo Sapiens
ttttttttttttttttttttttgagatggagtcttgctctgtcacccaggctggagcgcagtggcacgatcttggctcactgcaacctccgcctcccgggttcaagtgattctcctggctcagcctcctgagtagctgggattacaggtgcctgccacacacctggctaatttttgtatttttagtagagttggggtttcaccatgtttgccatgctggtctcgaactcctgacctcaggtgatctgcctgcctcggcctcccaaagtgctgggattataggcgtgagccactgcgtccggcctacaggcagaattttttgaaggatctcatgcaaactttacaaatctatttcttctgcagctcctttgcagtaaccacatctgcaaaacacaccctaaatactagaagctggctgggcacagtggcttatgcctgtaatcccagcactttgggaagccgaggcgggtggggtggatcgcttgagccaaggagttcaagaccagcctgggcaacatggcaagacccctgtctctacaaaagtacaaaaaattaaccaagtcttagcaactcaggaggccgaagtgagaggatctcttgagcctgagaagttgaggctgcagtgagctgagattgtgccactgcactccagcctgagtgacagagtaagactctgtctcaaaaaaaaacaaaaaaatcctagaagctttaatgaccggagtataggaagtttggtgatttcctcagcagtgtgatgttaagtcagagaccacggtttaacaagtgcaggtttatgacgcagatttgattcagcaggccagctgtctcgagcaccgcatttttaacacgttcctgggggatcacatgctgctgctctgcggaccacaccttagcaaggaactcgagagttccactttcatgacctactagcatcttacaggcaataaaacccaatccagacttaccatcttcctccccaaaccagtcttcctcttgaattc

SEQ ID NO: 196362 - DNA, 1000 bp, Homo Sapiens
ctttaaattctcagctccatatctctaagcatgtcttttgtggcccatatggcacacaggcctcaacagaacttggttctggtctatgtgttctctctggtaatacaaagaggtttctcttggccgggcgtggtggctcacacctgtaatcccagcactttgggaggccgagatgggcggatcatgaggtcaggagatcgtgaccatcctggctaacacggtgaaaccctgtctctactaaaaatacaagaaaattagttgggcatggtggcgggcgcctgtggtcccagctactctggaggctgaggcaggagaatggtgtgaactcgggaggcggagcttgcagtgaaccgtgatcgcgccactgcactccagcctgggtgacagagcgagactccgtctcaagaggtttctctttaccttagctctatgaggtgttctaaaagccaggtcgattctatggctgttctgtctaatcatgctcagtctgttctcaagatctttcagacaaagcatgatccagagctaggcaggatgaagccactttgataggaatactttccagccactcacagccatattcttgggtagggaagtgaactggaagtagtgttctttgttttgattttttgcttcctgagctactatatactaagctaagcactatatgtatatatcacattttattccttgtagcaacttccgtgaagtgaatactgtatttttatcttcatttaactgaaatatctgaagctcaaaggttaactgaattatctaagaacaagccagtatcaagaccaaaccttgtgttctgctgtactttatgactttcctttggattttgtgggggtttttttgttttgtttttatattgcagaatggactttgaatagagatttcaccttttgttattgcggaagaggagagggattgcagaggatagggttcttaatggtttttgttttacttatagaatgtgctgacatagaattttgaattc

SEQ ID NO: 196363 - DNA, 1000 bp, Homo Sapiens
tttttttctggctggtggggagatgggggtctcactatgttctctgggctggatcgcagcagcatgatctcagttcactgcagcctctatctcctgggctcaagtgatcctctcaccccagcctcttgaggagctgggactacaggcatgtaccaccacatccagctaatttttgaattttttttgtagagacagggtctctttatgttgccctggcatgtctcagactcttgggctcaagtgatcctcccacttcagcctcccaaagtgctaggattacaggtgtgagccaccatgcccagctccatttcttaatagacatctatactctatagtcaggtctaacatatgaaataattaacttgtgtgttgaagtacaaaatactataatttgtcatttaagggaatgtaagatttagatgatccttaatgctccttgcaacttaaagattctgcgcctcactgacgttaagcttgtatgagacctgtagtctgttggaatacataagcagctgcctgtgttacacagttgtgaggtggtaatatacttgtgatgattttaaagagctctttctattgtcactgacaacagagtctaagaaaaacctgaattattgcataatcaaataagacctaatttccctttctttttcttaccttggagctggtataattctcttgcacagagcaaaggccaacatcaaaacaagagaaagatataaggataaacagaataatgaagtagtgactagttttcacattcacatgtgaatgtatttttcagtgtaaactaaaacatagtgtaaactaatacctatttcatattttattaatatctggcacttgtgtaacatttatgatttgcagaatgctctcactgatgttctcatttaatcctcataacagtttctgaaagaagtactgttctcacatcgcagatgagaaaactgcctgcaagcagtttaatcaggagcacacagctagtgtcccactggaattc

SEQ ID NO: 196364 - DNA, 1000 bp, Homo Sapiens
gtaataaccccaataaaaaaccaagcagaagacaatagaatgcagagaagaagacatacaaagagctggtagacatatagaaatacagagaaaactacttaattcattaatcatatattacaatactgtttcagtaggctaaaaaaagtaatagccagtgtttgtaagttacacactgctggtaagcatatgtaattaataaaacctctttaaatcctgcactggtacacaggtaaggggggaaaaacctctctaaagagcaatatatgtcaagatttataaaaaagtttttccctctgacacagtaattctgtgctagaaatgcatcccaggaaatagattgatttatgcataagattccttattataatgttatttataacaaaaattagaaaatagcttaaaatatccagcattcagaggataattacattatggtatgctcatatgatttatactattttctaacattattttaatggcatgggaagttgctaagtgaaaaaaaaagatacagcattttatatgtagttgatctaaattttgtaaataaataaatgaacaaatgctaaaggaatttatttcgtcaataaatagtaaactcataactgctttaaaaaattataggggttctctgggtattcaagaaatattaacaggccaagcacagtggctcatgcctgtaatcccagaactttgggaggccaacatgggcagatcacctgaggtcaggagttggagaccaccctggccaacatgatgaaactccatctctactaaaaatacaaaaattagccaggtgtggtggcaggcacctgtaatctcagctactcagaaggctgaggcagaattgcttgaacccgggaggtggaggttgcagtgagctgagatcgtgccatttcactccagcctgggtgacaagaatgaaattctgtctcaaaaaaaaaaaaaaaagaaatattaacagagattctctgggtattcaagtcttatagaattc

SEQ ID NO: 196365 - DNA, 1000 bp, Homo Sapiens
caggcctggtagggacaaaggacacctctagggccatgtctcctgtgccagttgtgtttcagagagggttcttgggcctttttaggaaagccttttcttggtctcttattgtcagcatagcacagatagattcttcttgctggttctactgggcttgctcaacccagaaatgctatatcccaacatcttcattatttctttcattgtacttgttatttgaagtaatatttaggtattgattttcctttttactgtctgttttccacactagaatatagctctttgagggcagagattattattatcatttaaaaaaatttactgctgcatgtcagcacttagacaaagtaggttcttggtacaaatttgttgaaggaaagaagaaattccaagagatagaaaagatggtgacagctgttaaggaggacatgagagcagattgaattcttaagatatgttgcctatctgggcaacaggactaaaattcattaactattttgcttcctaaacacctagtgagttcctcttctgagccagacattgtctgtcacgtgtgaattcgaagtgagcaggatgcagttttggccccaggggcctgtggtctagttgagaagacagaactattgaactgtgtgttctccaacactggcaaaggccaaggggttgttatatgaaatatcaaaaagacctgatttgggacagtctgttccacctccttagctttggattaattagatagttcctaaccaaatttaagtaaagattcctcttccctgactattcccaaaagaagttctaatgaccttaaggttttttacttgagtgagagaaatgatgaccagtacatccggtgttttcaggacaaggggagggtggatttcttcctccttgccatattttcacaaatacttgctgggtattgatcatgtgcactaggctagagatacaaaataagagaagacaaggtccttgctcagtctattgtggagggacttgtgga

SEQ ID NO: 196366 - DNA, 1000 bp, Homo Sapiens
agaaaaaaggaaatcagtatgttgaagatctatctgcactcccatgtttattgcaatactattcacaataaccaagaaggggaatctacctatgtgtccatcagcagatgaaagcataaagaaaatgtggtatatacacacaatagaatactcttttgcagtaacaaagaatgaaattctgttattcatggcaacatggatgagttagcttggggacattatgttaagtaaaataagccaggcataaaaagataaataccgcatgttctcacccatatgtggaagctaaaaaagttgatctcatagaagtagagtagaatagtggttactagaggcagggaagtgtggaggggaaggggagtaggtatagccaaaggttagttaacggatacaggatacaaaggtacagctagctaggatgaataagttctagtattctatagcaggactgggtgagtataatttacaaacatttattgtatattttcaaatagccgaaagagtggacttttaatgttttcaacacaaagaaatgataaatgtttaaggtgttagatatgctaattactgttctttgatcatatcacatcatatatgtgtgtggaaatacactgtatcttataaatatgtgcagttactatctgtaaactgagagtaataataaaaacccccaacacacaggtttcttttgtgcttttgtcagaaattaaaaaaggaaaagtgctataggaaaattaatctagcaaacttgcttagagtggattggaagatatgaaccagtgttgaggagggagacttgttagggttggcatttaattccaaaacgaattgtatgcactgtagacaagagatgctgataggaatataaatgcgtaaatgcatgagactttcagaaagtcatgatagtcttggtgactgtagatagggggagatatgatgactctgaagtttggcagtaaagtgacaggagatgttaatgatgcatctgaaataggaattc

SEQ ID NO: 196367 - DNA, 1000 bp, Homo Sapiens
caattccctgaagtgttaactcattccagtattaactgaagagttcacagagtaaagacaaggcaagtcccttctacttatcagcctgtaatatcaaaggcaagttaattacttcttagatacaatgaggataaaggcacaaaaccttttttccctcctaggcctctgggcctgtgatgggaggggctgtcatgaggtctgtaacataccctggagacattttccccaacgtcttggaagttaacatttgggctcttcattacttatgcaaatttccacagagggcttaaattttcccccagaaaatgggtttttcttttctactgcattgtcaggctgcatattttccaaactttaatgctctgctttctcctgaacactttgccacttagaaatttcttacgccagatgccccaaatcatctttctcatgttcgaagttccacagatcttcgggacaggggccaaatgctgctagtctctttgctaaagtatagcaaaagtcacctttgctccagtttccaagaagtttctcatcatcacttgagactacctcagcctggaattcattatccatatcactattagcattttggtcaaagccatttgacatgtctctaggaagttccaaacatccccacatcttcctgtcttcttctgagccctccaaactgttccaaactctttgcctgttagttccaaggtcgcttccacattttgagctctctctatagcagcaccccactctctgtagtaccaatttactttatcagtccattctcttgctgccatgaagaatacccaaaactaggcatgttataaagaataagggtttaatggactcacagttatgcatttctggggaggcctcaggaaacttataatcatggcagaaggcgaaagaggaggaaaggtacatcttccatgatggtaggtgggagagcatgtgtaagcacaggaaaaactaccatttataaagccatcagttctcatgagaattc

SEQ ID NO: 196368 - DNA, 1000 bp, Homo Sapiens
caaccccttatcgtcaaaattttgtctgtctatatacatacatatatatgtaaatatatatttttgcagcactattttctatggaagaaaaatgcacaaatatgaaaagatcattttcttgaaagattgttttattttttaatataaaaggttgcagaaaacaaacggctacatatatatgtagttgtgtgcacatactatacacattatatatatatatatatatatatatatatatatacacacacacatactaaagtggtaatgttacctttggggatgggggttgttgaaggattgtgtgatatttattttccatggtagaattaaggttaattttaacttctgtgtgtgtgttcatatttttcaaattaaaaatacaagcacacaagccatattatatctttaagaagtatatacatatcataaattagggggtcacacaggcataacttgggtactggcttcaccactgaatcatcttagattccctaaacttttgttttctccaacattaaaataagataagaacctaaaataagtttttatcttatgaagttgtaaggattaaggagataatgcaggataatttatgaaaatgattgctatagtaactggtgcattaaaagtttaataaatattagatattattgttattattgcactcaaactccaaattcatccggcctatcagataaatgttaatccctacctgttcctaaactagttaaggtccttgtctccttgttcttttagaagtttgcatttgctcttacattccatctagttctcccctaaaaaagctgcacttttttgctttgcctctccgctggaaggctcttgcctgggtccctattttcctacattcgttcaggtaaaaccacccccatcagcctctactcacccacttcagcttatctcattggaattccatctaggccagaactcaaaaccattccacccctactgcctctctgtcctttgcctcctaactgaattc

SEQ ID NO: 196369 - DNA, 1000 bp, Homo Sapiens
acatagattatataatttataatcattatgaaatatgtaattgttatatacctacaatatgctcacaagacataagaatcttactttttttttttttttttttgagacatagtctcgctctgtcacccaggatggagtgtagtggcatgatcttcgctcactgcaaccttcgcctcccgagttcaggcgattctcctgcctcagcctcctgagtacctggaattacaggcgcccaccaccgtgcctggctaatttttgtagttttagtagagacagggtttcaccatgttggccaggctggtatcaaactcctgacctcagatgatctgcctgccttggcctcccaaaagtgttgggattacaggcgttagccactgtgcccggctgaatcgtatactttcttatctattcttggattactgctgttcacagtataaggaatatggggacatacactgcattttaccgacagcagcgtttcggaagtgtagtcctagcccaggaatacctgtatcggtagtaagaaaccagcatcctctctctgacttctccttcaatcttttggtcaatgaccagtagcataactccatataagtacagtgcttcacactaagaagagaagaggacaaaagccaaaatcactagattatacattcttagggagtaaagtcggtaatcatgaaaaatattgctttgctcacacttcttcaaaaagttttagatttcaaggaaaaggtaggtttcctccaaggagctcttaccttcttgccgaatgggccttgaaaagtttatgtaaaacagattttaattcatagtgataatttttcagttgacctattttggctatgttgcttgggacaccaaaatagcaacccaatattgtgtatacctcttcatcataaaatcattcacttattcaatcagcatttcttaaatggttagtatgtactaggtatcaggacagatggctgggatgcaaaaagtaaagaagacagaattc

SEQ ID NO: 196370 - DNA, 1000 bp, Homo Sapiens
aagaaaccacagggaagaaaagtgaaaaaaagatcacttctgattccatgtaaaattatacagttacgaactatattaatagctgaaggataaggctgatatccaaaagtcaaataaatttaattcctaattatccacatacaagaaactaaatgaatgaaagaagcaatagtaattttccatataaatatagttgagaaattatgcattaccctggccgcacaaatacaactgctatagttgactctgaacatctggaacacttctggatgtgtaacttggaaccgaggatatggcattctttttaagggtgtgtgtattcacaacttagggaagaatcccaaattgaattccatagttaaaagcaaaaacaagttttaacacactgaaagagtacactcctgtctggttgagagagatcagccaataaatgatggatccccgggcagctcaaatgccagtgtggcacgtttcctatggaatgtggaggcattcagagacttaaatgattttactctctcaacagaatccagatgctcttaaatattacagatattattataaattaaacaatataagtagccagaaaatattgtagttagggtttctataaaaattgttttgaacactgatgtagaaagagctgtatcctttttcccaacatggctatttcaaacttgtgatagtatattcttgtatattattgatcacctctttatattttctgttataaacatcctataaagtatgctaatatatttgttaatttctctccacataaatattcataatgtcctgtccaagaaagtagaaaatgggaccttgaaataaaacaaatgacccagtcaacaactaaatctcctttaaaaaaaaaagtcacaagtcaatttacctttgctttaatggtttttggtagccccataaaatggtcttattttgtgaaggggagacatttctaaatatgtaaaatttgttttaattctttaggaaagcagaattc

SEQ ID NO: 196371 - DNA, 1000 bp, Homo Sapiens
gattttctgttgctgtgcctgcactatttgttgccgttacggtgtattttccaaagtcatctttgttaccttctttaatgtgcaaaacagttgaggtagctgtttcttcaacgtttactcttgttgtctgtttaagaggctcaccatctttgacccaagaaatgttaggtcttggtcggcctataactggaatttctattttaagatcttctccagcttggatactatatgtgttaaatggtaactttaaactaggctgtatagtcaagtccttggctatgacaggaacacccaacactcttggatcgctttttcctttctcattataagccttgacacggaactgatattcttgtccagaactcaaaccagtaacaactgcattacagactttggattcagccacaatgctccatttttcagttcctttgggctgcatttcaacaacgtaccccaggactctgctaccgccatcatgttcaggtttctcccacataagtgatgcactggtctgggacacatcagtgagtgtaacctttcctggtggggaaggaggttcagcagctttcacggcatcaacagtttccactggaacaccaactccaaattcattttcagccatgactctgaagtaataaatggctccttctgtaaggttttccactttaaaacttgttttgctgcatttactactcacattagcatacgcttttctggttgactcacgtttgtcaatcacatagttcttgacctttgcccctccatcaatgatgggtggctcccataccaggaaggcagaatcttttctcacttctttgactgccaaattctgtggtggtcctggagtgtcaagaactttcacagttacaaaagcagactttgatccactgctgttttccaacttaagaatgtattttccagcatcatttctatcacagttatctattgatagttgggtatagtttactcccttttcaatttggaccttatctgtgaattc

SEQ ID NO: 196372 - DNA, 1000 bp, Homo Sapiens
tttgagctctgaatttctttcttctactttttcaattctattgctgaggttttccagagcatttcacatttctaaaagtgtgtccaaagtttcctgaattttttattgattttctttaagctatctatttgcttgaatatttctcccttcacttcttgtatcatattttggatttccttgcattgggctttgcctttctctggtccctccctgattagcttaataactaccctcctgaattcttttttgggtaaatcagggatttcttcttggttcggatccattgctggtgaactagtgtgatttttggggtgtgttaaagagccttgttttgtcatattaccagggttggttttctggttccttctcatttgggtaggctctgtcagagggagggtctagggctgaaggttgttgttcagattcttttgtcccataggatgttcccttgatgtactattctcctcctttttctatggatgtggcttcctgtgagccaaactgcagtaattgttgtctcttttctgggtctagtgacccagtgagtctaccaggctccaggctggtactcggggttgtctgcacagagtcctgtgatgtgaaccatctatgggtctctcagctgtggataccagtgcctgttctgctggaggtgaagggggtgcaatggactccatgggggtcctttggtggtttaatgttctatttttgtgctggttggcctcttgccaggaggtggcactttccagagagcatcagctgtggtattatggggaggaaccggtgatgggccagccctagaattcctaaggttatatgccctttgtcttcagctgccagggtggataaggaagagccgtcaggtgggggaggggctaggcatgtctgagctaagactctcgttggacatgtcttgctgcagctgctgtgggggatgggggtgagattcccatgtcactggagttgtgtacctgggaggattatggctgcctctgctgag

SEQ ID NO: 196373 - DNA, 1000 bp, Homo Sapiens
tcatgaaaacgtataagataaaatcttatgattaatcccatttcaaaatgaaaaaacagagatttggagatgagaaatcatgttcctcaagcttatgcagatggtaaaataaacttggaattcacccaaagattatcagaccccaacacaaatacgtcacttattcacaaatatgtcagttattctgctagtacttgcctcagttgtggtggggatatgagacatggttgtcattctttgggtgaccatttcacccagttttgccaattagttaaatgtgaattatttaaaataactctcctttgttctatttctttcttttttttttttcacctttggttactttcttccacttatcatatcaatctcacattagaagcaaaggccatgattcctgcccattctctgccctcaccacaaaacctggattaattaggacataacagccagaaatatgatgaccagtcagttacactttctatgctctctagcccagccatcaggatgaatttagattagacatactcaagaatatccatgagtgataactataagctttgtcacagataactgtattggctgtgcttaaatgtacaactctgtttttctattattatgtgatatttcatgttgacttgtcaaactgaaaaatacccatattgattttgcagaaagcttcacatgtgagataaatgcactcaaagattcctcacaagtagctctttggagcttcagatgtgaaatggatcattcctcaatctgtaatagacccttctgtgaagctcttcaatcaaaccagagaattcaaggtgaaattgaggggaggattggaaacccctacagggggatttgagtgaactagctgagaaaggaacctgaggtatttgccacgtgctgcctcttttttcagttcttttctttagcatgggaaggctgtcaatcaatgtgtgaccttacacgctgtaggtgcataatacctgggtacaacaagacaagctgt

SEQ ID NO: 196374 - DNA, 1000 bp, Homo Sapiens
atttaattagcatctagctaaagggaaatggcatttatactaaatgttgctgagggactgaaaccaaacagatcacacctgagttaggagcttaatgaaataacctcagaacacataagtaaattaacaaacaagggcttgaatatgatagataagagctattcttttaaagttggggtatgggccggttgtggtggctcacacttgtaatcccagcactttgggaggctgaggtcggtggatcacttgaagccaggcattcaagaccagcctggccaacatggcaaaactccgtctctactaaaaatgcaaaacttagctaggcatggtggcgtgtgcctgtagtcgcagctactctggaggctgaggtaggagaatcacttgaatttgggaggtggaggtgcagtgagctgagatcgtggccactgcactccagcctgggcaacagagcgagaccctaataagccttgttgtagttctgcatacattaaactgattacttttcaaagtcaggtaataatatttgaaataataagataaccatgaagcactttcaagacttaaagtcctgtatctatttataattaagattttgaagtagctaggcatggtggcgtacacctgtactcccagctacttggaacactgaggcaggagagtcacctgagcccaggagttcaaattcaacctggacactaaagcaagaccctatgtctatatttggagtataagaatttagtgcttttttgggggtgagggagattgagacggggttttgctatgttgcccaggctgttctggaattcctgggctccagtgatccacctgcctcagcctcccagagtgctgggattacaggcgtgagccactgtacctggccagaatttagtactttgactaaagttttagcatttttttatcttgcttatttactcccaacacactgaagcagggaaaggaaaaatgtctttgtttttttcctctttttaaaaactgccca

SEQ ID NO: 196375 - DNA, 1000 bp, Homo Sapiens
aaattctgatttgacttgcatttcacaacagtaaatgacactgagagcatctatgcatatgcctactgtctgttggaaaatttctattcagatacttttcatatttttgaattgtcttgattattgaattgtaacagttctttatatattgtggatacaagtcccttatcacaaatataactgacaaatatgttcttgcatgttgtgtgttggtttttttcactttatttttgatagtgtcttttaaagtataaagtttttaattttgatgaagtccaacatatttattttttctactgtcacttgtgcttttggtgtcttgtaaaaaggctttgactaacccaagaacaagtagacttactcttatgttttcttttaagagtttatagttttagttctttcatttgggtccataatccatttggcattaatattttaatatatagtacatgaaaggggtccaactttattcttttgctagtggatacacagttatcccagcaccatctgttgaaaagactattctttctttattaaattgtcatgacaccctttaaaaatcaattgaacataaaagtcagggtttaattctgggctttcaattatattccagtgacctatatgtctatcattataccagtatcgccctgttttgggtactgtagctttgtattaagttttgaaatcaagaactgtgactccttcacttttgttgttctttttcaaagctgttttaaaaattctgactaccctgaatttccatgtaacttttaggatcagctttgccttttctgaagaagaaaaatggcagctgagattgccttgaatctgtagatcatttgggataatactgacatcttaacaatattaagtcatctagatccatgaacatgggatgtctaattctttaatttctttcaataatttttggtaggtttcagagtaccatttttttaccgcttattttcttaatttctagatgcaattataaatggaattc

SEQ ID NO: 196376 - DNA, 1000 bp, Homo Sapiens
catgttggtgtgctgcacccattaactcatcatttaacattagatatatctcctaatgctatccctacccccgaggtaagaattttaaaagtgtgtgggtgttttgtggctgttactatagcctcaagcaagaaagcccttccataggattttcttatttcttcatctgggctgaagacgcttactagcctaggagggtttgagagccaagagacagtgaggtagaaaaagaaacttacttttctctgaggaatggaaggtgcattgtaatttgaaaatgaaaattactgccctacactaaaatcttgggatgtcagtccaaaacagagcatgaatgttatttaatttttaaaagttttttgccgtttcaaaattgagagaataggtacttttgctgtgacctttattacagaatataactgcagcttggaagagctgtaaaggtaggtaccagatgagaggacagtgattgctggaggacagaaatgaagtaacagtgacaggatattaagaatgaaggccacatggtggtctggagtcaaaggcccttaagattggaaagctttttttcaggtgcttactaatttttttaccattctaaacaagtttttggctgggcgcagggcagtggcttaagcctataatcccagcactttgggagttcgacgtagatggatcacttgagcccaggagttcgagaccagcctgggcaacctggtgaaaccctgtctcatcaaaatatacaaaaaattagccaggtgtggtggcacatacctgtagtcccagctacacaggaggttgaggtgggagaatcacctgagccagggaagtcaaggctgcagtgagccgttattgcccctaccgcactctagcctggacaacagagggagaccctgctttagtccatcaatcagcaatcagccaatcatcagttttcacctccctttggttgtattagggtttctggctcatttttctctcatgaaactctgttgaattc

SEQ ID NO: 196377 - DNA, 1000 bp, Homo Sapiens
ggattaatattcaaactacttataaatagaaatccatttagtaaaaggaactgcttcttttaagtgataactttacaaaggtagaatcaatgatgtcacctactatgtaaaatgatcatctattggccactcgctaattcttatccaccacttctgtccatcaccagatatctgaaaaacaagccaaacatccatccttatatgtgctgagctttcttgagggttttgattcgaatacattgtcttactataatcactaaccactaaaatttccagacattccttacttagatttcaaaattatacaaactagaaccttttgccaaagagtagttgaaatttctcagtatatttacagatcctattgtgggtacaggaaatatggtagctgtaattatgggcatatattaattagactaatactttaagtgggcatacagtatcctattgcaattgattataaatttaaaaatacagaaattatttttcttcccaaaaattattttgcaaagttacttattagtagaaacagaaactcaagttaactataaagttgacttttagtaaaaaatgtgacaggaaattagaatgatctatattatctactgatgtttaccttataaagtgacatttattattaatcttgtatattttaaaacataagcaattctacttaatttttctaacatgaaacaaatttggatgctgtgaggcagattttacattaaagaaaaatttaacttttgtagattttggcaaaatttttgtaatatttttaaatggaataaatacaaaaataagaaatatatttaaaatatattcttttaaattacatttgctattttgtttttgatggcttttagtcccacaaaagatgttatagttgcaagaaagctgtgattgctggcacagtacaggacggcttcttcatagtttaggtgaagatcagcaacaaaccaatattcacttccttcaattataagtggaggtccatgaattc

SEQ ID NO: 196378 - DNA, 1000 bp, Homo Sapiens
tctcaggcccgaaggataagtgttgctgctgaatgtggttacaatttttagcaaaatcacatggatcaattgaaaattctctagacatgttttctggctggtctgttcctttttaacaactgtcttaagttttaagcagtttcttcttgaaaggcagatgtgctgaaacgtgtgtgaagccatgtgccattaggagtataacacaaagaagttgaaacacaaccctgtacatgaaccattattgaagtatttgagttattacaaaacagcaagaatcctaaagtcttgagcaattatcaaagtgacaatcatggacattgtaatgttaggatttcaactggttaatctgccttcttattgcttgttgatagctttcagagtgttcatcatgttggtcttcaaaatgaagatgtagtagatatttccttgtataactggttaggttattttatatattctcatgtttcagctataaaaattgcttattggtttttgtttatttatgcggaggacataagggaatacttaaaaaactaaaacaataataactaatctagattttaatctcaagtctgccatgatctagctagataaagggctaattgcgtcatgtctttagagtttcattttttgaacctatgaaattaagaagtttgataagatgacattcttgatccttgtgttgaaatttaacaattttagttattgttggacacacacacatacacacaggtctatctacgtatacactaacataccacataactgatttctcatgatgtttcatcattctgtggttgtatattatggcttgcttattttctacaatatcaataagaatactaacatactactaattctatagttacattttattctacatttaaattatatttaatatccaattgaaattccattctaagcctaacatttcatagcagacaccacttgaattttgatccccaaatctgtgttgtacatagtgccttatttggaattc

SEQ ID NO: 196379 - DNA, 1000 bp, Homo Sapiens
cagatgcaacacaccagcctgaaaaggatgtggcagtctccttagaccccctcagggatgagagtctgggtacctcacaaagttttccaccaaagccagcagagttgctagctgaggatgaagcgaatttataatggacagcagagaaggaaaacaatgagtattagttttgaccctgatacttggttcagtgatggggactttcctcttctaagtctacccccaggaagaggtccactgggaccctgaaggaggtcacttaaagctatgaccatttagactcctaagtaattcttgcctagtccctctttccaagtgtcctccagttcacattggagcataccagtcaaggatacacaccaccttgagtcagcttactcaaatattaaacagttcctactattcaacatagttcctgcatattgactttattgaataaaatctgcatttcccataaactttaaataaaaattttatttacatacaaagtgcaaattatatcttccttttccataattctggttaaaaaaaaaaaagttccagcaattgcatttttactatttacccaaagagacaattatattccactccacatattcctttcaaattatctgaccaggatttctttgcaaacctgtcttgcctacttttccttaggttgaaaggattctgtaatctcaagtctgcctcaaccctgtatcttcatccagtaccccggatcagtaggatgaaagtggtaagcctacaaaaaagtccacttccatttgtgtcaaaacctactttcccaatacttgggcatgtcaattctgctaatgttctagagtacaactttctcacattttctaaaaccatattttagaaatggttacaaaatccaaacaattaacaaaataaattagaatgatgaaaacaaattagaggaatgcttttaactttccaggtaaaaggcattgcttatccaagactgactactgtcctcacccatatagttatagaattc

SEQ ID NO: 196380 - DNA, 1000 bp, Homo Sapiens
atggtgtattgttatacaaaacattcatacgcctttcccaagcactctgctttcgataactgcatgcttggtattacgagagcacagactgtcaaaccagaaggtgaattccgctacataattattatctaccatattacctctctgactttctttactgtaattttcaggttcctttaaagttcggatcatgtcttattaattcttgtgccccacattcccttggatattttagatgcccacctactttgtagatttcattatttggtataaacatgctgtgtattctcggattgttagtgctaaacataagcacaaaagtgttatttgaagctatcttatattattcattctagggctcccactccattagaatattcacctatttatagatactagttaatgaaaagaccatactgagattttgaatggaatatttttttctgatttgaagtttgttttaattaggtcttggagaaaatgcttgtgtaaagaaaagtcatgaaaagtaccttatagctttaaagagctctggacttacatatcctgaggataagcttgtatatggtgtgcaggagccatctgctggtactagttctctggctgttcaaggtttgtctaaatatttaatttgaacagttgtaacttttctgtattaaaaccaaaaaaacctctcaaactttactcattattgaaaaaaattattttgaactaaaacagtattattctttttaagaaaagtaataaaagtagtaaaaatttagaggcaaaaaagaatagattgaccaaagaagagaatgcatttttcttaaatggaatttgattagcttattaaggttctggttctaactcatgaaaaatgtacagttgctattcaagagtagcccaaaactttactgcctcaatattttagtaaactatggtttaaaactaaaaagagatccttctgaaacaccatttgtaataactgtattaaatctgagttttcactggagaattc

SEQ ID NO: 196381 - DNA, 1000 bp, Homo Sapiens
tatgaataattatatgccaacaaattgtataacctagaagaaatggataagttcctagaaaagtataacccaccaagattgaattgatgagaaatagaaagcttgaacagaataacaagtgaagagattgaagaagcaattaaaaaccttccagtgaagaaaatctcaggaccagatggctttcgtggttgatttctacaaacatacaaagaagaattgtcaccaatacttcttaaagacttccgaataatagagctagagggaatacttccaaacatattttatgagaccagcatcatcttgataccaaagccagacaaaaacacaagacaagaaaagaaaacttcaggccagcatctctgatgagcattgatgcgaaaatccttcataaaatattagaaaactgaattcaacaacacaaaaagattgtacatcaagacaaagtgagatttatctctggcatgcaaagcaggtttgacatacacaaatcaatcagtgtgatacattatcttaacagaatgaaagagaaaatacataattatcttaattgacaaacatttgacaaagttcagtatcctttcttaatgaaaacttaactatgtatagaaggaaagttcctcaacataataaaggcagtttacaaagacctcacagctaacaacataaccaacaaggaaaaactgaaaactttttccactaagatccagtacaaggcagggatgctcacattcaccacttctattcaacatagtactgcaagtgcttgctagcaagagcaatcagacaagaaaaagaaagaaaaacatccaagttgaaaaggaagaagtaaaattatctctatttgcagatgacatgattctataggtagaaaaccccaaagatttgacaaaaaactgtaactaataaatgaagtcagtaaagttgcaggatacaaaatcaacatacaaaaaaatcagtagcatatctatacacaattctttttctagctgaaaaagaattc

SEQ ID NO: 196382 - DNA, 1000 bp, Homo Sapiens
ctaaggaagcataaagcgaggaaggtgaaaggtgagtggggatgggggagttattacttgatgtgttgtcaaaagccaaagttatagggggtacgtgagtctctcatgctaactcctcagtttttctgaagcccacaaaggggaatgacttgatcagagtggctcagcccacacagagttgacagaaaccagagatcggaagcgaagcttggtgttttgcccaatgccccctgccacgccccttctggagtttcatttcctatgtatttaggatgggagcaaggacaggagggcagggaacaaactggtcccttgggattctagctgctactactgcccatccctccccctgaccagcttgtaaacaagtctagttcccaggcagccagccagcctggggagccagacccagaccaggaactggctctggggcagtcccccagccccagccctacctcctgaaagtccctggcctccatactcctcgtgattctcccgtctctagtccctgcgaaacagagaaggtcaagaggtttttgtctttctgtcttgctcatctccactccctcctgccttcttaagggaggaggagggagaggagaaggatggggcagagtaaccttgggaagataaggccaggcaaccctgggaaactagggagttagcagagggcagggttgaggaggagggactggggaacttagaagtaagggaagtgggggtggggaagatgagcttgcagagcccccgactcacaggtggagccccagacataaggggctggacgactgcagagaggactcattccctgcctgattcccagtgggggaaaagagcatgtttgaggaaatgaattaggagtcatgaaataagatgtggacaggggcctgggctcaagtgagaactttctcttagatggcttatttactcattcaaaaccacatattagatggtgttcattgtataatatactacaggtattacatgtgacacagaattc

SEQ ID NO: 196383 - DNA, 1000 bp, Homo Sapiens
aagatatgagaggcatgataaaaaggacttccgggtatgctgttgagggatggtgatatctttttttttcttttttttttttttttttgagatgaagtctcactctgtccctaggctggagtgcagtggtgtgatctcggctcacagcaacctccgcctcctgggttcaagtgattctcctgcctcagcctcccaagtagctgggactacaggcacgtgccaccacgcccggctaatttttgtatttttagtagagacagggtttcaccatgttggccaggatggtctcgatctcttgatgtcatgatctgcccacctcggcctcccaaagtgctgggattacaggtgtcagttactgtgcccggccaagggatgatgatatctttagactgtgacacccttatgttcttccccagggggagcacagtcctgtgagatggttaggcttcagttgcaaggaatattgattcatttcattcccccaaagaaattctgtaaaactcactgacttctcagggtccacacaagagaccaaataactatttctgtccttccatataatgtaaattcctgaatggccactacacaaaagtcaaaagggaaaagaatatttgttatagaggaaaatgataccaacatggaatgagaaatagtgctaaagatggaaagaaagagccagggagagagatagcaggacagggagagagagcaactttctctcagagtctctatagtcctgaaaacaggtccatctttcaacatcataattagatgagccaataaattactttgtgtttttttttttctttatttgggtttctgccgcttgcaaccacaatagtcatggctaatagagtgcaggtaatgtaagaacccagtgacatattgtaaactatgttcttactaagattacaatatgggtctccaaatgacaccaatccctctgccaccagccctgtcacattctgattcaccgtaaaataagaaagagtgtaagata

SEQ ID NO: 196384 - DNA, 1000 bp, Homo Sapiens
ataagtcagcaaaattcccttttccaaaaatgaaaatttccagaaatcatgacaaagtatagtcctgaaattaaaatatttctaagtatcatatcatttcatatcgtatgtaaatataattttaataagcctctgcccactatacaaatatgtaccaaattcctcaagtcaaattacacttcagaagtgttgcctaaattactacttgaagaagaaatttttaaatcatcttaaaaatttcacttttgccattaagccaccagaaacaacagaaaaaaaaccctgtaataatattacatggatgagaatattatactacatctgcacttctaggttcataagaaagaagagaggaactggtatctctcaagaaacgaaactaaagaagttacagatgtatacttttgtatgagtgataaatactcatataatgattgaaggggggaaataaagagtacagctacaagcattccatccattatgtataatttttattgatataaatatatatttgaattttaagacttttaaacattaagatttgacaagtgcagtaaagaacaagcttctctatttatgctgttccatgcatacaggagagaagagttcatgtcataattggctttggttttatctgttcttacaaagtcaaactgtccttaaatgaaattattcgcaaaagcaatccacagcgccatcctctacattaaaatgcaaacctcatgttaacatgaataaatgtgcccataatttcggagaatattttaggagttgtggccattatatgtgttttatttgtaatgtaaacttggaatttgggagaaattttaccttgtaattagaatagaataccaagactaagatatataatgcaatgcaacagtggataattcactattcttttacaaatatttaattcaatacttctgattttcagtctgtaccacgaaggaaatatttcttcaagtaaagtaaatgcagaaccttcattaaagaattc

SEQ ID NO: 196385 - DNA, 1000 bp, Homo Sapiens
cccttttgctccaccccccactcccgtatgtctgtacaaccttaacaaaataaaaagacaaaaacctgaaaccacccaaaacacgcaacaaagttctcttacttgcttgtttttcaaggatatttgcatagattccaacttccatggctgtgtctccacggtccctgggcacattatttctcatagcttttcctacgtaaataggtaggaatcatcaaattaaaccaattcagccacatttttctcatctcctcggccaaggagcagaattccctcaaagttctgaaacagagagtgacttgctccaatggcccaaactgttgtctaacaaaggaaaactatagactcaacagggagtctagacaccgctcctccaagccaggggctgttctgatttattttcctggccttcagaggaacatgctttgcctatcagattatgcctgaactagccagacttattttctttccttcgctgaagagaatagtctgtggaagctttgtaatatcttcaagagagtgtaaatggcctattgaattctttttttttaagatggagtctcgctctgtcgcctgggctggagtgcagtggcactatcgtgatctcggctcaccgcaacctccgcatcctggtttcaagcgattttcctgcctcagcctcccgagtagctgggattacagttgtgcaccaccatgcccagctaatttttgtatttttttgagacggagtcttgctctgttgcccaggctggagtgccatggtgcaatctccgctcaccgcaacctccgcatcctggtttcaagcgattctcctgcctcagcctcctgaatagctgggattacaggcatgtgccacaatgcctggctaattttttgtatttttagtagaggcggggcttcaccatgttagccaggctggtctcaaactccagacttcaggtgatcaaagtgctgggactacaggcatgagccactgtgcccggccagcctcactgaattc

SEQ ID NO: 196386 - DNA, 1000 bp, Homo Sapiens
aaataactaagattgcttttctagaatggttaaaaaaactgttaaagttgtttttcaaaaatcattttgagaaactgtgctttgaatacagcaataataggcaaacagacttgaagttactaaaaagctaaactaaagcatttgctcttgagatcatctcattagattccatgttattcaagatagccatcaatgttgagccaacttcaactatgtaattcctgagaaaatggcaattgaaaaatatccatcaccaatttcagtcatttgatgcaactttcatccaaaagcaagatttttttgctcagaagtacagtcataatttcaacattgtccttgtctatgaaatttggaaaaataacaatgcatgttattattaaagcttaggacaggtgttcagagtgagttttattatgaaacagtttggtgctagctctggatagtattaatacctgtaaccaaatatatttgaaaagcaaatacccagcaccctgttgctatagaaataaagcaaataataataaaaggtggggttctctttcattacatcttaggctagctcttgaaaacaccgtatttctgcctcaagcaacaatcaaaaagagtggaaaagtaactgaacttttataaaactttaaaattcaactttcatagcacttcgtggtaagattcaaatcagttcatatattatttaaaattctgataagtggcttaaaattctaaattatgcttaaaatgtcttttgaaatatctattacattacaatttttcagtggataacttaagtgctactttagaatcaaggaacaataccttgaggtgtgttaaactttggaaatttacttggaacccaagtgcattaataaaacaaaatccaaactagcagtcaaatcaggcagagcaagactccagcagtttcaaaaacatttgcatgagaactttgcattcgttaacatgaacaaaattgtcctttcagccacatggttaggaatgagaattc

SEQ ID NO: 196387 - DNA, 1000 bp, Homo Sapiens
gggccacaggtcttacctggcccttggtttaagtgtgggccagaggagaaggtaagatggggctcagctgtgagtcttgtctagagaggctgctactcaatagcacttctgttcataagccatctccagcaccacctttgaacataacgcctcctgttctgtgggtttaactcggcctcccttctcccaaggtgccccgaaccatcccccagtaagtcaaatggaacctgagccaggtgtggtggctcgtgcctgtagtcccagttacttgggaggccaaggcgggaagatcatttgggcccaggagtttgagatcagcctgggcaacacagtgagaccctgtctctaagtaaaaaatttaaaaagcaaacaaaaggaacccggcagataccaaacaccttcactttcacatcccctcttcaattccttcattaagttctagcacagccttttccatctgctctgccccacccaacgccctttctattgcctctttgaacaagttccacctgccctgactcactgcaatttaaccctactgtgtgccatatactttacgtgcatatgttcatttaacagtaatatgaggctgtcctgggttgttgttgataattttactaggttggtgagaaaaataaagcccagaagagtgacctttcagtcacccattatgatataattagcaagtggaagaatttggaataacttccagtgactctggacatccaatcccatatgtgaaacagaccagcaacctctgcatgctggggcattttatataacatcacggcccacttgttgataccttcaaggcaattcatcttggcaggctggtggacttccttcttagccgtgtcctccagtgaaacagcattgccagcctctggaaggtaaacctgagacaagaaagaggccaagaggcaccatcctcagtcagtaaggatgacatggcaccctaaaacagccatggaatcctcccagcaagatggttagagaattc

SEQ ID NO: 196388 - DNA, 1000 bp, Homo Sapiens
gtgacagtgaacatccaatattaaactctactagaaggctgttagggtctcttcctccttgttctatttccatacaccttttattttatttcatttttttgagacagagtctcactctgtcacccagactggagtgcagtggctcgatctcggctcactgcaacctccgcctcccaggttaaagacattctcctgtcatagcctcctgagtagctgggattacaggcgtgcaccaacacgcctggctaatttttctgttttcagtagagacgaggttttaccatgctggccaagcctgtctcaaagtcctgacctcaagtgatctgcccacttcaggctcccaaagtgctgggattacaggtgtgagccaccacacccggcgtatttccatacacattttaaacaggttgattctcttcttctgagtgacaggtatgcatatttgcacttcaatgtattaccaagaatgcaaaaagttgagaaatacgttaaggaaaccacattttctacttgagagtgtttacttcagtctttctaggagtgtatatgcttctagaatatacacaaggtatgtcagaccagaggtatgaaaatgaggcattttggccaggcatgtaatcccagcactttgggaggccgaggtgggtggatcacctgaggttgggagtttgagactagcctgaccaacatggagaaaccccgtctctactaaaaatacaaaattagccgggtacggtggcacatgcctgtaatcccagctactcaggaggctgaggaaggagaattgcttgaacccaggaggcagaggctgcagtgagccgagatcgtgccattgtactccagcctgggcaacaagagcgaaattccgtctcaaaaaaaaaaaaaagaaaagaaaagaaaatcaggcatttcatttactgcaaatgaattaaattatcatcagcatgttaagaattctgtaagtaaatatcacttttaagacatattttacctggaattc

SEQ ID NO: 196389 - DNA, 1000 bp, Homo Sapiens
aatgagtccctccacctacatccatgttcttttggtttcctcaccctattttgactttttcctccctctcctactctctcagatgcttttcacagctatctaaacacactcaagtatctttcctctaaaaaaatttcactccaatacgttctcacatttgcgtccacctaccactccttccctgcctctatccttcccttcacagctaaatgttcataaggagctttctcatgttgctcttctgatttttttactccccattcaccatttagcttggtgcaatctggcttttgcccccattacttaattgaaaaaggtcttgccaaagtcatattaacaacctttgttgcaaaatccaaaggacattttagatcctttcctaagttgaatgctcagtagcttttgtcactgctgactgcttcccttggttttctccacatcatactccttgattgcctggtgccttacttcaggtcttctgagcagcacaggaggcagggctgctgttgcataatggggaggatactgagctggttaggtgtgccaactgcattccttgcagcttaacagcaaatgcatttttttttttttttgagatggagtctcactctgttgcccaggctggagtgcagtggcacaatcttggctcactgcaagctccgcctcctgggttcacaccattctcctgcctcagcctcccgagtagctgggactacaggcacccgcaaccacgcccggctaattttttgtatttttactagagacggggtttcaccgtgttagccaggatggtctccatctcctgacctcgtgatccgcccgcctcggcctcccgaagtgctgggattacaggcgtgagcaagtacattcttaaacgaagccctcacttccacaacagccacagcccaccccttgcaagatacagatctggttctccacatacctttggggaacaggttatccaggattccagtgggcctgtcttcctgaggagaagctt

SEQ ID NO: 196390 - DNA, 1000 bp, Homo Sapiens
atggctgggcgcagtggctcatgcctgtaatctctacactcgggaagccaggacaggaagatcacttgagcccaggaattcgagactagcctgggcaacagagcgagaccctgtctctacaagaaagaataattagctggctgtggtagcatgcacctatagtcttagctactcgggaggcagaggcgggaggatcactagagctcaggaatttgtgaccagcctgggcaatacagtgagaccctgtctctacgagaaaacagtaattagctgggtatgacagcacgcacctgtactcctagctgctcaggaggccgaggcggaaggatcactagagcccaggaatttgagaccagcctgggcaacacagcgagaacctgtctctacaaaaaatagtaattagctgggtgtggtggcatgcacctatagtcttagctactcaggaggctgaggcgggaggatcactagagcccaggaattcaagaccagcctgagcaacacagcgagaccctgtctctacaaaaaatagtaattagtaattagctgggtgtgctagcatgtgcctataggcctagctactcgggaagccaaagcgggaggatcaatagagctcaggaattcaagaccagcctgggcaacacagcagagaccctgcctaaacaaaaaatagtaattagcttggtgtggcagcatgcacctgtggtcctagctactcaggagactgaggcaggaggatcactagagcccagtgagctataattgtgccgctgcattccagcctgggtgacacagcaagaccttgtctctaaaaataaaatatagtggaccatgcaagacaagttacaagtctctgtcaaaccagcttcttcaggccggctgcatggcagctggagcagggctgcccaagaaggcatccgcagtaggcaaaagagtagacccactgggcacagtggctcatgcctgtaatcccagcactttgggaggctgaagcgggtagatc

SEQ ID NO: 196391 - DNA, 1000 bp, Homo Sapiens
ggtccaggaatcacactttgaggaccactgccctaccacattgcttcaacacatttgtttaatatcacaaacaaggaccacctggatttcatcctttgcaactaatgtgaaatatttaaatattttttattataatagcatattttttaaaactctagatattgaagtaggtaaatttgagctttttttttcatccaagtcagttttaaaatctagtgatttagttttattaattgagaacaatctcatcacggcatgagaaggctctgataacatgctaccacaacaaatgttcccgaaagttctttaggttcggtttgcttatagaacaataaatgttccctgtttggaaacagtccccaaatgttccctcttgtttaaacagtgtgaattcttaacatactcagcacacatactgtaatctatgactgaatagaggcctttctctcctcagggagaatggaaggatgttattttggggaacagtgaggctacctttaccattttttttctaactcacaaaatactgcaataaagtattgctcaactcagactgaaacaattttcccatctgtcaaaatattttaaatagtatcaagctggtattactttgtcaaaacatttcatcagagacagtatctaaatttaaacaagcagttcctcgaactatgtaagtaaggtgaataagctgccactggcacggtatattttttggaaaatccacaaggtctcattagaaagtccttaaaggaaatgggtgtttaaaccaaggacgagtgtaccttgggctgaacatttcactgtccttgaaatgatttatttcaactcctcccaaacgccatagaacaagctcagctttacaatacttctggtcaaagtctcagtaaactcacaattatgcattgaaatgtgggtaatatggattgacttagagatctccacaaacacaagcagataatttgcatatattctccaaaggaattggagttgacacgaattc

SEQ ID NO: 196392 - DNA, 1000 bp, Homo Sapiens
taatatttgtgctaaagtgagcaaagctaactgtataaagaaaacacagtgggttgtgacaaggatgacatgaaaatacaggacaattctgacaatgtaggggctgattttatagtgtaagaactattaatgccccttgcttcttttttctgcctcttgctcttgtcttttggacatttcagtgattgtaagttcttcggtcatgtcagcccctgtcatcaacttgagttacagtagatggggcagacatggactgtttgctatatagaactatctgtttgttttacttccttgtgcgctttttgttctctgttctcttgttaatgaagcttttcctgcccattattaatccaaactcttggaccttgtggttaggaaattcccttaacttccagccatatggcattatcgtgtctctttctctctctctcttgctctctctcttctcctcttccccatattttctgtcaaataagtactgtttactcatttagttgcttatcaagtacttattcttggttttaaaaaaaattaatggtaactgtatttttctcatttttagcattattcaaatgtttatattttaatacctttaaaccactttaaaattttttcatgtttaattatagttttaagaaaaactattttgaacaaccccaaatatagtgcatctagaaactaatgtatatttgattagacatcatttatagtggaacagtagactgtagtacatggtaatttttcttttactattaagatacaataaaacatgactaattttgctgtcaaaaatgtaaagaataatgataaatggagtttttatattttacttttaagattgcctgtctttaataagacaaagccttaagccttatgttataattttggttctaaaaaccatcatttcagtataaggaataagtatatttcgtcctcctctttagtttttttcttcctatttatttttattttgaaaaatttctacaccttctttgaattc

SEQ ID NO: 196393 - DNA, 1000 bp, Homo Sapiens
tggtctcgaactcctgagcccaagggatccaagtacccagccaccgaaagtactgggattacaggcatgagccaccatgcccgactgacccttcctgaattttaataaaattattttataatattgcatatttcatatattttaatatatatttgaaccatcaaagaaaataacttttactcataaattatgaaaattctttttgtgttaattgttctttgtagaaaccaaattgcttttctactcaaataaaaaaaagaataggtaaagattcatatttactggccatttctgtcagaataacatggaaatagtgcttatcttcattattaatcaagcgatcatggaagaccctttggcactcatggcaaaagagtctaaatatctgaatttcttctcttattgttcctggatcacattggaggatacctgttttttaagaaaaggaaaaaaaaaaagaaaaattctacatttgtagaatctccagtaatagtttaattaggaaacccttaagtacaactttaccctcatattgccaaaaatgactgcttccccagtggatatacacatatactaatagtgacctcattttttgataacaaatctgggatacattatttgacaaaaacattttttccctgttttgtgatgtttctttaaccgagcatgtgaagtggtcagacttcacaatataagcaaggtttatctcattattacatgaattgcaatatgttaagtgaagggcctcacattactttaaaatatactaaagtatatatatttacttatcttgcaactttcctcctctcaatgcatatactgtttttgaaactcccatttctctctttcttccccaatgtcagtcctcaccaaatgcccctggcccttctggcttctactaagattattctgagtactcatttcattagtgtaaattgttattgcaaacacagttctaatgatttcaagttacaatcaaagcaacaatgtacaggaattc

SEQ ID NO: 196394 - DNA, 1000 bp, Homo Sapiens
aaatatctgagaatggtgtttgggttttggactctaaaactggggacagggtaggttgcatgaggaatgtaaactgtgtttcaagggacaagctggtcaaatctagaagacgtcaaagtatcctgagggggaaagagaaaaatgccgaaataaaactataaaactagtttctctgaaaggcatcaggaacttgttttgtttttacttttttgggggaatgcgggacagagtctcgctctgttgtccaggttggagtgcggtggcacagtcttggctcactgcaatctctgcctgctatgttcaagtgattctcctgcctcagcctcccgagtagttaggattacaagtgcatgccaccatgcccagctaatttttgtatttttagcagagacggggtttcaccatgttgcccaggctagtctcaaactcctgacctcaagcgatccacctgcttcggcctcccaatttactttctttttcaaaattttttttaaatttttaacttttttcccctcattttgaacttctttgtcaaggagaattccctttagacaggaaagaaaagatgaggcaggagagaattggagctcaaataggagagaaaggtgtattgagcacacctggaatagtggttcttcatcctgctgcacctgagtatcatctgggagcttagaattatcaaggcttcagcctcagccacagaaattctaagtctgtgggctctggatattagattttttaaaaccatacacacaaaccctctgtgaatggcttctcaccttggtgagacattagagacattagaattatctggggtgcttaaaacgtgaatatgctgctggggcttcaccccagagaagttgatttaattgtcctgttgacaggtccaggccctggtggttttaaatttgtctcaggtgattctaatgtgtggccggggttgcagtccactgacctacgtgctctaaatcagcttgagtgatctgacctgggtgaattc

SEQ ID NO: 196395 - DNA, 1000 bp, Homo Sapiens
aaccccacttacagtgagttgatggagcgccccaagagcttagttataactttgctgaaggttagactgctcgttgataaccagttgggatttgaacctcagtctaattccaaagcctgggtcattttcactttacttcattgccacccggaatagtggccttcgatcactctcgaaaggtgcagatggcacaggagccctcacactctgcctttccaccatatccttcacatgaccttcagtgaagcagtgtttgctgctttaccctcctctatgctgagggtgaaaggactgtcaggaacacaacctaaatacaacatagaaagtaaaaggactctcctgtatgtgacgagacctcttagttaccattaaagcttgggtgaacttctatttttaataaaatttaaattcagaatagcgttagatttatagagaagttgcaaagaatgcagagttcccgtgcactccataccaagtctcctcttattaacataggacattagtatgacacacttgtcagagttaatgaactgatattgatacctactaaagtctgtactttattccttttttttttgagatggggtcttgctctgttgcccaggctggagtgcagtggcgcaatctcggctcactgcaagctccgcctcctgggttcacgccattctcctgcctcagcctcccgagtagctgtgactacaggtgcccgccaccacgcccggctaattttttgtattttttaatagagacggggtttcaccgtgttggccaggatggtctcaatctcctgacctcgtgacccgcctgcctcggcctcccaaagtgctgggattacaggcatgagccaccgtgcccggcctattcctttttttttttttttttttttttaaagcttattcccaatgtcctttttctattccagtatccgagaggacaccatattgcatttagttgtcaggtcttagactcttcttggctgtggtggttgctcagactttcc

SEQ ID NO: 196396 - DNA, 1000 bp, Homo Sapiens
cacgcccggctaattttttttttttgtatttttagtagagacgggatttcaccgtgttagccaggatggtctcaatctcctgacctcatgatccgcccgcctcggcctcccaaagtgctgggattataggcgtgagccaccgcgccctgccaccctcaggaaactcttaaacttgtacaccagaagccacgtacgagactgtagcatctgtatagccaaatcagctcaaatttccacctataggaggatgctgtatacagtgtttgcaaaataggatatacagtgaagatttgtgaacctgtttaaaagaagaggttatagaaattatgttaatataattacatataaaatataaaaggcaaaacaagcaaggacttttaagattaagtagtggagattaaacagcaaagcaaagcagcatgtaacacttacttgcattagtggtaaatttggtttaggggagagaggggaacatgattaggggcttttaaggttgctttccatttcttggcaattagtgtctttttatatcctttaaaatattttattttgaaatcatttcagacttacagaaaagttgcaaagatagtgcaatcaattgctgtatacccttcacccaaattttcgatgttaccactttaccatatttgctatatttttctttgtctctcttgaaactttttaatgttatattttgtacttaaagcatctcttcctaaaggttactctgagaatatttgaaacaataagttaataaagtttataatgcaaatgttattttctttgcagttgccttgccaactaatacgacctcatcgagacctcggactgagtgttgtagtgatgcaggtgactctcctttgaaacctgtcagctgtccaaaatctaaagcatcagacaagcggagtttacttccacatcagatcagtcagatatatgacgaattatttcagatacatctgaaattgcaggtaagaactaaatactgaatcgagaattc

SEQ ID NO: 196397 - DNA, 1000 bp, Homo Sapiens
tgggatacctttgggtatttaaaacgcatgaaaacaggccagttagtctgtgtaaaatatcagctactgtgtacacatggtaatgaggtttttctcatcaaggggtcttaagatgtgaaatgactactcccatgtttctctggatttaagactccctaggggcatcctgatgtgacagatgacaatatgtcttgaagaccaatgggctgcttctgtcttacctcttctattggggggccatgaagcagagatttattggcacgtcatgtaaagaaactggaacttgggttcaggcaggaaataacactacagactagaacctgccctgtagtggttctcaaacacttcttaatacctatagggagaccagtaaaaaaggcagataaaggtagagtttctcagaatcagggggaaagcctagagcacccagctgctcagctcaaaaacctccagaagccctggagatgcttggtggaactctaaggctgtgagaagcatagtttgaaaactgctgtcctaccaatgatttaagcagctaagctaactctaagctttacttttatatgctcttttggagtagaagtttgaacagtcaatgagggagataaaattcacgttaagcaggctttgcttgaaaacaccttcaagaaacccgatagtgccacagaactgggtgttaagaaaggagcacctgtcaagcatgaagactggtgactggagtccactaaccccgtgatgtgctatatgtgagagcttttgcaaatcactgagcccaggatctttccctggaaaggggataggaattcccgccaaattcataggtttcctttttttttcttcttcttcctctcattttagaggggtgggaaatcaaataaaataacggattttcaattatttttaaattgtggcacaagtggaattaaagcgattaagagagtttaaggcagagtagaatgtggtttactatattggaatgtaaagcacagaggagaaagag

SEQ ID NO: 196398 - DNA, 1000 bp, Homo Sapiens
aggaataacgactattattattcttgttgacccataaggaaaataagccacagagaagggactcacacaagatcactgggctcatgttctactgttgctgtagaaaattactacaaatttagcagcttgaagcaacacccatttattatctcacaatctgtttgtcagaggtccaggaatagcatgtctcagctggttccctgctctgagtcttacaaaggtaaaatcaagaagttggcagagctgggtgtggcaactcatgcctggaatcccagcactttggaggcgagattgggaggatcacttgagcccagcagtttgagatcagccttggcaacatagtaagcctccatctctacacaaaataataaaaaaaaaatccaggcagctgggcgcagtggctcacgcctgtaatcccagcactttgggaggccgaggcgggcagatcatgaggtcaagagatcgagaccatcctggctaacgtgatgaaaccctgtctctactaaaaatacaaaaaattagccaggcatggtggcgggtgcctgtagtcccagctactcaggaggctgaggcaggagaatggcgtgaacccggggggcggagctggcagtgagccgagactgtgccactgcactccagcctgggtgacagagcgagactccatctcaaaaaaaaataataataataatccaggcatgatggtgcatgcctgtgatcccagttattaggttggtgcaaaagtaattgcggtttttgccatgactttcagtggccacagttacttttgcaccaacccaatacttgggaggctgaggtgggaggattgcttgaacccaggaatttgaggctgcagtgatccatgatggcaccactgcacttcagcttgggcaacggagcaagaccctgtctcaaaaaaagtcagtaggctgtgttccttactggaagccctggggaagaatccacttccaagcttattcagcttgtcatcagaattgaattc

SEQ ID NO: 196399 - DNA, 1000 bp, Homo Sapiens
attttcactcatgttttgacagagagatggatgtgatgaagggtatgaatgcagttactgtttaagaaggtgatggactaaccaacattggttttagcaaagaataaagaaagtgactgtccttcaatctagctccacatgcggttcttaaatattaaccacaaagtactcaagcccaagggcacgagctctgggtatgcagagtgtagcattgacagctttcaggaatgcaggcccaaagacagctccagaaaatatccaggaagcaaactatcttgaagttctatactttctttgaaatgccaagatgtaatctaaaaatatgtgttctacttttgtagtctaataaaccacatttatatgatggttatctgtcatatggggagacaaaattcaacatttcacatgcctgagctttatacccctcctttaaatgtatcaagatttcataaagctttggttcttcagaaaagatcaaggtacatcacaatatttaaagcattatctccatatctattgccacaggaggataaagagaaaataaacataaatgcaaataatgaaaatgcctgagcaatcataaagaatgaagttactgtgtggattctattctgtgtttatgtgttctttcctttgctcttaagtcagttaaacataatgcttgggttctttcctgatttatttcattcagcaatcccccctaccccccgacatcccttgcaaagatgaatcaacaaaagctattaccaagaacaatatgattgattacttattggaactcgaataccaattttccacttaagtatatctttatatcaatcacctcacttgcctacctattgaagagtttcaattagatttttttaataaagaggactttctttactctaaaggatatagctgatatttatgaagacaacgctttatttacagaataaaactgaactttgccataacttagcataagcaaatatgtagtttctgtttccctaaagaattc

SEQ ID NO: 196400 - DNA, 1000 bp, Homo Sapiens
tttgcattaatagccttttggcttaaaagggaggaaaattctgatttttctggataggcaaacaaaactgcatctagatacactactgttgtttggagaggtaattcaattgctagatcaaatttggctatgctagatttctatgtcaagtgtgatggggacaaaatacatcaaatcatgcgctctctttaaggattcatctttgatcatctttgtatcctgggcattgaatatattgcctagaaattagtaggctctcaagaatcatttatgggatgaatgtggaataaattatgtccttaacactaatcttggtgtagaggtcttttggtaaaaggaagcataaaataagatacctgcagctgagctaggaacttagacctaatactcaggcaactgtagaataattatttgataaactgtgtagtagtggtcataaatacttgaaagagtttgatagggctcagataagtattcaaaaagggtttcatgaagatgtcactcaatcatttaaatccatttgctccatctggatatttcttcatgctgtatagatattctgttgtttatatatctcacatacctagggtcacttaagtgggctagagttaaacctcccagaaactaggtatcaccagcatgaatctaatgtagtttttccatgaggtgcaataggtgctagtaatatacagtttttctgcccagtacttcaacattcaccttgtcctaggaatgcttctccatttcctgattgccaaggcttatggtacccaaggagctgctgtgttaccatgtgatcctgctcccctagccacaattgatctctgttgctcaggtgagccaatctcagtcctctcttctccaggccaacttgttgattggtccagggtagccaatagatccaattaaattcaataaatcccttccctatgattttaggactttgttccagaaaaagcatcaaggcagttttttttttctgccaagtgactgtagctat

SEQ ID NO: 196401 - DNA, 1000 bp, Homo Sapiens
ccttttttatggctacatagtattccatggtgtatatgtgccacattttcttaatccagtctatcattgatggacatttgggttggttccaagtctttgctatggtgaatagtgtcgcaataaacatacgtgtgcatgtgtctttatagtagcatgatttataatcctttgggtatacacccagtaatgggatcgctgggtcaaatggtatttctagttctagatctttgaggaatcgccacactgtcttccacaatggttgaactaatttacactcccaccaacagtgcaaaagccttcctatttctccacatcctcccagcatctgtagtttcctgaatttttaatgatcgccattctaactggtgtcagatggcaagttggattcctaagtattttattctctttgcagcaattgtgaatgggagttcactcatgatttggctctctgtttgtctgttactggtgttttgatttgcatttctctaatgaacagtgatgatgaacattttttcatgtgtctgttggctgcataaatgtcttcttctgagaagtgtctgttcatatcctttgcccactttttgatggggttatttttcttgaaaatttgtttaagttctttctagattctggatattagccctttgtcagatgggtagattgcaaaaattttctcccattctgtaggttgcctgttcactctgatggtaatttcttttgctgtgcagaagctctttagtttaattagatcccatttgtctattttggctttgttgccattgcttttagtgttttagacatgaagtccttgcccatgcctatgccctgaatggtattgcctaggttttcttctagggtttttatggtttcaggtctaacgtttaagtctttaatccctcttgaattaatttttgtataaggtgtaaggaagggatccagtttcagctttctacatatggctagccaattttcccagcaccatttattaaacatggaattc

SEQ ID NO: 196402 - DNA, 1000 bp, Homo Sapiens
ctggcccatcagaggcaggacgcactgcccaggcaggtgtgcatctggctcatgtgggctccttccccgcagaggcttcgcaaagctaagccatcctgtcctggaggaagggcagaggccagtcaatcagctaaatgggtacaaaaaagcaatggagacagagcaagtgtaaggcaggtgctggaagctgatgagcacagcagaggtcagtgggcacaaaggtttgagccaaaggacagcaggctggaacaggcaatggggaggggctctgagacacgcagaagggggttctgactcttatggcagagattttaagcccctagggtggcatgataaggaagaaaagggttcagtgaagggtagtagagatgacgggtgattcctttacctgcacaaaagaggagaaagctgggagggctgacactaatgctactattggcagcttggctggaatctctcccctagagcagccctgagggtctctcctagagctcagtggagacacaggccgcatggctgcttggctgctagcagatactcgggggtcctgggatatttgggaggaaggtttccatttccctgtcttttctcattttcctgcacaggccagggattcattttctgcgtcaaagatatctgttctactctttagcaatgcatctctctcttccctttgcaccacacacagccagctcctgtgtaaggaagtcaagattttctcaagggaaaaatcaccctagaaaccatcaactcatgacaaacgtgatctccaacgttcattgtggaaaatagcctcaaggatgagatgatgaggattttgaagatgggtgagtaggtcgtctacttcccggaggagaaggaaggccaggactctctggggcatgtcctaaatgtccttctcttcagttctgacttttcaaatctgtctcttgctggggccagcgaggagggctgggcaggatgggcacccgaagaggctgggagggaagatgctgaattc

SEQ ID NO: 196403 - DNA, 1000 bp, Homo Sapiens
acatgaggcttcaccgtgttagccaggatggtcttgatctcctgacctcgtgatcagcctgcctcggtctcccaaagtgctgggattacaggcgtgagccactgcgcctggccaacatcattagttgctttattgataatagccccaaattggaaataatccccatgtcctcaactggtgaatggttaaacaaactgtggtacctccatacgtagaataccactcagcaataaaaatgaaccaactgctgatacaacaacttagatgaattgccagggaagtatgatgagtgaaaaatgccattcctaaaaggttactactgtatgatttcttgtatataattttcttgaaatgacaaaattatagaaatggagaacagattagtggctggcaggggtcagggacagcgtaaatggggttaaggggtgggaggtagatatggctgtagaagagccacttgaagggcccttgtgatgatggacttgtatctttactgtggtggtgaatataacaatctatttatgtgctaaaattctgtagagttaaatacacacacacacacaaatacaagaactgggaaaatcttaataagatgagtcaattagatgaatgttaatatcaaggttattgatattaactacagttttttaagatacaagtttgtgtgaaactgggtaaagggtacatggggtctctttgtacatattcttacaactgcatgtacatttgcagctttctcaaaataaaaagggtaattaaaaatgaaacattcgaacatttacaaatattaaaatcaaaagctagacaaagatgcccaccgtaaccagtattagttgacattgttgtagaggttttagctaatgcaattatttaagaaacagaaagaagtaactaagaaacaggaaatgaaatgattatgatttgtatataatttttttttacctagaacattctagggaagttgcagaagagagtttataagggaatcagttatgaattc

SEQ ID NO: 196404 - DNA, 1000 bp, Homo Sapiens
ataactgattccatcaatcattgattaacctcctcctacgtgcctggtgttgggctgaactctgcggatacaagaggagtaagacacaggtcccggccttgagagcttaccatcctgtgtgagaggcagacacacaaggagaaatgttcaatgcagtgacctggctgtgatagtcgcatcccaagtgctctacggggacagaggagaggccctgagctcgcccatgggtctgccagcataaaggcaagagaggtgtccagcctcaggcacctcctcagcccagtctaggagcataaatgagaattagcccagtaaaaggctggatgacagaaaggatctgggcagaatggacagcacaaaacaacactgtgggtggggaaatagctgagggtgtgtagggagctgcgctggagtcaaaagcaacttgtgtcagtttgcctcagactttcttagttttagcactgaaagtctcacatcctggccatctccttagtcccaggccaactgggatagatggttaaccaaggtagcaagcaataaagttaaaaaagatagccagtggctgcattatggagggttctgtgtgtcaagtgaaagttgtttggttttgtgttatgggtgatggggatccaccgaagggtttcagagacactgcatggtcagggagggacaggagagatgtgacttcctggaggggacaggcagcctcataataagtatggaggagagggagcaagtgagagcattggaagggttaaatcaatggctactgtatgagagaagcctgacttggggaagtgaattgggttggaaaggacaggtgtgcagagagttgattaaactatgatagtttggtttggaatatactgtgttgaaggcatctgcgtgtccttcgtatgcataagagcacacagattgagcatcaacaaccttcccagggtgccgctttccattactcttttaggtctcatttgccaggaactgaaaagatgtggaattc

SEQ ID NO: 196405 - DNA, 1000 bp, Homo Sapiens
gcctcaacatcccaggatcagatgatcctcccgcctcaggttcctgagtacctgggactacagcacgccaccaccccgcccggctatttatttttttgttaaagaagtgatcttactatgttgcccaggctggtctcaaactcctggactcaagcgatcctcccacctcagcctcccaaagtgctgggattataggtatgagtcactgcctccaacctattttttaaattttttttagagacagggtcttgctttgttgccaaggctggagtgcagtggtgccatcatagcttacgacagcctggaaatcctgggctcaagtaatcctcccacctcagcctcccaggtagctgggactataggcatgtaccaccagcccactaatttttttggtttttgtagagacagggtctcacgatgttacccaagccggtctcaaacagctaggctcaagccatccttccacctcagcctcccaaagtgctgggattacaggcatgagccaccgtgcagggcctgatagtttatttcatagactcagctaccaactccttagagtgtagagggaaattcttctccacacacacccttcaaggttctccctccaccctctgctgccctggacaccctccctagaccttcccagtcggcaacctgatgtcaggaatcctcctgaaacctgctcctgacttcgcaggtctcagttctgatccgtaggagcacacagaacagaatgaaaggcagggctctcctgcgaaggttggttttttattctgattttagcaagtaaaactctacttgaaatttgcgtctgaccacgggttctctcccctaaaatttccatactcgccccaacctgattcccctctccagattctccagaaagtctacactgccctctggtggcataatgttgctattgcacagtctcctttcaaagcatcctgtaacgtttcttcttgtcagtcatcctgttgtccatcctggaaaaatagaattc

SEQ ID NO: 196406 - DNA, 1000 bp, Homo Sapiens
gtggtgcatgcctgtaatcctagggaggctgaggcaggagaatcgcttgaacccgggaggcggaagttgcggtgagctgagatcacaccactgcacttcagcctgggcaataagagcaaaactccgtctcaaaaaaaaaaaaaaaaagttgatttagcagtttaatttgaatccatttaaaaagttatattgttcccccttaatactgaatgtttaaaacaaaacaatacaaaacaaagcagaaacaaaccagtccatttcaaataaaagcaaatgtcttccataaattcttaatctgcccagcctagcatgttatggaatggatgttgctgataaaagataatattaggttacagtcttcttcattagtgatttttaaacaaaactgtaatttcctgggaggcacagacatttcatatgttggtgtacagtatttatttacatccctgcttgtttttagaaggattcaggatcataagaaaaaagccagccaagtaagatcagagtcctatgctgagtgggaagattttccaccgttgtagcacatttaaattttcttttttttaagagacaaggtcttgctctgctgcccaggctggagtgcagtggcatgatcatagctcactgcaactttgaactcctgggctcaagcagttctcctgcttcagcctccggagtggctgggactgttgggtgcgtgccatcatgcctggctattttcttttgctttttaaaatttcagagctgtttctcagtgtgaacaggctatttattttattttttattttttgtagagacagggttttgctttgttgcccagagtggtcttgaactcttggcttcaagggattctccagcctcggccttccagagtcttggcttacaagcatgagccaccacacctggccatccatcacttacttactctttatcttgtagcttttcttccaacagaagtcatgagtttgtgctaatttacaaataagaatcttctgaattc

SEQ ID NO: 196407 - DNA, 1000 bp, Homo Sapiens
tcccttcattcttcattttcccatcttgttcagttatttctcctcttgtctcctctcctattctcctttccatagcctcttctgctaacgcccttcagaaaatattttcctcaacatttcctgaagagtccattctttctcattctttttcattcttgcatgctgctgcagccacacttttaacaaaataacctcatctgatgcctggacaatctggacccaagtctgaacaacaacctcttaggcattcagaactcaaatgtttccctggttgagtgtcaactagctgtgatctggaaagaaagtttgcaggctttctggctcttcagaatagttgttatttctcatgaaaccacaggcacctttggtctagtcatatgtttaagttattatacctggtacaaagactcttgttgaaccctaaaaccacagtttgtaagatcagaggttatgtcctcaaacctttgcaaaaccaaaatttatgttattgtatgaatcagcacagacatcccaatattgagagaatatcttatttttgccagacaggatttgtgggctatgttttataaacacaattctattcagagaacagtattttaaagatagtcttacttcttagaaaggatttattattccacttgaggtatataaatatatacacacattattggataatagtataatatcttggatataaataataagatatatatttatatatacattaaattattatttgaaggaaaagcatgcagataacctctgtagtatatctaaacttgtaggatgaataatgtatatttccaaggattttctcagattgaagatactgaatttccaagcttattcctaaaaacctaaaattagattttagaaatggaagagtagtaacactaatctcactctattccatatgtatattccttctgcagagtgtggattatgccctggcaatgtcaccctctgtcccaactgctgggagtcagaaattggtgaattc

SEQ ID NO: 196408 - DNA, 1000 bp, Homo Sapiens
tcttgactcatttttgctattaaaagcaggaaggaacattgggacagcaaatgattaatgaattgctctataacctgcctttttccaaaagaaaactgagcgattgagaagacagacacgtcctccaaaaaagtgctatgattcaatgatttcaattgatgtcagtttagcaaacacgttgagtacttgcgttgtatgaaggtgctctgccagaaaggaggaaacaggcttggcccttgaggagcttaccctcctaaccacagccaatattccaaaaacacatcatgaaagaacagtttccaggggaaatttaatttttagagatggccagaagcaatcttgtttaagcaggggcaaaagctgttagaaatggtcagtttttctagtatgaccaaatatcagtcagaagaaattcctaaagatgaattacccaatttcccgaacaatggcaatagcttgagaaggtttatgctttttttctccagaagtcttctttgaaggagacacttttgacgacatgcttgtgcaagcatgtgtgtgtatacgtgtttgtttactacccctcttttcttacaggcacagcttatctataaaggatgctaataaactgagactcacagaggtagtaatctctgaaaataatttgaattttttagcacgttcaggttcttttattccttctctccaagagactttcctccggggtcgagttagaagtaattgaattaaaactaagtatatatctaaaagaaatgaaaatattttcccacaaagaaattggcacactaatgttacagtagcattattcataatagccaaaaggtgtgaacaactcaaatatgcatcacctaagagatgaatgaacaaaatggggtatatctatgcaatggaatattgtttgtccataaaaaggaacaaagtgatgatagacgaatgatccttgaaaacattacgctaaatcaaagatgtcagtcacaaaagaccacatattacagaattc

SEQ ID NO: 196409 - DNA, 1000 bp, Homo Sapiens
tatttcaaggccccacaccagaaatctctgtttcaagtcatcaccatatatcaggtcatagttaattgcttaagcgttgaatctgccacctaacttaaagtagtaacttcaatgtcaaaggatgaaaatgggaagagggagattcttgcctagttcctcctcctaatccccaaaccccaatcccaaccagagctttaaggaaataaagagggttaaaagctctctagagacaagcagatgtgcaatgcacccccttaatacagaaactaaagaaaaggctgtcttagcagcagagcactgggagtagagccacggctctaaactttaatcaataacatcacaccaaccaggcaggccacactcccatcaggaacaatggctaccacagcagtgattctcaatcttgggaaggtaaggtgtgcacaagcatagttcaataaactccacatcacaatttcagaaatatatgctgcttttctctgcctctacagagagaggtataacctggttctccaaaaccagggatgagatggtcccaaccagattccccttaagaaataggagaaaataagatcaataatcacccaatcaattgcatagcattttactcacttcagccctgttttatagttctctctacaactgaaacttgccctctcccttcaaagcacctccaaatctcatctcaccactatctggcctacagacactactaatgctacagcctcccagtccctcttctgcctcttcccatcctgcattgagaaggaagccaggttcacctccagtcagctcacctttgtaaaatacctttcctccctgtagtgtgttttccctctcgaacctctccatgcctcagttgatccttgtccagaccaaggcaccctatgttgctctgagtttgagcattttgggaggcccaactttctaaacctctgggagccttccccttgctacttctttcctgtccactgagtatttttcttagttctaggaattc

SEQ ID NO: 196410 - DNA, 1000 bp, Homo Sapiens
agatagaagacaggataaaagcaggaaggggagccgggtgcggtgacttacgcctgtaatcccagcagtttgggaggccgaggcaggcggatcacctgaggtcgggatttcgagaccagcctgaccaacacggagaaaccccgtctctactaaaaataccaaattagccgggcgtggtggcgcatgcctgtaatcccagctactcgggaggctgaggcaggagaatcgcttgaacccgggagctggaggttgcggtgagccaagatcatgccattgcactctagcctgggcaacaagagtgaaactccatctcaagaagagaaaagaaaaaattagccgagtgtcgtggtgcacgcctgtaatcccagctactcaggaggctgaggcagagaatcacttgaacttgggaagtggaagctgcatcattgaaccgagatcatgccactgcactccagcctgggcaacagagcgaggctccatctaaacaaaaaaaaaaaaaaaaaaaaaaaacgggaaatgaattgtcaaatgaggatatatatagggtgaggtatggaaggctcctgagtgcagcagcttctgtcctttgagtgtagtggagctggggtgcacaaccctcctgcaagtggatatgttcttgtttaccagtttggaactctgggaacccggtagtttagggatttttatggaggcttcatcacgtaggcatgatcagtttttaactcaatccctagtccttctcccctccctggaggatgggggatgtggctaaattttcaagcttctagtcatgactttgtctttctggtgaccagaccctatcctgaagctatccagcaagacaccaagagaccctcattagtacaaaagatgctcccatcacccaggaagttccaaggatttaggagctctgtgtcaggaacttggtgcagaggcaaaacacatatattttttttttattttttaagtagaaacggggtccctctgtgttgcccagggt

SEQ ID NO: 196411 - DNA, 1000 bp, Homo Sapiens
agacagggtcttgctctgcagccctggctggagtgcagtggcatgatcacagctgttttctttttttttttaatctgctgaacataatctctaattctctgccaatgatcttagttacagtatttcattatttggtggtgtgatttttttctccctctttttggctgatgaaaagttgtacccaacttccctcactaataatatgaatgatctccatttctctttattgttcattgatgcatgccactattttacagtggctaagtccatatgcttggtgttgaaagccatggagatggtgaagattttgtaatgttcattgcagatccctaatcaggatagaaactggcagggatgtcctgcaattaagctactaagacttccatagtttcttcatttgtagtaggcttttgggaaggtccttgggccttttagttgtcccaagagcactgctgaaatttgtatttgtggagagtaggggtaaggggaggtttacttatattttgaaaagatctcatgacttgacctggtggtaatcctgctgagcaaatcctattaagtctagtttgttcaggctgctataaaaaataccataaaatgggtgcttatgaacaacagaaatttatttcttatagttctagaagctgggaagtccaagatccaggcattcacaaatttggtatctggtgagggttcatttccttgttcatagatgacttttccctataaccttacatggcaaaaggggtaagggaattattttggggtctcctttataaaggcactaatcccattcacgagggtttcatctttatgacctgatcacctcccaaaggtcccatctcctgagatcatcactttgggggttaaatgccaacatgtgaatttttggggggcacattcagaccatagtacaagtgttaaaactgcaagaagaatccccacactcaaggtaacccaagtaatagactaatatgaatcaatccaacccaattgttgg

SEQ ID NO: 196412 - DNA, 1000 bp, Homo Sapiens
aactcaccaggtctggaaaggtctcgtccctctcatctctactgaagaggtctttggggcctcttgtctttcacctaaaagcctgcagcaacctggactcactctcactgtccaggcctttcctgaccacctgacccagacgccttgaggcaggatgaatcaatcgggtaaggccgaagtctcacggtgtcactccactacttaaaatccttccatggcttgcctgcagaaaaagactgactccttggaacaatgggagaggatctttagagctggctgctgctacatccctctcccttttccctattcctgtaccaaactcctaacaggcaggagggctgtggcctgggcctcacgggctggccgccgaaggcaacaggtgaccatggagcaccaaggatgcagggagctggctggagcccccccacgggacagcgagcaacacagagacaaaacatgcgccccgtggccacagaccacacatggctggtgggtgagggcagacacgtagcagtgttgccaatggtggaacgaggactcgggaatggacttcacagggtgtttctgctagatctgaaagggctttgtaataactagaaatgagggaccggcacagagggctttagttttagagacagggtctcactatgttgcccaagctagactcaaattcctggactcaggcgatcctctccccttggcctccatttggaaataattctttttattgagcccaggctgtagtgcagtggcactatcatggctcactgcagcctcaacctcttaggctcaagccatcctcccacctaagcctccagagtagctgggactataggcatgtgccaccatgcccagctaattttttttttttgtagagatggggtcttgccatgttgatcagggtggtctcaaactcctaggctcaagcaatccacctgcctcgccctcccagagttctaggattacaggtgtgagccactgcacctggccggaaagaatt

SEQ ID NO: 196413 - DNA, 1000 bp, Homo Sapiens
acagaagttttgaagccaggagaatggcctgcactaggaacatggtcatggatcctgaacaagtcatgtgctgggcgattctcatgagcctgtttggccaggagcaatcagagcccatcctagaaatgtaattggtattgattcctcccacctaaactgtataggcatggtatatacaggatgtacaggaattggtagcagtattccattcttgggatacattatgataatccagcttcaatgtcatgatatagttaaggaaactgaagctctgagaggtgaaatgattctctcaacatcacccaagttacaactccacccaaagtctatctgaatccagggcccatgctctttccactacacatgggcacctgctcatccaaccaacattatggaacacgcgcctcctggtagatgtctggtgtgttcgataatgtaataaggttcaagttctctaagaattggtcaaagaacatttcctcttctgccaggatccatgacacgaaattttctaagcaggaaaggaagtttctacattagaggaaaacttcccattaattgcctgtgtatggggaggggatgttggagtcacaaaactatctctaatgctggaaaatcaacctctcccctcctcccagcagctaaaagtgaggcagctctgcttcatatagattaggtagacagagaagatgtggtcactgttgtcactgctatctgatgaaataaaataaaaacccagaactctagaagaaaccagtatgttaaaggagcacagagtgactgatgtgattggcatatagctccctaaaccctccagaagcatctgtaaccaacaaacagggagcttgttaacctaagtaatttgtaccctgggactgatgcagtatctgagtacaagttaggtgggtatttaaagtccagatgtcttctcagcaagagtttggctgtgggttttcctgagtcttcctcttccactttggaagagctctatcatgtgcat

SEQ ID NO: 196414 - DNA, 1000 bp, Homo Sapiens
cacagactacaaatgtcatagaggatcttttcttatccccgatgtgtaaacgtaatgattctatgtctaatggactcatgtccttcagctctaggaaatgtcttctatttctcaatatgcattttctcttactgtcactactattagtcagctgtggagcatcctggattagccctctaagactctttcgttttatgatttctatctttttgtcctctttgggagatttctttgaatttatattctaatgcttttgtttaaaaatatatagagatatttttgtaaatgttttaaatatccaagggcttctaacaatgctctgatttttcttttttcattgcatcctgttcttttatgatgcaatatctcatcaaatttctcaggggtgccaactgggggtttctttcttcccttctgtttctcatctttactcttttcttgggccattcttgtttttatttttatctgtctttcgtgatgtatttttatttatttttttgagacagagtctcactctgttgcccaggctggagtgcagtggcatgatctcagctcacttcaacctctgcctcccaggttcaagtgattcttgtgcctcagcctctcaagttgctgggattacagatctgcaccactacacccagctaatttttgtatcgtgttgtattctttcttcaagtatctgatcatcctcagttgtctttaattcagaatgagacaataaggtgctaattggctttggggttttttgtttgtttgtttgcttgttttttgcacctggaatgagcttactagtggtgatttaaccttgtggtgatttagcggttaactgctgcatgatctcaaacagcactctgtgctttagtttcttcctagagttgtgaatattaaatgaattaatatataatgtactaattgcagtgttttataactatttgctgcttctattacttgcattataattacttggtagggactcagctatttagctagggaattc

SEQ ID NO: 196415 - DNA, 1000 bp, Homo Sapiens
ttttattctcttagtagcaattgtgaatgggagttcactcatgatttggctctctgtttgtctgttattggtgtataggaatgcttgtgatttttgcacattgatttcgtatcctgagaatttgctgaagttgcttatcagcttaataagttttaaggggatgagacaatggggttttctaaatatacaattctgtcatctgcaaacagagataatttgacttcctctcttcctgttgaatacactttctttctttctttcttttacctgattgccctgactagaacttccaatactatattgaataggagtggtgagagagggcatccttgccttgtgccagtttacaaagggaatgcttccagcttttggccactcagtatgatattcgctatgagtttgtcataaatagcttttattattttaatgtatgttccatcaatacctagtctattgtgtgtttttatcatgaaggggtgttcaattttatcaaaggccttttctgcatctgttgagatcatcatgtggtttttgtcattggttctgcttatgtaatggattacatttattaatttacatatattgaaccagactttcatcccagggatgaaactgacttgatcgtggtggataagcttttgatgtgctgctggattcggctggccagtattttattgaggatttttgcattgatgttcatcaggaatattggcctgaaattttcttttttgttgtatctctgctaggttttggtatcaggatgatgctggtctcatataatgagttagggagaattccttctttttctattgtttggaataatttcagaaggaatggtaccagctcctcttcgtacctctggtagaattcggcagtgcatttgtctggacatgggcttgttttggttgggtaggctattaattactgcctcagtttcagaacctgttattggtctattcaggaatctgatttcttcctggtttagtcttgggagggtgta

SEQ ID NO: 196416 - DNA, 1000 bp, Homo Sapiens
ggattacaggcacctgccaccacgtccggctaatttttgtatttttagtagagacggggttttaccacgttggccaggctggaatgtttgtccttttgtgcctggcttatttcacttagtgtcatgtcctcaaggttcatccatgttgtagtatatgtctgaattccttccttttttgttttttgtttttttttagaatttccttcctctttaagggtatgtatataccacattttgtttatccatttatctactgttggacatttgggttatttcaccttttatttagctattgcataatgctcctatgaacatgatatacaagtatcagttgaagtccattcatttcttttgggtatatacctagaagtgggattgcgggatcatacccacccagcaatgagattgctgggtaattctgtttaatcctggcaggaactttaaaggtaagggtttttgcctgtgttgttcactgatagaagcccagagcctggcacagagtacacactcagtaaattcttgttgaactaactgtttaatttccctgtctaggaacctggaatctcagtctaagaaggctgtgcagcttatctgacccagcttgctctcagtagtcccattctgacttctaatgcttgctgtttcgagttcaaagccccccaaacaggccgtaatagtgtgttctagaactttgctggggagtcacatcaagctcaccattgctttatggactccaccttccttccatggccccttcaggttcccgacccctttctctttctcagaagctcctatgtcaccaacagaaatcccatttacaagttcttgcagtgcctttggctgtcatatctggtcccttttagattagtctggtgcttgctgggtttctttgcttctcttgagctcacttcccccatgtccccaaaggctccactgctccttagtgcaaaaaaatgattctctttgataggaaacagaggtgaaaaggcctgagggaatt

SEQ ID NO: 196417 - DNA, 1000 bp, Homo Sapiens
ttttttttttttttttttttgagatggagtctcactctgtcacccaggctgaagttcagtcgcgtgatctcggctcactgcaacctctgtctcttgggttcaggcaattctcgtacctcagcctcccgagtagctgggattacaggtgcccgccaccacactcggctcatttttttgtatttttagtagagacatggtttcaccatgttggccaggctggtcttgaactcctgaccaggagttccgcctgcctcggcctcccaaagtgctgggattacaggcatgagccacaccgtgcccagcctctccctcttgtcctgttttagaattttattttattttttagtcaggcttcagaagggccctggaacatggctctgtgtgatctggcccctgcctacctctgccacatctcagagccctctgtcccacagctgcatcttcctgtcctctgccactcccagctccccctgccccacctctctgttccctctgcctggagcatcctccacattctttctaggggaccctggtgcccccagctagcttaggtcctctcctattcccttcccttgacttttgcttttcttttatagcacttcattcaacaaatattttttcagtacttactatgccaggctgttgtgacatagcaattaacaaaacagacacaaagctcggtccttatagaactggtaatctaagctcattgccattgtgttgatgagtaattattcagcaattggtttgttaacttgtcttctccactagactggaagctccatgaggacagggccatatctgtctcgttcacagtaccatgaatccccagtgcatagtaggcactcagtaggttcctggggaatgaaagacattctgggattgatggctgccatttggccatctaggctctctgaggtagctgcatcttccttgggaatccagaggtcgtcatgtggaattacctcctcaagactgaattacacagcctgttagaggg

SEQ ID NO: 196418 - DNA, 1000 bp, Homo Sapiens
agtgtgagttctacaactttgttctttttcaaaattgttctgattatttgctgtcctttgaaactttagtatgaattttcctaattctaaaataaattttagtacaaatttttctatttctgcaataaaatgccactgggattttattaataatagggattccattgaacctgtatatcacttttggtaatatagacattttaacaatattgccttccaatccatgaacacagaatattgttcaatttatttgtgtcctctttaacttttttcagcaatgttttattgttttcagcaatgttttgtagtttttgacatgtctttctcctcttggttaggcttattccaaagtgttttcttctttttgatgccattacaaatggaattgttttaattttgttttggtttgctcattgttaatatacagaaatacaactcattttgtgtgttgattttatacccagtaaatttgctcaattcatttattagttttaatagtttttatttttgcagaatgtttaggttttctacatataagattatgtcatctgtgaatagaaataattttatttcttcctttccaatttggataccttttattttattttatttttttgcctgattgatctgactaggactttcaatattctattaaatagaagtgacaagtgctgggatccttaccctgctttcaatcttaaagaaaaagttttcagttttccactattgaatgtgatgttagctgtggatgtttcatataaggcctctattatgttgaggtagtttccttctatttctagtttgttgaatactttattgaaagggtattaaatgctgtcacatacttttactatatcaatgatcatgtgacttttggtcttcattctgttaatgcagtatattaatttgattgatttttacatgtcaaaacattcttgcattccatgaataaattccacttggtcatggtgtaaaattcttttaatgtgctgttgaattc

SEQ ID NO: 196419 - DNA, 1000 bp, Homo Sapiens
ggagcaaggtctaataagatattaaacattagatatagcatttttagtaaaaaaaagtctcattcttttaaaagacgtgtaagtagactttcgagacaatttcaaagggatcctcataattgacaaattgtcaatatttatgaatacactttatatacataattcaaaagcaaagtatacaattcatctagaaatataagttctgatatatttggaaaagttgtcattttttgaggtgttttgtcagttgatctcagtatagtactgtgcttaggaatacatgttgcttgactgtggatgataacatagaacaatagttggaacgttaagttccattgaagaaaacaagatgtagtaatgatcattgtctactctaaagaatatttttgaccagatgcggtggctcacgcttgtaatcccagcactttgggaggccgaggcgggcagatcattaggtcaggagttcaagaccagtctggccaacacaatgaaaccctgtctctactaaaaatacaaaaattagctgggcttagtggcgggcacctgtaatcccagctactcaggaggctgaggcaggaaaatcgattgaacctgggaggcggaggttgcagtaaggcaagatcatgccactgcacttaagcctgggtgacagagctagattccatctcaaaaaaaaaaaagaatattttcattaaaaaaactgttagatgtttgaaggatgacttaaacacaagttaggaagtggttggtttcaaactcttaaactggtatttttccaacttttttaggagcagattttttttcttgaatgagatttaagaatcataatataaagcactattagatttttataatttattactatacagtgtcatgtatataattttataatatggtattactgtaattttatagtaagttctaacttaaaacatgtaaacttaataaacaagagtaaagctgttcttgtgaacccatttaaattggttatagatttaat

SEQ ID NO: 196420 - DNA, 1000 bp, Homo Sapiens
ctgtgtaatttggtctctctctcttttttttttttagtgataatgtttgatgcctttctctttctcatttgtgtttctcctccacgagtgagtcttatactttttgtgtgttttcacgatagtagatatcatccttttgcctcatgatgtaggaatcccatatgcattttttgtagggctggtctagtgatgatgaattatctcagtttttgcttgtctgggaaaaactttatttctccttcatttttgaaggatggctctgttgggtatagtattcttagacaccagttttatttgttttcttttaacactttgaatatatcgccccattctctcctggtctgtaaggtttctgctgagaaatctgctgttagtctgatggcaatatccttatatgtgaggaactcacagaacatctgacatttttctcttgctgtttcagagttctttgtctttgacttttgacagtttgactataatgtgccttagagaagacctttttaggttgaatctatttggggatatttgagcttcctttatttggatatctatatcttttgcaagaattgggaagttttcagctattattttgttaaattggttttctgtacctatgccatcttttctcttgctggaatagcaagaatttggatatttgatcactttatggtctcccatatgccatgtaggctttcttttttcttttttattctttattcttttgttgtttttgttgttgtctcatggggttatttcaaaaggtccatcttcaagttcagaaattctcgtacttgtttttactctgttgttgaaactcaattgcatttttaaatttcatttattgaattcttcagtttcaggatttctgtttggctctttttaatgatatccatctctgttgaatttctctttcagaacataaattgttttcccgatttatttttattatctgtgttttcttctatctcactgagtttatttaataacattattttgaatt

SEQ ID NO: 196421 - DNA, 1000 bp, Homo Sapiens
tatattccctgactgtcagatgaagcattcagtaactgtccattaaattgagattaattgtactgttcaaattttcagtgtttttactaaaatttttcttgcccaagcaatcagttattaagtatgttaaaatcattcttctcatggtaggtttgtctgttattccctgtagttctgttaatttttgcttcataggtttcagattattttattctggccatatagatttaacatttgtttataccttcttggataattgaaccctgaacctttcatcattattactcaccacctttatccttaataatgctttttgtcttaaagcctttttcctaaaagtaatataggtaccctggctttattttggttagtatctgcttgctgcatctttataaatattttactttcaacatttgtgtccttaggttttagatgtttctcttacaaacagcatttagttttttttggttgttgtttttagaaatccatctcatagtctcttaaatagcaaatttagaccattaacatgtattgttattactactatatttgaacttatttttaaccattttactttgttctttctctgtatttttcctatgactttccccctcatttatttcctttatcaaagttgaacttttttgttatattccttctcccactgttcctcaccaccctaccccatccttacccctttgaacacaactaactggtttggaaatgtagtctatttctgctgttttaataattgcccttgtacttttacttcaatcttacttaacaaattctacacctattcattatattttgtttaactaactctaaatttaatatgttaacctctcctccaaacaatactttgagcacccagctcctggcttgtattctattattatttagtattttacttttattctttttttaaaccctcctatattagacattaaaattattattttatattgacagtagagttgcccacatatttacaagaatt

SEQ ID NO: 196422 - DNA, 1000 bp, Homo Sapiens
agaatttaaggagagggatctctctgttagagaacttaacattaccctaggaacagcaagagcatcatcagccccaggaaaatctacctctgatatggagaccaggcttaagaaaatcccctagaacccagagaaaaagtgcaaaacaaggaaaatggccaaagagaatatcatagatacagagatcagacaatgagaatccagagtcttgttaagtgatagaaggaaaatactaacagaacacatgtaacaggaacaacattttagaggaaacaggacaaaaacttccctaaactcaagatactacaccagaagtgggcagtactcactatgttcaggggaacaaaaagataaaaactaaaaagcatcagactgttttttgtgtgaaggaaatttgtaaggtaggagaattaggtcacttactacagcacaaattgcatgtctatctaaattgacgtttaagtgcaaaagcatggatattactcatgcagttttactggaaaaccatacagatgtttttcaggaatgtacagaatgaatcaaaggaaataactgatcgacaggaaaactgtaggaaatttgtgggctggctgtgaggcagtggctcctattatgtacaattttagtgctaagtactgtgttaatgatggctatcaaacaatatgttaacatctgaaaggaaatatgtatattgagcataataaatattttataaataacaataaatcatttgattttatgctagttcccaggttctcacttattttagtaaaagtgagtagtgaggagggagaaagaagcataaaaatgtgattctgctgaggaaattagcaggatttgatttctgaaaacggtaagactcgtgaaattttactatttcaaagtacataccaaaacaatatgattctggctgaatatgaaaagatgagaaagaatgccagggaattacagtaaaaaagtaagagatcatcataatattaatatcaaaggcactagaatt

SEQ ID NO: 196423 - DNA, 1000 bp, Homo Sapiens
ccatgctacctcttttctacagacatgcctaaaatgactgactgttgaaattttatgtaaacattgtatgtaaataccagaggtcggcatgataattcctattttgacgattagtaaaatgtttatcattaaacttagctaaaatacctggtgtttccgatgtcttaatgtgtttcatacaggcttttactaatgtgccagtgcctgttgtcagttttaatctgtgtgtgggaagaaaaggacagtgttagaacatttagtacagctataaagaatgtttaaaaagttaaattataataggaaataatccattatgaaaggacacttcagatatctccttttaaagttcatattgaaccacccgcatatttttcagattccatggatttgtttttcttacgagagctttttggggaaagtcctttgttaccaagaattttggctaagacagttgaaattcaacttggcaatcagaaataaatattgaaaaaataatttctgactactattagagtcaaaatgaagaatcttagatatattaaagagcagtctggccaggcattgtggctcacacctgcaatcccagcactttgggagactaaggcaggagcattgcttgagcccaggagtttaaaaccagcctgggcaacatagcaagacctggtctctaaagaaaaaaaaaaagaccaattccttgtttataaatgtggaaactgacctggaagttaagtgacttgtcagtaaaatggtgaatagctggttatttgtattctaccgatttttagataataaaatatgcactttaaaacattaatgaaaaatacgaagagaccatggattagtttgaatttcttctggtgactttggatgtctttttacacctaatttggtcatgtcatttattcaataagtttaatatcagatactagttttaggtactgggggaatttttttttctcgtttgtaaaccaagtatgtcctacttaggaacttaaagctt

SEQ ID NO: 196424 - DNA, 1000 bp, Homo Sapiens
gagggtgatatggtttggctgtgtgcccacccaaatctcatcttgaattgtagctccaattctcacatgttgtgggagggacaaggtgggagataattgaatcatggccgagggtctttcccaggctgttcttacgatagtgaataagtctcaggagatctgatgattttatgatggggagtttccctgcacaagctttctctctttcctgccgctatgtaagatgtgccttttaccttctgccatgattgtgaggcctccccacccacatggaactgtgagtacaataaaaacttatttttccttataaattacccagtctcaggtgtgtctttatcagcaacatgagaacagactcattcagagggctatgaagtaaaattgcccataagaatcagaccaggctgggcgcagtggctcacgcctgtaatcccaacagtttgtgaggccgaggcgggcagattacttcaggtcaggagtttgagaccagcctggtcaacatggggagaccccatctccactaaaaatacaaaaactagcagggcatggttgtgcacacctgtaatcccagctacttgggggactgaggcaagaaaatcgcttgaaccctggaggcagaggttgcagtgagccgaaatggtgccattgcactccagcctgggtgacaggtgagacccagtctgaaataataataataataataataataatcagaccaaatagttaatgcttgcctgagtatcttcttggtaaattgtctgaagtccaatttcacctggaattaccagtttataaaaatttgctttcagaaagaagatagtaactttgtgggatagatgtataaattagcttgtatgagtgattatttcacaatgtatacaaatatcaagtaatatacctaaaatatatgtaatttttattagtccattttatctcaatgaagctgaaaaataaaaagaaaaaattggctcacgcctgtaatcccaacactttgggaggc

SEQ ID NO: 196425 - DNA, 1000 bp, Homo Sapiens
caatttaaagaaatatattttggaggaggatagtaagatatgatcaagttactaagcattccctaatttatcaaaaatttaatcaatgttttcctagagtggttccgcttgagtgaggttcacctctaactcaagactgcagaggctattgatcaccttggtcttggcattaatgaattgggtgctgttctcaactggtagcatgtggcttcagctgtgaaacatcatgtggtataaaagaaaggagcataggccgggcgcagtggctcacacctgtaatctcagcactttgggaggttgaggcgggtggatcacgaggtcaggagattgagaccatcctggccaacatggtgaaaccctgtctctactaaaaatacaaaaaaaaaaaaaaaatcggctgggcatggtggcctacgcctgtagtcccagctactcaggaggctgaggcaggagaactgttggaacctgggaggtggagtttgcagtgagctgagatcgtgccactgcactccagcctgggcaacagtgcaagactccatctcaaaaaaataaaaaaattttaaaaaagaggagcatgaacctgtagtaggaatccagggtgtttttgctcctcaaagaaaggtgttatagaaacataggttgatatcactattagttttctaaaagtagaagacaaaattattcaaaagcatcattcttgggccacattgtttccttgctgatgaaagtgaataaatatcaggatgctgttggcaaaactgagaagaaaaccttacccacatacccccttactgttttcctgccatttctgcttctacctgtctcactatagctcttaagtacctaggaccttaatccctcaatacctggttctaagaaaatgatctaatgtcaggcatttacagatagatgtgaatttcaatccccatatggcacttctcccaggggtatttaaaatttaagttttagttctagttgtagcaaaagaatgtataagctt

SEQ ID NO: 196426 - DNA, 1000 bp, Homo Sapiens
catcttttcaaacaatgttatctcagttaaatttatccgtggactgtgtcttcccaggaaaaacttacaagacaatcagaaacatctcctctagaaccacctgatataggattattttgtaagagaacaacccaaggagcctctataaccccaagtgatcaaaacttaaatcaataagaaattgacatcgtgtgcttcttgatctgatgcactgagaacaacacaaagattatcattgtggcgatcttaccaaagatacaaaacctgaatttaatcagaaagaagcatcagaaaacccaaactgaggaatattcttaaaacaaacaaacaaacaaacaaaactgtcccgtactcctcaaatttattgacgggggaaaaaaaaaaagaccaaggaactgtttgattggagagactaaggaaacatgcttataaaatacaacatggcccctgggttggactgcagcctagaaagacagctgaaaattttgaataaggcctgtgtatgaagtagtattgtgtcagtgttagttttctaattttgattaattgcattatagttcgatctggatgaaatgatgaagtagctcttgtaagagttcaaaatgagaagttaaaaagtttaagttgttaaaatcagtggatagcagataatgagcaattggaagatgatacctgaaataggcagattacaaatgacgtttgtcatatttagttggatattggttgacttgagcactgatttgcaacatgtgtttggggctatcccactacacccccaagttcacactcacctatttttacttgaatatgtcacttaattcttagagaaacttcagaatagtgttgctcacagttcactttgattttacaatgtaaaatatacatataaatatttttacaaggggaaaagaaagagggaatatcatacaaacaaaaagctaacttccaaagagatagttgaatttcacaatcaattaaaacagaatcacctgggaagctt

SEQ ID NO: 196427 - DNA, 1000 bp, Homo Sapiens
gaggtaacttaatcataggggcaagtctttcctgtgctgttcttgtgatagtgaataaatctcacaagatctgatggttttaaaaataggagtttccggctgggtgtggtggctcacacctataatcccagcactttgggaggctaaggcaggcggattacgaggtcaggagattgagaccatcctggctaacatggtgaaaccccatctccactaaaaatacaaaaaaattagccaagcgtggtggtgggcgcctgtagtcccagctactcaggaggctgaggcaggagaatggtatgaacccgggaggcagagcttgcagtgagccaaggttgcaccactgcactccagcctgggcaacagagcgagactccgtctcacaaaaaaaaaaaaaaacaaaaaaccacaggagtttccctgcacagtctctctctcttttcttgctgccgtccatgtaagatgtgacttgttcctccttgccttctgccatgattgtgaggcctccccagacatgctgaactgtgattccaataaacttttttgttgtgtaaattgcccagtcttgggtatgtctttatcagcagtgtgaaaatggattaatacatataataaatggttaaaagcatagaccttgaagttaagatacagttgaattcaaatcttggctcctcaattctgttccagttatgtgagactagggcattcagactactttccagctcagaactagaaaagaccgtcaaaacatttttaacaagcttctttaagaatcggaaaatcagccaggtgtggtggctcacacctgtaatcccagcactttgggaggctaaggcaggcggatcacgaggtcaggagatcgagaccatcctggctaacacggtgaaaccctgtctctactaaaaatataaaaaattagccgggcgtggtggtgggtgcctgtagtcccagctactggggagactgaggcaggagaatggtgtgaacctgggaggcaaagctt

SEQ ID NO: 196428 - DNA, 1000 bp, Homo Sapiens
gtgaagatacgcaggacgtcctctaaagcaacttccgtgggtgccaggttgtgggctgggggcggtgctgaccttgagagagcggaggaggcgcaggcgcagcacaggtacgtgggcgggcggatcgtggtggctgcgcttgcgaggaccctgaggtagattgggtggtttcaacaggaacgcatccactgtctgagaggtgacggaggcacacgttggtgtggggagcgggaggggagagggaggggggcgggtggggggcgggagggggccaggggtgggagtgagggtgcgcgatgggagtcgactccagacccaggtgatttagagagagtaaagaccacctttggccgtcattttgtctcagcttaactgacgccctcttgttaccctctagttttcctgactcggtcccttattagcatatcctcatttccacagacctgtccgtctgttgcttctgttccctgccttagtgggtaccgtagctctaccctccttccgggcaatggaatctcatagtgagaagtttcttcactattcacaggtggcaattgaagccggaagaacatctaccaagagcagagaacccaggaagaaaattctgcctctttaatacgttccaatatggacgttttccatatagatacctatctatatagatagatgctctgggatctgacggtcctggacacctgtatggctgtgtgctgtggtctttgcctagcctgcggttcacttttgctctggccaccacctcccctcatgtacaaaccgcgtctctgctctgccagtcttggcccccgtcaggcagcggttcactccctcaccagggaagtctagatagatagatatagatagatatcgatcgatagatatagatatatatatagatagataggtagatatatggatagatatagatatttggatagatatgtagacgtctatctataaatatatcgatatatcggggttctcagtcatcccaaagaagctt

SEQ ID NO: 196429 - DNA, 1000 bp, Homo Sapiens
ccgcaatctctgcctcccgggttcaagtgattcttccacctcggcctcctgagtagctgggattacaggcgcatgccaccacgcccggctaatttttttgtatttttgtagagacagggtttcaccacattggccagcgtggtctcaatctcctgaccttgtgatccacctgcctcggcctcccagagtgctgggattacaggcgtgagccactgtgctcggccaatgtcttatttctaagtcacagctcccccacataaatttctcttagccatgtgctagatatttttcaaactctttgtgtcaataattggtaaataactgatctcaatgtattttctcccaaagttagtagctctcgaaaggtaaaaattcaaacctgttagaatactaaaggtgaccacttgtctgtctcaatacctcctttagctacagacagccgtccagagcaatggcaccttctgatggcctgccaagggaattttaagacctaaaacttattctgcctcttctttcctcttatgtaagtggttaggagttggggagaagaggaagacaagcaaatcagaatcatctcaggagctttataaaactatacatgcctttataccagatccacaccacagcaggaaagaagttaacagtgttgtttttttttttttttgagacagtctcgctgtgtcgcccaggctgaagtgcagtggcgtgatctcagctcactgcaacctctgcctccctggttcaagcaattctatgcctcagcctcccaagtagctgggattacaggtgcccaccaccatgcccggctaattttttatatttttagtagagacaggatttcaccatcttggccaggctggtcttgaactcctgacctcgtgatccaccctcctcagcctcccaaagtgttgggattacaggcatgagccgccgcgcatggctttttttaaactgactaactaatcactgctagctctgcacaggtgagtctgataagctt

SEQ ID NO: 196430 - DNA, 1000 bp, Homo Sapiens
agaacgggcagccaggtcagggaggctgatctcaatcccaatcgccagcagactcaagattctagggcctctggaagtgaccacacctctctgtacctcggtggcctcctgtgtaaaacaaggctccccctaacatccgcccatgtggggttactgtgagaattcaaggctcaatgcaaggaaagaggggaggccaggaaggccaggcatgcagagaggacaggaggcaggacctgccaacttaggggcaactccagctgtgctgtgaagtggcaggtgggtagaaacagggccagggcagcaggcaggggaagggtcacaaatggctgtccaggatgggagcagtagacatggagagaagtggaggaactgtccagtgtggccctgaggtggcaggcaggaagagcacccagcaccatgtgcgctggaccgtgggctggctgcatcttttccattttggcagctgtggggaaaagttccctgtccctgggagggtggggggcaggtgccatgccttcctagagaggagagctgctcctgcttcctgcactcaggtgggcccagcaccctcttgtcccccacccccacctcaccagtctctcttctggggcaaatgggacatcaagtgaaatgggcttctcagtgggggaccagggtgaagttcaagggagcaggccctgggctgggtgtgtctgggagcccagagatgaacctcactcaagtcgtctctctaagagttcctagttgggtggtgataaggtttggatgtatgttctctccaaatctcatgtggaaatgtgactccaacattgtaggtggaacctcatggaaggtgttggatcatggggctgggtccctcatgaatcccttggtgatgagtgagttcttgctctggtatttcccgtgagagctggttaagagtgtggcagctcccccaccccccaactctcaccatgtgacaagcctgctccccttggccttccaccatgaatggaagctt

SEQ ID NO: 196431 - DNA, 1000 bp, Homo Sapiens
attacaatgaaatggtttaaacataataacaagaaacaatacattaatttattaccccagactattcagagagaacagtaccttatctatttccattttatctacatatacaccacaggccctgttataatcaaatgagatcattttatcatttaatgtaccaagcactacttatgtccttcaacatattgccgctatgcactctgtatacaatttaactttttgtgtatggtcaagtcctaaagaatgcacaaagaaacacttctgggaattgtttctccatactgattaatcactcaaatcttggaatttattttcaggagtagggttcaaaaattttctatcagtatatgtcttaaaacctgcataattaaactatgagtccatcaatacataacatcagccacttattttaacacaaatttgaagaaggaaataacaaacatttattaattatatgcccacaaacttcgcagagtggggacagaaagatactggtaattacactgcactgtgactggatctaaattagaagcttgactggaatgcaatcaaagcaggcttagggaagggccaatgcatccaagtcagtattttttccaaacctggataggaactggtaactgtgaggtaagaaaaagaatgagtcaaagattctcaaagcaagcttgcatttgggaaagtagtttcaagaagacagagaaaagagaggataggctggtttggggagaaggcagatgataagttctaaacatttgttcattcattccaactctactgacaacctactctaggcctgccacagcaggcaggtaaaggtttggttcaaagcttgggagaggaatgggctaaagacatggacttggaaaccaacggcatatgttatggactgaatgtttgtgttccccccaaaattcttatgttaaaatcccaaccaccaatatgatggtattagcaggcaggccttttcgggggtgattttgccatgaaggtgaagctt

SEQ ID NO: 196432 - DNA, 1000 bp, Homo Sapiens
ccatagtattccatttatctttagagactcagaacaacctcaacactgtaaacgtgccaacatgtaaaaaaaaaaaattgcagtagaagtcactcagtcagctagccaagcagcgttcactatgtatcagacacattactaggtgttaggaacaattaattgagtaaaataacccattttcttaagaagttctgactaagcagcaggaatggcatgaaagcagactgctataccatatgatagcggaaatacatacaaagtaaaagggcctgcataaagtaggtaagtacttcttctgggattagagcagaagtgccagggaaagtttcctagagcaagtaacataagaattaggtgttgaaggaagagtaaatgtttattcaggtgggagagatgtgctatgtttaaaaactctgatgtaggcaagggggcctgaaactgctaagtttgggattcagtttagctggttaaaaaaaaaaaaaaaaaaaaggtacagggtaagtggaagatacagaagcaacagagaggtagccagagtacagatcacaaagggtcttgtatatcattcagggaagaagtcccattagatatgcatttcagaaaggtcactggttagagtgcagaacatgatttgaaggcgagaccagaggcaggaagtctattatgatttgaatgtgtttttaaacgtgctcattttaaaaacacctaattcatcattcccttcttgaaagagtttcttcacagtttcctagatactcttggttctttttctccttcactggctacatttttcagtctcttttacttattcttcttcatcttcctaaaatcgaaattttagtgtgtcttgaggccctcagaataagataacatgattaatcatccccatctccccaaccctgaaaacaagcataacacctggacatactaccaaaaagccctatctgaagatattagagagtaaatggaaacagactctgatggagggtccaccaagctt

SEQ ID NO: 196433 - DNA, 1000 bp, Homo Sapiens
cattttagcggtgaggcaactgaagcccagagaggttaaataacttgcccaaagcctcacagcaaagttgaggaagtaaaactgggcctggaatccactcgtctgatcccctggcacatgacgcaaggcttgaccttagagggactcgtttccagacagagctctggcaaaggagtgtcttgggcagcttaggagtagaagaggaaaggtgaatggaaaccaggccttgggttatgagctgcgcaggattttccagcatctcagatgcaggcgtttagagaaagagatataatggagcaggccctactcagagccacgaaaaggaatgaggacagttggctctaactcaaaacaaaaatagggtaaacccaatcagtcaagcgcagcaacctgctccgtggcgatctgtgactcatcagaagctgaggctctcaccaggactttctaatgagcttcgctgttggctacgaccgcggtcacttcacttcagccctactcctggcctggggaaatgggcaggccccctagtagctcggggtggggagacgggtggagaggaaggaggggcgaaaagggaaggcgcgaaatctacaaatgtttaagccagctggaactccgatgcctctttgccttttagggaaattgactcgactcggaactcgaggacctttcacaagagaccactgggttagggggcagagctggtaatagaatccagcgctccgaaccctgaatcatgtcctctttttgctgctgaggctcaggccacagcaccccaaattatgactgtagaataccaaaatatgctatcccaaaatacacttgtttggcacatttcaagctggttattctgagaaactgcagacacgggagtagctctgaaaagctgtccttttgtaaagcaaatttacatctataaaggaagtccacatagtaaaagtatctgtgtcaggaaggcagctgctcagagaacttttattacatgagagactttacataa

SEQ ID NO: 196434 - DNA, 1000 bp, Homo Sapiens
tgtcatgtgaaaagatgaccagggtatgcctccaataatgtggcaaaactgtattattaagagagatgacaggcagttaattgatttttaaaaatactaggtgcttgtgatatttatggtattttttgtctcgttttctttattgtgattgaatccaatttaaattaaaatatgaaatacttaacaattataaaatcaatatttgctgtgggaaacagaagagatctacagtagtatttacagctcttcaatttgtttataaaggaggcaatataacaattttaacatacttttaaaccttttgcctctagaagatatatcaattagcagacaatattcaaggaaatcagtgctgcatagatatttttggtctactaaggtacaatttatagtacagaaccgacacaatactgcagcagaaaccataagttacaaagtggtaactctcacagacagtaattagaactaccctgtcctatatgcccctccagatatagcaacttacattctttgagaaaacaggttctttacctgactaggatacttcactggtatttccaaactaaaacactttcccactcaacactggtttttaaaaaccattagaacttttagttttataagttgcaattaatgagtattcctttaaaaagaaactattttcaaagataatgtattttacttgttgaattcacttatagtgcatttgatttcaagcagagagataattaccaaatatagcaattaaaaatttttaaatattcaattcattaaataattgctacacatcaatcttctaaaaggcctcagactagacactgaggggaaaagaacattgaccaaagtatcaacttcactcttcagaagctcacctaatgcaacagtatacatcattgttacacaatttacagatactcagttattccatcaagcagaacattgcagaattaagttcaactattgaaatctacatccaggccgagcatggtggctcaagctt

SEQ ID NO: 196435 - DNA, 1000 bp, Homo Sapiens
agatatgaacaccctgaagtctcgatggcctgtaatctcacgaccctttctttcaacctttcaggaaacttgaagtcatttacttttggcccctcacagtgggggcgccaactcagacacattcatgggttggggagttcccttaaatgaatgaagtagcagagttttagaccacagggagtggaagacacctgtaagctggagagcccatttcccacttagcagggaagctgcagggatgttcctgctgatttttgccatgtgctttgggttgctggaagaggcagaatataacatttcctgatcttcccatcactacgtaggccactgaataaaaagtgggcttctgtttgtgacctctgtcttaaatacgtcagtggaaataaataatgagaaagtagcttgttttgtccatactccccttcaacctctctatctccagagcttttatctctcatgtgggataacttaagttcccaggctattcttgtagaatcggaaacaggctgttaacaggaggacataagccaatcccctgccccactgttactgcaattttaaagaattacccttttgtagaacactttagtgataacaaaagtaagaatggttataaatgttaaaatgacttcagtgaaatgtttcttgggtcactttagagggcttttgtgttaagggggaaagttataatgtatcataaaacccatacttgcagcagaatcctggattatgttgtatgatggaatgcagatgactgctatagagtgggtcacagccttctccttcctcttttctcacacagctttcttccttcactggtctctgaaaaagggatgaaaggactgagagagttgggcaggatggaaagaagagagcaagatgcagggtgaccaagagagttctattgggtggaagaatgagcaaggcccggaacttctcaagtgccttgaataggagaggataagtgatttcatttaacttttgaaataatttcaagctt

SEQ ID NO: 196436 - DNA, 1000 bp, Homo Sapiens
gaatccaggcacgttaagactgagtcaccaagactttacttagatgttctcagtgttgagagactccttcatcaatggctgggcaggaagccttttatttctgccttgccacctcccaaattatttcctccaggttcatccatttctctagagaaggatcctgtggcggagtgaaggacaatggaggggtgtgtgtgtttcaatttattattgctaattattacaatgaacatcttatgactacttagttgtaagttgtgtgtcttatgactacttagttggaggtgtgtttgtattccaggggtgcatcaacatgtgtgcctagtactctgaagcacagagacaaggttgggaaagtgtcttggaatttcccgtttaaacacctctggctgaggttggtatccccaagtcagtctctgcaatgggaacctccttcctggccttccttagaattggggatggtggtggagaggtttagtacatgctaaacctatctgttgagtaacggaattctattgttgcttaaagcgccacctaattagtcataagacattcattataacaattagcaataataaactgaagttaaagcaattgaaatatggaaaaaatgatataagcctataattaaatatattgagaagaaaataaagtaaattacctctaggggaacctactcatcccacgttgctcagaactgttctggttttacaactggaaatcccaagtctgggaaccctctcaggcccaagcaaaccagcgcagctgtttgctctaccctatctcttcatgtttgataaacatactgaattatagtagaaaatgttaatccagttattttccttctagccagcaatattcaccattggatgctaaataatgacagttctttaaaaagagaagcagaaatgtccagggaatacaactggagtgtcagtgcagaaatgatagtaattactggggaggagagcatcacatgaagccaagaaagctgaagctt

SEQ ID NO: 196437 - DNA, 1000 bp, Homo Sapiens
ttttgtagagatggggtcttgctacgttgcccaggctagtctcaaactcctggcctcaagccatcctcccgccttggcctcccaaagtgctgggattataggcatgatccaccgtgcctggccagcccttccctttgctgagggggacagcaaagctgagagctgggaagagatttttcagagccacagctctgaagctccctaggctccagttcttaaccctctgagtgcagtcccagctatgaccagcagggtgggcgagtggaattcggtggaattagtggatttccaggtgactcagcgcctctcaacttctctctcttacttccttctccattactcccgaataaatgcttatcagcaaactggtttttactgagaggcccacagctccccattctccacaagtcaagatcctcacgtggtctccctggggaaggggagagttatggacctagagaagaactttcagagtccctccaagggagacagcagagtggggtcctgttggcctccacccttttggggcacgcagatagtcaatatcttcagcgtccccaaggcctgcaagggtggggccccatatctggaagtcccaggcccagctgggagttggtcaagtctgggctgtgggggcagggagtgctgggggatggttatccccttttctgccctctctcctggggcaactccaaattttcagccctcattgactttcccaggactgctgtccccaagtcttcactcatgtctctctgtgactccttcccattaggtactcgcagcaacctgaccccccaactttttcagtttccagcctggggacttgtggtggttaagagcatgagctgagttcaaatcccagtcctgtcagttaacagctgtgtgatattgggcaagtcactctctgggtctcagttttctcatctgtcaagtagggtgatactagttcccaccccattttgaaagctctcatgtgaagagacgacagagcaagctt

SEQ ID NO: 196438 - DNA, 1000 bp, Homo Sapiens
gtcaattcagcaagtctctaagtatattctgcactattagtttaattcagagtgtagtcttaaaagtatactttaagtgtgtagacatacacgattttcatttctcacagtaactcatatatgagaagagccaaactcatagggacagccagacaggggtgctccacctgctacttggcccaggtgctgccgccacagtgctgcccttgaattccaaaacccagtcagggcgaaatgtcctgtgttgagtcatttagaaggtaaatcactagtagcacatatccaataataacgtgatcaggactgtgcacagccagcctcattagcatatacttttattctagtcatgactagcacaattaattacacaagttgtgactcagacttccaatttccatggtgctatctattaatttcaaattaatgttctgccctttgtcaatgagctcagggtactttatgctaagagaataaacataagtacataatgtaagaacatttttggcttccaaagttttttttatttttttaatgaatgagaaatgaagccagtttccagcccaaatttaaatatgaaagctaagtggcactagaaacaatgatgctctaagttgcactagaaagaatgatgctaagaagaaacagtctaggagggtaagaggggtgggtgttacgagacgcctatcaccagccagcctctgtcaattaccagctttttgatcttgagtaagctggtccaacgctctacactccaacttcattctatgttagtcagagataaacatgaatggcctccctcttcatggatcttttgtaagcatcttgtgagataatggatgttctggaaccctccaatgggagttgaggagtgcctcataaaatgattatttacaaagctgcagggaggaggtagggaatgcccaaaggcatggtgctttgttgtcaggagtgagggcatggaggatgtattagtccattttcatactgctatgaagaaata

SEQ ID NO: 196439 - DNA, 1000 bp, Homo Sapiens
cttggtccttcctggctctggcccatctgtttctaacttagttccctggccctgactgccccagatctgcccctgagttttcttcctctcactgattcttgctcataaactcttcccatggcttgattcttccagccctgttgcttggcaccagctccccaggcattttctctagcagctcagggtctgaggagaggtcttttaggactgccatccatgtgctacctcccctgaccaggctggaggagagggacctcacctcagtagtcttgggtgatgctgaggcagcaacgtacttcgtacacacacattggcattcttctgtttattcatttaacagatgtttctaggccataagctgtgtgccctgaggtccttgggctgtgataacattggggaatgaagcagccctctgatgtcttgagacttctcatgttgaggatagccaccaccatgccctggaagctctcaccactctaactagaaatgcttaactcacatcctctctaaatagagtacaggcagctgcacactgaaactgagattgaagaggatacagtgaaacagcagggtgagttctaggcaaactgtggccattgcagactttctgttttcctcagcctccttgctgacaccctaccaccctcaatggctgccctcctcttttttggaggaatacctaatgcttgcagaatcgtcaggcctctctcccttcttcttccttctctaatcaaaagagggaatcccctgaattatttccattataatgtgtctatgttttagtcaatgcactgaaatgtaagcactgtgactaacggtggactttgtttttgaacatgaaccaggtaagagagagttgggaggtggggaagagagtttctgcttttgaaactcagtaatgtttattaaaaagcccagccctcaacatatacttgcttttgataattttctttaccttggcagggagagagaaagggagggagattgagttgaaaagctt

SEQ ID NO: 196440 - DNA, 1000 bp, Homo Sapiens
gaatataagtttcaaaaaggccagtaatgctattaaaagcaagcaaaatattaatgcggcaagtacatattttgcctttaaaaatataatcttatctttaagctatagtataatactgacaaaaattcctgtacagaatgtaatacatcatataaaaccacaggactgagaaatcctgttagtccaaataactcattttatagaggagaaaactgaggcctgagaatttaagtaacctgtccaaggaaatcagctagttagtgacaaaactaggattaaactagatgtgaggcctcatctctgctgcaatatttgctttctattttttgtaaggttaaaaaagaacaatcacaatttccagccacaatttctaattcaaatagcaccctagtaagattaatcaagttcttacatgcagtgcactgtgctgggtggtaagtttcctaggagataagaaatcaagaggctaggatgagaggaagtgatagtaatgtcaaagacaactaaaattaaataagtacaagtaaaattcaaaaacagaagcaggtacacttgtctcaattattaaattagaagccttgagttaacagcaaaatttgtaagtatgtattggacatttaaggacagcatgatataatctttcaggaaacccaagttaagtgttccacatgataaaaagtaccttatgaccatggattccctgttatccagagtatttctcatccatcatacacagtaaaatacagaaaattctaagtttctctgactgatttatgtttgagaacaaaccattttcatggaagttattagtttaaaagtatttgtttgtaatatttggcaatattcttattcattttaaaaatagaaaaattgattagctgaattaggtatatttgaaaaacagacttcagtcttgtaacagtaaaataaagaatgtaatctaatttttatgaacattcacaaaaaggaatactctgtagtcattaaaaagaataagctt

SEQ ID NO: 196441 - DNA, 1000 bp, Homo Sapiens
tgactttcctctaaagtaggtcataagaccctcattccagaggtgccctctatatagctggaagaaagaaatgtcctcctctctgaaaacacagggacacagagaagaatgtgagtaatcagatcttgctaaattccccccagtttatggccattaaattatactcccttagtccaattatacttctgccccactgttcactgttcatcacacctaaatataaaatagaaagctttccctgtgtcttcaggtcttcctttctgaaggctcccatgtcatgtaaaattgatattaaatacattagtatgcttttttctagttaatgtcttttatcataggtgcctcagccatgaaccttgcaatgggtgaggaaaggtattagtttttcttccctatagtcccttaccctttccacaaaataaaggtctaactcccgtttttctttccctctgccttctggaccagacatttgttttgtttttctaatataaaattatcccagtgtgtctttatggagttttcagtagtgaaagagatgaatgtcaatgagttctagatctgcctaaagtatccattgttcaaacaaatgtcatccactttgcctccctcaatcaataattttacctaagacgtgttttcccattagagcaacatctaacccacacctggactcttatatgttcttcccattaatgtgagtcacacttctggtctcaccccacttctcattttcccggcactaacaaaagaggagtgactcatctgagtgttgagtttggggaaaggaagtaggtatggctgtcttagcccagtgggcttttctcttctgggatttgcctaactgcaaaggcttgcattctggcctgatctcctctctgtgaaggtctattagggtaagctctgccactgcaaggaagtcctatagttttcggctcttttggtggtttagggagtgattaagtggggagctggggggttggagggatgaagggataagctt

SEQ ID NO: 196442 - DNA, 1000 bp, Homo Sapiens
aagcacatgcattttcactgggaagttttaagaatacattctaaatattcaggagtccattaagtggcagaatattttacatctgccccgttcctaaacagtaaaatgaaaatttcattgttctgctttagaaattaaatttgaccactttgaaattaaaggtgcaatattaaccatgtaactgttaaacattttacatttttcagaaaatccttaagcatttattcaaaataaaggtaacaaacatctaccgttttgtgtaaaataactatcagtgacttaatttgacagcgacatttaagtttaccatcagtggtagtttgaactatctacacctatagatagtaattagatacattctgacagttttccaggaagagcaaaccacagacacttagtcatgaactgaaaagccaaagcattagattcttatatcacatgcaaaatgttctcaattgtgagcattttactatgcttagaaagttatttacaatatatggatctctttggtagcatgttctacaggaagaactgcttcatgataacagtttgtgggggccaggtgtggaggttcatgcctgtcattccagcactttgggaggctgaggcaggaggatcacatgaggtaaggagtttgagaccagcctggccaacatggtgaaatcccatctctactaaaaatacaaaaattagccaggcatggtgacacacatctttagtcccagctacgtgtgaggctgaggcaggagaattgcttaagccgaggaggcagaggttgcagtgagccaagatcgcgccactgcactccagcctgggtgacagagtgagacccagtctcaaaaaacaaaaacaaaaacagtttgtgagagaaaatcagagtctgtccttaaactcactggttttcctttgctaatattatggcttctcttttaaaatagccaaaggtttcaaccagtctagctgctgccaccttcttattaaactttaataagctaagctt

SEQ ID NO: 196443 - DNA, 1000 bp, Homo Sapiens
agatccacctgcctaagcctcctaaagtgctagaattacaggtgtgagccaccactcctggcttggattttggtgttatttatatgtgctgtcaatatattctccatctgaagactgctttttcactttattggtttcctttgtggaacaaaaatccttgattttgatgaagtctaattatggtcagtgctttttatgtcttgtttaagaaacatttgcctaaagttttgaagattttttttttttttttttgagatggagtctcactctgtcgcctacgctggagtgcaggggcacaatcttggctcactgcaacctccgcctcccggattcaagtcaagcaattctcctgcctcagcctcctgagtagctgggattgcagacgtgtgccaccacacccggctaatttttgtatttttagtagagatggggtttcaccatgttggtcaggctggtcttgaactcctgacctcgtgatccacctgcctcggccacccaaagtgctgggattacaggagtgagccaccgcgcccagctcccccttttttttaagacggagtttcactcttgttgaccaggctggagttcaatgatggcgatctcagctcactgcaaccttcatctcctgggttcaagtgatcctcctgcctcagactcctgagtagttgggattacaggcacatgccaccatggcccggctaatttttatttttttttcgtagagacggggttttaccacattggccaggctggtctcgaactcctgaccctcaggtgatccgcccacctcggcttcccaaagtgttgcggttacaggcatgagccttttttacaggcatccagccctgttttcttttttttagagacagagtctcactatgttgcccagtctggtcttgaacacctgggcttaagcaaccctcctgcctcagcctcccaaagagctaggattacaggcatgagccatggtgcctgcgcctactttttttcctagaagctt

SEQ ID NO: 196444 - DNA, 1000 bp, Homo Sapiens
ttataaactgctggtgggaatgtagaatggtacagctgctttgtgaacacagactggcagttctcaaatggttaaacataattatcacatgatccagcacttgcactcctaggcatatacccaagaaaaatggaaacataagtccacacaaaaatgtgtacatgaatattcatgagtattactcatggtagtcccgcaaagtacatggtgcacagctgcctctttctcatcctttagagctttccttaaaagtcagctcctcagacaggttgctcctgactgacctccaccccactatatatcatgccatgtgttttctttgaacagcagtcatcacaatccctaaacatcctgcttatttatttgtttacttgtttattaaattgtgatgtctttggattccctgtccacctcatttgattgttagatctttgaaggcagatatcccatctgtcctgacttttttttttttgagacagttttgcttttgttgcctaggctggagtgcaatggcgcgatctcagctcaccgcaacatctgcctcctgggttcaagcaattctcccgcctcagcctcccaagtaggtgggattataggcatgtaccaccatgcccagctaattttgtatttttagcagagacagggcttcaccatgctggccaggctggtctcgaactcctgacctcaggtgatccacccgcctcggcctcccaaagtgctgggattacaggtgtgagccactgcccctggccttgtcctgactcttttattgcatgaatctgcagcgcccagccaggtgctgggcacataataggtgctcattaaatatttgttgggtgactgagtgaactgcagaaaacttagttggctctgtgtctgtctcttcattagtctagaattcagtttcttctctattttttgactgattgtgacagcttgagttttggatgaagtgccaacctctaatttttattcccttggctactgtaaactaaagctt

SEQ ID NO: 196445 - DNA, 1000 bp, Homo Sapiens
aacaagtaggagaaagaagttccaagctcgaatataaggcttttgaattaacccaatcaaagataaagataaaaaacattttaacaaatgaacaaagcctccaagaaatttgggattatgttaaatggccaaacctaagaataattgatgctcctaaggaagaagagaaatctgaaagtttggaagacttatttgaggaaataattgaagaatctcttctggccctgctagagatatacacatccaaatacaagaatctcaaagaactcttgggaaattcatcactaaaaaatcattacctgggttgatcatcatcaggttatctaaagtcaattacactcctgtcctactgtttcaactattcagatcagacaggcacctattttcatctataggaacgtagatgttccaagtagggaggaactgtgactctgcctctcaaggcaaaggaaataatcttaagagctgagagacaaaagagtcaagtaacatataaggaaaacccatcagattaacagcagatttttcagcagaaacattacaagccagaaggattggggtcctatctttagtctccttaaacaaattaattgttagccaaaaattttatatccaacaaaaccaaggttcataaatgaggaagagatagtctttttcacacaaagaaatgctgagataattcaccactaccaaatcagcactacatgaaatgctaaaagaagttatatatgttgaaatggaacctcaaatacatcaaaatataacccatttacagcataaatttcacaggtcctatgaaacaacagattaaacaaggtatttaggcaacaactaatatgatgaatagaacagtattcacatctcactactaacattgaatgtaaatggccaaaatgccccaattaaaagatacagaatggcaaaatggctaaaaattcacctatcaagtatctgctgtcttctagagagtcacctaacacacaaagactcacagaagctt

SEQ ID NO: 196446 - DNA, 1000 bp, Homo Sapiens
ttttcacacctagtctgctctccataagtaacagaatatcaacatgccagataattcaggtaatgaagatggatgagtttctcctctgggtttaagtggttcgtattatctaagttagttcatgtaagtgtacttggctaggtatgttgtggggaggactggaggttgcggaagagagttgaaaaacaaaaaaattagtaagacattgggcttccttccagaggcacacaactcctggggaagacagacaccatgggttgtttctatgaaacttggagtgcaaatgctgcaatggaggtgtgagtgcgtgccacagaagagaggcacgcaaagggcttagcggggacttccctcctgtcccagttaggatgaattagcctgtttgggaagagactacataggactgagaggtctctgggttgcctctggaccatagtatcccatgaaaagaattctaagccatgatttggggaggaggacactgcactgtatttggacccaaaacagaccaaaacctggcagaccagagacatcttaatggtccactgtacccgctggattcttctcaccctcggtctagagtcctagactgagctctgatccagcttggtcacaaatccggaaaacactatttatatttcatattttatttgggtttaaagacatgggtctctataaaattgaaaggaagcataaagaagcagcggaaatcaccacccccaacccccgctattgaacttgtacaataccctttacctctccaggcctcagttttcccaactataagccagtgacacctcagatggtttccaccattgtagtgttacgttggataaataacatatatggaggttaagcagaagactagaggaacattggtttgagtatatgagaaggtaactttgggttttggttaatgagatgaaggcaatctgcttggctggcatggaaggcactggtgcgcagttcataggatgttcattatcagaggtgcaagctt

SEQ ID NO: 196447 - DNA, 1000 bp, Homo Sapiens
gcttttaaaaattgatagcaattttatattctttcctatatcatttgtgttcgtgtctaatctctgctaccagactgaaagccccttgaaggcaaagcctacatcttctttgatctctcacagaattgaataaggacatagaccatagactcagggtagcacatctcattcaacctcagccatgtagacctttgactcaagacctcaccattcaggggaggaaaaattagagttctgtgggtgtttggtatatctctagtttgccagagaaatacatagaattaacactacaggaatagggaaaactatgggaatgctgtggcaataggcaaaagggggttctattatgcagcctccagaattcctgaatctatctggagaaagaaaaatgctcacccttgcttcctgctttcattttcccacatctgctttttatcatagtcagtctcctcgctggctgttcccaccacactcaacaaaaactgagcacctactgtatgccaggcaatgtcctcagtgctagagatacagagatgagtgagatgagcacctcctgtgtaccctctctgctatgatcctgagggtagaccacccttgaccatgtcagcagtcgtacagtgtaatgtgctcaggagcacgcacatgcaggagcacgcacaggagtcttcggcgctagccttgtctttgaaagtcttttacaccctatgctctttagaatgcctttggatcgtacagtccatcattcctactcgatatgtggcctgggatcagggttgtcttcgcagttattttttacttacaaggatgttgtagctgtgaagtagaaaaattctcacctccctttcatatggtcagattctcctgtttttatcttccttagactgtgggtgcagctgacttttctgtggtttgttgggaacctgtgtttgtaagcctgtctactctcatgtgtctgttaagtttgaatcctaacaacactaaaaccttttcattaaagctt

SEQ ID NO: 196448 - DNA, 1000 bp, Homo Sapiens
gggactcagaaatatatggattttacttatgtttgtatataagttttattatgaccataaaaataatcctgtagtcaacaacaatttaattgtacatttaaaaataactaaaactgtagaattgaattatttgtaatacaaagaataaatgctagaggtaatggagaccgcatttagtctaatgcgattgttatatattgtgtgtccgtatcaaaatatgccacatatggcataatatgtacacatattaggtatccacaaaaattaagtcaaatacatttaaatgagaaaataaaaataaaaatttagcctatgggaacaatattctttaacttaatggcaattaaaactcactggcaaaaaaaatcactagagatgtcagtccattatcttaccaaatagtgtatttttaccatcttttacctacacccttgagtaaggtggaataggttaaagttactggcataataacacttcattgaattcatgatagtatttaacatgttaaaactgtttggttgaaaagttcacatgcaatttataatttaaaaatatgctacatatatttcataaaaatacaataaatcatactaaactttaactaaaattaagaatgtttttctttcataataatgcagaatattaatctgaacatctacctcatgcatcactcgatattataagttaaccataaagatcctctctacttaaattttcatcatgcatcttacatttttaatgtccttacctttccatagaaaaggtcataaataatgcctcttcatatttgtaatgctttttcaaaatactcttctgtactttaaagacatattttctgatcagtcgtttgacagtaattacacttcttatttagtatgaacgctctgaatttgagtacgatgtgagcaggtattaatggctttttgtctatatttgttcactttttctcaagcataaatgctttcctatgcattaaggtgtgagcattagttcaaagctt

SEQ ID NO: 196449 - DNA, 1000 bp, Homo Sapiens
atggtctcgatctcctgacctcgttatctgcccacctcggcctcccaaagcgctgggattacagggatgagcccactgcccccggcctaatctttcttttgagtcaggcagttcctatgtatagaattgggtttgtttgttttaaaggagaaccagctattgaatacttaggatttataaatcccattcagctagctgtgaaatcagcttcaaagtaacagcagaatcttaagaagcacaaactagaaaggaaaaccgccaaagttgtaactcagttgtttctgacctctttttactattggtgccatgctttgatttataaagccatcagccaaagtcctttagtgacagattagcatattgtttaaaataggaggttgtggggaaattgttgtctaaatgaagtctagtataaatagctacactttatttagtaaaatgtgccattttgctgctttatagatcatgctaagttctttttttttttttttttttttgagacaaagtcttgctcttttgcccaggctagagtgtagtggtgcagtctcggttcactgcaacctccgcctcccaggttcaagtgattgtcctgctgtggcctccgagtagctggggttacaggtgctcaccaccatgcctggtgaatttgtattttgaatttgaatacaaattttgaatttgtatttttatggtagagatggggtttcaccatgttggccaggctggtctcgaactcctgacctcaggtgatccacctgcctcggcctcccaaagcgctggaattataggcgtgagccacggcgctcggctggatcatgctaagttcttaaagcaggcaagagttctgagtgtctagcccaatgtgggccattcaaatactcttccagtcagatttgagtctagagctgtcagttcttcacattttggtacatagttttacctacgaatgggaatctactgacattttctcatgccttctgcttctggcatactgaagctt

SEQ ID NO: 196450 - DNA, 1000 bp, Homo Sapiens
tcaaataacatcactaaatataagcctgaaattagacagaaaaatcttttgccagaatttgattttaaaaccataatttatgttggaaatcaagtggtaaaaggtgaataatcctgcttgcctcattcagttgaataaggaacagcatctgataaagaaaaactggttatggaagtataaaatacatctgaatgttaaacatttatttcaattagaatatctgaacccaccatctgtggtggccatcttgctaagggcacatgtacctaacaaatctcttaagaggcattcccagtctgcttgaataagctattgtataagaaaacttggagtgaccactttggcctcacatttccttcgctccacatcctgtggcacaaagcatgaactcagcaggctggggtgcagggctgcctgctgccttgtgataatcccctctcccagtaggggcctccactgatgcatggctaagaacatgcttcctcttttgcttgcaccccagtggggtttccatttctaacttgggcccaaatccagactgctaaggaaggtggaaaagtcagaaagctccagatgctgtcagagatatttctgagtcagtttctaaacaataatttattagaaagagtacaggtataatgtgaaaaccagcaaggctggtaattttggagagattcttttcctcccacccccaagcagatctagggtctaactaccacctgttcaacagaagctggctgtttgccttactttccttcagggagccactgactaaggatctccaccagcatgaacctaatgcctcccgacagccttccctagccaagagggacctgggttgagtgcaccagttactggtcacaggatatgcagtccacagaaagactcctgtggtgcaaccagctgaaagccaaccagagaaaatggagagtgtacatttgtcctgacacagctttgctcctgttggctgccaattcactccatgtctggggccaagctt

SEQ ID NO: 196451 - DNA, 1000 bp, Homo Sapiens
gtcactgtggtttgagaatcctcccagttctctcttttgctcttatttccctgcatgagtgctcacaggataggccggagggcgtggggtgctgtttccccccacactcgtgttccaggcatggggagtctcagagcagagcagcacccacttgcttgcttgctggaagcccagggcttctctccctgggcctcatttcctcatctgtcaaatggggctgataacctctgtcctgtaattgctataggagtcaaggcccagaatggcaccttgcctggcctggctccaggggaggagcaccccggatggcagagaaatactctttgaattttagtggtcagattttcatccctctgaggcatggggtgagtgtggggtgtgtggaaggttctgggggtcaatctctctccagaggaaacctccaggggtttgatcccagggagtccacaggatccagggtagatgtcccctcctggcagaactgtgtgtgtggggtgctcataaggtgactgtaatggaaacataaattgtcctgcttcaaggcagccacttcaaaatgttgtaataaccattataaacccattctctgcacacccactaataaataccttagtcccacgtcacatttcctggtatctctaaagccaccaggagaaggcaggaaggccataaaagaaacacaaaaacacagttgcagatgagcctaaaacccatttctttgaagcttaattgatgggaaaacttctggccctagagaacttaaaggcctatcgtacagatatttgattaagtgtcctcatatcacagaccaagctaaactggaaatcattatgcaataattggaaatacactaataaaatgaggatgtgggtttgctcaggacataaaaaggaataaaataattcactcagataactcaacaaaaatgagcaggctgcccccgagacagctagaagagagcctcctgagacagtgcctggccctctattgtcaaaagctt

SEQ ID NO: 196452 - DNA, 1000 bp, Homo Sapiens
cgcagtggctcacgcctacaatcccagcactttggtaggccaaggcgggcggatcacctaaggtcaggagttcgagaccagcctggccaacatggcaaaacccagtctccaataaaaatataaaaaattagccgggtgtggtggcatgcacctgtagtcccagctactcaggaggctgaggcacgagaattgcttgaacccaggaggcagaggttgcagtgagctgaaattgcgccactgcactccagcctgggcgacagagcgagactctacgtcaaaaagaaaaaaaaaaaaaaaatcactcaccatacatttcttatcctgaatctgaattaacagagctggtgagtaaatattcaaagcatgtcgcttaccagttgaatcgcttggtcccgagtgttaagcctcagccttggtaaagatgtcatcgctgaagtctcattaccgacccatcaagcccagatttccaccatgaaccatctccagagaccttcgttccgccacgtcagggtcagctaatgctcagcaaattatccacttagtaaattcatttcaccgtcaacagatagtggtgcagactcgtgttctaacaaattaaatatcccattcggagttctgaggagtctttttaagttattcccaatcaataagaaaagcacacatgacactaaagctcctctagaaagatggctcatttctcttccaatgtcaaaaagccatgaagtaaaaaaaaaaaaaaaaaaaaaaatcagattacattaaattacttgctttttttctcctcttgctaggaagggaaaagaggagaggagaagcatggaaagaactcactcctaaatcacagattaaatccaggaagtttaagatgatccaatttcatttccctcctgcctgaagatttgatgagagcagcaagggtgtgaacctataagcagccttccatttattttcagcaaataaaaaagttttgcctgctgattcaactgccctcaccaagctt

SEQ ID NO: 196453 - DNA, 1000 bp, Homo Sapiens
tggaaggccgaggcaggcggatcgcctgaggttaggagttcgagaccagcctggccaacatggtgaaaccctgtttctactaaaaatacaaaaaaaattagccgggtgtggaggcccacgcctgtaatcccagttactcgagaggctgaggtaggagaattgcttgaacccaggaagcagagattgcagtgagccaagattgtgccacttcactccagcctgggtgacagagcaagactctgactcaaaaataaataaataattaaaaaaaaaaggcaacttgggagtggatgaagcccctggggacgggcagatgccttttgagggtctcaatgcggggtgagatcagtgtcaacaggctcgaaagtgggttgtccaggctcagctagcccccagtcctccacgagaacctcacaggggctggtctggccacacagtgtttgattgttacactgttttaccacttccctctcctgactcaatcccccacttgtccacagatcccctgtcactgaagactcgtagcagggaggggacgggggctctggcatcaccttctgactgtcaccgtccccgcctccagcctgccccagtgttgggccttgttcccaggtcctctgggctcagggtcggccaggccccttctcctgtggtgtgggcctccagccccaggagcgccaggagctctggcgccttggtcccttcctcctgtccggcgcccccagctgtactctgcctcattaggagtcgacccctcctgggaggtgtggtctctggcagggttaatgattgctcagtggaggtggagatggtgccaaagtctgctggccacatagctgcaggccgcagagggtgcccacctgtgtgccagcgcctgtccggcgcctgcctgccgcctccgtggcgaaggggacacaggtagggactatccagctcatcgggggtctctgggccagagaaatgtgggggttggggggatccctagagccaaggcaagctt

SEQ ID NO: 196454 - DNA, 1000 bp, Homo Sapiens
gaatctcttgaacccgggaggtggaggctgcagtgagccaagatcgagccactgcaccctagcctgggcaacagagcaaaaaacaaaacaaaacacaacacaacaacaacaacaacaacaaaagtaccacatggctatgaaggagaaaagactggaaagaagatgaaagccagggaacctcctccccaactcctccaggccacaagacccttcaacctggaacaaacgttgggggacaccagcagcccccaaggcacaggcatctctatacacaaagggaaatagcagagtcatagccaaagagggtttaatgcagtggctacaaggcacagcatcatgacggcaatgctgttaaatttagtgtttcctttaaacagcaggccaagaaagatgtctcacatctgtaatcccagcattttgggaggctgaggctggaggatcgcttgagctcaggagttcaagaacagcctgggcaacatagcaagacactgtctctacaaaaaccttaaaaattatccaagcatggtgatgtgcacctgtggacccagctaatctggaggcagaggtgagagaattgcttgagcccaggatttcaagaccagttgtggcaatatagtgagaacttgtctttacaaaagattttaaaaattagccaggcatggtggcacacgcctgtagtccctataatcccagcactttgggaggctgaggtgagtggatcacctgaggccaggagtttaagaccaacttggccaacatggcaaaaccccatctctacaaaaaaacacaaagccaggcgtagtggtgtgcgtctgtaatcccagctactcgggaggctgaggcacgaggacctcttgaaccctaggaggcggaggttgcagtgagccgagatcacgccaccgcactccagcctgggcaacaaagcaagaccctgtctcaaaaaaaaaaaaaaaaaaagaaagaaaaaagagaaagaaagttctaggtttgcaaagaattc

SEQ ID NO: 196455 - DNA, 1000 bp, Homo Sapiens
attagtatgccacattttctttatccatttgttgattgatgggcatttgagctggttctctatttttgcatttgtgaattgtgctgctataaacgtgtgtggaagtgtctcttttgtataatgacttcttttcctctgggtagatacccaggagtggttttgctggatcaaatggtagatctacttttagtcctttaaggaatctccccgctgttctccatagtggttgtactagtttccattcccaccagcagtgtaaagtggtccctttcaccacatccacaccaacatgtagtatgttttgattttttgattatggccattcttgcaggagtaagagggtattatattatagttttaatttgcatttctctgataattagtgatgtggagtctttcttcatatgtttgttggccatttctgtattttcttttgacaattgtctattcatgtccttagcaccgcccccccccccccttttttttttttttttttgagacagcgtcttgctctgtcgcccaggctggagtgcaatggcatgatctcggccccctgcaacctccacctcccgagttcaagcaattctcctgcctcagcctcctgagtagctgggattacaggtacccactgccaagcccagctaatttttgtatttttagtagagacggggtttcattatgttggccaggatggtctcaaactattcacctcaggtgatccacccgccttgggctcccaaaatgctgggattataggggtgagagactgtgcccggcccttagcccactttttgataggattgtttgtttttttcttgctgatttgtttgagttccttgtagattctggatattagtcctttgtcagatacatagtttgcaaagattttctcccatgctgtgggttgtctgtttactctgccgattatttcttttgctgtgtcataggcaaagtctttatcatgatggacaacaccctgtcatatggcttatgagaattc

SEQ ID NO: 196456 - DNA, 1000 bp, Homo Sapiens
tatgaaggctggctaattatattttagagacttcaccatgtgttatttgaattataatgcaacaactaaccattacccctagaatacagcctggatttccatcctcattatggttggtaaatcactagctggatggttcaatggccttgattggctttgggatacaccaaagaaagagaatatatttgaaactacagggattttatcttcactcttctccaagttaaggcaatggttgtggggagaatgcactctttgaggcaggcaagttaagcctggaaacatttgcaggaagaggtggggaggatgggtgtatttatatttacatttttaatttatattttttccattgcaacagacagaaaaacaagcaaactggcttaaaaatgaaatattggctcacgtaatggaccatttcaggggtaactggctcaggcgactcagataggacatcaatagttttcaagcccacactttccacctcttggctcccctttcttgcttgttaattccattatcagcttttaaaactaggtattagaggattttaagcagccttgggttggggtaggggtgggagtggcaggccctaattacctaatggctatttggtcaatttttagtattctatatcattttaattcattttacaaaaaggtgattcttttacattgcccttctaatctttcagtttatgtctttaaataaggaaacatgaatgacagcaaaatgaaaggggaagatacatgaatccttctttcttttcttttctttcttttttttttttttttgagatggagtttcactcctgttgcctaggctggagtgcaatggtgcgatctcagctcactgcaacctccacctcctgggttcaagagattctcctgcctcagcctcccaagtagctgggattacaggcacctgccaccacatccagctaatttttgtatttttagtagagatgagttttagccatgtgggccagactggtcttgaattc

SEQ ID NO: 196457 - DNA, 1000 bp, Homo Sapiens
agcactttgggaagccaaggcgggtggatcacctgagataaggagtttgagaccatcctggccaacatggtgaaaccccgtctctactaaaaatacaaataattagccagctgtgggtggagggcaccggtaatcccagctactctggtggttgaggcaggagaatcgcttgaacctgggaggcggaggttgcagagaaccgaggtggtgccattgctctccaccctgggcaacaagagtgaaactccatctcaaaaaaaaaaaaaaaaaaaaaaaacaaaaaaaaaaccagacaaaagaaagaagagaaataaatctcctgggcactgggccaagtttgctggagccatcagatcactctcccatttcagcagcctcagagctgagtccgacttgcagtcaccctctctttgtgtccagcctcaagtttggcctcttccaggcctgggcctctgtggtttgagtggacctctagcctctaaatatctctgatgcccaccacaggggctggccgaccaggatcggagggtcaagagatgtggctctctcacgctgttcttaaacggagtgaggattgagaaatgactacaacatggccaggcacagtggctcatgcctgtaatcccagcactttaggaggctgaggtgggcggatcacgaggtcaggagttcgagactggcctggccaacatggtgaaaccctgtctctactaaaaatacaaaaattagccgggtatggtggtgggtgcctgtaatcccagctactcgggaggctgacgcaggagaatcccttgaacccaggaggtggaggttgcagtgagctgagatcggccactgtactccagcctgggcgacagagcgagactctgtctcaaaaaaaaaaaaaaaaaaaaaatgactgcagcagcaaccagaaatgcagcagctctgggctagacagagggccaggtgctggggacagcgggaggcaatctgacagggtctcttttttacagaattc

SEQ ID NO: 196458 - DNA, 1000 bp, Homo Sapiens
taagggcccaacaaaagatctttaccttctgaaatcagtttatgaaaatttaaagtggtgtttgctccatcaaattcagacacaaataccaaactatattctgtccattgtcaatgcttctactttaatgtagcactggaagtatgtggcagaagaattagtcaaagaaattttaaaaatccattaaaattgaggaaaaataaataaaaaattgctgcttgtagatcatataatcttatatttaaaaacccataaagagtacattcgaagctgtctaaactaatacatacactcagtaaattagcaaaatataaaactaacatacaagcatatgtacggttttatacacttaaactatctgataaaatagaggaagaaaaaaatcttatttactatagcattaaataataaatttctgagaaaaaaattaaccaaggaagtaaaaaatctttactaaaaaaatgaaaaaattagaaaagttataaataaattttaaaatattttatgtctatggattgaaagtataaatattattaaagtgccatattattcaaagtgatctatagattcaataaacttcccattaaaattgcaatggtatctttttgacagtaatgaaaaatacaattctgaaatttacatgaaactataataagctttgaattgccaaagcaatcttgatgaaaagaacagagcagaagtataagcaaaacttatacttttgaagtctatttcaagattatatagtaataaaaacagaatggactgtgcagaagactgagcaagaaaaattcaacagaaactactactctcacacatttcagacctatgcaaaaagagaactttgagaatagttttagtttctcaaaaaaaatcagatatttgtgtccccaaaacactggaaaagaagccagattatgcagcctcttatatgctgtgaagtggactttggctctcactgtgaacttgaagggagctcactgaaagaaaagaagaattc

SEQ ID NO: 196459 - DNA, 1000 bp, Homo Sapiens
tatgagttctccaatgtcgtgcaaggtgtgcaatttgattgaagaccttgccacattcattacatttgtaaggcctctctccagtatgaattctctgatgattgcttagggataaactatgcctgaagaccttgccacgttcatgacatttgtaaggtttctttccactatgaattagaagatgggcaataaggcctgaatagtcactaaatgctttgccacattcaatatatttgtaacacttctctccagtatgaattcttcgatgtcatacaaggtatgaaagttgactaaaaactttgccacattcattacatttgtaaggcttttctctggtatgaattatccaatgttctataaagtgtgaactgtgagtaaagaccttgtaacattcattacatttgtaaggtttctctccagtaagaaataactcagtctcgggctaaaaactttgccacattcattacatttgtaaggcttctctccagtatgaattatccaatgttctgcaaggtgtgaactctgagtaaagaccttgtaacattcattacatttgtaaggtttctctccagtatgaattctctgatgtcatgcaaggtatgaattattcctgaagactttaccacactcattacatttgtaaggtttctctccagtatgaattctctgatgattgataagggataactcatacctgaagactttgccaaatttttttacatttgtaaggttctctccagtatgaattacaagatgggcagtgaggtctaaccactcgttaaatattttgccacattcattatgtttctgagactttctccagtatgaattcttcgatgttgtgcaaggtttgaattgcaactaaagaacttgccgcattcattacatttgtaaggtttctgtcctgtattcactcactaatactctgtaaggtgtgaattgcgactaaagactttgccacattccatacatttgtaaggtttctctccagtatgaattc

SEQ ID NO: 196460 - DNA, 1000 bp, Homo Sapiens
gtgagctctgtgcttgggaccctccctgtgtggctcttcatttggcaggccctgagttgcaacctttataaacaaactgtcatcagaagtgtgagttccaggagtcattctagtgagtcatgcaccctgaaggggtggcgggaaccctgaatttgtagccagctggtcaaaagtgcaggggcctggggtcccccaaagggtgactggcatctgaggtgagggcggtcttgttggggaccgtggccttaaatgtgctggggctgtgctaactctgggtgactggtgtcagaatagaactgcaggacaccaggtggcatcagaccaagatgcaataaaatccaggatcagttgaacgcacaactccatccaggcccttatcacactgcacagatcagtcacctttaaactggggatggcaggggatccgaagtccctcagtatcaacgtatctggcccagcaccacactggccaggggctcagtaaaggtttgcggaatgaacacacttggagcacagaggaccccagggctgcgccgggggaactgctagaggagccaggcccagggagcctcggggagacctggggagaaattacttagggctgtcacgtccccatgaggctggcctgtttctgcagaactaggacagtggtgtgaagccactgagaagcagactctgccggcagagggcagggccgccgaaggtgaggcaggcttctgcatgcatggccgggatgacagggagggacacctgcccaggcctgggcccctggggtcccgtgaggctctggctccaaactcaggcagccactccagcctttcccaccaacatcaatcctagagaggcaagacagtcctgtttacacactgggcacccggctcctgcatctgagtaaacggaacagctgtgcaggaataatcaagcgttctgctccacacctcagcctggctgcctcagaaacaagaaccttcacacattttctaaataggggagagaattc

SEQ ID NO: 196461 - DNA, 1000 bp, Homo Sapiens
ctcaaggacagaatgacccagaaggcaaggtcccctgtggcctgcgtgccggtgtgtgggcggcagctccgggtccgggacggctctgaggaaggatggcgatgtcactttaacaaatgaaacctcagtctccccttctggaaacagacttcaatcctcaggggacaccaactcagttggcagggactgctcgaccttggctgtggtctccctgaattcgtgaaacattcaccacaaatgggctccacagtcaaaaggacagacccttaagtgcccgtaaagttccccgggggccgaacaaactttggcaattgcagcatttcattagatggcttgctctccgcagtaaaaataacctttttattttgtagccagatcttgtttttcccaaattgcttttgcctttcattaaagatccaaaactagaagagttctttcttccctcccagagtggaaaaattcttggtggttttttccccagagctgggacctgttcacaagtcccaaggaccccatttctcctgaccaggtgatgctggggcattctctggggaacatgttcctgaggacttccctacagtaggtctgggcacacagcttagcgcccgtcactcattcagagagaggagggaggaggagagacacttttgaaacagatgattttgctgtggtcttataaccatatgactctttttaaaaatagtctgctcagaacaaaagaaggaaaacttttccactattgtttaggaggctcaccaatatattatttcaagattctggggcatgttaatgggatctgaggtacaattgagacagcctggagcagtgacatcggtgggctgcccagctttcgccgtgctggtgagcaagcaggagggaaggcacagccaccacctgcatgtgccctagcttgcgaattctccttcctcttttctcttttccttctagatttgcaccatcccttcatttccctaaagggtagaagagcaattccaagctt

SEQ ID NO: 196462 - DNA, 1000 bp, Homo Sapiens
gaactgtcgggtctgacttccagcttctgtggtgtgtgtgcgctcccctgttcctcggtgccctccacactagacctggatgcccttgccttggtctgacgaaaagtcacctggaatattcgccacatatctcaacctgtagtgtggctctgagctgcttacaatttctttgaggaagtgttctttgttgaaccttaagaaaacatgtactatcttgaattctttatattaataatttttctcatgtctgctttatctaacttgacagtataaacaattttatttgtgctgttttttatggctttgctaagaagaatgttgcctttttttacttcctcagttaaaaaaaagttaaaattttggttttgtccccacctccacatttgttgcataataaaattttaaaatcctcaaaggaaaaagaacgtgaaaacagcacagacttctagtttctttctgagtttaagacaattaactactataaaaatcaagatgctatatccagggcacccagagaaaactgtctcaggcgctccaacggctctctcaccaactgctgcagaggggagtctggcatttatgggcccacgttaggcttcatattcttcttaaaacaccaaaagcaaagcgtaaggttgtttttccctttaaacggtcccgtgatagatccagatggtgtacttatgccaggacccagcgagaggcagagttctgcacagagcacattttatgtaagagaagacaactttattgccaaataaataacctcctcttttgttagcaaaaagcactaaaaattatgacctaaaggaaatcaagttaattgacattctaaggtttcagttactacaaccgttattaaaaagttgactttgtccctttccaaaatacggactgccaacatgggccattaatttaaaaactaaaaaagagctgtcagggaatttaattactttatgtgtaatataagttctctatgaaagaaaagaggattaagctt

SEQ ID NO: 196463 - DNA, 1000 bp, Homo Sapiens
tacagtgacacaatctcggctcactgctgcctcaacctccccggctcaggcaatcctcccaccccagcttcctgagtagaagggactacaggggcacgccaccacggctggctaatttttgcaatcttttgtagagatgggacttcgcctaattgcccaggcttgtcttgaactcatgggctcaagcgatcctcccgcctcagcctcccaaagagctgggattacaagcatgagccaccatgccaggctttctactcaaccctgattgatctcatgcctttgtagcgtcaccaccaccaccacctccatagggcttcctgagccacacataggttatgtctctgtaccacaaacacataccctgctcctcctctccttagcgggtatttgcccttgccaggtcttagcaggcggtgacaggagatgaagaagtctaggccctcatcagacccattccaaggaaggggacaatcaggagagagccaaccccctctcctcaaggcagcaaacccatagccaagaggttcagggtggaaacctggggcccctggctgggaactgggagcagagcagggctctagtcttgaagtggccagaggaaggataagattgatgaggggaagtctcaggcaggaagagcctggggttccaggaagagaatctaacaggggcatagaaggccgggcttctgcacaggcagttacagccagcgcagaggggctctaacccaggcactgcagcttaaaccacgcagtccagacctatggacactggcatcaaactcggtacggcctctgtcccctcagcgacaagcctgggacaggaatgcacccacaggaatagctaaagggcccagcggtaaggttcaggggcttcataagcacactcaaacccaagcctgtgtcatcatcacataaccctcaatgacaggacttcagctatccaaggccatgtgctgtgagctggccttggtgttatctccccactaaattgcaagctt

SEQ ID NO: 196464 - DNA, 1000 bp, Homo Sapiens
tcttaagtatcagatattatataatacagtaattcaagggagggagagctctacttgatagcactcaatctgagccttcatagcttggttggattttagtgaacggggaggaagagtgagagcatttcaggcaaaggaaaggatactcccagagatcaaatatgaaggcaaatttggtgggaacagttgggctcaagttagtataaataggagagatgaaagtgaaattcaattctatcaacaaacttgtctaaatgactggcaaaaggtagttgagggacaaattgttgagtgctttaaatataaagctaagaagtttagactttattctatagaaagtggtgggtaaaaaataatttaacatgtttgcattgtgtaaattataatcgtaacacatgtacatttaaaaaattcaaacaatacacaagtgtagaaagaatgaggcaaagctttcccctcctatcttggtataattttattcctcagatgcagtcagttaatagtttgggtacaattttccaaccttttttttttttttgagacaggagtctcactctgtcacccaagctagagtggaagtggctcattgcaggctctctgcagcctctgcctccaggctcaagcaatcctcccacctcagcctcctgagtagctgtaaccacaggtgtgcacccacaccaggctaattttttgtatttttggtagatatggggtttcaccatgttggccaggctggtctcgaactcctgagctcaagtgatcttcctgccttggcctcccaaactgctggaattacaagcatgagccaccacacctagccccagccttttaaaatttataaaaatatagatctttttttaaaaacatatgtggaattatactagacatgctttttggcaatctgtatttttctttaattcagtaatgggttgtgaacacttttgcatatcaatatatactattaaggcttttgaacaagcctccagtatttcaaaagctt

SEQ ID NO: 196465 - DNA, 1000 bp, Homo Sapiens
aagttttcccatgacatcaaatgtctagcttgtgagggctgcactgtcttgcaggtgcttctatttcttgctctcagcagtactgtagcggggcctgtatcttgatagaggcaaggaaacctgcgtcctggggctcagtggttcttgacactggctttccggtaggatcaccatggacactagaatgtttctgtaaaggccggggcccccactcaaacctgcctttctgggctgtcctggccccaactgccttgttcaggttttcaggcatccaaagagaagagtcaaggtcaaccaacatttatgccggcagatgatcagatttctcttaggagagtagacattttcttttctttcctgtaagtcccgaattataagctgaaagttgttccctgctgctcacacacagcccctctgaaaagcagaaaaactttctgaggtttgagcgaggtgttttaacaccatggacagcgcccctggttcttcgacccggatgcgcttcctaataaaacggcattccaggttctagaaagcatttcggtaaaacaggctcagaaacaccagattcaagagaataaccattatatgtgaatacatttaaaaatagatcacacactctaacaactgaaatgtacagaaaagatgaaagtgcatccgttaacgtttaaatgcccatttctactgatggcattcatctgcacgctcgcacagcggagcagctaacctttaggacagcgcccggggcagagccagctcggagccagcgctgcacagctgtgaggggccggctttaggctcacaccgcctgtatctgaaacgctgggacgggtatttaaccccctgaacctcgttcctcttgcctgtgaaatgtggatgctccagcgggagtttctgaagattggcagcttggcatgtaaaggccttagcagaaagctgcccttggttttaggaccacttaaatacccaatcaggtttcccttcaccactttcattaaagctt

SEQ ID NO: 196466 - DNA, 1000 bp, Homo Sapiens
aaaagcccatcatattgagctttgtttatatcgttagtaataataattattgtaaaattacacctataaattagtaatactcctataaattagtaatactaatttaataaatttaataaattagtaatactaattaaataaatttaataaattagtaatactaattaacacctatattactaattattgtaataatacaacactaattattgtaaaataacacctataaattagtaatactttattattataaaatacagtcctatttgtattgtaacactccaacttgtatgtcggtgtaacttttaactttctggaaattcaagctaatctcaaaaggtatctctaaactatgggaggacttaattcttcttccacctttaagtttcacttaagtctcacctttcctgcaaggaacaacaaaagacaatagaaaacatggcagcatttgcttcttcctcatcagagtgttgaaatcagagcatcatagtcatcattcagaagtggtgttgaagactgctgggccctgcatcagttttttgctctggttaattaaagctgaacgctcatttccaactgagacacaatcggtaaaaatggcacagctttgccccatggaaaagctgatggtaaaatacacaccccaaagtatctcaacagaaaccaaaggaccactgaacttaaaacgagtgaagtcacagaaacaaaaggtttattatattaatcctttttggttcaatgaaaataaaggagataaacctaggtctgattggtggcagatgtagggagtgtttggtagatctgaagacattgtgagatgaacccatggtggaaaacacccctagaaaagatctcaaaaacacagtttaatcaagaacagggtcaggatggtcattgcagacagcagctagtgaaaaaacaaatttttaaattggaggggacaacatgatgcagtggaaggaatccacacaaagtctccattggatttgagctgaagctt

SEQ ID NO: 196467 - DNA, 1000 bp, Homo Sapiens
gagacagggttttgtcctccaggttgcagcacagtggcaagttatgctcactgtaccctggaactcctgggctcaaggagtcctcaagcctcccaagcagctaggagcacaagtgcatgtcacttcttaaaggagacttgccacagagaataatgggccacactggcttttgttacttggtgaaatgattttgttggtccatatagatactgctactctacggagcaacaaaaccatttcaccaattaaattaaccacctagcatcatgcatgtggtgattaacaacttggatatattttgcttaagctatttgaagaatccctaagttatggataaagggaagaaaaataaacctgccttttgacactgctcatgtatcttctttgtatcattatttacttacaagcctttttttttttttttttgagacagtcttgctctgtctgaagtacagtggtgtgatctcggctcactgcaacctctgcctgccgggttcaagagattctcctgcctcaaccttcctagtagctaggattacaggcgcctgccaccacgcctggctaatttttgtatttttagtagagatggggtttcgccatgttggccaggctggtctcgagctcctgacctcaggtgatctgcctgccttggcctcccaaaatgttgggattacaggtgtgaaccaccgcgcccagccacaagtcgtattttaaagcgtcctattccttagttataattcccttgacttttaacaacagttggttttgaccccagctccctggtgcctggacctccagatccaccctggagcccacaggtggatttacatctaatatgttacaatcctgatgtaaatccccaggaggaagcctggcgttagccacccttactctgcacagtgctatccttgctgttgctttcatctctggcaggagtttccttttcacaagggagaaggctctatgcatttatagcagtgttttattttccagcaagctt

SEQ ID NO: 196468 - DNA, 1000 bp, Homo Sapiens
ctaactccaggaaagccatttttcatctcaacttctttgtccttttagtccagtttgctgtgtccagaaagggcgcttcacctaatggcagctgacctattgactggccagcagcttatgagatggcctggcccaaaaaacctttattgtccctgaatagagacagtaatgatgaaccaaaccaatcatatcttctcttgtggggaatctgcttttgagacatttgggattgtcaccagttgacggaagtagcaactgaaatacacacacagaaaaagaagacagataaaatgggaaatgcagaaatagaaatgacaggatgtggccactgaccagatgtgtgacataaggaagagtggaaagaataaaggaaaccaaatttttagttcgactgactaggcaagagacagtggcatgaatcaaaatggcaagttcatgaggagtggtagggaaaagaataaggccagtgtgggacagattgaatttggtaagtgagccaacactccaaataaaaatattcatcatcagctagatgccagtgtgagttttgggagagagtgtagggctgacaacatagcaatgagataacccaacagtgctgctgctgatgccatgacagtggatagaatccctacaggagaagagcagtaaagaagagagggctctgtttagtgaagaaaaaataggaaaaggagctagtgaagaggcaaaagaatttggcaggagttcgagaagtttgtggtgtcatggcaacttggttaggaatagcagcgtatgttcatcattatcaaatgttcagaggagccagaaaggatgaggtttaaggtgggaccacagggttgggggatgaagagggtcatgcttatctagtggcagaactgtaagtttcaaggaagtagagggagggaatagagttgcttttttcaaaaagaattatggtggtaaaaagaaggaatgcacaagacaaagagagagaataggtttaagggaaggcaagctt

SEQ ID NO: 196469 - DNA, 1000 bp, Homo Sapiens
tttcagctatatgaattcttacaatccattaaaatttgaaatctttgcatttatttgtgtcctcctcaatttttaaatcaatgtttatattgatttttattgtatataaagtttttattttatggatgtttcatctcattggttaaatttattcttaagtattttattccttttgatgctgctggaaagggattgctttcttaatttcttttacacatagtttgttgttagtatatgaaaatgtaactgatttttatatattgatttcgtattcttcaagttactaaatttgcttattagttctaacagttttttggtggagttgagaaatttctgcacataagactatgtcatctttaaaaagagaccattttatttcttcctttcagatttggatgaaatttacctatgtattgttacctaactgcactggctagaactttgagtcactcattgaatagaagtgataagaatcagcatccttgtgatattcttgattttagaggaaagattttcagcttttgacaattgagtatgatgttaactgtgggcttatgataattggcctttattgtgttgaggtgcatttcctttatacctaatttattgataatttttatcatgaaagatgttgaattttttagctactttttctgcatgtttatataattttttgttctattaatgtagtgtattacatttatttatttgcatatattagactatatttttatcccagggataactcccacttgattagggataagctaaaataatcttttatatcacttatttagaaaacaatcatttcataaataaaaagattgtgttccaatgcagatgaaaaacacccatattacttgtatgttaccacataactagttaatacaaaatttagtggcttaagacaagaatgccacatggtctttgacagtatttcataaggaggttaatcaaatggttctggctttgggtctttcatgaggttgcagtcaagctt

SEQ ID NO: 196470 - DNA, 1000 bp, Homo Sapiens
agtagccagtggccaacacttagagcagtgaggggctggggtgggtgcactggagggtaaagggaacccgggcagagcagcaacagtgtagtaactacactattcttcttcacaaagttgaggtaagtggggagtgggaaaataaacccagaatggctgcaagggaattggtgtccttaggacagagccagatttttgttacagcaaagaggagatcaactcctacaaaaagaggttgtgaaaagagggatgataccagtgtagactgccaggttgtctggataaaaaagccagaaaaaggagtttctatttttcaaacaatcggtgagacacgtggggtgtacaggaataatgcaggtgattttaaaactacagaatctttcttggatctcccctgtgtgcctcgtgaccaaattggctaccaacgccaattcattcctttttttccaactctaggagtcattgagtggctaacaactatgcagccacaccactcagtcatctagagggcctgaagaatcccatcaagtgtgctacagtctgtttatttaactggtagagacaaagctttatggcagctttaagctgcggctgaagcttaactatatggcccttctagtaagagagttatcgaagattgtataaaattgcaccaattttactgaagccgagaaaatgttctgtggttagaaggggaaaagatatttcaaatgcattatataaaagacaaattaaaatagacaatttaaagaaaggggtaacactaagtaaagggagcacaaaatggattatccttgatatccacagaggttgcttgaaaaagaatctgggaataaatatgaattaatttaatagcatcagactaaattatgaaactaaatgtttagaaagtagcagaatgtcttcacgttaaaagcaaagaagagaaaggatttcaaagaactacatttcaagctgaatggaaagcagatggaaaagcccatatgaaacaaggaagctt

SEQ ID NO: 196471 - DNA, 1000 bp, Homo Sapiens
aattatctttaccactttcattttttcagcgaatgttatctaccaaaagttaggaacatggacaactgctgggcattccagtactaaaaggaaataaatggcttttttttttttataacaaaggttggctgtttttgaaaaggactttcaaatagtaaatattttaggctttgagagggtctctgttacaaatactccaatctgccttgcagtatgaaggcagcaaccatagagaaaaggtaaaagtagactagctgagttccaatgaaactttttttttacaaaagcaagtgttaagtccaatttagctgctggttatcccatggtttatctatttctttgctttctttcagcatggttctcttgaactgagtatcttttgaacacctgctataggtgaggcactaaagatttaacagtgaacaaagacataatccatgtgcatatgtagaaggaaaacataaaaaatatgtaatcaaattcccatactgtgtgacaacattttcactataactaaccaaaccctttactttcttcctagtatttggtgagcagagctacatttttgtatactttgttaaaataacaaaaattgattctatatactgaattatttaaggcagaatatttagtaaaatcaatatttagtatgttaaatttatctagaaccagacatttttcgtaaattctgcttataaaagcatgcgctggtccaagctgtcttgagtagaggtaaaattaaaagaaaaacaactaaataataaataaaagtatttgttgaagtagaacttaatcttcttcatttaagtaaaactacaacttacccatacatacctctttcaccttaccagaatcaataacaaagacaacatcattgactgtgatgctggtttcagcaatattggtggaaagaatctgcaacaagatattactttaaagttaataaaaaaacagaaaaaataactaatgaaagtgttaaaaagaagattttatgaagctt

SEQ ID NO: 196472 - DNA, 1000 bp, Homo Sapiens
ttgaagacacacaagtgttatttggtgcactaattggaacacatcgatgagataagagccccatttgtccagagcttatatttggcttgggagaggaagtggttcacaagcccaaataaacaagggcgtcatgagcaagtgcatcgcctgtccaaagaggagatgcacacaggagatgcacaagggcgagcagaggaggcaggccggcgagctcagaggacgttttgtacttgagagttcctagggctcgaaactccctggacaaacagcagggatgatttttgaagtaattagcagaaactgtatgcatttgggccattcaaacaggaggccaatactcagggaaacggggagggaaagagccataggaagaaatgggagggtagaagctggccccggaagctcgcagctgttgcatgactgcccgtccatgcagaattttcaagggatgaatttcagagatgctgaaactgagagccacttacccaaacgatccccctgatttctaacattcataaaagtggtgagagtaactgcttggcaactaaggaatagtatcaccgcattaaacctaaattgaatttaattgattacataattaagagacccaagaagggtcctgggaacacaggcatttgaggcgccatctcaatcatactgaagtcaactgtgttttgaatattcttttttttttttttgagacggagtctcgttgtgtcgcccaggctggagtgcagtggtgcgatctcagctcactgcaagctctgcctcccaggttcacaccattctcctgcctcagcctcccgagtagcagggactacaggcgcccgccaccacgcctggctaattttttttttttttttgtatttttagtagagacggggtttcactgtgttagccaggatggtctcgatctcccgacctcgcgatctgcccgcctcggccccacaaagtgctgggattacaggcgtgagccaccgcgcctggctaattttttttt

SEQ ID NO: 196473 - DNA, 1000 bp, Homo Sapiens
ccatcccctcaactcagtgataccacagacctctgtctgatgtcccttcctaaagctataaattggtcaccacctctgggcaataagctagcaaaattgtatgtctcaccctatttgttttccttaccctggggattacaataccattttatttgttgtagaatatctacaaaatattgttttacatatgttgcctggtcttctgtttgttaaatgtaagaacatgaaaatcaggccctgtaattccattatgaatgcaaataaaccctagaatattttctaatccccattcttctgttattttactcagtaaaattatcaaaatgtggaactttaaatataactcaagcctgatcattcagagtatatcattctatgataacattgattaatctgggaatagggccaaggtcttagctattccattcaggtcaatcctttgactctccttttatacaaaacgggaagacacttccttttgactgcatttccccactgtcagtatgtcagtctggttacaccatgtcagtggccattttgatgtgaaacaatgaagcccattgaataacacggccaagaaattaagagagaaattaaatactaaaaacactgtttgaatttaggaatttaaaaaataatgtttctgtacactgaacttaatatttattctaattttatatgctaatacatattatagatatttctctactctccccattctaatgccagctaattttttaaaccaaaatgagtatgaggttagtgctctcactgctaaataaaagatatgactaatataataacctgatacatgtagaaagtgcaaatattttaaataagtttgaaaaaaatatataataaacaatacccaagagaacaaataaagattaaaaactaaaaaactaatttttatgtgatatatatatatatatataccatggaatgctacacagccacggaaaataaaattatgttatttgcagaaacatggatgaagctt

SEQ ID NO: 196474 - DNA, 1000 bp, Homo Sapiens
aaattatctctgcagaagtgttttactctcaggtccactgttcttctcaggcttttataaaagacatcttaggatctatgtaatcaggtcatccattttctagccatgagatttgggtctgggagatcttgctcatgatttcgaagtgatcttggatcgccatttgaatcaagggttcctttttaaaataaacatttagagtcaaatattcaaaaggcccttttattacaaccacagctttatctgttccctctccataaatgtggctattgaaaacattttaggccaggtataatggctcatgcctgtaatcccagcactttgggagatgtaggcaggcagatcacctgaggtcaggggttcaaaaccagcctggccaacatagtgaaaccccttctctactaaaaatacaaaaaaattagccaggcatggtggcacatgactgcagtgacagctgctcaggaggctgaggcaggagaattgcttgaacccaggaggtggccatttcagtgaaccgagatcgcaccactgcactcctgtctgggttacagagagagactctgtcccaaaacataaataaataaaaataaaaaataaaaacattttagtggagtgtgtttccaatacttcaaagtctttttcttgttttcctttatgttctctttccctagttaatgtcgtggtcaaatgtagaaacttcatgtttgttaatgcattttatttagttcaaagtttaagtgaactgtaaaatattgaaacataataaaatcacccttacccccataacttcttccttgccatctttgctcaatctctccagactctgctacatttcttctggctctatcaggctaagccagtcttgtctgtttgaactaccaaggagcactgagtcctgacgttaagactctttcatatttaccaggctcctaataaagtatttctctctagctatgagtgtgattctaatttttagccctctatggtaaacaccaagctt

SEQ ID NO: 196475 - DNA, 1000 bp, Homo Sapiens
aaggcctatagccagatcccaggcagggcttcttggggaaagccacgagagagtgcaggagacggcgtgggatgaaaggctggggctggggaagcccagcctctttcttacctccatacccatcagagcccaggttctgtttatccgtctgcctgagcatctcctgagtccatcttttcctcctctccttctccatggtcatgtcctagtccagccccatcttctcctgcctctgtctccctgggcatcctggccctggtctccctgcagcacaagagctggagggatccctttcccccagctatggagaaggtttctctttttctttcttgcattcctttttctttgtcaaattaaatataattgtatgaataggccaggcatggtggctcatgcctgtaatcccagcactttgggaggccaaggcaggaggattgcttgaggccaggagtagttcaggactaagctggccaacatagggagcttctgtttctagaagaaaaaaaaattgtttgaatagctagtcacacagttcaaaagtcaaaataatattataaaagggtaaatgtggagaaatttctctcccaactctgctgctgtccttcccattctgtccctctatccctctacctgctcatggggaaccactttgtcagtttcttgtatttcttcctgttagtgccagtaaatggagttgtagatccgaaatgttcctcagtacgcatactgattggtactttgctattttcacttaatagtaacaccctgcagagttttccacatcattccatagaaagcttcctctttctgtttttttttcccccacagctatgtaacactgtttttgtgactgtgcctggtcccctatagacagacacctgggttgtttccattttttgccattagcaggcctcaaagaatcactttgtatataagacattttgcaagtatgcagattgagctgtagatttccagaagcaggactcctgggtcaaagctt

SEQ ID NO: 196476 - DNA, 1000 bp, Homo Sapiens
tgtgaattttgttgtgtacattgtagcacagtaaagtttacttaaaaattaggaaatgataaagcataagaagtaagtatggtcagcaaggtccttaatttgcaatcgatcatttctaaactatgttaattcatgaactatgttaaaatagtttagtaaatatactcactcaaataaagaattgtgtttttatgcacagcaaaacaaaaagagatatggtggataaactgagtcggtttcacatatttcctgaaggagtgaatggagagaaggaaataaatgaaacatataaagaaataaatgacaattggagaatttactagaattggtgagatacatggttccccagatacagaaagtacaataagcaccaactagataaataacaatgtttatctccatttgtagatttaatcttccacagaaaaataagaaacagtgggaatttcagtggaaataaaaaaaactgatgaaactagagaactagagacaattgagtggtaatgtgaagatatgtgaagattgatcaatagtttctccagtcaaaactttcaaatgcttcctgaatatgcccagattttattattcatggtacttttattagaaaatcagagtcaggttttctttggttttggctgggtgcagaggctcacacctgtaatcccagcactttaagagactgaggcaggtggatcacctgaggtcaggagctcaagaccagcctgacccacatggtgaaaccccgtctctactaaaaatacaaaaattagccaggcatggcggtgcgtccctgtagtcccagctatttgggtggttgaggcaggagaatctcttgaacctgggaggcagaggctgcagtgagcttagattgggccattgcactccagctggggcaacagagtgagactctgtaccctccccccaaaaaaaagaagaaaaagaaaagcagaattaggttttttctggtctctaaaaaaagtcactttttcaaatgaagctt

SEQ ID NO: 196477 - DNA, 1000 bp, Homo Sapiens
ctatctctcagaccacagtgcaatcaaactagaactcaggattaagaatctcactcaaagccgctcaactacatggaaactgaacaacctgctcctgaatgactactgggtacataacgaaatgaaggcagaaataaagatgttctttgaaaccaacgagaacaaagacaccacataccagaatctctgggacgcattcaaagcagtgtgtagagggaaatttatagcactaaatgcctacaagagaaagcaggaaagatccaaaattgacaccctaacatcacaattaaaagaactagaaaagcaagagcaaacacattcaaaagctagcagaaggcaagaaataactaaaatcagagcagaactgaaggaaatagagacacaaaaaacccttcaaaaaatcaatgaatccaggagctggttttttgaaaggatcaacaaaattgatagaccgctagcaagactaataaagaaaaaaagagagaagaatcaaatagacacaataaaaaatgataaaggggatatcaccaccgatcccacagaaatacaaactaccatcagagaatactacaaacacctctacgcaaataaactagaaaatctagaagaaatggatacattcctcgacacatacactctcccaagactaaaccaggaagaagttgaatctctgaatagaccaataacaggctctgaaattgtggcaataatcaatagtttaccaaccaaaaagagtccaggaccagatggattcacagccgaattctaccagaggtacatggaggaactggtaccattccttctgaaactattccaatcaatagaaaaagagggaatcctccctaactcattttatgaggccagcatcattctgataccaaagccgggcagagacacaaccaaaaaagagaattttagaccaatatccttgatgaacattgatgaaaaaatcctcaataaaatactggcaaaccgaatccagcagcacattaaaaagctt

SEQ ID NO: 196478 - DNA, 1000 bp, Homo Sapiens
gggcgtaatggcctgcacttgtagtcccagctacttgggaggccgaggcgggaggattgcttgagcctgggaagttgaggctgctttgagccttgatcatgccactgcactccaggctgagcaaggtctcacaccttgtctcaaaaacagaaaataataataatgaaatatcccagtatgatattgcatttattaaaaatttttgtttctctttttttcttctgagaatgtatagcaagttcctcaggtctgttctttccttttcggtgatttcaaatggaattccattctgggctcaggttatccacctgcctcagcctcccctttgatttcttcaaacacagggtttgtctcatgtaaatatcagtagtggtccaggtcacttgactggagagcaaagaggactcaggtcagtgactccaagctctaagaccaacccttgggtctcccaagggatgtaatcgaaggcccagttgtttcttcctagggagcctcccctgcaggtgtcctacctgctcatacctactgtggaaggagccctttgtactgagagaagctgctgagcactggaaagctggggatctgaatgcacgttgggggattggctgaatccagtgatgcccttcctgagggcataattgtggtttccttgggcctatttttagacattaggtttgagttttgcatctgttgtgtaggtgcactcagtgtaatttttctatagtgagaaagtctgtaaaggccaggagatctgtctcctggacacaggatgaatgaactggggagttcatttgggtcagaaccttaatctcagtccagttgagagtttcctcacttacaacaattgaaggggcgatttccctgtcaccaggggtgagggaatgtgtggagctcgctgagttcattcctttggctcctcaggtgcccctgccctctgtcaccagggactgtctcactctaaaggttgttgcccaacagcaagaatgtgggccccaagctt

SEQ ID NO: 196479 - DNA, 1000 bp, Homo Sapiens
tggatatataatgtgcatgtttgtgtctgcatgtatatacgtatatgaatggcttagaacggtacctagcatatcatacacattctttaagtgttagatactgttgttactgttatttattattaatattattacaaagctaccatacaacttagcctacggaacagactggggcactgattaattcaaaatctgtgtctatggaaaacttatgagaaaagcccaattaagaacatttcatttttttgcactgaggattgttttgaggaagtttaatgtactgaatggactgtttggtgttgagtgcacacatgggaaatatgaccatgactcaccttgaagctgttctatcaaagtcagttccagccacaaatcaaacgacatcaaaaattttcacaatttcacattctatttgtgccagtcagggggatttggttgggttaactactttaatgacacattttaatttgtgctcatctagtatttaagcataagagaggattctttgctgcattttttggtgaagcttcttcagaggctgaggctaacaggtgtggtttttcaaaaactagaaggattgtgtttttagccatttttctagaaaccaaagagccattttttttatcatgagtaatctaatttcatttttgtttttactaatgaaaataggcataggaagtaagcacagcaacaggagtgctattcattctttcctcaaaaaaaaaaaaaaccctcaactctaacacgccctcctctgaataggtctaactctgtcctttctcatttgttaaacattgattttttttcagcatttaatggaatgaaaattaagagggtcatgtagtatttttttaaaaaatctccactttcagctccttattttgataaaatatgttttcagacttcaacattagcaattatgtcagctctagcctgggaagaaatattgtttttcattacctccatgtaagtccacaggggaaggactaagtataagctt

SEQ ID NO: 196480 - DNA, 1000 bp, Homo Sapiens
ctatgaaaggaagttttaaaaatataacccggatttttcattgctggtggatagagatgtgcgagcgtgtattttaatatgtgccccacatccttgttaagtgatttaattatcttaactaggtcttaaaacatactttttaggtttcattgtctgcaaataaacacagttttattttgtattctctgtgccttcattttccctgctatgctgggctggccagaatgtgactgtgatatcagaagtaggaggaaagggcgtcatcacctgtgcccagcctccaagagagggtcacaagcctttcaccagtaaatgtcacgtcaggtacacagggtgctttcctatcattcctaggtcactgagatttgttaaaaatcatgaatgggaacttgctgttaacaaacccttttctgcattgattggcatgattgcgtggttaccgttctctattggactaacgtgctgagctgtagtaattgattcctaggccttaagccactgcttacccctggagtgatatcacttggccacagtgcacattcctgccccgtgctgctcgatttggtttcccaaggtcttatcagtgatctctgcctgtgtttcctgaatgtactggcttatgaatatctggtttggtgtcaggttgatagtggcattgctgaatgagttgggaagtgttgcttccttctctgttttctgaaagagtctgtgtgtaggttgtattgtattttttctttaaatctttgctggaattcatgcatgaagactacagggcctgggatttttcttcactgggagattttaaattagtagtttagtctcttggctgttctatgtctatttagactttctatgtcttcttgagttagttataataattcatgtcacttaaccggaaagggaactaacttccttaagttaaaaatcatgtttcaggccaggtacagtgactcatgcttgtaatcccagcactttcggaggccaaggcgggcggatcacc

SEQ ID NO: 196481 - DNA, 1000 bp, Homo Sapiens
gcagggtactccaacagacctgcagctgagggtcctctctgttagaaggaaaactaacaaatggaaaggacatccacaccaaaaacccatctgtacatcaccatcatcaaagaccaaaagtagataaaaccacaaagatggggaaaaaacagagcagaaaaactggaaactctaaaaagcagagtgcctctcctcctccaaaggaatgcagttcctcaccagcaacagaacaaagctggatggagaatgactttgacgagctgagagaagcaggcttcagacgatcaaattactctgagctacgggaggacattcaaaccaaaggcaaaaaagttgaaaactttgaaaaaaatttagaagaatgtataactagaataaccaatacagagaagtgcttaaaggagctgatggagctgaaaaccaaggctcgagaactacgtgaagaatgcagaagcctcaggagccgatgtgatcaactggaagaaagggtatcagcaatggaagatgaaatgaatgaaatgaagcaagaagggaaggttagagaaaaaagaataaaaagaaatgagcaaagcctccaagaaatatgggactatgtgaaaagaccaaatctacgtctgattggtgtacctgaaagtgatgaggagaatggaaccaagttggaaaacactctgcaggatattatccaggagaacttccccaatctagcaaggcaggccaacattcagattcaggaaatacagagaatgtcacaaagatactcctcgagaagagcaactccaagacacataattgtcagattcaccaaagttgaaatgaaggaaaaaatgttaagggcagccagagagaaaggtcgggttaccctcaaagggaagcccatcagactaacagcggatctctcggcagaaaccctacaagccagaagagagtggaggccaatattcaacattcttaaagaaaagaattttcaacccagaatttcatatgcagccaaactaagctt

SEQ ID NO: 196482 - DNA, 1000 bp, Homo Sapiens
attggatgattcaatattgttgatggcaattctccccaaaactgatctatagattcaatgtaatcatattaaaatcccaacaggaatttctacagaaattgacaagctgattctaaaatttacatggaaatgcaaaggacctagaatagccaattaaagagaagggcacagctggggacctacattactgagtttaagccctctctaaagctataatattaaagatgatttggttattagagaaaacatagaagtataaatgaatagaaaagaatggtgtgagtctagaaatagacacactggttttccttgggtcttcattggacaatttacttcacaaagatactaaggcaattaaacagggaaaggaaaatcttttcaataaattgtgttggatcaaccgtatatccaagaaaacaaacggacaccagctctaccctcatgcaatatccaaaaattaactcaaaaaaggagtatagacttcaaggtgctttaaactactgtaaaactttacaagaaaatgtgcaaaaatcaatccttcagaccttgggggtagttacaggactctcagaacacaaaaagacaaaaagctcacaagttggtcttcatcaaaaggttttctttttttaaaattttctttcttcttttttttttttttgagacggagtctcactctgtcacccaggctggaatgcagtggcgtgatcttggctcactgcaagctctgcctccggagttcacgccattctcctgcctcagcctcccgagtagctgggactacaggcgcccgccaccgtgcccggctaatttttttttgtatttttagtggagacggggtttcaccgtgttagccaggatggtctcgatctcctgaccttgtggtcctcccgcctcggcctcccaaagtgctgggattacaggcgtgagccaccgcgcccagccaaaaggttttcaaatgtcttttgaaagtcaatattaagaaaattgaaaagataagctt

SEQ ID NO: 196483 - DNA, 1000 bp, Homo Sapiens
agagacactaaagccatcaattttcagctttaaacagatttgttttggtaataatcgaacttgcatggagctagaactccttagtgaatccgtttttcatttggacagtggctacatttgctgagaaatatttctgtcacgttaaatatttcttgtgctatgttaaccaccccaacaaagaccataatggcttaagcttgtaagcattctgttttttgtggatgatttcatctagatgttcattcatttcagccaggtttgaaagttattaacagagagtgagttgccttcttgacgccctttacaatactgtcacacatcacctggcccaaaccccttaagaagtagcactagtcccgtgggacagtatggcccacagattagctgtggcttggaagaagcgggtagggatggctaatggggcctgtatagtgtcttctccatccaagaacagtccagtagtccaagttacaaatatatagcaaacttgaacccaaattttatgtacaatagtattaatatccaatgtgagggatctaggttgtgcattccttatgagactctaatgcctgacgatctttcactggggggggtcccatcccccaaagatgggaccatctagttgcaagaaaataagctcagggttcccactgattccacattatggtgagtacataacaataatagaaataaagtgcaaaatacatgtaatgtgcttgaatcatcccaaaaccatcaaaattgtcttccagaaaaccagtcactggtgccaaaaagtttggagaccactggcctaggggatggggcctggacaaatgagtagaacctaacagcctgagctgactgccagagactctaaacctggattgtgagattatgagttccccaatagctgaaactctcagaagtggcacaagtaaccattcggcagagaaattttaaagaaattcacattaagccggggttgaacttggcacactgcaaaaccctcctaaagctt

SEQ ID NO: 196484 - DNA, 1000 bp, Homo Sapiens
ttgcccaggctggagtgcggtggcgtgatctcaactcactgcaacctccccttctggattcaagcgattctcatgcctcagcctcccgtgtagctgggactacaggcacatataccaccacgcccagctgttttttttttttgtatttttagtagagatagggtttcaccatgttggccaggatggtctcgatctcatgaccttgtgatccacctgcctcagcctcccaaagtgctaggattataggtgtgagtcaccgcgcccagcctatgatctttttaagaacaaaatttgtcttgattgcaaatcaatttcatatgtttaaaaacctgtatcacaaaataaatatttaactttaaaaaaaaaacaaacctttaatggcattcattgccatatgactgtatcagctttcttcccactttctatcacttttaataactcatcaatactttttaaaacaataatcttgttttattcagtgcaaaactttcagagtaatatttaggtaaattgaaattttaggtaatcagatgaaacattacctagtctaggtgatgaacttgatatatgaggaatctgtatatacacacaaacacatatgtatatacatgtacacacgcagataggtattgtatatcatataaacattgtaatatgattatagctatattcatatgtagttgatacatcacttaagattaatgtcccttaaattattttaaaataacataatatagactaggtattgataaagtctttaaaattgttactatagaagttttgtttttgtttttgtttttttgagacagtctctcacagtgtaacccaagctgaagtgcagtgttgcgatctcaggtcactgcaacctcagcctcctgggttcaagcaattctctggcctcagcctcctgagtagctgggactacaggtgcaccccaccacacctagctaattttttgtattttaatagagatagggtttcaccatgttgcccagtgcag

SEQ ID NO: 196485 - DNA, 1000 bp, Homo Sapiens
tcctaccttcttgggaggctgagacaggagaatggcgtgaacccgagaggtggagcttgcagtgagccgaggttatgccactgcactccagcctgggcgacagagcaagactgcgtctcaaaaaaaaaaaaaaaaaagacggattctcactctgttgcctatgctggtctcaaacttctggcttcaagcaatcctcccacctcagcctcccaaagtgctggggttacaggcatgcatcaccgcacctggccaccatgtggtcttgatggaaggtggtgcctagtggggtatgttggtgtgacagggaccaccaaagatggcatagattccatcgtggccagtgagatggaaggtgatggaccctaccaggattggcatgaagttaacccacctatgcctgccagtgttgacataggcaccttttctgttttctatagccctgaaggcagcagtgtggataagcccaccccacaggaagtggctttccagctccgaagctatgtccagcgtctccaggagcgccgttctctaatgaagattctctcagagcctggccccaccttggcacccatgcccactgtgccccgtgcagaagccatggtgcaggccattctggggacccaggctggcccagctcttccccgactggagaagacacaaattcagcaggacctggtggccgcaagggtacaaatgggctgtggccactgtgtcagtctttcttggtgggacaaaatcctttactgaggtcgggggaccaaggagcaaaggagaattctgctgggctgagtgcaggcattgtgaagggagaattggagctggggttttgagggattaataggagtttgttttctggggttcagtttctcattagactacaaatctggctctccaaaatgcccttcctatgggaagagatgggagcaaagaacacaatcttgggtttgtagcttggcatgaaaaacttgaggttctggagttagagaaactccagaagctt

SEQ ID NO: 196486 - DNA, 1000 bp, Homo Sapiens
tagttaaagcagccaagctgaatactgttgatccaagatgaaatatcaatttataaagcttttgatgtaagtaactaaacaaaacttatggaagcttcaacataggtacgtatttttcccacatgaaacagtgcagaagtatgtggctgtttaatgatgtcatccagagcccaagttctctcaaccttctgttctttgacccttagaatattggccttaatcctaatgcttgacaactcatggctgcaagatggctgctacagctctaggcattatgtccacagagcaagcaagaaggatgaggaagcaccaaagttctgctcctcacaggctttgtctttttatgtgggaagagaattcctcctgagcctagttcccttaatatctcatacagaactgcatctcctatgtctgtggtgggatccaccttcttgaaatcaatgggtctctgttaaccactgaaatacactgggattctgttactaggaaagaaggaagtggggagaggctgtggataggccacagacagtgaggaaagcaaggcttacaaatgctgcgacatgccaatattacatagccagtttgtggaaaactagattttgaatgaagcttgaacttccaaacctggggtcttaattgctatgacaaactctcaggaagttttcagacacctttactttcctttcttcaaattttgtttttagaatctctgtcagagattttctatgggaagtcctaggtttcacagcatgtggaattgagagacaagaaagatcccttccaacttaagcttctagagcagctctgtctaatagaacttttgaaatggaaatgttctatgctgtgctaatacagtaaccactacccacatgtggcgatttaggacctgaaatatggcaattgtgactgaggaatggaatttttaatttcatctaattttaatttaaatagccacatgtggctagtagccactgtattgaacagcacagttccaaagctt

SEQ ID NO: 196487 - DNA, 1000 bp, Homo Sapiens
agtaccacgttgtttttgttactgtagccttgtaatatagtttgaagtcaggtagcgtgatgcctccagctttgttcttttggcttaggattgacttggtgatgcgggcccttttttggttccatatgaagtttaaagtagttttttccaattctgtgaagaaagtcattggtagtttgatggggctggcattgaatctataaattaccttgggcagtatggccattttcacgatattgattcttcctacccgtgagcatggaatgttcttccatttgtttgtatcctcttttatttcattgagcagtggtttgtagttctccttgaagaggtcctgcacatcccttgtaagttggattcctaggtattttattctctttgaagcaattgtgaatgggagttcactcatgatttggctctctgtttgtctgttgttggtgtataagaatgcttgtgatttttgtacattgattttgtatcctgagactttgctgaagttgcatatcagcttaaggagattttgggctgagacagtggggttttctagatatacaatattgtcatctgcaaacagggacaatttgacttcctcttttcctaattgaataccctttatttccttctcctgcctaattgccctggccagaacttccaacactatgttgaataggagtggtgagagagggcatccctgtcttgtgccagttttcaaagggaatgcttccagttttttcccattcagtatgatattggctgtgggtttgtcttagatagctcttattattttgagatacgtcccatcaatacctaatttattgagagtttttagcatgaagggttgttgaattttgtcaaaggccttttctgcatctgttgagataatcatgtggtttttgtctttggttctgtttatatgctggattacatttactgatttgcatatattgaaccagccttgcagcccagggatgaagcccacttgatcatggtggataagctt

SEQ ID NO: 196488 - DNA, 1000 bp, Homo Sapiens
atttaaaaacatcataatatttgcatatggcagtttattcaattttctaaacctaattaccttcatgatataactcagaattcaggttcaacatgatgcagcactggtctttgtaagtccaaataaccatgtgagcaatcagtggaaacttgctagaataccaataacaggaagtatttttatccttagaccttttaaatctttttaattttcccctaaataagcaaatgtggtagacaatataagaagcaagttttaagtcaatacattctaaatacatttcaagctatataatttcttcaaatcaagactatcacctgaaacaaaatatggtttttgaatttttcattcaacaagcaagttgttttttgaaccaactgaattttaatcaagtcatggcacacacagttattttaaccaatgtgctattgattaatttgcaattaaaaaactggatttgtgtcagtgaaaatggtggagtaaggacctccaaaaatccttttctccataaaagcaatgccaacactgagaaaacttgtcaaaatcaacttcttcaaaattctggaaattaaccaaaggcttgcaggaatccagggagcatatattcaagaaaaatgctgacttttggtaagaataacaagctttgtggcaaatttaacttatcctactccatctcccactccttagcttcctaatagcctgaaaatcaaagagcaaatcccactgaaaaccagtatggcagccactggaggggagagaatagggctggaacctctttgaaggcctatttccatagaattgtcattattgcagtctggtggttccccggaagactccattcacaaggctgttttttatttgacctgactgagagcttaccagtgcaaacctttttcctggctgtgtttgtcaaaaatagtaagaagcaactgcttaacaccatggctgcctgaggttgtgaatgacagctgggagaaacaacaggttaaccagaaagctt

SEQ ID NO: 196489 - DNA, 1000 bp, Homo Sapiens
gaaagaattatatcaaaaagatattttagtgcattttcatttgacaaagatttaagatatataaatgggttcttgaaaatgtatacacacacatacatattgataaatgaagcacgtcagtgctatacgagaaacacttatggaatatatgtcagtttgagtgagagcaattaagaattaatcatttttacttctacagcattgtctgaagtacacaaaataagtgttgagggttaaagaatatagctaaggtctgccatatagcaagtattgtaaaagcatgcaatgaacatatttaagatatacagagagaaatttctgtagaaacaattagaaaaaaattaaattctaaaggcatgtatataggataatataatatacacattatgtgaaaaatacaaccccgtgatgattgctaataatcatttctgaaattggaaatgctaactactaaattaattcatactagcactaaagtgattcatttacaaaaatatggcttttgttttaacaacacttattaggggaaattagacatctcccgcttttacactctctctctatatatacacacatatatgtataaatatatatgtatacatacacgcatatattagatagataaatagttagaagtgagaacatagtggtgcactcttaacatactggtaaatagtcccatagctgattacagaaaatatgacatttagtttgtgaaagttttaatgaagagatgtatttcatgtcaataaatgggtaagattttaacacagagagctggcatgcaaataaaagagcttaactaaaattgtgagcaagtggagatgaaagtgaaacttattcactattcccctaatattccctccatgtgaaggtatgttctttagtatgacactctactttcttatactttcttatgattattcagagttttaagagtaaagaactgagcctagctagttctacctccttctcagttgcttgtctaaattgtaagctt

SEQ ID NO: 196490 - DNA, 1000 bp, Homo Sapiens
actaaaaaccttgccacattcattacatgtgtaaggtttctctccagtgtgaagtgtatgatggtattgaagggatgacttccgactgaaactcctgccacatttattacacttgtatggtttctctccagtatgaactctctgatgttctgcaaggtatgaatcactccggaaaaccttgtcacaaaccttacatttgtatgatccctctccagtatgaatcttcctatgtctttcaaggtgtgatctgcgaatgtaaacattgtcacattcttcacatttgtaaggtttctctccagtgtgaagtatatgatggcattgaagggatgatttctgactgaaggtcttgccacactcattacacttgtaaggtttctctccagtatgaattgccttatgaattacaagggctgaatttcgaccaaaagtcttgccacactcattacacttgtaaggtttctctccagtatgaagtctacgatggcatctaagggatgacttctcactgaaggtcttgccacactcattacacttgtaaggtttctctccagtatgaagtctacgatggcatacaagggatgacatctgagtgaaggtcttcccacactcattacacttgtaagttttctcaccagtgtgacatctatgatgatatacaatgtattgcttctgattaaagatcttgccacatacatcacatttatattctctctctcttgaatgggttatgtggtgtctccttaagagtgagctataattaaaggctttgccacactcattactttggcaaggtttttctctcatgcatatttcctgtatttgtgtgaatgaagaatggaggaaattcttcccatacttattagaaatatgagttttgagcctacaagaaattctttgggattctgaagctgaggaagcaccgatagacttgtccaattggttactaattttccctttagtctgaaacatgtggagttcaggcagatgcgaatgaaagctt

SEQ ID NO: 196491 - DNA, 1000 bp, Homo Sapiens
cgggccgctcccctcaaggcagtgcctggacagggggccctcgtgggcagccatgagccttccttgggaccagcagttccagagatggaattaattctccagagggcagtggaggaggaagccaatgaagtaattctatttgttcaaacccaacttgaaagagggaaaaatgagtcaactctttctttggagtggctgccagtttccagataaagtttgttcaatcaaggagctccccatctgaggtgggcatgccaggcacgggtgtggtggtgacgggtcaggtggcacatgcaggatggtgaagggcaggtgagggcaggccgggtcaacacggaggcagcgcccctgcagccactgggtgtgtcccactctgctgccatgtggcatgcatgctccatcatcctctgccaccacggtgaagaggccagtgctgattccgtggacatggaaaactgagtgggagtcagaaaacctggattctaacactagcccagcttccagctagttctgtgtctttaaccttttctttctgtgcctcagttcctcatatgataaacaagaaggatgtacgacatgcatgacaggttttctcccataatcataaaaatatacaattacatgactataagtcaccgaacgagatctttatggcttcctagtgtgactgtcatgtaatttaatattggggaattacttgagctctcgagaagaactggaaatcagtttcagcacccccctgccccaccaaggtgatcataagccccacatccccaaagcatggcccacctctgtggctgcagaactgccaccaaggtcccgggaaacaaagaggttgacaataggccgactgattctctgtgtggccagaattagagccaaaggccaccagaagctcagcatctttcttattgttgcatctccctgtgttaagaaacgaagataaaagttacctgaactctagaagcagaatggaaaaaacgattcagaatcaaagctt

SEQ ID NO: 196492 - DNA, 1000 bp, Homo Sapiens
accgagcacctaccatgtgccaggtcggagccacagtgctggggaaatcatagttgacaagatggacaaggtttctgtccttcgtgaagcttacagccttgtaaaaatgggaatcaaaaaaggaaggggctgggcgcagtgtctcacgcctgtaatcccagcactttgagaggccgaagtgggcggatcatttaaggtcagtagttcgagactagcctggccaacatggtgagaccccccccccccgccccccatctctactaaaaatacaaaaattagccaggcgtagtggcacgcgcctgtaatcccagctgttcgggaggttcaggcaggagaatcgcttgaatccgggaggcggaggctgccgtgagccgagatcgcgccactgtactccagcctgggtgacagagtgagactccgtctcaaaaaaaaaaaaaaaaaaaaaaaagtggggggaaggattccacagcaagaaaacgctctaaaataaacaaaagtgcccgagggagtgagaaggtgctggctaccctgtggaaaccagaggatgacaggggtgacatttggcctgagacttcatcggaacatgctggttcacccctgtaatcccagcactttgggaagccgaggcggcgagaagatcgcttgagtgaggccaggaattcgaggctgcagtgagctatgatagcatcattgcactccagcctgagtgacagagcaagactcttgtctctgaaaaaataaaataaataaaatgaaatgaaattaaaataaaattattttcccagtggaggaaaggggcacaaacaggttcagctcaggcaggttcagctgccccccttcccccctcccccacaaggttacacagcctttgtagagctgggcagaaaccaaggggtggaactcccaggagggggcccagggaaggtctcttcctcatctgctgggaattttgggggtcctttgtctgggtctacattggaacctcagtcctaggaagctt

SEQ ID NO: 196493 - DNA, 1000 bp, Homo Sapiens
tagtttctcaattcctacaaaaccacacccaggccatcagcaatcattctatatgacaaatgctccttccaacaaccccacaatatcatcccttaccccaaaatctttcttcagtttaatctctcccactctaggttcccacgccacccctaatcccactcgaagcagccctgagaaacattgcccattatctctccataccacccccccaaaaactttttgccaccccaacacttcaccactattttgttttgtttttcctattaatataagaagacagtaatgtcaggcctctgagctgaagctaagccatcataacccctgtgacctgcacgtatacattcagatggcctggagcaactcaagaaccacaaaagaggacatttcactattgtgatttgttcctgccccaccccaactaatcaatcaatcaaccttgtgacattccttctcctggacaatgagtctcatgatctccccaccgcaccttgtgaccccgcccctgcccccaagagataaccacctttaactgtaattttccactacctacccaaatcctataaaactgccccaccccatctccctttgctgacactctttttggactcagtccacttgcacccaagggaaataagcagcctcgttgctcacacaaagcctgttggtggactctcttcacatgggtgtgtgtgacaggatagtcctattctaccctccttgcaatagtctttttgaataaagtcttcccttgctaaattcagatttgttttttatttgacagagtaatggtcggtgcacataaaagactaagcatgcacaaaagtgtgcacacaaagataaaggctgggtgtgtgcacttgaggaggctgtgctcagtgtatgtgtgtgtgtgtgtgtgtgtgtgtgtgtgtgtgtgtgtttatgggtactggtggtaggtggtttttgagttgcatatgcatctgagagtccagatagtctctgaatgtaaagaaagctt

SEQ ID NO: 196494 - DNA, 1000 bp, Homo Sapiens
ctagacagcaaggggactgcactggtctattccaggaagctctgcaacagcaccaggcctgagggacagtgacaggtagataaatagaaaaatgctgcttaggagcagggttgcaagcccacaggatcagattgtcaagtttggagctgaactccagcctaggggtattttttgttttttcattttcttttgagacagggcctggctctgttgctcaacctggagcgcagtgacccaatcatggctcactgcagcctcaaactcctgggctcaagcaatccaccctcctcagtctcccaagtagctgggactacaggcacacctggaaaattattttatttttgttaaagaggaggtctctgttgtgcaggctgttctcaaacccctgggttcaagcgatccttccacctttgtttcccaaagcgctgggtttacaggtgtgagtcactgtggctggccccagcccaggttttcctactccactgccttgtacctggctcacccccctctatagaagcccatgatctcttctggttcaggagcaccatggtggtgtgtggcttctctacactgtggtcccatgtggacacgtctcagagctgccactccaggagacactgactttggcctgtggccatcgagtgcatctgttggaaggattttgtttgcaagtgacatagaaccgaatgtaaactggctaaacaaaaagggaattcaatgaaccccgtaattgaagggtcagaatagaaagtgctaccttcaggaatggtttgatccagaggatgaaacagcattccaagactgcttatttctctccatatctggctctgtgttgcctccttgctcagcaggttctctcttcatagtggcaagatggtagccccagcctcacattctctcaggctagctgacagctggctggggaaaagagaaatgttttctcccggtagcccttcctccagtgtcagaatttcttcatgctggttggatctttatgatc

SEQ ID NO: 196495 - DNA, 1000 bp, Homo Sapiens
ttcttttttttcttttctttttctttttctttttcttttctttttttttttttttttttttttttttttgagacatagtctctcactctgtcgtccaggctggagtatagtggtgtgaccttggctcactggtactttctcctcccaggttcaaaccattctcgtgcctcagcctcccaagtagctgggattacaggcacccgccaccacacctggttaatttttttgcttttgtttttgttttatcttgagacagtcttgctctgtcacccaggctggagttcagtagtgtgattttggctcactgcaaaccttcgcctcccgggttcaagcgattctcctgcctcagcctcccaagtagctgggactacaggcatgtgccaccatgcatggctaatttttgtatttttagtagagatgggggtttcaccaggctggtcttgaactcctgacctgaggtaatctgcccacctcaacctcccaaagtgctgggattacagacatgagctgccacacctggccacaagtttcatattaaatatatgatttgcaaattttatcttgttctgtgggttgccatattttcttgatggtatcatttgcagtacaaaagttttcaattttgataaaatccaatttctcttatttttatttgtattgcttatgcttttggtattgtgtctaagaaagtctaaacccacctaaggtcatgaagattttctcctttctgttttctactgatttatgctttctatttaattttcatttctaggtgaattggcaagtattttccggacaatgttaaataacagtgggcttctcttgttctattcctgactttaatatttcaccattaatcatgattgtatctatgggatgagatcttttaaacttaaaaaaaagcgtcctatattactagtgtttataaataattaaggactcttttacccccaaatgtatttaatctatagacataaatgtgtttttttctcttttgatc

SEQ ID NO: 196496 - DNA, 1000 bp, Homo Sapiens
atgcctgctccacccacagttgatggcagcagccacactgagggacctagctcaggtaaatgctgtgtattacaggcttcaccccagctagagtaatacaggtagaggaaccaataggtacaaaggcttggaggtgcatctgagccatgaacatttcagaacctggtaaccatgttgtgtcatggaaagtggggaactacattacccagaaagctctgctttaaacgacagccggtcagagccagtgagcactcggaaagaaggcatttccacgtgtgcacgtaacgtaaggccgagacttccggggtctctagtagcggctgtgtatcggcgatgcgggtgtttccccagtttgtggcccctgagtgctgggtgggaccgcggtgactgaacctagaaggtggagaggaatcgtcctcggtgcccagaggcggctctgcagccccgtgacggcgaccactgctcccgggccgtgcttccccaagtagtccgatggcagcggctgtgccgaggcgcccaactcaggtaattgtggtgccttctgtgccctcaggtcaccccatcgtcacccaggtcctaaaccagcgagggagcggctcctgctcgtgggtctgtagccggtacccggcgtaggaacactgaggcgctcacaggaggcctctccttgtaaccgtccagtgggttcacgttgccagctgcctagacagagccgatttatgaagactggggaattgcgatggagaaatagtaattcacgcagagccgtcctgctgttcgggagacaggagttttattattcaaatcagtctccctgagcattctgggatcagagttttcaaaatttggcgggtaggggcttgggaagtggggagtgctgatcagtctggttggagatggattcatagggggttaaagtgagtttttcatgctgttttctgttctgggtgggatggcagaactgattgacccagattaccggtctgtgtgttgtccgctgatc

SEQ ID NO: 196497 - DNA, 1000 bp, Homo Sapiens
ctgcaccactgactgcactccagcctgggcgacagagcgagactccatctcaaaaaaaaaaaaagagagaaagagagagagagagagagagagagagggagggagggagagagagagggagggagggagggggagagagagagagagaaaggaaagaaaaagaggaagaaaggaagaaataaagaaataagggtaaaaccaaacaaaagaaaaacaaaaacaaaaaaacaaaaaacccaccaccctggatgcgatcctccagcagacaccaagaactgagcctctctgcctggcctgaggacccagcccgctggcctctgccccacagcctcacacagccaggctgtaccagagcaaaaggtctatcagcaactcataccacagcggggcccaggcagggtttacagctgtggcaatgcctcctgcatgttttcctgtcactagctaagacagccaatgggcctagaaaagcaggggcgcgtcctcaatgctgactgagaggcactgccacagggggcggtgtcagacctgccttgcctgtctgcttctccaactagtaaatgggtgtgcctgcaagaccatctaacacagggactgcttaggaattagggaattcctgcagcctgtgcaacatgtcaaaactccttctctacacaaaatataataattggccaggtgcagtggctcacgcctgtaatcccagtactctgggaggccgaggtgggtggatcacctgaggtcaggagttcgagagtagcctggccaacatgatgaaaccctatctctactaaaaatacaaaaaaattagctgggtgtggtggtgggtgcctgtaatcccagctactcaggagcctgaggcaggagaatcgttatgaacctgggaggtggaggttgcagtgagccgagatcgcaccactgcactccagcctgggtgacaaagcaagactccatatcaaaaaaagaaaaaaaaatagtgtctttgcagatataattaaggatc

SEQ ID NO: 196498 - DNA, 1000 bp, Homo Sapiens
ggtaaaggacatataatttcagtgggaataagttcaagagatctattatacaacatgaatattacagttaataataacgtatacctgaaaataactgagagcagatttttaagtgttctcatcacaaaaaatgacaaggatgtgagatgatgcatatatgaattagcttaattttctgcaattatggggtcttgccacatttccagactggccttgaactcctgggctgaagcaatcctcccacctaagcctcccaaagtgctgggattatacatgtgactgagccactgtgcccgggtctgccaatgttttgtaaaaagctttattaaggtagctttattaagcacgtggtggctcacgcctataatcccagcactttgggaggctgaggtgtgtggatcacctgaggtcgggagtacgagaccaccctgaacaacatggagaaaccccgtcctaagtaaaaatacaaaattagccaggtgtgatggtgcatgcctgtatgtaatcctggctacttgggaggctgaggcaggagaatcgtttgacccgggaggtggaggttgcggtgagccaagattgcgccattgtactgtgcagcctgggcaacaagaacgaaactccgtctcaaaaaagaaaaaaaaaaacactaaatacacctccaaaatttccttgtattttgtttttggtgataatatttatcatgagatccatcctcaacataattcaaagtgcataatgctatacgattaatacaggaactatgttgtgtagcagatctctagaacttactcatcttgcataactgaaactttatacccactcaacagcaattccccattttccccaccctgtcaagggtttttgaccttgttttttgaagccaaactcagaacttagatccagactgcaatggccgtgtttgtagacactgcacaaaactgcccatgtcataccatcaacttgacattcacctctctcctgacaatgagatcaggaattc

SEQ ID NO: 196499 - DNA, 1000 bp, Homo Sapiens
ggcccgacgtggctggtggggggcactcgagccacaccactgctggtgaccagcggcggggccgaggggttcaggcaccgtctctctgacttctccctgtgaaataatcaagcacaggaacaagtgagcactgcctactggtgctgcctcacatgcggcttcaagacgggtctactccacaccacagggcggctttgatacagggcgacttcgagatgggtctactccacaccacagggaaattccccccagagcattaaggcaaggaactcattctgattggtcaaatttactataaaggtcctttcctgtcaaacctaagacacatttgtagaactttaaaagcatgactaggccaggcgcggtggctcaggcctgtaatcccagcactttgggaggcccaggcgggcagatcgcctgaggtccagagtttgagatcagcttggccaatatggtaaaacccggtctcttctaaaaatacaaaaaattagccaggcgtggtggcgggtgcctgtaatcccaggtacttgggagactgaggcaggagaatcgcttgaacctgagaggcagaggttgcagtgagccgagattgcaccactgcactccagcctgggcacgacagagcgagactccgtctcaaaaaataaataaataaaaataatccgtctcaaaaaataaataaataaaaataaataaaagcatggctaaggactggataagcaacaggaactaatccaatcactagtatttagcactggaagcctcagcactccattcggcacacgagaaatggaaataaacacaggtttcaaaacccacttcacactcacttttccagctccagctgggtcttgagcttcttctttgcccccatggtaagagactcaaatttattcagatcttcttcagtaaggctcaaaaactttcacagaaaaaacaaattacaaagttacggagacataagtaggactctgagaacaaagaacttggagttgaattc

SEQ ID NO: 196500 - DNA, 1000 bp, Homo Sapiens
gaatcattacagcaagaagaccacgctgctctttcctctctcaggtagaagtgaatattgcctttcctttggatgacactgtacttttgtgaaatttgataagggcactttctcagtactttacccctggttatgtcttctgcttcctcaggatatattaagttccctgagattctggacaacagctaactcctcactgaattccttgtcacaggagtcaatagaatataaagttgacatggtttctgccctcagggagtctcaagatttagattaattttctctcaaactcagctgcacattagaattaaccgggaaaccttaaaaattccattacccaggccttactctaaaccaatttaaacccaggaatcagtatttttgaagttctctgtgtgattccattgtacatccaaagtaaataaccactggtttagagctacactatccaatagggtagcaactaggcacatgtggcttttaaaatttaaattaaatttaaaaagcagttcttcaaagtactaatcccatttcaaattctccagggccatttcaatcattacaaaaagttctattagtcaatgttggtctcaggtactaaaaaccctcatctgaagcataaaacatctgttcaatgaatgacggtgtgcaaagaatatagcgctgggcattcaaagacctgccactaactcattgtgtaatgtccagtaatctagttttcctgtctgtgaaatgaaaagctgggtaacatgagtggctctccagacaagatctttggaatatactagaaaaccaagggatcagggaacacaatgccaggaagagctgaaccaactggctccacactccatagtaaatagaacagatagctgaattccacacaatttttctttgaaaagcagctctgctgcattacaaaaaaagaaaaaatgaaaccatgtctgatatcttgataaccaacagactccctgtctcagtccagcagcaggttagtgaattc

SEQ ID NO: 196501 - DNA, 1000 bp, Homo Sapiens
acgatgaggatgccgatggccgtggcagcatttagttcatgtacagccctctacaccccaggcctgcggcagacagttcctgcctccttccctttgattcccacagcagccttgaagcaggtcctagtgttttctccatttatagttgaggatactgaggcccagggaggctcagcctgccatgcagagtggggattccagccagacttggactccagagcccccatgcgacaccacttgccaacaggtaacctgggtcccaagtactcccctgcgatggcaaggtggggtcagcacggcaagccttggaaccctccccaggtggcaggttacataatgagagagaagtcaagctgcaggctcaaggtcaatgtcgaaaaacaaaactctccataattccccaggaggtggtggtaggtgttcagaggccaccacctgtgaggaccaagctggcacacttccggagaggccaccagcattctggccggaactggagatgccccgcagggctgggcacgactgcgtgcggaagcagcgggcaggagtcaagctggccctggcctggactagtctcctccagcacggagcaggtaggagcccaggactaaggtcatagtaagaggcggccacccgggcaggtgctagccacgggccacagggagctttttcagatccgggttcacgctcacgaacgaggaacctgccctaacagaagcaggccttgcctggccccgggagggttcatttagtcattcaacaagtagttactgggtgttgtgatggtcaattttatgcatcacattgggtgggcgatggcgcccacaagtttgtcaaatgttattctggatgtttccatgagggtgttttggaatgagaggaacattttgatcggcggacttccagtaaagcaggctgccctccagaacatcggcttcttccagtcagtggaacaaaaaacacagagcaaaaaaactgatattccccaagcaagaaggaattc

SEQ ID NO: 196502 - DNA, 1000 bp, Homo Sapiens
actgaccatccatttctaccagaagctggttgagcgtctgctcctcctccgtgttggagaagccggacatggtggtggagcgcttcttgcccaccgcgtcgatctcatcgatgtagacgatgcagggggcccgggctcgggcttccttaaagaggctccgcacacgggcagcgccgaggcctgaggggacacagagagaatcaggaaatgggcagttaataaaaaacaaagcctcttcctgtacccgggccagacaaagttctacaccaaggacaactaaagctaccagctccattccctacaaacagacacacggcagctgctcgcgggggcccctggccacccctcagggttcacacgcaccgtgctggccccccaggccacaagtgacggtggctttgaagcaaacatcatgtgcttcgcagacaaaacccctccgccaacccagacctcgctttccttctctactcccccacccacccgtgtccctttcagtccagacaccagaggaaggatgtgtgaaaggagccaggtagtcagccaagcccacccacagcccccaaccacagcacctacctccaatgacctccacgaactctgggccggccatcgccaggaagggcacctgagcctccgtggccaccgccttggccagcagcgtcttcccacagccgggggggccgagcagcagtgcgccctttgggaccttggcgccaagctggaggaagcgttctgggctctggacggcagcagacaatgcaacactaactacttggggattccgtttttttgttttttagaggtaaggtctctctgggtcacgcaggctggagtgcagtgggtgccatgatagctcactgcagcctcaaactcctgggttcaagccaccctctcacctcagcctctcgagtagctgggaatatacaggcatgtggcaccacgcccagctacttttaaaaacttcttgcaggccaggtgcggtggctcacacctggaattc

SEQ ID NO: 196503 - DNA, 1000 bp, Homo Sapiens
ccaagtagctgggattacaagcatgtgccaccatgccctgctaattttttgtatttttagtagaaatggggtttctccatatcggccaggctggtctcaaactcccgacctcaggtgatccacccaacttggcctgtctaggtttttttattatgaaatattttatacacaaaaaccatacagcatatatatggggtgtaatgaataattacaaaacatatgtatccatccacatctcaagaagtaattcattaccaacaacactgacaacttttcataccatcggcattaatctgcaaatcagaagtaaagcaggcagcctgcagccagataaaacctgcagattatgttttatttggctaatacagtgagtttcttttttctttttggttgccaatatttaaatatcaagaaacttcacatggaattcagcattctggagtatcattaaaaatggaagatgaggcttcactactcccacattcaccatgacaatacgtggccatgttcccctttgaatgaacacgtactcaccggttcactacagtccccccattccctactgtcctatacccgcctcccacttatttattttactggcccttgcacttgagtttgtgacccctgcttatacaatataactgtggtttccaaccttttggaatatggaaaatattctttaaagtaaaaaaatttcacagactctcaataggtacttatactaagacaggtccacaatccctatctaccattttgaaatccaaaaagctctacaaaataagttttttttgtaacttatttggcaacaaaagttgacctgagtcgacatgaagctatgtataatctttacgcatccatgaagtgtgaaaatattcatacattttgctatagtaacaataatatgtttgactatcgggtgttgtcccagagcccagagcattatataaccacatcatacgtgcattattacttttagaaaaatctgaaacaatctgaattc

SEQ ID NO: 196504 - DNA, 1000 bp, Homo Sapiens
tcagggttggcctcctgccagtaaccctggcactcattgttcattcttctgactatcgtcagtcataatgagagctcgaactggtgaaagtgcagggagctcaccatgaccccagcccacagaggtcctgggtgcgtccctgccctcgaagcagcactctggatcccagcgccaccctcatgtccatgtttgcacctcattggctgtgacagaaatgagacatcattgtcacacgctggcctgagggtcagtgggccttgctttggacctcagtttccccaccagtaacagggttcagagcagatggtccctgagtgagtcccagctctaagttctcccagggtctcctggacaatgaagcaccagggccaacctccatttgctacaggggacatcctcaggctcttctctgctaagaccccacacctccaagtctcctcattttacctttaaatagctgtttcatgacctgcttttttgacggtaagtagatttttggaaactgaaacccctgacccttcctcccagcctgggcctgcccttggcaggataggaggccttatcggtcctgccacttggtctgggcctcaaagggccaccgccatctgcaggagggccgggtggggttcacagacgctatctgggacttgcctggacacctccaccttctcagctgagtgttgctgccccaccagggagaaccactcacacacagtagtaatagaaataatttaaaattcatgctgcaagttcctgagcgccctcccaacactgaggtgggggctagtctaatccccatcctagaggtgaaaacagtgaaactaggactcacaaggcaaattagcctgttcagggtcaccgagggtccactctcatgggagagtttgcagatgcccaatccggcattctgctgagtgtccagtggcttgtaagtggccagacaccctttgagctcagcctcagctgctcaggcacagaacatgcctggagcttggaattc

SEQ ID NO: 196505 - DNA, 1000 bp, Homo Sapiens
tgtgagccttatggtttggctgcttgtcaacccaacacaattatttcctgatctttagccaacacggcatgtctcttcatcagtaagtgaataagcagaatggacctgtgtgtgtgtgcacatgcccacgcttgtgtacgtagcatgtgtgcagcataggtgtaaagcctgcaggcacaccttgcattcttgactaaaattccttctccctcataagaagagagattacatgattgtcttagtcattttcttttcgtgaaatggttctgggatggatagagtctgctgggatctaagctcccaactggaccaggcaagcataaaaaggcaggctactaacacccactgtgtctgtgggtgctggcaagaagggaacctcagataactatgcagagaaagcctgactttggccattaaagctaaacacttagggagaggagtcagaaaaacttttactggtcttacctgcccatactctcttatctacacctgtcttcaaggtaacgcaaagaggctacttcacttcttgaaggtggagagcttatgctttctactgaaacttaatttacatagtaaaactcccctgaactacttcctctataaattgcaaactcagaaagaagaaaagaagttgtaccttctaattcaatcaacttccccctaagtcttctgtacctagcagatgaacgtccatcacacctccaacctaaggaattctccctcttgcctcccagcatctagacttagcctagctgcttaaaatcaaattgcccttcattgtttaaacataactgatgtaatggctagctctggtttcatgatgcatttgcttgtattgaccataactactggtttgcaggaacctgccaatccttttgaaaactggtaattttttgaaagcaaaatattttatgcaattcagaccactttttgtatgcacgtaatcatattttggtagcaaattctttgtgctattacacaacgatgccggtaagaattc

SEQ ID NO: 196506 - DNA, 1000 bp, Homo Sapiens
aatatcagcagcaccagtgttaatccaaagtgtacctgaggttgaaaagccaacagtggcacaaaggccactatctaaaaacgtcattttagtttagtaataaacttgaagatactggacaacagtcattgggtttcactttaataaaaatatacaaaagaattctgaattcataaagtcctttgttataacagttaaggaaactaagacttttttttttttgagacagagtctccctctgtcacccaggctgaagtacaatggcacgatcttggctcactgcaacctccacctcctgggcgattctcttgcctcagcctcctgagtagctgggattacaggcatgtgccaccacctccagctaatttttgtatttttagtagagacagggtttcagcatgttggccaggctggtcttgaactcctgacctcaagtgatccacccgccccggcctcccaaagtgctgggattacaggcgtgagccactgcgcccggcgaaacgatgactttttaaaaatggttctttgttaacttaattacttgctaaattctaaacatttcccacaattttattttaccctttaggggaagtcatgatcagtatttttatctggaaatggcttctgcgaaatatgccactaggattattatgaatgggtctgttataaatggagttcttgatcaacatttccttatttctaaaagctaaatgagtcacaacaaaatgagtcacttcaaccttggtactgttcaaaattcaaagataacattttttaaaatctcctttttttacatataaaccaagcaaagctctggacagttaagacagtcaagaccctaacagtaacggaaaaggcagaattgtatcccagttcccacctaaagctttccaaattcacactgacagtaaaaagcattttctagaatcaattaatttgacccaaagctttgaaaataacagtcatttaggaataggttcttagtatcatgattaagctt

SEQ ID NO: 196507 - DNA, 1000 bp, Homo Sapiens
aatttttgcctgttgatgaatttttaagtatcaatttcttatcgttttaattcctagtttcttggttacttactagtgaaggtgagcagctttaccaatatgtttattggtaatttgtattctcccatgatttgcttgtttttattctttacctattttctgaatatttgcatttttcttattgaattatataaactctttgtacatcggaaataataactattagagataaatatatatgtctgcaccatagaaaaataggtgtgcaaggatatgtgtgaaatatatacatatatacacacatatataaaaaacactttctgttttctttcaaccatttgttgtacttttttatcacaaaggattttctttttttacttttatgtagtcaaatctgtacattttctgtttatagcttctaagttacatgtcttcatcagaaggcttcctgctgtaccccacctcagtcttacaaattataaagatgttaaatttctttactatatacacgttttaaaattaaaatttagatcattaatccaactgatttttgttttgtatatagtgtgaggtaagaaattttcctagatgatttcaatagttcatctttcttccattgactttaaatgtcaccatacctctgtgtgtgtgtgtgtgtgtgtgtgtgtgtgtgtgtgtgtttattctctaatcttctctattgagctatttctcttcttaggccatcactgtgcaattcttaagtgcatacttaatcgaaggatttgggtcattaatttctatagaaaagtgcagaaatagactgcctgagacccagtgctgctagttaagatacaagttttagaaaaaatatccttcacccaaactcgaattaagcactcaggaatgtgctggggttgacaccaggtatgtgaaactggtgatcaattaggcatagatccatattctctggaacaggtaggaggctcaagaaataagagggaggggacagaacaagctt

SEQ ID NO: 196508 - DNA, 1000 bp, Homo Sapiens
gtgtagggaggtgtacttaggtggggaaaccaaagtcaggtaaaagttaagtggatttcttcatgggaaggaagaaagctgtgctggagaggaagcaggagggggcttgggggaaggcgataagattatttttcttgcacccggttggtggttacacagttgtgttcactttgtcatatttattcagtgggacatttatgtctcattacttttctgcatgtatatcacatttcataatttaaaaggtttaaattgactgggcacagcagctcacacctgtaatcccggcactttgggaggccgaggtgggcagatcacttgagtctaggagttcgagaccagcctggccaacacagtgaaaccccgtctctactaaaaatacaaggccgggcgcggtggctcacgcctgcagtcccagcactttgggaggccgaggcgggcggatcacgccgtcagaagatcaagaccatcctggctaacaaggtgaaaccctgtctctactaaaaatacaaaaaattagctgggtgtggcggcacgtgcctgtagtcccagctacttgggaggctgaggcaggagaatggctagaacccgggaggtggagcttgcggtgagccgagatcacaccactgcactccagcctgggggacagagtaaagtgacttagaaaactaggcttattaaaactctgccttacaaactgggcagactagatgtcttggtaataattagaagattattatcaataatcttctaattattataatgataattagaagattatacgggggcacttgctctgtgctaggcactgttctaaggggtttattatttaatccttgcaacaaccctataaggtgctactattgttcccatttcacagatggggaaaccgaggcaccgtgccgttaaatcacttgtctaagttagtcagtgctgaagatagatttataaccaggccatctagccccagagtcgatgctccattccccaccgcaagctt

SEQ ID NO: 196509 - DNA, 1000 bp, Homo Sapiens
tgaggtcttggtgaacagggaagtctgggatcccggtgtcctgttggggatgggttaggaggcaccagcatctgtgtagctgacagtggcagggaagagaagagaggggtgtcctctgaggaggatgaggagggacaaggtctggaactgaccctgggtcatgaccttgagcatttagtccttgactcgcatcagcccgatgaggtcccaggacccagtgtcaatgcctggagctcctgccagcagcatcagggtcacacggagaaatgcagactctaggttccaccccagacttacttgggttcaggtccacatatctgacttcagcaaaccctgcaggtgctgaggatgtacactgccatttgagacacatttccccagaaagagaggctggtgggaagattccactgagctgagagaagccccccacagctgatcttctcctgtctccatttggttgaaatttcacattttcttttcttttgaaaggggaagctcaaaaggaacatgatgccctgggctttacagaagaaacgagaaatccacatggccaaggcccatcggagacgagctgcgaggtctgctctccccatgagactcaccagctgcatcttccggaggccggtgacaaggatcaggtctcatcctgacaaccaggtcagacgcagaaaaggggacgagcacctggagaagccgcagcaactctgcgcctaccggagactgcaggccctgcagccctgcagcagccaaggagaaggttcaagtccactgcatttggagagcgtcttaagtatccttgcaccggggacggccggtgaatctctggacagagctggtgctgagcgtgtgcgcagcccgcttgagcccacccctgggcggtttccagctgtggcaggggggccaaccccaggaatgggttgtcagctcccaccgcccctctctggccaattggtgactcctgcagatatccggagacaggccaggagggtgaagaaagcca

SEQ ID NO: 196510 - DNA, 1000 bp, Homo Sapiens
ataaaataaaatataaaaaattaaaagattaagtctctcccgcttatggatatattgcatataatggggagtgtgagatgccttcaaacttaacagttacaagaaaatacagaatctgccagaatcacaacgacaagaaagattctgaattgtaaaatatagacagaggttgggacaattaaaaaatgaagaaaatcctgcgggaacccaatgcactgagtttcaacaagcctgggaatccactgtctctgagactctcacagccagccagagtggttttcctgggaagctttctgagttgttctctatgtacagagaaggcatgggccagcctggcttatttcctaataagagaagagtggtcttatccaccaccttctttccagcacattgcacatttctgggactgtcacccctgcttttactactagacagaaaagaaaaaaaaaacagcagagaaaaaccacaatcttgcccttttgtaagcaagtgtgatattttcaccttcaaaaagcagatttgtgaagcttaactttgttcatctctataaagtgctttcattttttgaaaaggaaagtgatccgtgtgtgggcttaatctaggcttaatctgatctaagatggaattatttaaaataatgtcaccgtagtttgggattaatacctcttgtttctctttggagacatggcttttaggaaagtatgagttaactgtcgctatagactgtggttccctctagagagtattcagttttctcttaaagcaaattcattaggaaacagaggatcagcaaaaagtctagcctggagtacgatgtaatgggtgaaagtgtatttcttccatgaaagcttggttttggaagttattgtcattatttgaaaacccatgaatctgatatgaatctgatatgactttgtgtgtgtgtgtgtgtgtgtgacggagtctcgctctgtcgccccggctggagtgcagtggcgctatctcagcttacttcaagctt

SEQ ID NO: 196511 - DNA, 1000 bp, Homo Sapiens
gcggaggcaggagaggcaggtacactcaatgtaactttacagaaatacatcgtaatttctgtctgaatttttgccttctcatttctctaaaaatgtttctgtataatacaaatccttctttcactatttgccttagtttcagtgcccacatcatagaagggtcatgtcataaaagaagtcgaaagtcatcttgagtaaccaaaaccctttgccagattgtctaacatcaatttgtgttctgatattgcctcttctacatcttcctcattgtctggcactggttcagtagcactcatctccatcaagttgtcatcttctgttaatccctctggagtggcatctattagctcttgatttctccaagatccatatgttgagacgcttcacacacacccctcacccacctttttgccatatgctcaatctctttcatgattttcttgattgactctgctgtaaatcctgtgaagttatgcacaacatctgaacacagttttctccagcagaaacttgttgttttgagattgatgactttaatagcttttcctgtaacaatgtggcatcttcaacagtgtaatccttccagactttcttgatgttctatcagggttctctttcatagcattgacaatcttttccaaagagtaccatatataatgggcattaaaggtccttatgacccccttatctagaggctggattagagatgtgtttgggggcaagtagaccactttgatgccttcagtgttgaactcatggggttctagataaccgaggggcatccttcaatatcaaaagaaccttgaaaggcagacctttagtggcaaggtacttcccgacttcagggacaaaacatcaatggaactgatccagaaagagttctcgttgtccaggccttcttgttgtacaaccaaaagactggcagctggtgtttaacattttccttcaaggcttgggggttttcagctttataggtaagggcagtcctgatgataagctt

SEQ ID NO: 196512 - DNA, 1000 bp, Homo Sapiens
tcaaaattctgcagaagtttgatcttccttcttaaggactttgtgtgaagtaattctttactgcttttaaattgctgttgatcagcttctgggtttttgggttctaacttttttgggtatattgaagacacagtgtattacattatattacatttttaaacgttaagttatttttctgccattgtaaatacaagtatcaaaatattcttgcaaagaagtaaacatttttctcagcaagcatatccttttagtaagagagtggaatgctaaacagttcttatccagcattttggacatcttttattttttgtcagagatcctgtctacactgaaaatattaattatataaacctgttgtctctcacctctacattggatcacatggtcacctgcctcatggaaatgccttttttaaaacttcgatttgcagaactccactatttttatacctagctacagttttgagaaagaagaatcagaaccctgacccacttacggttgctgggacaattccccctcccgcatgtattgctgcagtgcccaggacagtaaaatggactacaagcggcgcttcctgcttggcgggtccaagcagaaggtgcagcagcaccagcaatacccgatgcctgagctgggccgagcactgagtgctcccctggcatccacggccaccactgcccccctgggcagtctgaccgctgcaggcagctgccaccatgccatgccccacactactcctatcgccgacatccagcagggcatctccaagtatctggatgccctgaacgtcttctgccgtgccagtactttcctcacagatctcttcagcactgtgttcaggaactctcactactcaaaggcagccacacagctcaaagatgtgcaggagcatgtcatggaagcagccagtcggctgacctcggccataaagcctgagatcgccaagatgctaatggaacttagtgctggggctgcaaattttacggatcagaaggaattc

SEQ ID NO: 196513 - DNA, 1000 bp, Homo Sapiens
ctgcctcagtctcccaagtagttgggattacaggtgctggcaatcacacctggctaatttttgtatttttagtagagacggagttttaccatgttggccaggcttgtctcaaactcctgacctcaggtgacccgcccacctctgcctccaaagtgctgggattacaggcataagccaccatgccctgccagggagttcttatcttgataaaggattacatgagccctctaaaagatgtttgtttaaacattataggtggtggcagcagtagtgggcaaaggtgtagtgtgcagcacttgattattttactgctgtttctgctgagcctgtggcagcccagccctgtgtgcagctctctccctgccccatgatgccaccacattccacctgctggcatggagacatgcacctgaggtggaccctaggagcccggcctaagatgggctcctactgctgctgcttgggctgctggcctcaggactgcaggaaacttgggggacaccagggcactgagaacagccacactggcataatcaacaccttcttctggaacatccattgtcccctcctgttgtgaggagacaatgtctactgctcagaagctcttgacccagctgactgaaaagttcgtgtttagcgaatatatttctacagacattgtggagagtgtggtcagaaatttacagatttaatgctatttctatcaaactaccaaaacattctgaacagaactaaaaaacactattttaaaatttacatggaacaaacaaacaaacaaaaccccaaatagccaaccaatcctaagcaaaaagaacaaaactagaggcattacattacctgacttcaaactatattacaaggctatagaaacccaaagcagcatggtactggtacaaaagcagacttacagaccaatgtgatagagagagctcagaaatgccacccatttacaaccatctgatttttgacaaagctgatgagaggaatgtgtgaagaattc

SEQ ID NO: 196514 - DNA, 1000 bp, Homo Sapiens
gagtttgcgaccagcctgactaacatggcgaaaacccttctctactagaaatacaaaaattagccaagtgtggtggtgcatgcctgtaatcccagttactcaggaggctgaggcaggagaattgcctgaacctgggaggtagaggttgcagtgagctcagattgtgccaccgcactccagcctgggcaacagagtaagactttgtctcaaaaaaaaaaaaaaaaaagccaggcacagtggctcaggcctgtaattctagcactttcggaggccgatgggggcggattgcctgagctcaggggttctagaccagcctgaccaacatggagaaaccccatctctactaaaaatacaaaattagccgagcatggtggtgcacgcctgtaatcccagctacttgggaggctgagacaggacaactgcttgatcccaggaggtggaggttgctgtgagctgagatcacgccactgcactccagcctgggcaacaagagtggaactccatctcaaaaaaaaaaaaaaaaagattagagaatttgaagaactgcaatagaatctatccaaaataaagcacagaaaggaaaaagtgatgaaaatgagcacagagcctcaatggcctgagaaataagtggctttacctatgtgactggagttccagaaagagaggagagaaagggataaccaaaaaaaagtctgatgaagtaatggcctacaacttttcaaatttgatgaaaaccataaacttgcagatgtaagctccataaaccccaggtaggctaaacacacatatttataaaacgcaccaagacacattataatcaattgctgaaaaccagcaataaagagaaacatcttaaaagcagctagaaggggggaaacatattacattcagagaatcaaagataacagtgccagtcgacttcttgtcagagagtgtgcaagcccaaagatgatgcaacatgctgaaagaaaaatcaaaacaaactgtcaacctagaattc

SEQ ID NO: 196515 - DNA, 1000 bp, Homo Sapiens
agcaaaatatttctatttgataaatgtgtgaaagcctttcataaattttcaaattcaaacagacataagataagccatactgaaaaaaaacttttcaaatgcaaagaatgtggcaaatcattttgcatgcttccacatctagctcaacataaaataattcataccagagtgaatttctgcaaatgtgaaaaatgtggaaaagcttttaactgcccttcaatcatcactaaacataagagaattaatactggagagaaaccctacacatgtgaagaatgtggcaaagtctttaattggtcctcacgccttactacacataaaaaaaattatactagatacaaactctacaaatgtgaagaatgtggcaaagcttttaacaagtcctcaatccttactacccataagataattcgcactggagagaaattctacaaatgtaaagaatgtgccaaagcttttaaccaatcctcaaaccttactgaacataagaaaattcatcctggagagaaaccttacaaatgtgaagaatgtggcaaagcctttaactggccctcaactcttactaaacataagagaattcatactggagagaaaccctacacatgtgaagaatgtggcaaagcctttaaccagttctcaaaccttactacacataagagaatccatactgcagagaaattctataaatgtacagaatgtggtgaagcttttagccggtcctcaaaccttactaaacataagaaaattcatactgaaaagaaaccctacaaatgtgaagaatgtggcaaagcttttaagtggtcctcaaagcttactgaacataagttaactcatactggagagaaaccctacaaatgtgaagaatgtggcaaagcctttaactggccctcaacccttactaaacataacagaattcatactggagagaaaccctacaaatgtgaagtatgtggcaaagcctttaaccagttctcaaaccttactacacataagagaattc

SEQ ID NO: 196516 - DNA, 1000 bp, Homo Sapiens
agcgcagaggaggaggaggcggcggcggcggcggcgagagagcgagcacccagcgcctgcacccaccccggggccgcccgggacgccccctcccgagcgcgcgcccccccttttctctcgcaagcgccggggcaaaggcggagacagcggggtccctcctccccccttccctcctctagggggaaccccccttcccccttccttggctcagcgactgcaccccctcccttgcccgcccctccgcccctgccccctccctcccccgcccggggccttcccgggccttcggcggctgcaaagaaaaaaagagagagagaaaaggggggaaaaaaaagcagcagcggagggagcggcggcggaggagagcgcgcgcgcgccccctccctccctccctccctccccctccccccaatttccaccgcggccaattcatggacaggaactaccccagcgccggcttcggggacccgctcggcgccggggcgggatggagttacgagaggtcagcgaaagctaggtaaggagctgagggtggcctagagaagggggccaaggggtgggagcccagccgggccgggccgggccgggccgggcccgcccggcgacgcgtgcatcgcaaactcccctccggcttgcaagggagcggccttcctcggtttgtaacaacgccgccgccccagtttgcaaattgcaaactccgccaaagccagctccggcatgcaaagggagaattgcagcgggaaaatgggggtgcaaaacaatttcggacgggaaggccttgggaaggtgggagggactggcgaagcaaggcctggacttccccccatccttggattcccggcttggtgacccctcccccccgcgccccaggcactgctcttgcaaaggtgggaagaagagaagaattagaacgcagatctggggggcgcgaaccccctctcaggtcctattgttccgggactgtgcgaggccgcgccactaggcgcccccccaagaattc

SEQ ID NO: 196517 - DNA, 1000 bp, Homo Sapiens
gggcttctgtgtgcaaatccctagacaacattaagactgtaaataccttgaacgcagctaccctgcagcctatggaagaacctgattggaaggatggtgagttacctcactgctagtaggaccttccccactgttgcataaatacagtgggcaaagtgttctcaagccaggaagatctcagagatacccccttggagagcccagatgttgaatacttcactgatggtagcagtttcataacacatggggtgtgatatggaggatatgcagtagtgacacaacacttggtggtcgaggctcaagccttaccttctgggacttctactaggaaggctgaattaataacattaactagagcacttttattggccaaggggaagaaagtaaatatatatacttctcaaaatatgcttttgcaactctgcacacccatggggtgacatacaaagagagaggactttagactatgagaaaaaaagaaataaaaaataaaaaggaaattctacaattattagaagccttatgggctccagagaaggtggctgccattcattgcagaggacaccaaactgggaaaagctataaggttcagggcaacagaaaggtggacccagaggctaggcaggcagcaatgaacaaggctttacctgtaaaaagaactctagcaatgcctctccttatagagccccctttgccagaggtacccaattactctttaagtgaaaaagcttggtttaggcaggaaacagggaagtatattaaaagtggatggtggctgttctctgatgggaggctagccatcccagagacaatagccccaaggtttgtgaagcagatccatcaaggaacacacattggaaggatggccctagagactgataggttgacacttctatgtgccacagctctctgcaaccacctgtgctgtttatgaacaatgtatgtctatcctgtgccctgaataatccaaaataagaacccactcaacccccaggaattc

SEQ ID NO: 196518 - DNA, 1000 bp, Homo Sapiens
ctctggtggttttataaggcagacaccaatatcttgttttcaaaagcatatttagtaatcatgaaatttaaaagagctttcatataatgccaaatttttaaaaattggaacaggccaggtgcagtggctcacccctgtaatcccagcactttgggaggccgaagtgggtggatcatgaggtcatgagatcgagaccatcctggccaacatggtgaaatcttgtctgtactaaaaatacaaaaaattagctgggtgtagtgctgcgtgcctgtagtcccagctactccggaggctgaggcaagagaatggcttgaacccgggaggtggaggttgcagtgagccaagatcgtgccactgcactccagcctggcaacagagcaagactccgtctcaaaacaaaaaaaaaaaattagaacataaaactgtaaatacattacaataattttatatacacatgcatatatacacacacgtatttcatgtcatatgtatgtaatataaaatgtgtgtatatattatgtaatatgatattatatatgtgtatgtattatgtgatatgtatgtgtatatattatatatcatatatgacatcatatatatcatatacacttatatatcatatatgatatatagaaaaagctagaagaaaattcacctaaaatttaataattattatctctgggtgatgggattactgataatatatactctggatagtcagattccataaatttgacatggtaaataaataatttttataatcagaaaaaagctaattgtccagtgttatagaacatcattgaaataattctattgcttaaaaataaattaaaattctggtttcatttttaaaatgaaagaaggtaatggtgcatacatatgactaaattttgaatgctgaaatctgaactggccaagagtgtatttatttatctttttttcattttagatcagtatcaaggtcatggtacaggatatgctcactggcattgagaagctt

SEQ ID NO: 196519 - DNA, 1000 bp, Homo Sapiens
tgcagacactggtgagatgtctcctctttgggcacactgcctcctcctctactggtgcatacaggagggctacatttcccagggtgcctttcagtaaactgtgaccatgtgacctagtcctggccaatggaaagtgagcaggatcatgtgtgtcccttccaggcttggctatacaactcagtgtgattgctattgcttttccttttgaagcatgcttagaagctgccatgtgtgtatagcctggatccctgagtcaccacctggactgccactcaactgtcaatgaaatttgggtgaaagaaaaataaacctttgttgtgttaaaccaccaagatgtgagggtttatttgttaatacaacatagcctattttattgtgacttacgtaccttcaaaatgttgttttgcagatagtcattattttcataaacctttaaaaagcaaatctccctaggtaccatggctttggggtaagggaactgccaaatggagtaaggagtggtagccaggcttgatttggggagacagggtgaagggggttaggagggtagagaagggagagatagacgatccagaactcacggcaaagtttggggttgcaggctgcaagagaaaattgctgaggtgagttaaattgggatggcaacttgataatttaattggaaagggatcaggagagcaggtaaggggtgaggctgggaaaggagagaagggaagattggggagagatgaagaaggctgagctataggggaggtgaagaaggagtttgggagaaaaagtggtaaaaggggatcaagaggtcaagggagaagaggagaggggattggtggagagatatgctgcaccttttaattcatatgaaattaaaactttcttgaattccttgatcacattcgccctgagggtcaccagctcttccagcagaggctcatctgaggagagaaagagatctctgtggggtgggaggcacccagaaagcccaccccactacctgaagctt

SEQ ID NO: 196520 - DNA, 1000 bp, Homo Sapiens
cctcctggtcttaaagtaggaaatctgctgggtaaaaaaataaagacaatgaagggaacattttgtcttataaattgagtaacagcgttctctggcaacttgttaatgtcagagatgatctctacaaaagtgaagataagcttgattgcacctaaaacgaatattttttcctatcaaatgggaatacaaatttaggttgttctgggcaaactttcttgagtttaaaaagagggaagctgaggcaatatttatttacagactccaagttggaaggaactaaacaatcctgccagttgctctagaggtgacaggcacttgccttttctcacttttctttttcccttcttccctctctcctgtctctccttcattccttctttccttcatcagccaggctgactgagcttaaatcctagtcctaccacgttctagctgtgaagtcttgagcagcttactcaacctccatgtacctgttgcctcatctataaaacatgaacagatggttttctatctagggttattatgagtgagttcacatatgtaaagtacttaggatctggcacatagtcagtgttgggtaggaacacgttttccccattcctgatgtttccttccacatggaaggacttcttcattcattatttgatctaaatcttcattgacaaatcacagtatcacacatgggctcatgaattttgtaatatatttttaagtcaaattgtttatgtagacaggaacccaacaaaaatatttgcccaggaccttgcgcgccctagaagtggctctggagaaaagcatttgcctacagaaataaaccatttccttcctcagcctatatcagtaacaaaggtgcagctttggccactatctgccactcctttctcttattcctctgtttgtttagaagcggatcaggaaagagggacaccatttcctcagatccctcaaagtccccaaaaaagaactcaataagcattagctgttatcatttttcaagctt

SEQ ID NO: 196521 - DNA, 1000 bp, Homo Sapiens
tgttttcaacaacatgttgtagtttttagtgaagagctcttacacttttgttagattacactttatgtttttgttatattttcctaggtattttattccttaaaaacattattagaattgagccagttttcttttatgaagtaccctagctactactcccaaaagcgttgccttcacgattatcatttctattgacttaaaacatgttttggttaaaatgagcaatatattccttagtttgggcttactcaccctccttaaaacacgactgccttggaacaccaggaatcactgacagagaagatatttcatgatatttccttagcctcaacgtctcagtccttcttagaaattattctataggccgggcgcagtgactcacgcctataatcccagcactttgggaggccgaggcacgcagatcacgaggtcaagagatcgagaccatcctggccaacatggtgaaacctcgtctccactaaaatagaaaaattagctgggtgtggtggcgtgagcctgtagtaccagctactcaggaggctgaggcaggagaatcacttgaacccaggaggcggaggttgcagtgagccgagatcatgccactgcactccagcctgggcgacagagtgagactccatctcaaaaaaagaaaaaaaaattattctatagaaacatctttagatttgcctggcaagcaaacttgggagcactttgggatgtgaggagcaaataggaaatcaatgctagggagttggaaattcttgcccagagttaggacattaatgccactgtccccaacgtcaagcccaggatctgtcccgatcatggagcagagctcaatcactgtgactattgctgggtgattattgctgggtggagcgagcaaaaatttccccctggggtgagacgaggctagaaaagagtaggtgccggaaacttctaatggatgaaaacttatttccaggtctgttttagaaactgaagctatttgcttaagctt

SEQ ID NO: 196522 - DNA, 1000 bp, Homo Sapiens
ttgattgcctctccaccatccactgtgctcccagagctgatcctggtgctccagatgtcatgtgactgggtagggacagtggtctagatccaatcctctattaatgcaggccaaggttgggtccgctgctttaccagccacgacaaaccattggcttagaggagttaagcttgtggtcaactaaatcctgcagaactgagtgtggaaagatttttgtggcaaaaatggaattgttcttcaattaaaagatcagtaataaaaggcatacggctttgttgtgagatgctgctttccagaaggcttgagcctgtgtgagttagaaattcttatttgctaatttcagcagcttcaagtgagccagagattttgatcagttctcgtttggaagaaatttttgaaaaatttaaagaaaaggtaaataagaaaggaaaatttaaagcttcctttatctctaggaaaaataagattttccacccttaaattatcaacttaataaatctccttcagaatgctgtggaactgcaggtttcttctgctgatatcatggtttccaagagagtgagttacctggttaattctgacttggaggtttgtgcctaaggattggaggtggcaggttggggttggaggtggggaatacttccgaagtgagacactgtcttaggctcttctaatttctagagctcacattctgagaggatgcactgtcccatcagattaattgcactacatagaggtagtgcccagcttccaatccctgccccccaccccagagttctttaattaattgatctgaaatggagcttgggagttgacatttatttgtagttctctagatgattctattgtgcacccatggttgaaaactaccactttacagtttttctagaattgttgttttctggcgccacagtcccccactgttactactttagttgatacctttattagttcagataccccctcttctaggaagccttccctggctttcccctgctaa

SEQ ID NO: 196523 - DNA, 1000 bp, Homo Sapiens
atcctgcatagccctaaatccattaaaccttgagtcaacacagcacatgtttcagggagcacaaggttgggggtagggttacagattaatagcatctcaaggcagaggaatttttcttagtacagaacaaaatggagtctcttatgtctacttctttctacatagacacagtaagaggctgatctctctttcttttccccacaaagaccagcttggccaacatggtgaaaccctgtctctactaaaaatacaaaaaaatttagccaggcatgatggcacacgcagggattcccagctaccttggagctgaggcaagagaattgcttgaatccaggaggtggaggttgcagtgaaccgagatcacaccactgcacttcagcctgggcaacagagcaggactccacctcaaaaaaaaaaaaaaaaaaaaaagaatgcaccatttcgcctcatctctcagcatttgacataaccgatcattccttcttaaaacactttttttggaaaatatgggtggagccaagatggccaaataggaacagctctggtctacagctcccagcatgaacgacgcagaagacgggtgatttctgcatttccatctgaggtaccgggttcatctcactagggagtgccagacagtgggtgcaggacagtgggtgcagcacactgtgtgcgagccgaagcagggcgaggcattacctcactcagtaagtgcaaggggtcagggagttccctttcctagtcaaagaaaggggtgacagacggcacctggaaaattgggtcactcccaccctaatactgcgcttttccaacgggcttaaaaaacagcacaccaggagattatatcccacacctagctcagagggtcctatgcccatggagtctcactgattgatctcagactgctgtgctagcaaactgcaaggcagcagcgaggctgggggaggggtgcctgccattgcccaggcttgcttaggtaaacaaagcagcctggaagctt

SEQ ID NO: 196524 - DNA, 1000 bp, Homo Sapiens
agcacccccaccccaaaccagttgtgacaagcagaaatgtctccagatattgccaaatgttccctgggagacaaaattgccccccattaaggaccatttctgtaaataaatgtgtgtgtagattttattataaaatttattcaaatatgcagcacagaacactgaatttaattgtactgtgtcttgaattccatttgttagagacctgggtttataaatatttaggtaactagtattcctataaaacctgtaaattcattcatttgcttattgagtaaaatttaggaattctcagcaatttctgagaatagctctatagaataagaaaataagaaaaataattatgatgccaggactagtggagtttgtttgctaccctcttctgtgtttccattatttgatagatatgcctactaaattttatctattttattatttattgtgggttgctctgttactaaactgagtttctcaaacacaaaaaaatacgtagtatttatttttccaccctcatatccctctctactcaaaagcgtgtcacataatatgtgtttaattaatggtattatattagattgggaagatgatgcattttaaatatgagtttttgtttttactggcatttgttttgttgttaagtataagcctgttaggattaagttatcttaatagaacagtgacattaaaatgttgtatagggtgaacttcagcttcaaaactaaacttccttttaaggtataaagaaacggagctagtgatgtgatcctttaaccatgtgaatgtcacacacccatgcttgccttctgacatcatctcactggataaagtaatgtgtataacagactgctgatgagtataatcttagtattctatttttataactgacaacatgctcataatctaaagacctgctttttaaagatgaaaatattttagctcgtttatatcttaaaagttctcttttcctatatttaatctcatatatttatattaaaagctt

SEQ ID NO: 196525 - DNA, 1000 bp, Homo Sapiens
accaggattgcaaccactcttttttttttttcctttccatttgcttggtagatcttcctccatccctttgttttgagcctatgtgtgtccctgcacatgagatgagtctcctgaatacagcacacagatgggtcttgactctttatccaatttgccagtctgtgtcttttaactggggcatttagctcatttacatttaagattaatattgttatgtgtgaatttgatcctgtcattatgatgttagctggttattttgcttgttagttgatgggctttcttcctagcatcaatggtctttacaatttagcatgtttttgtggtggctggaactggtggttcctttccatgtttagtgcttccttcaggagctcttgtaaggcaggcctggtggagacaaaatctctcagcatttgcttgtctgtaaaggattttatttctccttcacttatgaatcttagtttggctggatatgaattctgggttgaaaattattttctttaagaatgttgaatattggcccccactctcttctgacttgtcgcatttctgccaagagatctgctgttagtctgttgggcttcagtctgtgggtaaccggacctttctctctggctgcccttagcattttttccttcatttcaattttggtgaacctgacaattttgtgtcttggggttgctcttcttgaggagtatctttgtggtgttctctgtatttcctgaatttgaatattggcctgccttgctaggttggggaagttctcctggttaatatcctggagagtgttttctacctcgttccattctccccgtcactttcaggtacatgaatcaaacgtagaattggtcttttcacatagtcccatatttctgggaggctttgttcatttctttttactcttttttctctaaacttctcttctcactttatttaattaatttgatcttcaatcactgatacccattcttccacttgattgaatcagctattgaagctt

SEQ ID NO: 196526 - DNA, 1000 bp, Homo Sapiens
caaaaaagtagagtaaaaacatgtaacataggaataggaataaaaagcaaagaatgagagaaagaaaatgatgctgaagaaatctcttaaaaaatagtgctaaaatgacaactattgcgtggggggccttaagaggaagagattctgaagtcagaaatgtggtattaggagcttttagtctgtgtatgaggaaggtgatgactgattattataaaggtttgttttcgtctttaaaaattaaattttaaacttaactatctttggaattctcaggatcatttaggaaagctttgcaagactttagcctttgaagcttaatgtgttttggtgattcaatgagcaattcactgcttcatgaccaagtttattttattgtttaagctactgcccaagtataagttaggtaacttttgaaaaactgcaccacttacatctggtgatttgagcatgttaatgttcagtgtgcccaatttaataaagaagtcaaatttgcatccaagaatcttttaagcagtggaaagctcatcatctcagtgtccagaaaattggtttgtaagcctacaaatgtacaataaaatgctaaataccatttcagacgcaagtaataagtttaatttcttgagggaattatcttccaaaatgcatcatccagaatgaccagaatatcatatgatagtcttagaagaaaattcgtttcgtgtgtgtgtgtgtgtgtgtgtgtgtgtgtgtgtgtgtgtatgtgtacaccatgcacttaaggaaattgtaaagtaatatttaatcgagatgtccagagctctcagtgcctttatgcagatgttggagagagacaggtttaggtatttaatattctaattccatgtccaaaataattctatgtttatttctttcacctagtttgccatttccaaaaaaagcaccaaaaaactaatcattgtatttcagccatagacattatggttcatctaagtacatctaagtgtatttgtaatgaaagctt

SEQ ID NO: 196527 - DNA, 1000 bp, Homo Sapiens
tcagggaaattaatgaagtacatataagtgcttgatttaaatgtgtattttattcaatagtttgagtatcttgccatggaagatactagcccagcctagcagaaaagtgcaatatgtataatatactttcgcattttaaaagttatattccctatccattttgaaatgctagccaaactacatgaagttatttgcaattaattgtaagctaatcaggaattttgaaagcttgattggattaacaaactataatgttgaaatttggtaaaatcataatgttaatttttactgtgaaacgttttcttgtaagatagatatacacatcctagtttaattttgtgtcttagtgtggatttacaaatttactacagttattctgagcccaggaacccaatcagatttcaggccagtttgatactggctgttcttaattctaacaggagagtaggacatcatactaaatgttatgtcagtgggactgtgttgtctttggagcttagtaaattaatcattttcttcagactttaaggagagtgataaataaaatttggagtcataggatatagatgtacaatttaaagattaaactttttttttttttttgagatggagttttgctcttgttgcccaggctggaatgcagtggcatgacctggactcactgcaaactccacctcccgggttaaagcaattctcctgcctcagcctcccaagtggctgggattacaggcatgtgccaccacagctggctaattttgtatttttagtagagacagggtttctccatgttggccaggctgctcttgaactcctgattttgtgatccacccgccttggcctcccaaagtgctgtgattacaggcgtgagccaccttgcctggccaagattaaacatttttcatcaattgtggatggtggcttataacactgcaagaataggctgggcatggtgactcacaagtgtaatcccagcactttgggaggcagaggcgggcagatc

SEQ ID NO: 196528 - DNA, 1000 bp, Homo Sapiens
ctgtcctcatcaccgccttacactccgttcttcctttgaacatcttttcggaatctttaactctaacacagatttcctcctttgttcaaaactgtccatggcttctacggtcctcacaaagatcaatcctcagcctggtactgaggaaataactccgactcatactttgttctcagtggacacaagatgtccctgtgttccgaatcctcctggcgcagtcgtgcctccaggcctttgcctaagccggtccctcggccagtctcgctctcccgaccgcatcaaccggtgtcggaaacagggattccacccgccggcgcctctaggtccctgacagaggcctgagctgcaaggacgcgaggaagcgcccctcacagtcaggggtctcagggtctgtgtggggatggcgggtgaggcctggaggtcgcagggctcacttgagcggccgccgccacgacttcatgcgcgggcggggacgcaggccaggcggttcctgtgctcgtcctgtcccaggtcgcgaccagcggcgtcgccaagcctcagatccgcctgtgtgcaatgggcacaaccactcctctcgcgcgctctcggtcctgacaaagaggtacagacgcagcataggtggatggtcccgacaagccaaaatggccaccgcggcgaggacgcaggaagtccctgcttgacgttacgtgcctccgcaatggcgcggcttctctgaggcttcaatgggctttccaattcacagagacgattccgggtaatatttaagttccgagagacgcgcggcgcttaaaggccgcctccaacctgactttcggaagaaggggctaagctccaccgcgacgggcgttaggaaatggcaactccaggtccagttgcagaggaggctcccccatcttagaagaggccatacgcgcatttctgcgggtactgtgtgcaaccgattacccgtgtgtttggagacttatttcagaatttgtgatgctgagcttcttcgcagatc

SEQ ID NO: 196529 - DNA, 1000 bp, Homo Sapiens
gcttccctcacgccaaatgtgccccaacatgccaaatcatgcaacatgacatgatgtcactccaggacagtttatgacatgccacagctgtctggcatgtccagacatggctgggtaaggggcctacagaaaggtgtccccaagctggggaggcgggaggggaggcctgggcttccccagggcccttgcagtggcttcgagcaccgccacctcctcggcctgctgagcctccatgagtgccatctgctgctccaacttccggcgttgctcttcctgcttccggtgggctcctcggaaggccaggaccagggcgctggaaggggtgggtggctgggtcaggaaacagcccccgagtccacccaaggcaagggccgtgtactcccactcccagaatgggggctctttcacattgggtctccaagggtcccagctagctggtcttttgttgttgttgttgttgttgtttgagacagaatttcgcgcttgtcacccaggctggagtgcaatggtaagatctcccctcactacaacctctgcctcgagggttcaagtgattctcctgccttagcctcccaagtagctgggattacaggcgcccaccaccacgcccagctaatttttttgtattttttaatagagacagggtttgaccatgttgcccagactggtcttgaactcctgacctcaggtgatccgcctgcctcagcctcccaaagtgctgggattacaggcgtgagccaccatgcccagcctgttttttcttgttgttgttttttgagatggggtttcgctcttgttgcccaggctggagtgcaatggcacaatctcggctcactgcaacctctgcctcccgggttcaagcgattctcctgcctcagcctaccgagtagctgggatcacaggcatgcgccaccacgcctggctaattttgtatttttagtagagatggggtttctccatgttggtcaggctggtctcgaactcccgacctcaggtgatc

SEQ ID NO: 196530 - DNA, 1000 bp, Homo Sapiens
tatgtattttcacaaattaatgttttttatttatgttgcacatttatgtttatattatattataccatacacaatatattataataagatttataggttacctatttactttacattatattatatttatctacaattatgtataatatataactaatatttattctttaaattgtatatttacatttatatcatcttatcacatattataccatatatcatagtatatttatattacagatttgcatttatattatgctacatattctagagaattaacatttattatttatattgcacatttatgtttatatatcatatgcgttatataatatactatactgtagctttatatattacatatttacatttacattatgttaggtgacataaaattatatattatgtataattaatatttattatttatatatgttacatttatgtcatattgtacgttatgtattttaacatacatttacattaacatgatgtatttacacttatataaaattatatattatgtataattatgtattacacataattaatattctttattgtatgttacatttaaatcatgttgtacattatatactataatatacattacattaacaagagatatttacgcttatataaaattatgtattatgggctgggcacggtggcttatgcctgtaatcccagcactttgagaggctgaggcgggtggatcacttgaggtcaggagttcgagaccagtttggcctacatggtgaaaccccgcctctattaaaagtacagaaaattagctgggcgtggtggtgtgcacctgtaatcccagctactccagaggctgaggcaggagaattgcttgaacccaggaggcagaggttgcagtgagccaagacagagcgaggcactgtctcaaaaaaaattatatattatatataattatgtattacatataattagtatgtattatttatgttgcccatttacatttataatatattgt

SEQ ID NO: 196531 - DNA, 1000 bp, Homo Sapiens
ttcagcttagtttgttgctgtttttataggctacagttcttttgctgcactcatattttatcagtttatatgtagttaattagattgtgtaataaaagtaacaaataaaacaggcataaacagtattggaaacaaacacaatttatctttagtaagcttctacttaactagaggaaagagtatctggccatactagagaatagattattagccatgaaccttcagcaaggtggatatgtcatgtttttaaagagcaaatgggccgggcacagtggctcatgcctgtaatcccagcactttgggagtccgaggctggtggatcacctgaggtcataagttcaagaccagccagaccaatagggtgaaccctgtctctactaaaaataccaaaattagccagacgtggtgacaggtgcctgtagtcccagttactggcgaggctgagacagaagaattgcttgaacccaggaggcggaggttgcagtgacctgatatcacgccactgcactccagcctgggtgacagagcgagactccatctcaaaaaaaaaaaaaagagcaaatagtgctgggtgatagaatgaatcacctatgtggagactgtttaagataatttttactgtacattaagattaaaggagatcagcaaactgcacactggcagaactaggtgacaagtagtcacgtagttttcttggctgttaacacctgggttgttttcaggagtgtatatcatatttaactattttttattgttattaggatgttgaagggaaaatccatttttatctaccaatacctgtttgcattgttggaacatggcttgggttaagactgaatttagccatccaaaattgctttttagtgtgtgcttaactgtgaatactaatgatatgtcccttgctaataagtaagtaatattttattctctctttttaaaataaggcttacctaaaacagatcttaaatctacttgtatttccaaagtattttgagaattc

SEQ ID NO: 196532 - DNA, 1000 bp, Homo Sapiens
ctttcataaagtagacttgttttgttttcttcctatagtcttcaaaccctctgtcttgatggcaactttctgactactttacctgaagaattgggaaatctacaacagctttcctccttgggaatttccttcaacaactttagtcaaattcctgaggtttatgagaaactcactatgttagatagagtggttatggcaggaaattgcctggaagtcctgaacttaggggtgctgaataggatgaaccatatcaagcatgtggatttaaggtaaggttattctttaccacaccttcctttaaattgactctggtggacctttatgtcttctgtttatgaagatttgtttaaaacattagggtttttaaaattttgttgttgttttgagacaaggtctcactttgtcacccaagctggcatacagtggcacgatctcggcccactgcagtcttgacctcccgttctcaggcgattctcccacctcagcctcccgagtagttgggacttcaggtgcgcaccacgaggcctggctaatttttttctacttttagtagagatgaggtttcaccatgttgtgcaggcaggtctcgaactcctggactcgagcagtccacccacctcagcctcccaaagtgctgggattacagccaccgcacctggcccataactttaggttttttgaatagtgtagaaatatatgttttcaaaggtatagtaagactttatttatcactcagtagcagagagattaaggatcaggtagttgtaccatgtgatagagactatcaaattgcctttgacaaagattgttctcacttaccctcccatcagtgtatattttttattttaaaaattttttatagagatggggtcttgctgtgttgcccaggctggtcttgaactccctggctcaagtaatcctcctgccttggcctcctaaagtgttgggattacaggtgtgagccagtgtgcccgacccctccaccattttatgagaattc

SEQ ID NO: 196533 - DNA, 1000 bp, Homo Sapiens
tatgttctgatagacacaaagaagccacaccatttgtagtgatgtgagcatctcaactattttcctaaatttgtcttgatgtccaacttctgttctggcctcgaaacttctgcagtagttggttcttcatttccttgttgtggctcaacattgggaaagaatgggaaatcagtctctaatgagtatgtggggaaattcctattgataatctcatcacatgccgttttagaactgtgaactgtgggtgtcacagctttcaggtaatgtctcattattggcctttcattttattttatttttttttgagacagagtctcgccctgttgcccgggctggaatacaatggcgtgatctaggctcactgcaacctccgcctccccagttcacacaattgtcctgcctcaacctcccgagtagctgggattacaggcacccgccaccatgcctggctaatttttgtatttttagtagatacggggtttcaccatgttggccaggctggtcttaactcctcaccttgtgatctgcttgcctcaacctcgcaaaatgctgggattacaggtgtgagccaccacgctggccttttttttgaagacggagtcttgctctgttgccccggctggggtgcagtgatgagatcttggctcactgcaacctccacctcccgggttcaaccaattctcctgcctcagcctcccaagcagctgggattacaggtgtatgccaccatgcctggctaatttttgtatttttttttttttagtggagatggtgtttcaccatgttggccaggctggtctcgaactcctgacctcatgatccgcctgccacggcctcccaaagtgctgggattacaggcgtgagccaccacgcccagcctattggccttttaaatgctttaaataaaacaaccttattagcaacacgaaatttacattgaaccttaactaaggtgttctctgatgcttacagtgttttagaaaactgtgatacagaattc

SEQ ID NO: 196534 - DNA, 1000 bp, Homo Sapiens
atgatcttccatgcaaaaggaacaacaatgcaaaacacaaaaggatacaggatgctgatgaggtgacgatggtcaacagcagcatgcagtatttcaacattttataagtttgtttttattcattatgacaactttaagacattaccacaaaaattatttttggttaatttttaaaaatgagtaacatgtagcatcacatgtaaatggatagaaattaaagcaaaataatcaaggatgtagagctactttacctgcaaaataagaaatgactggaaggtgagaaagaggttctgtttttgatgttttattcagctagcaaagtgatctaatacatcacatattgtattagaggttatgacacatatagaacaaaaacttcagctactgtctttgtgtggcaaacttcataatatttttcaagatgaatttttaagtcctctaggtaggaacgtttttagcttaataaaacctaatttcccacattaaaaaaccagttttaaaaattcttatagcagtaacataaatcagaacatgtccaaggttctcagcttttatgacatgatttttaaaagcttttttgtgtcaaaaattaattgtatgcctggaaaaactgctatattagagatgtatcacatcttattaaaaacgtataattagtaatgataatgttagtaatcatttattttccacttagaatataaaaataatattttttgagtgtttgctcagtgtcagatgctgttctacattctttccacatgtactaattcagtttccccagtaacccaacaagtcatttgccacattgcagaggaagacgcagaggcttggaagtaagatacccatagaggttacacagctggtaagtagtggatcccagcactgactctggagtccaggttcttactcctgctatattgttgttatgtttacataacccaaattccaggcattgtcttctactttacatctagagagttcatatctctctagagaattc

SEQ ID NO: 196535 - DNA, 1000 bp, Homo Sapiens
gatatctagctctcttgagagctccaggtttagatatttaacattgaatttgactgtggcttcttgggtttgtcacagacatttcatattaacttgcccaatacttgatcctctccccagttttgtaagggcctaacacttacatagtttggggtcctctgtaagaaaaggaacatagaattgagaatacaaagcgagatgtgggaacgtggtggtgcactgtgcagattagggcttggaaacttggcttctgtagccttgggtcactcctcctcggcttgcctactcaccccagcaccgtctcctccagccttccccatctgaatgaaggcctatgccttccatttgtttgtttagaccagaaacctaggagccgtttctcatcttcagcccacttctgagctctctgaaggtcttgcttgattctccaattcagtacccccttgccccgaatctcaggttgccattgttactttcctattagcttctgatcgagtctctctggttccactttgttcccctccgatccaatttccagaagcagacagagcagtcttttaaagtacatcagaacgtgtcactccagtcctgccatgtgtccatagaaatggctgagtctggtggcagggccaggggtgtgggcagatgggagagggtcaggggggattacaccgcacaagcttgactgtcctggaaccttgaaagaagtgggggtgtgtctggggaggtatgcaagaattatcaactgcagttgtttgtttcagtcccactttaccacatttcattggaagaacttgagctgtataaggcctgtgaacacaaatggggatgggtactccctaattctttgcttttcagtgcattcctgtggcatttgatgctaaatagtgcaatcaaactgtttaattacttttggggaagaatcacacattcttttttaaccccggtgtcatcttttaactccgggttccttaatctccttagagagctgattaagctt

SEQ ID NO: 196536 - DNA, 1000 bp, Homo Sapiens
tctaacaaaggattagagttttttctggtttatctagatataaatagaatcacagaatatatattactatcttacttctttcagtcaacattatgtttgtgagattttatgttcttgcatatagcagtaatttgttctttttcattgtatagcactgtatgaataaacaatttgttaatccattctaatataaatggctatttggattgtctccagtttttggctatttcaagtaacaattcagtggccattcttctgcatatgttttggtgcaaaagtgcacacattttggtcagatatataccagggagtaaaagtgtcaggtcaaagggtattaatcagccaggtacagtggctcacgtaatgcctataatcccagcactttgggaggccgaggtgggcgggtcacctgagatcaggagttcgagatcagcctagccaacacggtgaaaccctgtctctactaaaacaacaaaaattagccaggcatggtgtcatgcgcctgtaatcctagctactcgggaggctgaggcaggagaattgcttgaacctgggaggtggaggttgcagtgagtcaagattgtgccactgcactccagcctggaggacagagcaagactccgtctcaaaaaaaaaaaaaaaaaaaaaaaaaaaagtattgactcattcaactttaaaatatatcaaaacaattttcctaagtggtagtaccaatttctgctccactagctgtatatgagtttgctgtttctacatcctcaccaacacttcaagaggtctttcacattttagccattctaatgactatatgttagtatttcactgaagttttaatttgcatatccttgatgattaatacagttgagagctttttcaggtttattagctatctgggtatcctctttgtgaaatgtctgttctaatcttttgctgtgaaacgtctgttccaatcttttgctcttttttttttttttactggatttttgaattggtagaattc

SEQ ID NO: 196537 - DNA, 1000 bp, Homo Sapiens
aaaacatcaatgtggagtagtattttcaaagatgagtgcccctaaagtgttaatgttcttctctacttgggagagggtttcaggcttggtgccacaggatttgccctttgtggcttctcacatcccagacttagaaaatatgagctgtgatacagagaaaggtaagaagctcagcagagccccttaatgataaatgagtttgcatcatctgtcattagaacttcctgccaactgggtcattccctattaaattaccacttgtcaatgtttaaaatactgattgataaatgactgtgccaaaactgataacacaacagcttttattttctaataatcttagttactacagcctgcttgtcaaggcacagacaccatactttttttccgtttttaaacgactttaccaaaagacaatttaatctaatgcagtgctatcaggtatactgtctggccccttatatgtcacatacatgctggctccacttgccaaaataaacctactggcgatttagtgatatggggtgctccaagttacacatttcatcaaatgctagtaatctgttttatcaatataaactgtaatttaatgaaaaaattcttttcttcagtacacttcactttcaatgcccttgagtataataatttgctcatgctgtagaacaagagcgtgttttacaagaccttaactctcaggagaaatttccctataaatacaaaatttgagttttatgggagtgtgttgtatgcacatgagtagtgcccacactacaaaacaaaacaaaacaaaacaaaacaaaacaaaacaagaggttgcacttagatttcagcttaaatatccttctgagatattgtataacggacttgttattagaacaaagcttagatgagcaactagaagataggttaataaaatggcatttgtatcccagaggtctctgaatcaaaatacaccagaacatactgcaggcatatgttaaggcagaatcaatcattggaattc

SEQ ID NO: 196538 - DNA, 1000 bp, Homo Sapiens
cttggttatgtagtagccagtgattttccccttttacaaaccaaagaggtttcagtcacttgaaactgggagaatattggctaaggtaggtaagagtcgtttgacagatgagaaatttgaaacttgaaaaggttgactgatgtgctcattttctcatagctgatgagttacagttacaggattagaacactaactactgttgatctttcttaatagcttgcctttctcacttggcaaggaagatggaagtggggacagaggagatggcccctttcgcttaggtggccatgggccttcctttccactaaaaggaattaccgaacagcaaaaagaaggtcttgagatagtgaaaatggtgatgatatctttagaaggtgaagatgggttggatgaaatttattcattcaggtaagaattgaaaacattgatgggaatttttaattgtacccacgtaaatttctcttttgattagaggtctcccaaatgtttcctttttctgggccactctctaattagtcattgcttaatattctgagttttattaaagaaatagtacacccacccttaatcaccctttttaaagtttgtgttcttggcacatgtttctcatttatttccaggacctgtgtcagtgaagttcaggaatatatagataccatgagaaattaacaagtcaaattgcaaaagatgaaatagtagatttcttcattatgccaagcttgggatacattttttgggcccttttttttttacacatctacaaaaaacattattaattatagaaagtggtctcagatctgagatagtcagtatcttcttatcatcctattaaggttttagaaagtagcatactatggtatagtgattttttttttaaacttttgatcacaaagcagtttgattgagtgaaaaaaaaaaaaacctgcaatgtaaagagttcatagcctacttactttacgtgggcgttggaaaggcaaaatgatttaagaaaagtgaattc

SEQ ID NO: 196539 - DNA, 1000 bp, Homo Sapiens
tactcaaagacaagggaacaaagcttcacagcctgttacagctttggacttggcccaggctcatgcccatctccaaagcggtcaagtcctatttgtcctataagaagcacctgctggccaggagcagtggctcacacttgtaatcccagcactttgaggggccaaggcagacagatcacgaggtcaggagttcgagaccagcctggccaacacagtgaaaccctgtctctactaaaaatatgaaaattagctgggcgtggtggcgggagcctgtaatcccagctacttgggaggctgaggcaggagaatcgcttgaacccgagaggcagaggttgcagtaagctgagatcgtaccgctgcactccagcctgggtgacagagcgagactccacctcaaaaaaaaaagatgcacccgccgttgacaacctccccaggcttctcatctatgagtcatccaccctccccaaactcctcaccatttatacatgcctccctcgagaccctcatccctgtgtccattcaattttagcagtttatgtacacgtcatatcctcttttcaatcagaagtaactcgagggccctcgcattttggctcgtatatactaagtactcagtaaacaccttggaaaatgagtgaatggctgtttaatacctattaaaatacagagaccaaacgtacactcgcccctccggatctcacttggggagcagtgcctttgtgctcaggagggctgccatgttcctaaatacttcggaatacacagaattctggtatgctttctagagaccagatatacccaagcttcagcccaatttcagtttttaaaaacaggatcaagagggccagatgtggtggcgcatgcctgtgatcccagcattttgagaggccttggagggcagatcacctgaggtcaggagttcgaaaccagcctgtccaaaatggtgaaaccccatctctactaaaaatacaaaaattagctgggtgtggtggtgcacacc

SEQ ID NO: 196540 - DNA, 1000 bp, Homo Sapiens
tgttttatagagactagcaggtaaggacctgagtttcaaggtgagtccagggaattagtccttaggatgggagatggtgaaggattgagcagaaggtgtgtgcatctaaggtatctaatccaaacaggatctggggacccagtcagaagacacttggggtttagggcaggaagtctactgattgccacgagcaaaaaaggaaatacattggttcatgaaatgagaaagtcaatggacagtgctgacccagattggatccagggctcaaagagcatctccaaggtctagcactttctctttctctctctaaccgctcttcttctatcagttctttttgtggactttattcttaggaggtatgtccctttttggtggaaagatgactgccaataatgccaggcttatattctctccttcgcatacccatgagaaaagggctttcctttcctaatcaagcttacaaaagttccgtcattgagtgtcataggcctgattagcctgacctgatcgaatggccatctctgaaccaatcactgtggctaaggtgatgtgatgctctgatgggccaggcctggttcacatgcccaccgttggagctaaggagggagttaatttcactggaaacccaaggattaaggtggacaccaactgtagctggcctttctgttttgtcaatcagctcactccaaaagtggaaaggagaagcaatgtcacaggaaaatcggaaagtgattaccagaagtgggataagaccagacaggaaaaataccccaaacaaaggaaagtaaagaccatgtaaggaattcagtcactggtgaactagaacagcaggttaaaatgatcatggtaggcacagtgactccattcagagctcaacatccctgaacctacgttgcatcagattcctctacccagggacaatcttgattccagaattgagagcaagagtcatgcagttgaagactcaatcacccaggagaggcaggtggctccggctttg

SEQ ID NO: 196541 - DNA, 1000 bp, Homo Sapiens
atctgttttcattttgaaaaatgctgtcagaatctacttgaaagaagaaagtaatactcgctttctctctgtgtcttgacatcagtaatagacaagctccatcctgaagtatttgcagctgatggcaggaaatctttacatcttgatctggaccatgcagtgagtggtgtatttctcagtgtgtgagaaacacacacacgcatatataaaatctatacgtataatatatatataaaggtattttttgatgattgtttttattgaatttaacattttcataatctttttatgtccaaatttaaaacatcctaacacatctttttaaatctaactgatataatgagctgtagctttgtgttaggccctaaggtataaatgaagtttattttacttttcccttccaatttgccattgttactgtagcttagagagaacagcaagactcttttctcttaggaaatcgagataatataaagatgtttttttcccagaaaaaaatacaaacttgctaaattttaatacataattttgacaataaagtaaaaaataaattatattttgtttctactaaaaacatatttagaagcaaagtggagttttgttttgtttcaactataaaacaatgaacaaagaaacagcaatgcacatcttaagataaaatgaagatgtggattgtgctacttaaataatggtacatagagtgggtcccggggcctactgggcccttttagaaggaaaccaccttcatcttcatcagcgtttacagatgacctgttacgtgctggccacggtggtaaagtagggggatgtcgtggtgaggagggcacagtcttgctccctaagaaaaacgtttggaggaagaaacttacatatgtgtaaaactacctcccctctggcttcgtggaatgtcctgtcggggtgaagcagtcttctccagagaaatacagtgcgtggcttctgccttcataattaacctccagaatgtccaaggcatgaattc

SEQ ID NO: 196542 - DNA, 1000 bp, Homo Sapiens
aagtttttctttcttgctgattacagtatagtatatacagtgtgtgcatgtgtgtgtatatatatgtgtgtgtatatatatgtgtatatatatgtgtgtgtgtatatatatgtgtatatatgtgtgtgtgtgtgtgtatatatatatatatatatatttttttttttttttgacacaaggtctggctctgtcgcccagactggagtgcagtggtgtgatctcacctcactgcaacctctacctcctgagctcaaaccatcctcccacctcagcctcccaagttgctgggactaaaggcgcgtaccaccacgcttggctaatttttgtgtttttttgtagagatggggtttctccatgttgcctaagctggtctcgaactcgtgagctcaggagatctgcctgcctctctgcccccaaagtggtgggattacaggtgtgagccactgctcccagccaagaaattctttatatgtagatactattttcttgtcaagttcagatgttggaaataacttgccatttgttcattcttgtctttgttgtttttcatataatagaaatccccccaatgttttatatcttttatgtctttattttgttttgttttgtttttgagatggagtttccctcttgttgcccaggctggagtgcagtggcacagtcttggctcactgtaacctccgcctcccgggttcaagcgattctcctgcctcagcctcctgagtacctggaactacaggcatatgccaccacacctagctaattttttttgtatttttagtagagacaggatttcgccatgttggccaggctggtctcgaactcctgacctcaggtgatctgcccacctcggcctcccaaagtgctgggattacaggtgtgagccaccacgcccagccataggtcttgttcttctatcagttttatagttttaccatttacatttaggtcttaaatttaattggaattaatttttggatatagtatgaggtatgaattc

SEQ ID NO: 196543 - DNA, 1000 bp, Homo Sapiens
aaataccatatgttctcacttataagtgggagctaaactatgagtatgcaaagacatacagagtggtttaacagacttttgagactcagaaggggaaagggtgagaaaggggtgagagattaaaaagcctacatattggatacaatgtacactacttgggtgatgagtgcactaaaatctcagacttcaccactatacaattcatccatgtaactaaaaattacttgtacccctaaagctactgaaataaaaaaaattgaaaatctatttctggactttctgtatttttttcattgatctatgtggaaatctgtccttcaccaatactaaatgatttgatttcttttgctgtataatcaatcctggaatcagatagcatggatcctcttagttcttttttaaaattactttgggtattctagatcttttgcctttctgcatgaatttcagaagaagcttgttgatatctactgaaaaaaaaaatcccaagattttgactttatagatcagtttgggaaaaattaacatcttaacaacaatgagtttttcaatccatgaatatggtatatttctccatgtacttaggtcttctttgatttctttgaccagtgttttatagtttcgaacatgcagatcctccatatgttttcttagatttatacctaagtattttatgtttttttgtaggatgaggtttgctattttaaaaatattttctctatctgttgagacgattatatagtttttcttttttattagcatactatattactttgattttcaaagccaaagcagttttgcattcccaggataaatctcacctggttgtgctgtattacacttcatcctggtaaaaatgccacgtgcacctgaaaagaatgtgtattctgctgttgttggatagaatgttctatttaaatgttatttagatgaacttagctgatagttttttctaggacttctgtatccctactgattgtctcctcgatttaatgaattc

SEQ ID NO: 196544 - DNA, 1000 bp, Homo Sapiens
ttccaggttttaagccctgcatgcattaggtatttctcctaatgctatccctcaccttgccccccaccccccgacaggccctgacagacagggtgtgatgttccccttcctgtgtccatgtgttctcattgttcagctcccacttatgagtgagaacatgcagtgtttggttttctgttcttgtgatagtttgctgagaatgatggtttccagcttcatccatgtccctgcaaaggacatgaactcatccttttttatggctgcatagtattccatggtgtatatgtgccacattttctttatccagtctatcattgatgggcattaggattggttccaagtctttgctattgtgaatagtgctgcaataaacatacatgtacatgtgtgaaaggctctttcaaatacgagacttgacatctggtagaacaaataattaatggtgtccggaggtagttaaaaagggagggatggaagacaagcttcaactccagtgccaaccccaactgagcaccacgaccatccctgggtccccgtagctatcactgcataatatccaccatgcattacaggctttggaggtagcaccagcatctctagggcagccagtcatttctctagaatggtgtagaacaacagcaccaggaactgaaaggaacctgcagtacaacacagcaggtgaggaatagaaagccttgcccgaatctcaccaccagaggtgcccttggactgggactcaggtcacttctttctgccatgtgcctggtgggagtaggatctagacaggggtatccagatgaagtgtcaggtctcctttagtcctgtggtttgacatgtttagttcaatggtttcacactgaacactgacccgacaaatgggcattttcatgtgtggaaggtgaatgaacatgttctgtgagctttcataaagttctgcttaaaaagtttccaagcagatcctccctgtggccccgcatgtatagagctataaagggaattc

SEQ ID NO: 196545 - DNA, 1000 bp, Homo Sapiens
ttgtcagttttcctaactgtcagagctggcaaatacaaaagtttctgctttctaatatacagtaataactagttgctctaaaattatattgacaaccttttctcttagatattttttctaagtattttgcaaattttttttatggaattttcttttataaaaatacttctgtttgaccaggagcagtgactcacatctgtaatcccagcactttgtgagctcgaggcaggtggatcacgagatcaggagttcaagaccagcctggccaagatggtgaaaccccatctctactaaaaatacaaaaaaaaaaaaaaaattagcaaggcgtggtggcgggtgcctgtaatcccagctactcagtaggctgaggcaggagaatcgcttgaacccgggctgcagaggttgcagtgagccaagattgtgccactgcattccagcctgggtgatagagtgagactctgtctaaaaaaaaagtaaataaataaacacaaatttaaaaaaacttctgttttatgagataatgatatggtaaaaacagtttcctacattattttaaacgatttgtgctataaaatagtatacagtcagctatgtaatgttttactattgattacctagtattcagttacagggatttttaatttttatttatctttttcctcacaacttttgacattttcctggtcactaatgcctgcaggagacagtgaggcgaactcaagttaatcaagtcactgttcagtttttagtgcctttatgaggagcaggactttaaaactattgactaaaattaggctttctgggttatttatggattttatttaacatatttctttcccttctgcatatgcagtttgagagcagactgcatatattgtatttacactgaagagaaagttgaacaaatcaattcatggagataagagaaaatacacatgtaaaacaaatattgtcacagaaacaatagtcttatttcttgttgaaaattatgacggaattc

SEQ ID NO: 196546 - DNA, 1000 bp, Homo Sapiens
cactttgggaggctgaggcgggcggatcacgaggtcaggagtttgagaccagcctggccaatatggtgaaaccctgtctctactaaaaatacaaaaattagtcaggtgtggtggcacgcacctgtagtcccagctgcttgggaggctgaggcagaactgtttgaacctaggagatggagattgcagtgagccaagattatgccactgcactccagcctgggccagggagtgagactctgtctcaaaaaaaaaaaaatacaagattcagtcatgtgccttcaaaacaactgtaaacacttgcaaaatacagaaaggtacccatgtgctaaattagtctattctatgagaaagctgatcaaaatagtaaagactttggggttccttcaaaaacacaaccataaggatacattagagcacacctgatttacacaattacaattctagatacaaacccaactggatcaaatgtggaggtacacatgatggaaactgcaaacagcaatacaaataattctgtctttcaccgagaaatataaatcaacaaataccactgcttattacctattcaagacgagtgtacttagagcttctccatcaacatcttcagcgattatgaccaaaggcttacggtgagcattggcaatttcaagagcaggtacaatggactggatactagaaattttcttttcactcaacagaacataggcatcctggaattcacatttctgacctgtaaaaataatgaagatttcaaaaatatacaaaaaatgactgcaatacatttaaatgaaaagcgaaaccaaggttccaatacactttaaaattcaccagtgagttggttttcctccttcatttctcatatgcattaacttttggaatatatacatttattttttagaggatgacaccaactaatacctatagtttgacacatattagaaagtatattttaaaaacttcaggaggccaaagcaggcagatgacttgaggccaggaattc

SEQ ID NO: 196547 - DNA, 1000 bp, Homo Sapiens
taggtactgcatgaagggctttatagaacaatgagcagaaacacacatgcttaccagtcatcatccagtgtagtgaagggagactgatgagaaataagacatttaagtaagcactataagaacactgggtacaacaatagatactaatttttatgttttttacatttttggcttgattttcaggttactgttcagtatcctttactatagaaatagaaaaattattttgaatgtttttgaatcttttctccccttctctttttagcttatatcaaaggtgggtggatccttaggaaagcctggaagatttacaataaatgctatctggacatcaatgcccttcaggagctgtatcagaagaagctaactgaagagtccttgacttctgatgctgcaaatgataatcacattgtggctgaaggggtgtctgaggagtctctgaacagactgaaaggtgctgttagctttggatatggcctttttcacctttgcatatccatggtgcccccaaacctgctcaaaatcatcaacctgctgggttttcctggagaccgcctacaggggctttcttcactgatgtatgcaagcgaaagtaaggacatgaaggcccctttagctacgtgagtagctgtattgcaatgctttggtagataatatagtgttgaaagtaagtaaacgacaatcaaagactttaaaggaaacttcaggtaaaatgtttggttggttgacagggtgctgtgtcttatgtctttcaatgcaacaccaaggactgtgttctgtggtcgtggtggtggttctaagctgactttagttagagaacaaggcgttgttcactagtctcacaagtcatgtattttaaaacctcaaatgattttataagcagtttttgtgactttgaccacattctctgagattcacgattctgatttttggacttaggaggtacaaatttgctaagctttttctgtgtttctgaaatttttattcttataaagaattc

SEQ ID NO: 196548 - DNA, 1000 bp, Homo Sapiens
cccaaagcaagccctgtcaacttcacttccaaaagatatgccaaatctgtcatctttccacagcttttataccatcaccccagtccaagttaccataaagtctcatttgattcgtgcaaagagccttgttactggtctccttgcttccttctacaacccatttctttttgaggtggagtttcgctcttgttgaccaagctggattgcaatggcatgatctcagctcaccgcaacccaggttcaagcaattctcctgcctcagcctcccgagtagctgggattacaggcatgtgccaccacgcccagctaattttgtatttttagtagagatggggtttctccatgttggtctggctggtctcgaactcctgacctcggtgatccgcccgccttggcctcccaaagtgctgggattacaggcgtgaaccactgtgcccgcactacaatccatttctaacatagcaactgaacattctttctagtcacaaatcgactcatatcatactcgtacttaaaaactccaaaggaggctgggtgcagtggctcacgcctgaaatcccagcactttgggaggccaaagcaggtgaattgcctgagcttaggagtttgagaacagactgggcaacatggtgaaatctggtctctaccaaaaatacaaaaaaaattagccggacgtagaggcgtgcacctatggtcccagctacttgagaggctggggtgggaggatcccttagcccggtggtggaggttacggggaaccaagattgcaccactgcactccaacctaggtgacagagtgagatcccgtctcaaaaaaaaaaaaaaaaaaaaaacactccaaaggaaacgaaacaccttaccctagcttccaaatctcactgtcacctagcctctgcctttgtcatctcgtcattctctccctcattcaccgtattcaaacaacactggcctgatttctgttccttcaacataccaagctcattcctccttaggtgaattc

SEQ ID NO: 196549 - DNA, 1000 bp, Homo Sapiens
tcttcccattccacctctgcctctccacctaggcagggccctggcatcctgtgaagtgggccagcgtcagccctggtgccacgtgaaaggtcccacactactcggggaaacggcttcacactcagagacacccttcccacagaaatatgtcagaaagtcagtttaatcctgtctgctctgcattcccacagctagtgcctacctcccgcctcgtgggctgcagtctgcgccctcccagtggctcgggaggcggagggccattccaggattttccatgggttcatttctggcaaaaagaggcctcacctccccacctccccgcctcccacggctgcctctcaggcacccatggcacgggggaagtgacagggagcctccactgtcctcatctttcacatgggcctatgggagcagccagtcagaatccgggattgggaacagtgaacgtgcctcgctcctgagtcccatgccatccacaccatatcgtctccttcaactgcagctgctccgtaatggaatcctgctgcttaagacgccctctacagctaatatcgccaggtgttaaggactaccagcacacaacagaggctttcttccccatacaatcagaagaattggcagagcaaagctgcagagagagtcagccaccaccctgggcatgccgtaccgggaagatacacgggaagttttttcattcattaagacctcaagagcaatgctccaaagttaaattgctctgggcagacacaagtgagatctcagggcttttacacaaggtaaatgtcccagggatacccagagagggaaagaagcagaaataatagcaacagttgtcatttattgggcacttactctgctcagctcttgataattcatcaccttgtttaattagctccacaacaatttgacagacgaggaaactgaagtttggcttcttaagcccaggggatatcactcccataacacaccctacttctggggttccatttacaaggaattc

SEQ ID NO: 196550 - DNA, 1000 bp, Homo Sapiens
ttggggtgaggactgactgcaaagtggtataagagaacattttttgggtgatggaaatgttctacatcttgattgtggtggtggttacataaacatattttattatatgttaattatacctcaataaagttaaatttaaaagtccagcaaatcaggactagtcaaaaaaaaaatgtatggccatgggcagtaagcttgtgtcatttttggtcttaatattccattttgggttgggacaagaatgattcagactgatacatcagtaactctaagctaggagttagtatttcaacaatgctaatgagtcctcccattgtgctcttccccaccacccctgaacaaccccataatcctccctgacaaattaaattgactccaggtagcaaacaacagtgcctggaactattctcagctggggactagctacaggaaggttttttagtgggtgtaattacctgggctttctaataagctcaatcatttgctaagctgaggaacttctggggtcctgccattactaaggacacctaacgagggttctgcttttgccttttttatgaaactgaggcaagaatgagagatactacatgatcatggctctgcttgtggcaactcactctgaataagggccaatagtttatggatctgcaaagagacaatatttcactgggggttcaaggagaacggggaggtttatctgtccttcttaggcttacaaagggtcaggtgggactgctgtgaagactccgttcatgtacatcagctgagaggtctaaggtgtgcacacaggcaaaggtctaaaatgaaagtagtgatcctgatacatactccatgaaggcctcaagggcaggtatggtttttgcatttttgtagcccctggcttggcacagcgtacatacttctgtacttctgcatggaagaaaataaatctgcggaacattaagccagggcaacccttctctgccttactgcactaaagatacttagaagctgagaattc

SEQ ID NO: 196551 - DNA, 1000 bp, Homo Sapiens
gtagttcctgatgtgacgattgaaagaacgtaggcaagggtttttccagcatcaagtgttatttttgtagaaagaatttggaaagaggagaaggcaaagggatgtggaaaaggtacttacagtagtttctcaaaacagttttcttttaggacctatgaaaaagttaccaaagtaaaaatgacaagtttgaatgaaaaacaagttttctttttataaaaattacatatttttttaaaatacgagatccttttcattgttgttatatcctgtagcaacaagaaatttggcttttttttttcttttttttttttttgccaggtacttcagctttcagtccaatgagtcagtagcaaattccactaatatttcagctggatcttgaactattgttttataccacaagcttcttctgttttatccttgaattaagaatagatagccttttatgcccctgatatttatggtgacacactaaaacaaaaagcaataggctggacatactaaagtagctcaagtacttcagaggtcagagttcctttgaagcaccttaacacatcacttacggatcaaggacaatgtggcataatggaagtatttctcttaaaagactgtgcagtaagaccagaagtatctctgttgggaaatcaaaatgtcattagtggaaactgcaaatttagacctcagtgaatatggtggtcgtctgtctcagttctgttgtaaaatgagattttccagttcatctgcagatcgcaataaaaatgcagctgattctcgatatcctgcaacaagctgtctcacggcattgatttcagttggactcagctggggtctggagtttgagctgctggaggatcctgagctagtcgccaattgtctcttcatgctgagatcagtgggtcctagaaagaaaatcatcacaaaattagacataaatattatttgttccagcatcttggatgtgagcattcaataaattatagttgaatgaattaatgaattc

SEQ ID NO: 196552 - DNA, 1000 bp, Homo Sapiens
gttggttcagttggtgaagtccttcagggtatgtagtctgccgtcttggtggaggcgaaaatgtaactcacttttttggcaggtggaaggagatggagtctggaaatgtcaggcaaacttgaagttgaatatggttcgcagatgcaaaaagaattctatggcactaaatttatctgggcccagtctttatttttaattaaataggccgattgtggcagaattcagttaatagggctggaggtaatttttggagttttgatttgagttgtccagcagttccgattaagatgggtagacagtcatataggtcatagtggagatagagaatgggctttaaagtcaggctgatatgattctgagtcactattttataatttccttggatatttatagctttgagtaagttattcgacttgtttcagcatctgtttccccatatgtaaaatggtgacaattattcctgctcttgtaaagattccgtgagcccaggcaaatgaggtttgttgcacggcacacaaatgtcattcaataggtggtggctgctgctgtttatactcttaaacctagaaaatatagacaaccatggtgggatgatggttccttagagaaaatggtccttaagaaaatgcacatcttccccagtgacttgaaatcacaaagtctggtagagcctgtgcattgctgtcaagaccctagtctaggagtcctggaaaacagcaggaagtccttcctcttgggtcgaggtggaaaccctggagcccttccagagaagaagctccgtgtataagctagagaggaattggtagtcaaagtcagaaccaaacagatgtagataccagatcagcccaggggtctgtgtaggagagctcattgatccttttctccttttagggttaggcatgctggcaagtgactgtgcccttgcttgatcatgggagcagcctgcactcacattcaggtgacagaggtcagggtagataagagctctcttgaggaattc

SEQ ID NO: 196553 - DNA, 1000 bp, Homo Sapiens
agatagaaggaacagcatgtgcaaaggccctgatgtgggggcatccttgtctacagtgggtctagattgaccatttgacagaattgaccagattcgaaaagggatttacttagagtcaagaatatagtttcaaaattagaagaaaattaagtgccttattccattttatttgggttttcagtttttcccattacagcaaacagaacaagattttgtcttttttttttttttagctagctgaatgtctttcaatccactgaacagttctcattttttagagcctctctcaaagccatcattacacacagttttcaaaggattgttacctagaagggtgacagaccaagctcagaacacaaagccaaagtcaatgatctaatcctgtttgggaaaggtctgctccttgctggggtcagctgttattctgatcttgttttcatgttggcagttttcttttgcagctgctctcattgtgaggagttaagggacagcttgtagcagaccaggacttttaaaaaaagattttaaaatgaataatagagctcttttcctcttatgtcacttattgagctttgaaactcaagccagctgattggagataatcatggccagtgtttgcatggtgctttgatttttgatattttaataagatcttagatggctttccatatattctttctagctaccttgtatcacacaagcacaacaatgccagctgccagggagactcattaaattgacattttaaatatttctgtaaattactagaacattttagctttaactcccggagggtaaaaggctagaagattttgtgcacaagagtatctgtcctgttctctaaagaaaatggaactccaaacccattcctcttattctgtctgctctcctcggttataaagctgcaggaagagccatcatttaatcacttttttttttctgtatgcttaggataaagaggcacagtagaattatagctaagagcaaagactttgaattc

SEQ ID NO: 196554 - DNA, 1000 bp, Homo Sapiens
tccttttacagcagcttaaaatgtgcgtctgacagtttctaaaacctaaaacaacacataggcttttctgtttatttttattcttatttttattttaagttccgcttttctgttttgctgagttttgtttgctttaatttttgttttatagtctttgttagactctatgacagatgtctgaaggcatatgtagccaaatttgtatagtggctctcactacttggcatgttttcaggtggcttttactttgttctttaaactttctaaagtcctttttgttttaaaatgaggatgaataatatttacaaagagctatttctaaagtatgtatttgctggcaaatcttgactacgtatcactgttttggaacctgctttttcatttcagaagtgttttatgtttgaatgcatctttctttctctcttttctttctttctttctttctttctttctttctttctttctttctttctttctttctttttctttcttttttttttttttgagacggaatttccctctgtggtccagactggagtgcagtggtgcgatctcggctcactgcaacctccaccccccgggttcaagtgattctcctgcctcagcctcccaagtagctgggattacaggtgcctgccaccatgcccagctaatttttgtatttttagtagagatggggttttgccatgttggccaggctgggcttgaacttttgacctcaggtgatccacacgcctcggcctcccaaagtgctggtattacaggcgtgagccaccgtgccgggcctgaatgcatgtttctttctacatttgcatttgcatgtacatatgtatataacaagtgtcaggagtaatgtatatggtgattgtcttgtactgtgggtgatttctgcttttttccccctatggtttccagaagtttcaggagggtctgcagatgctggtaagacccccgccccagttggtttccaggttcttgacaccttttcgagaaagaattc

SEQ ID NO: 196555 - DNA, 1000 bp, Homo Sapiens
ggccatgtgataggagggagcatagtggatccaaggatagaaaggaggccagcatggcaggtgtggagaggtgagcagggcatagtgtgagagaggctacacagataggcaggaaaccctgcaaagaagtcaggtagaccatttttgggaaatttaagatcctctcaagaacagtgggaaactgaccattaaggggattcaggcaagtgcacaggtagtgacatcagaatagcatgcacagcctatgtcctgaatggtattgcctaggttttcttctagggtttttatggttttaggtcttacgtttaagtctttaatccatcttgagttaatttttgtataaggtgtaaggaaggggtccagtttctgttttctgcatatggctagccagttttcccaacaccatttattaaataggaaatcctttccccattgcttgcttttgtcaggtttgtcaagatcagatggttgtagatgtgtggtgttatttctgaggcctctgttctgttctgttggtctatatatctgttttggtaccagtaccatcctgttttggttactgtagccttgtagtacagtttgaagtcgggtggtatgatgcctccagctttgttctttttgcttagggttgtcttggctatatgtgctcttttttggttccatatgaaatttaaagtagtttttttctaattctgtgaagaaagtcaatggtagcttgatggggatagcattaaatctatacattactttgggcagtgtggccattttcacgatattgattcttcctatccatgggcatggaatgtttttccatttgtttgtgtcctctcatacttccttgagcagtggtttgtagttctccttgaaaaggtccttcacatcccttgtaagttgtatgcctaggtattttattctctttgtagctgttgtgaatgggagttcactcatgatttggctctctgtttgtctattattgatgtatagggatgcttgtgaattc

SEQ ID NO: 196556 - DNA, 1000 bp, Homo Sapiens
aggtacagtgagtgccaaggtcctgacccagagatgtgtgcagcggggagctgggaggacagtctgaggactcagggccggacacacaggctgcatgtgctgcttcactgaggtgggagcctggggctctgagcacagtggtctgacttacggtggctgccatgtggatggtgggtcttgccacagcccaaggagagcttgctcaggcaggcggtagcaggagtggcgagcagggccactccacatggtgaaggtcttgggccaagtggctgaccagtatgaggcagggctgtgggcagggctagagagagatctggaactggctttggggcctgtgagtctgagtgcccctgagctgcagatgtctgagcagctgggcctcctggaggcctcggtgcccacactgggactgtcctccacagcatggcccgctgtgatggggctcagggtctcaccacaccctgcagctgggagttcttgtgaagcctaggggagtctgaagccctctgggcctgtttccccagtgccccagacagccagccatgcctgggaggagccaagtggggactggacgatgcagcaactgccagcctgagggccagaggtggcctgcctgtggccttgcctgcacacagagccagcctcaacctcctggccctcaagggaaggcagcacaggtgccagcggctgaggtcaggtggagaagcgagaccctcctgccattttggccttagtttccccactgcacagagcaaattgttgccatgattacttcagtgccatgacaggaccgtgggcctctgccctgtaggggccttacaaggagagagcggaccacctgcccacaccccccacgtcaacacacacacacacacacacacacacacacacacacacacacacacagcacgtccctgtccctcccaccagggaaaaaagagcatctggcccagacgtcactggttttcccaccaaacacctaaaggtttccttggaattc

SEQ ID NO: 196557 - DNA, 1000 bp, Homo Sapiens
cagcataattataaagctgcgtgaagttaatattttcattcattcactcagagacccacaatgtagcaggcacaatgttaggtaggaaggtgagggaacaacatgataatgaataaatatgaaatctgatttcacagtgctaacaggaactaaccacttaggaaagacaaatgaaggaggtgcataaataaccacaacactaggcaaagcaagtgctcaatgccatactagaggcatgcagataaattgctctgtgtgcaatggaaggaatcattactaacaatttttacatgttctagggcttccctactcaaagtgtggtttgttttttttttttttttagatggagtcttgctctgtcgcccaggctggagtgcagtagcatgatctcggctcgctgcaacctctttctcccgggttcaagcaattctctgcctcagcctcctgagtagctggcattacaggcgcccgccaccactcccagctaatttttgtatttcagtagagatgggggttcaccatcttggccaggctggtctcgaactcctgaccttgtgatctacctgcctcggcctttcaaagtgctgggattacaggtgtgagccaccgcgcctggccaaggtgtggtctttatatcagcaacactggacattactgggagctttttagaatgtggaatctctgtcaactagacctattaacttggagtctgcattttaataagacccccaagtgattcaaatacacattgaaatgtgagaagcactggtctagaatcaagtcttaatgatttacctaaatagatgtatctgcaggcataatatataaatacagaataacatttcttatgtaaacctttaaccctatctataggttaatcagtcattaaagcagaaaagaagtggtagcaaggaccattcaagatagaccattttatttgtttttattgtgttttgtacttaatatgtgtatttgaatgagacaaatggtgtaggaattc

SEQ ID NO: 196558 - DNA, 1000 bp, Homo Sapiens
acacttgaaagccactagtgtagttgggaaaacacacaaccagtcatgctagagtatgatgggtgccccaaaaggagggattaacagagtaactgtttgtctgggtgagtcaggaagggccttggcagagagttggagaatggggaggaggtagacctgggcaaagtgaccacaacagaggaagtagcatgtccaaagacttggggacatgacatgtttagagaataacaagtgctaaaagggacaatggtatggggggcgggaattggaatggcagaggtgggttatttttatttaatttatgtttccacatttacatggcttaatgtggcctccatcaaagaagtacctcctaactcctatctacaagatataatcaaatataaggagaggcagtgtctggtccatggacagctgttacaatgatgtgaactgccaagactagaaagatggccagtgggattagcaggaaatgatatgggatgagtcaacaggggcccgaaacagaagtagtctttcagagctctaaaagttccaaagaatgaagaccccagtgggatcccataagctcaagtcacactggacagctggggtccccactcaatattgtgaagccttggtgggcttcctggaagagagagggaattcactttggacttaccaagctctaccagaattcactgccatcttcagagggctggaaactgctgttttggctttaggttgctactgtctgttaaggtctctaagacacatggcttaactttattaatacagaaacatttactgagcagtacgggggatatcctacatggggtgggaaggggagggagaggaaaaggttatggctttgcagagcttatgatcttgttgggggaggggtatatgtggagaaaaaaatacacataaaaacagaggattgatttgattgtcatgattgtcatggaggaaggctctagaggcattggaggggtttgagctggtgaaagagaaggaattc

SEQ ID NO: 196559 - DNA, 1000 bp, Homo Sapiens
tcctttcaaagagtagaacacaggggcagctaaagggagaacccaagcttgaactcatgcagtccagtttcttttgaaatcccacagtactgtggtccatagtaatttattgacggtgattttccatttccagatggtgaccttggggccttggaggttaggatggtttttattcaagctactgaacttggcattttggctgagtacatgtttgcttcctggccacttgcccccagcccagtctactaaatctctctctgtgtcccactttcttacgtggttttgtgaccacagctgcaaagaagtaatgactgctctctgggcctccctttccaagggtcaggcaccttagatggggcccaggacagctgccattgtggaatgaatgggattcagtgccagaaaggtgggggtgggtggggagctaacagtcttctgaagtctcctcttgggtttccatggggagagaagacaagccttcacccacgtattcatgctaagtacaaatcacagagacataccattgggctactggttacctctcttgcctacaagttgccaagaaaaatgcaggtctataacccacacttacggactacctgctgtgtgttgggcagggtactagatgctttgcatctgttccaattttatccttgcaacaacacagtgttattaggtagtgctattttatatttaacaatgaagaaattgagaaaggtagtttcagaaacactattcaatgagtcagtgatgaagccaggattcacaccactttgaattttaatgtctatccattccaggaattcagaaggagattgaagaggtagcaatgaacacaataaaccagatagatagacaaaggcggcaattgcctgtgtgaggtgatttgagggataaaaacaacatccctcaccttcccaaatattcctcttacagcctgaaatctattacagtcattcctttgagttaagcattgccctctgattttgctgtgtttttg

SEQ ID NO: 196560 - DNA, 1000 bp, Homo Sapiens
aactccccttagaaagatgttttctaactgaactataattcctgagaggcagagactttttttgggtggttttatgtctctacagatccaggaactgacactgtgcctgacattgagcaaatgttcaatatttgtttgttattgaaagaatggaagtcgggagaatgtcttcttaggagtgtgttttatgtgcttatacgaagcccattttgcatgaactggtgaggtagaagacaagggaaggaagagctttcactaaagaagaatgaggagaaaattcatacaataatctctcctcttctggcaatctaggagaacactcttctgatataactctgcaggaaaacaggtacaggaggaaggaaagagaagaaaatcatccactattcctttaaacaaactggctctttcttctcatggttccaagtttgttaccttaaatcacaatcactataaaccagtttagaaaagtatgacaataattactatccaattcctatcagccctggacttgctaggaaattttctacttcattgtaaaacctcttgctaaacatttataaggcctacagtgttttaaaagtgaaagataggccaggcgcggtggctcacgcgagtaattccagctgaggcgggcggatcacgaggtcaggagatcgagaccatcctggctaacaccatgaaaccccgtctctactaaaaatacaaaaaattagccggacatggtggtgggcgcctgtagtcccagctactcgggaggtgaggcaggagaatggtgtgaacccgggaggcggagcttgcagtgagccaagattgcgccactgcactccagtctgggcgacagagcgagactctgtctcaaaaaaaaaaaaaaaaaaaaagtgaaagataaatcttatttgccaccactagaggagacaacagtgcccaatctttactctagaaagtgataactaaaatgaaagaattcaacatctaactttcctttttagaggaattc

SEQ ID NO: 196561 - DNA, 1000 bp, Homo Sapiens
gaaaaatcagctcccagggttttcaaagctccagaactaagtgacagaaaaggggcctgcagcattaatgtcgatgtcctgtccactagtgaaactgaacatgaactcctttcaaacatggctgagaataaaagctagacttaaaaaaatcagaaggctgggtacagtggctcacgcctgtaatcctggcactttgggaggccaaagcaggtggataacctgaggtcaggagtttgagaccagcctgaccaacatggtgaaaccccatctctactaaaaaaaataaaaaataaaaaaataaaaaattagctgggcgtggtggtgcatgcctgtaattccagctactcgggaggctggggcaggagaattgcttgaacctgggaggtagaggttgcggtgagccaagattgtgccattgcacttcggcctggacaacaagagcgaaactctgtctcaaaaaaaaaaaaaaaaaaaaaaaagagagagagaaatatttcctattcttttttttctccctagataaaagtgctctttgactagatgccccctcggatgttccctgggacctagaaaccctagagaatgaaaaacttattctttaacttttcttcttctgtggagtaacttctggtggaggcattaggctgtggggagaggacaggatgcacaggcagggaaaatgagccaggaacccaattctcgccttctaggagagagaagaagctggcctaggagcagcgggtttctgcaacaaaaggaacctgagagattatcatggtcaacccaataacctcacacccacacaaaaaaagagacctatgctttgtctgtagtacagatgaacacttgttctgctcatacgccagccactaggctgaaccctttcacataattttatttagtagatatttaattgggtgagtagatgaatgataaaagtgagcaagtaacatctagagaagacccaagtccattactgatacaggtgggcctggaattc

SEQ ID NO: 196562 - DNA, 1000 bp, Homo Sapiens
acatctgcaggcaattagaagaagctggactgcatgtttgattagctcaataagaaatgggcacaagtgtgactcgacttatgttagtcaaattccctagacagattatcctgttgttatcatatgaaataacccccttttatcaacaattaagtaaatccacatttatgggcactttgcaaaattgtgaggtgggaagaaatccaacttaagccctaagccttccaaaaaacttttaaccctgctttcaatggtatagacaccaatcccaaattttagaaactggctgaattacacagatcaatttgggttggaaataacctgtgtgcacacagtcaacaggtatgtatttagcatattccataagcaaggcacttaatagtctgcttataactaaaaaaaattcccaaagaagaaagaactataaatgttttactatgtgaaacgtaacttactttgttaggtagtctaaatattttctagaaaagttaaataggattttattttcattaatcacagtacagtttctaccgtaaccaatacatgttgtaagtcttgaatatattttattctaggacctcttcatttagttctgggcattgttcttgaattcaaccataaatgtcaatgacggtctacaaactactttgggaaatgactcattcatttatctggtttttttttctcccaagtaccattaaagtacacatctaaagtattcaaaataattcagtatataaaagttgatacttaagaatttttcagcaaaattttttgattttgggaaaaatactaccaaactttccagtctagttatataactaaataacacaattaaaagttggtctatcttaaataaactcaagattttttttatcagtattaacccaaatacatgtataagaataacctcatcattttatctccttgacataatccttaaattcaatatcagaatatcaagcagatgctgaagcattcatcatcaatactggaattc

SEQ ID NO: 196563 - DNA, 1000 bp, Homo Sapiens
cctcagccttctgagtagctgagattacaggcatgtgccaccatacctagctaatttttgtattcttaccggagacgggatttcaccatgttggccaggctggtctccaactcttggcctcaggtaatcctcctgcctcagcttcccaaagtgctgggattacaggcatgagccactgcgcccagccttgtcttggctattcttgacatatacattttagaatcagcttgtcaatttctacctaaaaacctgctggaatttcaattgattgaatagaatttataatccatgggaggtattctttaatttggctcagcaatgttttgtactttttgttcaggttataatggttcgtggtggtatataaatgtacagttgattttaatacattgacttggtatctggtgaccttgccaaattcacttgttaattctaatagttacctgtggcttcttttgaatatttttttacgtctataatcatatcatctgaaaataatgagttttatttcttcctgtctaattttatatcttctatttttttcttcccttattgcattagttggatgctccagctcatttaatgagctccagctcattaaaaaattggtgacgatgggggtccaggttctgctctggatttcctgcggatacatcccctcaagtagacttgtcccatgtcccttcaaacccccattgtcccctctagattactgagtccgatgggagccaaaattccccgtccaaatgactttgagcccaccttcaacctatatgtgcctcttcccggagtctgtcctgctcagggcagatgaggccaatgttatgcaacccctggggctaacagatggccacagggtatagatggagcttggatgtgcagttggggaaatccgcatgcctgcaggacagagctgggggtgggctgggagctgtggccagaggcaggctcttccttagccacccagttatcagtagaactctgaggtgtgtctgaattc

SEQ ID NO: 196564 - DNA, 1000 bp, Homo Sapiens
tatataccacaggattcaaccagaagaacagagaagctcaaagcctctcatagccagccccaatttgtccctcaaacatcctgcacttcaatcaaaccagacagagtaccagttgttctcacttggattgttctttaaacacttcccatcacctacaaataatgaaattttatcttctcttcacagcctaaaatcagccagtaccttttctatcaagcattgctacactggggaatcagaattcaaatgttttctgtatacacagcacttctgtatacaaacacatatatgtgtctttgaacatatatttatttactttattatccagtaggcaactggtagacccagagtgtaagacttatttcctctaaccacacacacacacacacacacacacacacagagagagagagagagcaagaggggggagagagagagagagagaaacacagacagtgcctattatcttatcttaaatataatagatgtatctttaggaagcagaagttttaaactgagtagccaagtgtttagagactttcaattttactttctcttcccccacatcctatttttgaaaattcatgtaatctctgattttgttttctatgagctggtgacgctgaacaaatgaaaatcatcaatcattcttgaaattcatatttcataaggtaacatcataagagtttcatgaaactcctctgccagttgcacttttagcatgaatttttagaaaaagtatagaatgacaaaaggctactacacattcaataagtctttaaaatatatttgcattttgttaaccatggtaggatctgcatgcatttgaaattggctataacttatgttttgttatattgcgccccctttgacgctttttagaaaacaacatttaaaactactttttgaagaaacagaaattatgaaattctgattatttcatacacaacaaggcttggaccatatagtgttaacccaaggataattcttgtaagaattc

SEQ ID NO: 196565 - DNA, 1000 bp, Homo Sapiens
aaggaaaagaggagtttttggggggtgtctgtgtgtgttttgtctttttacattactctaaattcccagaaccaatcccggttctacaaataagtgaaacaaaatcccctttaacaccgtagggtctcacgccctcagatgactcacggaaatgacgccatcagcgaaaagcggggcgggcgtagacgtcagcacgtcagccctcctccatgtccagctgagggaaggctcgtttcagtgccgcggccggcgcccgccaagggatgggcagccagagcctgtcgactgcggctgcgcaggtatgctggggcggggcttcaggtcaccccgcccatccccagcctacgcgaccattgaacagctgccgcccaacggctgggtaaatcctcagcggccgaaatgattagcccagggggcagccccgccccctgctcctcccggcctctcgccccgcccccatgtcccgcccgctcgtctgcctggctgcggggtgacacggggcttcgccttgggaaggggtcgagggaagcagttagacggctgccgggcggcggctgccgcgcggcacacaatgtgagcccggtgatggggagcgggccgttgggaagagggggcggcatggcaagaaatgggagggccccggtgcttggtggtggaggggctgcagagtgaggggcggctttgagtgggctaggctgtcagggagtgttccgatactgtagtgcaggctgggatcgcggtcgggagacgccgagtccgcattcctcagttctagagcttctcttggcagctcggcacaccttaagtttgcctctgtttgggttgtcttgggatgtgaggaggaaattaaaagattcccccaaacacttggatgcttctttgggaagttcctcgccggtgtgtgcgtgcccacttctcttggatggaaaggtggagaggccaggtgggcgggtggacttccactctccgaggattgttagaacaaacgaactgggaattc

SEQ ID NO: 196566 - DNA, 1000 bp, Homo Sapiens
gctgcgggctacacctgtcccgccgcaagtccgccccgcgcgggggaccgggggtgctgccgggcacgaagctcaacgggttctgtgctgcaagcggcggctcgcgcctgggagaccagcggcaggaagtgcgggcagcggccggccaggtccccggggaggccggggcgcggcgtgcacgctcctccgcgcagctggcgagccgcaccgcccccgcggcacctccatgcgcccctggcctgctcgctagtcgctgtcctccagaggattcagcaggaccgttcctcttcctcagccgcgagcacgtgcgcgggggtgcgcgcggaggtcacggtcactgcggggctcagggaaggaggcgccgtgcctgcaggacttcccttcgcttgggcgcaagccggcgattagcctggtcccctaggacatctccagggctccggggaacctctcctgcgcaggcttggccctgcctcctccaagcgtccgagtctttttcggcttttcgtgagcctcagagagggacgtttcctgccaacgctgctgcgaaggaaagtttgggcggcgttatcctgactgccttcctcgccagcgccggcgagcagcttggggacacagccgacgcccgggcatcctccccgacgaccccccggagcgctcccagttcagactcctttccgagaagcgcgcagaagtgacagccccggagcttcgttccggtgtaggtgtggggatgcgccgcaaggcaggaggggaaggcgctccagttgaagggggcaccccggggcccgcgccgactcctcccggcgcagccttggctcgccggagtcgcgggtcggaggctggcgccgctgcccgccgaccagcaccctggcgccaggcgcccggctccacgccgcacccttggcgacgctgtgcgaggggctctagcgcccgccgcggcgcagtctcgtgaacccccgctccaattttttcctacggaggcgcagaggagggtgaattc

SEQ ID NO: 196567 - DNA, 1000 bp, Homo Sapiens
tagctgcttctccagaccacatggacggtaagacgtagagctgggatttgaattcagatttgaccaattccaaagcctggggtcttcccgtctgccaggctgcttctgagattcactgtgttctcgctgcctctcgtgcagctctctattctgacgaaaggcattgtaggatcccagggaggtgccagagtggcctctctgcagtgactgtggctgtcttggttcctctcacccttcttccaaagcccccatgagacacacctccctggtctccttcagggacagaagacccagagtaactcctgtcccctctcctcttttaaaacacagttctgttaatgaggtgtgcagctccttctctctcactgtgcatctggggtgcatggcttgggtgctgtccttggccatggcactttcgtagatgacatttactcaacgtggggtgatgtcgtcgagctcctgtaacattaataggttaagtggtttgtctcgtggttttgtgtgtgttgtgaaacctggctggggtctgggtgtcgagaagcagggccccaggaggaccctccctgctgggccaggcatgaaaagttactaccactgtgtctgacttggggagcagagctccccagttgttggcctgacattggtgtgggcaagtgggtaggcagcagacccctggcagaggtgaggttcaagagctgagtcccagggcagagctgggaagtgagggagggacacgtttgccccacctgaactccttgttggcagtggactcagatgctgagctgctggaacctcttctgtgctaagttgggtctgggttgggaagggagagggggctgcagcttggaggggagggtgtggattagcagcgttaggtgtggaaggaggccctattgacaggttcaggcccccgaccttctgggggatggggtgcaggtagggcccgcaccatggtgtctatgctgggagtttcctgggtgggtgtgaagtaggcagtagg

SEQ ID NO: 196568 - DNA, 1000 bp, Homo Sapiens
aggagtttgactgggctggtgtccaggtctccccaggtcgccccgtcgggccagattggtcagccccaggttgcccatcccttctgctgttcttccctctgccacagcattcctcctccttcttagtcacagataattcccctactctcttggtgagttgccaagccattgcttctctctgccaagggctgttggactaggtctgtgttaggacaagggtccaagtcaccaaagtttcttgtgttagaggccagacctgggggcagggctcgggggtgggtaggagtgattaggaaaggagatagggaagagacagcttgtgctctgggtgtgggatggctcacacccccatgtctatgctacttacctccaatggacacacatacacacactcacaggcacagaggatggctacctctggagggcaatttgcatctgcctttggctctctgaagactgggagggaatataaagggggctgagcattttgtagttcttcccagctcgtcccttcttctccctacgttttaacagcttacaaagagattctgggcccagataaaataaaagtctttgggaagggaaggaagagagaagagcttagatctatgagctccatttaaatcacacttcaaatataaaaacacaaatgtacacaagggaaaaaagggaaatcacatacattgagcattttacaaatattttatcattcaatctccacaaaagttctatggagtaaggaattggagaccaatttcacagatgaggaaacagattcaaaaaggtcaaatgacgtgatcgacaccacacttctagtcagtggtagagctgagagtcaagtccaggctagcctactctataagacaatttaggaaaagataattaattttacaaaaggattcactgttggatggctttagatggaggatctccctgtagctttcaaataggatgtgatgtgcaaacttgagctggctggtgcccatccctgcaagaattc

SEQ ID NO: 196569 - DNA, 1000 bp, Homo Sapiens
aaagtaaataagccttaaaaattagttattgagttgaccagggccatatgctacaggagatgtacgagaaaaacaaattgaagtggtagtgtctcatcagaactgttccacatatttctaatacggaacgtgtaggatgagaaagatgagccccagtgcacacatcaagatgatatttccttatggacctagtcgaagctcccctggtgaaaagaaaaagctgcaaaggtcagatcaccagacacagactttgtctcctaggagatgaccacatgctctagtgcacatagtctgctttttgggttagtttctattagataaaaatatactttattccagctctattgatatataattgacaagtaacattgtatataacttgtacaatttgatatttgatatgcattgtgaatcatgtacgcatgtacatcaccatgatcaagctaagtaacatattcatcaccacacatagtgaccatttttaataatttttttatggttacaacacttaaggtcagctctcttagcaagagaatattaaattcagtcacactgttctatattagatctccggaatgtattcattctcttactaaaattttgtaccctttggccaatatctctctatattcacttccccacaaccactggcaacctccatcctcctgtctgtgtctttgtatttgattatcatatgtgctttttatgctctaacaaagcaagctgaagcactccttgtattttaccaaatacattgcccatttcatgtggcatctgtttttatgttttggagagttataaaataccccatatcccttggtcactgagataccatgtgatgttgaaggcaacttaaaatgttgaaatgttgaatatgagggttggaggaggcacaagtcaggtgcactgcaatctacgctacagcttggaattctctacctgacatctacctgtcagagtctgaaacttacagatcagtgtgcagcatatcttggaattc

SEQ ID NO: 196570 - DNA, 1000 bp, Homo Sapiens
aaatggctccaaagtctggctgacaacattttcccattgtttctgtaatccttagtattagaagaattcttaatcaatttttactagcaaattaaatttcaacagaacacgaattggtatttccttcatggaaaaatggggttacatgtcttgccatagataaatcgacagggacattggatagctccaaatgtaacacttgcatttcagtacatgtgctttgttcaattcagataaatgagataaaacttaggctgctctgtgctagatactatacaaattgttgaggatatgttgctgaatgagaaaccagtgtaactctcaagaaaatgtttaatagtggacatgaacaggatggaattaactatagcatattgtgaaatgccctgacattggtgtgcacaagataggtgaagaagaaattattttcctcttctgagctcaaaaccttcggtctgaacttgtaaggctgtgtagaagtcaccaggacttgaagatcattacaggtaaagggaaagacgtgagtagttgtgcgacacacaggtgcatgcatggatgttgatggccccctggggaagtaacatccagttcatgaggcttttgcaataaaaactcaggcctatttgagatgtgacctttttcttacctagatcatgggttacctgggctcctgtagagaaagcagcagggtagaaagacgatgatggaaagggcgagccagtcctgcccctttctttaccagggcaactcccatcagagtaaagggttttctgttctgcatataaagattctggaaaagatgcatgttataaaatatcatttgaagaaaggattccaccgttaataaaaccactgatttacagagactcagtactttctagatctggacaaaatgaataaaaaggactttctctgtgacctggctatcacttcttccaatacagcagaggcgagggaacgacgaaatatgattctgtcctgacccgcagagaaagaattc

SEQ ID NO: 196571 - DNA, 1000 bp, Homo Sapiens
cagctgtgaaatattaactgtctgtgacataatccaattaactgattctctgttgttgggcatttaggttattttcaagttctaactaatcctgcaataagcatcttgttctcccttgttctggttactctcttaagttagattcccagaaatgggataattgtttccgaagatatttgggaacatctgggaagttcctgatctgtattgccaaatgacttttctagaaggttgtacaaatttacattcccgctacacgtactctcttatgttgtaatacatgtttacatgccttttcccccacaaattatgccctatccaccttcctgtccccggtgcctgcacaggcagctgcccagcagcctcccttgcatcacacatgcccatacttgcaccatacgtgaccgtactttcacagaggagaaggaatatccagggtcagggggaacatccctgacagacactcctggaaccaagacgtggacaagtgtggatggacacgtgggtctctgaactctttctagaacacctggcatggagatgagatggccatcagagacctgtcagttctgttttctcgcttggcggcagggaagctgagatctaggtggggcaagtgggttccacacggcacagttcgtccatgtcagtgcagtggctgcttctcggggtacggccaagccggggtcttgcagcctcagctcccagcaggacccgcccagccagggtcctcaaccctaggctgacatcttggcctcactggcgtcacagctcagccctcaccctgcgactctgtgcacgtggggagtggggagataagagctggaggcagacctcctaagaggaaggaaaacgatgtggacttgggggaggaaggatctgccttccctttcttcagcgagagtttcctcttctcataatacagggaggacctcaagatggctgtctccccctttagagatgctgtgtcccagcaaaggggcacctagaacaggaattc

SEQ ID NO: 196572 - DNA, 1000 bp, Homo Sapiens
gcaccttggacagagacaaagctccaacctggctggaggcattgagtagccaagtgagcttgggatctcctccagggccagctttcctggcaaggttgcccaaagcatgtcttggttcttcatattttttaatcctttgaaggcactcaaaaataaaccccctaatatatgtcaaaacagtgcactagttctgcaaactctcagggcattttttaaaacaaaaccaacctattttctagaatagtgttaggtacacattaggtgcttagtaaatacatttaaaaaggaatacatgcaaattcaaccttcagacaaatgtcccagcctccttataataggattctttctccccatcagtccctcctatatagtaattctggagcttctagtacttgctaagttttgcagcctcacttgaagccccttcttgtgtctaaaaatcccagtctttaaatcaaaggaacagatgactattaagttttcaggcagaggaaactgaaactggccccttctctttctcatctgggggtaagtatagattggtggggaaacccacacctgactcctcttgggatcttgctttatgaagatgttcaccaccttcctttgtacctgagaaagcccttaccatgcagaaggaccaaaatcgcccaggaaattttccgagctgacccagcccactcagagccctccttcttctgaacacccctccacgtatcctcaacatcaccagattgttcttctgacatttcatatccaagttttttcatgcctattggttcttttcccggttagataatgaattccctgtgtttgtggtttccagttagatgctactgtgatgcaaacacagcagataaaatgggagattgatcagtcttgggggcttctatcttgtcctaaggggtctcctgcaccacttatttttagtctgacataaatatgcaggatggatcatggtgctatttgtggagtaaccattggctccaagtgcacccag

SEQ ID NO: 196573 - DNA, 1000 bp, Homo Sapiens
tgcgatatacccacggaacaaaactgcagaagtaccccctgaatctaaaataaaaggtgaagttaaataaaattcctaacaaagtcacaacatccaatgacagaattataggcatcagtaagtgtaaattttcagaaaaaagaaagacagaagtggctatttaatctactaccacaggtatagagaggcactatcatattaagaagggaaaacaaacaggataatatgctgaaattcacataggccaatttattgttatacctgacagttggtggtaggtaacttcttagataataaggcacgaatgaatcattcattgttatagctttcatacatataaggcaaataaaaattgacttagaataaaataaaatctgtttagttttaaaaaaataatttaaacatttattattatttttcaaaatttttaattattatgggtacataatagttgtttatatttatgggggtgcatgtgatgttttgatacaggtatacaatgtataatgatccaatcagggtaactggattacctatcatctcaagcacaataaaatctacttttgtgttaaggctataggcaaggaaatgataggttaatatcacacaacttcccttaaataactgtgaaagcacacaaccccaaagaaactacatttcttatgacaagaatttttataataggctcatattttcatcatatacataatatacaggcatgtgtgtgtatagcatcactttttatactgatactatattacctgtgcttcagtgaaaaataggtagaatgtatacattagaaatttaagtcactgtcaaaaagagcataactgacttaagaaggccatgacctcttaagaggagccccccagcttagggggcaaattctctatcatatacccatgtatagttcatatttactgttagtgttcatctgaataaaatctcatctgaaatactttaaacttcctgtctttaacctgcaaatcccaatgaattc

SEQ ID NO: 196574 - DNA, 1000 bp, Homo Sapiens
ggctgggctgtgcacctgcctcccactgacccagacccacttcctccagagaggcctctctccgcctgagctatttcccttgctagtgtgcagatatttccctaacatgtccttttttgtatttgtttgtacggaccataaatataactgtagctttaagactacacaggttgttatgtttggtcaacatgaagcgtttcccagaacttctctgacccaagaatggtgaagtggtggtacagtggcagaggcagcctcgtgggctctcttgctggggctctggcagctcacagcacatctgcccagattctgaggttctgcactgtggggctgggagggccaagtaggggcctcattcctcactctagctgccaccctgcaccgtccttacggcaatatgcttttgtagcatgtttgactttccaaaacgtttccagcatctttcagatttccccaaccagcccttggggcagtggccctgtgcaaaccttggctcaggaaggagattgggctcgctccacacaccctgtcggcgacgttgctggtcagcacgagctcctggtgctgtccctcggcccctgcactgcaccgtctgcccctcagcccttcatttagacaagctgctcaatgccaggcaccgcccagctccgaggacagtgggccggacaccaggccccaggccacgtgcctctctcacgggcagcacacggacaagagctcggtagtgtcggggaagcatctcggaggagctgcgggagggagcagagtgcccggacagagagagtgtggcaggggaagcatggctggggcctctgggggtcggcgctgcctctcactgatacaggggacgcatgcagaggcagccttggtggtcagtggaggagaatcccaaactgcttgtgcctcattgcgtttgggatgcctggtggacaccaagtggaggtgacatgtgggcagctgaggacagcgagagagaggcctgaagtggagcctggaattc

SEQ ID NO: 196575 - DNA, 1000 bp, Homo Sapiens
tcctcagtgacccccacagctgtgagagccacccagagggcaactgttcataagttaaaggctggggtggcctgcgttccttcctggaagcaggccgtgctgaggcagctgttgatggggaatcttgcttggttttgtgtttttgtttttttaaggaacatagttgttgattgtctgatttgtgaaatttacaagtgggtgtttgtaaagtagagatgaattagtggtaaacatgcagttcgttctaatgctgctaattgaagttgactaaatctgtaatgtttaaccggctgtgctaagaaacttcattcagtggcgagaaaggttggttgtgtggtgtccaagaggaccacttgatccccttgtgcttctactgtgggttttctttttcttcttcaaagcctgctatacacagttacgtttaaaaagtgaagttaatcgatagtttgcactatctgtagaattctggaaaggcgatagcctggctcagcgcttttctatgaaaatgaagcagtcgaggcccggggcagccaagcgacttggccagggctatgagtctgcctcacagcaaggccaggagtgggcccctcgcagcccaggtttggaggctggagcccagttccatcaaggcccttctccaaagcacggaacaggtggaccgcacccaggcgctccagagcacttatgtctcagtaacgtttgtttgtccaaagcagcatacgatccagccccgctgcccacccttacctgggaaacggggctcctctcatagacccacagtgctccccctagcctgttcatacgtgccctcacatctgagctgctcctgaccctgagagccgaagtgagctgagactcacccctctggagctttttagggaggatagaggtgcgtgcataccttgttgagaaagtgccacaccggatcctgcatgtgtccctagccataacagcgaactggtatggggatgacaacacaatggcagccatcacctgggct

SEQ ID NO: 196576 - DNA, 1000 bp, Homo Sapiens
aactacaggcacccaccacccccggctaattttttatatttttttagtagagacggggtttctccatgttagccaggatggtctcgatctcctgacctcatgatccacccacctcggcctcccaaagtgttggtattacaggtgtgagccaccgcacctggcctgaaatattttttaatccaaatataaacagatactcctttctgccattaataaacaattagggaaaaaaaaagataaaagcctgtttttaagaccattgtccatatggcttacacaagataacttcctgaagtgacctctaagacgaaatagttgcaaagtatttctgtgttcaattaaattaaagcgtgggcaaaaagaaattattagttgtagatatttaaaatcaaatcagtttaaacaaaacactgtcaacacagcagccaaagaacataatcaatcaaaagatgaataaatatacacagttatacagcactactactacataatgatgattatgatggtgatgatgaggatggtgatgaggaggatggtgatgatggtgatgatgatgatggttatgatgatggtgatggtgataatatggttgatgaggatggtaaaagtgttggtgattttgatgatgttggtgtagaggatggtgaagccatgctaatatgttgatgctgatggtgatgatggtgttggtgatgaggatgctgaaggttacggtgatgatgaccagatgacgatggtgctgctgatgacagtgatgatggtgatggtcatgatgatgacagcaatgaagataacaaatactgtgatgattgttttggtgataatagtaataactgtagtgatggcctgtttctacattgcaatctctatttctcccccagtctccatacaaacagaaccaccttagagacatttcaaacttaccatattcaaaatgcagctgctgcttttgatacaatgaatgcccttctgtcgcatttttactatcttaggagaattc

SEQ ID NO: 196577 - DNA, 1000 bp, Homo Sapiens
ataataaaatactaaatctctcaattttgtgatttgagagaagtctaataatattattttttttcatgaatttctttgtgggcttcattttaatggttatttctgttcatgatctagaaaactgacttcatcttataattgccatggttatcctctttcctctgttgagactttatccctgcatggaactcagcctattgtcttggattctcccttcacataatcaaaaccataccaaaccatttgccagtcatgtaagttcttttcagcctttacctctccttcctcactttgatttaactctgaaggacccagaggaatttttgtacctgaagcttttaatgaagaattcaaaaacagcaggagatgtactcatcatgtggtggagatgccatatgatgtagcttgatgcctgtactcaagttagacacttacccacgcatcccttaatagctaccaacatatatttttctgacttaattaatttctttatgttcttcaaaactcaattccattattttactctactggagaagtttattctaggttttctgctaggcttagaacttgtatttatatatttggtctcattaatgcctcagataaaagaaagacctatgtatctatacttgttttatttatttcgatagttagaaagactataaagaacttccaaatttggggttttattttcttttcttttccccttccatctatttgtacatatagagcagacaggtttataagtttatttttacatagatatgaattttagccacccacactttaaaattagttcaaaagattgtacacctgagggatgcagtggttcatggatgatgactatagtttgtgtatgttactttgtttatgaatgtgtgtgttttgtcttctttagtgactattgctttgtgaaaacataaatattgtaaacaaaagttaaaaacataaaattatctagaattctgtaggatttttattttgaagcttttctgaattc

SEQ ID NO: 196578 - DNA, 1000 bp, Homo Sapiens
tattttttcttatgaatttttaggtctacttttttgttttttattgtggttaaaaaaatgagatctgtcttcttaacaaattcttaagtatttagtatggtattgttaactatgtgcacattgttttacagcagatctttagtactttttcatcttgcatgactgaaactctgtccctattgaataacagttccccactctacagtaatcaccattctaccttctgcttctgagtttcgctactttagatacttcatataagtggaattatgcagtatttgtccttttgtgactggcttactttattaacatgtcatcctgcaggttcattcatgttatcacaagtgatagaattttttctttcttttaaggctaaataatattttattgcacgtgtgtaccacattttctttatttttttcatctaaagacccactaaaactacatggattaactacattaatccatcggtagacatttaggttatttctacattttggctattcatatttcaataaacatgggaatacagatacctttttgagatcctgattttaactcttttggataagtatccagaagtgggattgctggatcattatggtagttctatttttaattttttaaggacctgccatactattttccatggcaaccgtatcattttatattccctctaacagtgcttccagtctctccacgtcctcactatcacttatgttcttatgttgtgtgtgtgtgttttttaataatagtcatcctaatgggtgtgaggatatgtatcagtctcactgtggttttgatttgcatttccctgatgatcagatatgttgagcacatttttatgtacctataaaaatatacaaagaagacacctgtatgtcttcttcggagaaattgggtattcttaattgatttaaaacaatatttaagtcagtagaattttagcaaagtaaaagatactgaatttctggaagtctttgtgattgtgtttgaattc

SEQ ID NO: 196579 - DNA, 1000 bp, Homo Sapiens
taacatttaaaagccacctttcctcccctcaggttcttttctcttttaatataaatggcaaagagcatacatgtttatgacagacatgttccccataagtttattcatttattctacaaacccccccaaaattttgcagggaagtaaaacaaaactaagtacccacaatatgtgaggcaccgctctgaacatttttgcatggattatacatatcatttattcttaccacaactctataaagttggtaggattattatcatcgtctcctttttatagattaagtaattgaagcacagacattaagtaacttactgagggcatacaactagtgaatattagtgctaggattcaaatcatgcattcttttaccggagcctctgctgttaaattactttcagtgactttacccgagaccttttttttttttttttgcaggatggggtggtattcataaaagaattttataatcatgtgaataataaaatttattgccacaaagtcttttttttttctttttttttgagacagggtcttgctgtgtcacccaggctggagtgcagtggcgtgatctcagttcactggaagccccacctcccaggttcacgccgttcttcgcctcagcctcccgagtagctgggactacaggcacccgccaccatgcctggaaaattttgtttttgtatttttagtagagacggggtttcaccgtgttagccaggatggtctcaatctcctgacctcatgatccgcccgcctcagcctcccaaagtgctaggattacaggtgtgagccactgcgcccggcccaaagtctgtcattttatgatgacaaatatggctaagtttttttttaatggaactttattcctccaaaaaatgacttttaatttttcccaggccatcatttcatggttggtattaagacaaacaattatgaagtgttgaagaattaagttcctattattactgtatcatgtattactgtaaaaaaattagaattc

SEQ ID NO: 196580 - DNA, 1000 bp, Homo Sapiens
aacctcataaatatcctaactttgctattcctctttcaggaggccagaagactctgcaaggtagtgctctcatttgttaaaaacttagctttgtcatctgaacaggctcacctggtgttggttctttagggaagcctgcatttgaccaagtgcaagtagtagaggaccttccacaatagttattcaataagtatgtgttgaaataatgttcaaatattttaattcactgaactattgttaatgtcttagcatctctaggaattctctagagtctttgactctaccccctttgaatacaatcatagaatagcaatgtacttaatttttaagtacattagtgggtgcatttccattgaagaagctaaatttatacttggatatttggtctcccttcaaaaagcatactccaatgattattgttccatctgaaaaaatgttttccatacggtttcgttttatttcccatagaaaatttgatatttagctttattacaactaatggtattaattaattttcattgtctgagttttcttatagggtttgttttgaaatattcaattaataatagaatttagtgaagctactaagaaatgaagtgaatacatgatttctggatgtctgtctttgtaattatttctagacctttgtaagtaaagccttctcttttcttcatcagcttaacattgaagaacttaagaatgtgcaatgagagttaaacttcgaatcacgcatggcaatcagtgcctactcatgccatttcacttcaaagggacggtgtctagaaacattctttttacaaggcattgatatatgtaaagaatgtatcaatgaatagatgatggtggtgtttcagttacaaaagcagagaaagaaatttgttactgaaggcaaacttgtacacctgggcaaagcacttgcattcttttaagttctgtcaaaggtagtacttctcaaacttaaatatgcatgcaaatcacctgaggaatcacagaagaattc

SEQ ID NO: 196581 - DNA, 1000 bp, Homo Sapiens
tggcagacactttttgttttgttttgttttgttttgtgtttagagatgggttctcactttgttgcccaggctggattcaaactcctgggctcaacagtttgagcctcctgtttcagcctctctcacattcggtccatagcatccagaaatagtgtttaaccagtgatctgagcgtcccttggcccaatcaatatgacgcaaaaaattaaccatcatgtatgtctagcaagggcagcatgcttctggagtcagccactgtaaggcagcttcctgtttggcaagcagagttcagatcatggcagaagtatcagctaccttggcagcccagttccatggaatggatttagaaattgttactataaatccagcccaggttagtttcatctcatgattctgtaagtcactaataacctataagcttccttcctctcctctcctcccctcccctctcctctccctctttctctctctctttctttctctccctttcttttccctccctccctccctcccttccttgcttccttcctttctttctctctctccttttcttttcttttttcttttttttttttttttgagacagggtcttgctctgtcacccaggctggtgtggtggctcaatcacagctcgctcagcctcatcaccctggtaagcccctttctttttaaactagctaaagcagatactgcagccaaactcaaactgatataccttccttacacatggaggtgactttatgacccagttctggccgataaaaaataagtggaagcagccaggcgcagtggctcacgcctgtaatcccagcactttgggaggtggaggcaggtggatcacaaggtcaggagatcaagaccatcctggctaacatggtgaaaccctgtctctactaaaaatacaaaaacttagccaggtgtggtggtgggcacctgtagtcccagctacttgagaggctgaggcaggagaatggtgtgaacccgggaggcagagcttgca

SEQ ID NO: 196582 - DNA, 1000 bp, Homo Sapiens
aagtgcctgcactactatataataagtgcattctaatatagtaaaagctgatttgtttttagtagaaaaaagattttttattagggcattgttcttagacgtagctttcaattcgaccaagaaacagagatatctttaaattgtttactttgggctttaattcttagaaagtcaacttttattgatacgtattttttttagtaatagtttattgctatctactgttatcataaggtgttacctacacagtactaaaacaagtagttgatctcagtagctccattaaaaataattaggtccattgattaaataatgttcagttaaaattcccctttaatatttctctattggtgttggttcttggggtttgaaagaaactgttgtagactcatttttaaattcaattctgtgtaattttgatgtttgatttgttatttagttcttttaattattaagcacctattatttgccagccactgtgcagcttaattgatatctccaaatggatgtcaatagattcttaaagtttaacatattccaaatgaaagtttttcctttcctttcaaaatttgttcctttatgtcttacatcaatagatggtattatgaaatcacccagttggttaaacttaaaataaaagcaatagcaaaacctagaaagacaaaatacctaggaatcagcctttttctcatggcccacgtccaggccaacagtgaatcctgttggttaaacatctagaaggtgtttcagatctgtccacatttcttctcctaactagctagttagtctaaaaccatatctgaggatatttcttctattattctctatcacagtatcctgtttatttccctcatggcacctatcacaagctgtaactaattactttgtgtatttattatctttcctagtagaatgtctaagatctttgtcagtagggactttgtatctttggttcctagcatagtgccccacaggtatatttatggattttatggaattc

SEQ ID NO: 196583 - DNA, 1000 bp, Homo Sapiens
cgattctcctgcctcagcctccagagtagctgggattacaggcatctgccaccatgcccagctaatttttgtatttttagtaaagacagggttttgctatgttggccaggctggtctcaaactctcaaactcctgacctcaggtcatccgcccactttggcatcccaaagtgctgggattatgggcatgagtcactgcacccaggccaccttttttctttttttttttttagagactaggtcttactctgtcaaataggctgagtgcagtggcacaatcatagctcactgtaaccgtgaactcctgggctcaagtgattccccctgcctctgcctcccaagtagctggaactacaggcacatgccaccatatctggctaatttttttattttttttagagatggggtcttgctatgttgcccaggctcgtctcaaactccaggcttcaagtgatcctcctgccttggcctcccaaagctctggaatattaccgggatgagccaccacacttggcccttctttttattttgtttgtttgtttgtttatttatttatttatttatttatttatttatttattttgagacagcgtttctctcttgttgcccaggctggagtgcaacagcgtgatcttggctcactgcaacctccacctcccaggttcaagtgattttcctgcctcagcctcccaagtagctgggattacacgcacctgccaccacgccaggctaattttatattttttagtagagacagtgttggggtttcaccatgctgatcagcctggtctcaaactcctgacctcaggctattcacccgcctcagcctcccaaagtactgggattacaggtgtaagccaccttgccctgccctcttctttttaaataggtaacatattcacatggtcctaaatgaaaaagtacaaaaagcatataccccagacatccagtcacccagtcccttccccttctcacccctgctactagtttcctttgaattc

SEQ ID NO: 196584 - DNA, 1000 bp, Homo Sapiens
tcagtcagactatttaaggattaaggacctccatgcatactgtagcgatatgaaaactaataaacagactcaatgatatgagtgtattaccattagactatctgcaattcaaatctcaccaaaataacattaaaaatctgttgcctatatatgtggttctttctaaatgaaagcatcccatgattaaattcatgaatatcctacatcaaattgcaaatatatgttccttttcttttactattgcagatcttcagaagtcatctataacctttaaacaaagataaaacatttttgaccggcgtctaaaacaattagatgaaggagaaagataatactttaaaaatgaagagcaaaactcacccggaaattacttgttaattaaatttgaatagaattattaaaaaaggaatccctaaaattttaatccagttcagttaaatttatagtaatacatattacattattcatacctaatgtctctctgtgcagattcctaaaactaaaattcaatttactgaaatctattgaaaatatttattgagaacctggtataagtcaactctgatgggattttatgagatgtattagataacaaacattttccccatcgttttgaaccaggtgagatagacaaatctgaacagatagaaatcagaatgttacctagaatgctgttaggcaatctggtttagttccagggcagtaatgaaatccctaatattcctggaaacctaggaagacacaggtttccctcgcaatcagataggagtgtaagcacaccccttctgcagaccagctgagagcactgagtcatgcagatccaccagaaaggaaaaaaagggcagggactgcacatgcctgattcctgctgctaacaacacccaccagacaactttctcctcttttttcatggtcgaagaaacctacgtggaaacaggaagcaaggacgaagagtagcccagatcccaaattctcatgttgtctctgaaggaaagaattc

SEQ ID NO: 196585 - DNA, 1000 bp, Homo Sapiens
ttttctctggcattttttcccctccctgtaaattttagaatcacagtttttgtttcaagattttttattacttacaaaattgtatatttttgtttaatgaagcatttgatggatctaaatttggatataatttttttaaaaaaacatctcatctaccctgatattttgtttatttttaatttattaatttcatcttttattagttctaattttttcttcctactttgtctcagtttgttttttctattctaatttattaacatagtacttagtacctcattttcaatcttttccttaaataataaagacatattaggctctaagttttcttctaagacaaacttgcatcccgcaagttataaagtgcttcttttcctttgtattaaaaagtttataatttaggtttgatttctagcttgttctataggttattaaggagtcagtttcttattataacaagttcaatttttattataatttattttcttattttagtagttagtttggagaatgtggcctataaaatgccaatatttaagattttattaatgctttctttgtggcgaattttatgaaatgaacatataaaaaattatattttactgctcaacaggcctgtgatatacactcactgtgattgtattaaatctctttatgaacttgcttttttttcttttgtctattacaactttcaattctgaaagagtaattgaaatctttcaatgtaaattcactctaatttttcagttattttaattatttgttcttaatagatttagttgctatgctatttggtacacatccatgtatgtacattatatcttgtttgtaacttatgctttttgcctattcataagtgttgcactatagccctctcctctggaaattctgcctaagccttcagccacaaatgttctctcaaacacttgtcagcttgccagtgctgggttttatctcattctagcatctagttaagattgaatttacaaggagagaattc

SEQ ID NO: 196586 - DNA, 1000 bp, Homo Sapiens
ttgcattccttgtatactctggttattaatcccttgttggatggatggatagtttgtaaatattttctcccattttgtatgttgtttctttagtttgctaattgtttcctttgctatggagaagctttttaacttgatgtaatcccatttgtctatttttgcttttgttgcctgtgctttttgaggtcttgcccaagaaatctttgcccagaccaatgtcctgcagcatttccccaatattttcttctagtagtttcatagtttcacgtcttacattgaagtctttaattcattttgatttgatttttgtatatggtgagagatggaggtctagtctcattttcctgcatatggatatccagttttcccaacaccatttattgaagagactgttatttccccagtatctgttcttggcacctttgtggaaaatcagttggctatgcatacatagatttatttatgggttccctattctgtttttttagtcaatgagtctgtttttatggcagtaccatgctgttttggctactatagccttatagtatattttgaagtcagatagtgtgatgcttccagctttgtttttttttcctcaggattgctttggctattcagggtcttatgtgtttccatatgaattttaagattgtttaaggctaggacttcctgatattaaagaattattgttaattttttgaaatagtggatttgcaaaatatttgcatgaaataatttcttattagaaaaataaccaatatgcaataaccccaaaatgcttattggtatagataacaatgagaattaccacatttactgggacccgtgtcaagtacttccaggccctactaaatggtactgaaaccaataattaatagttggcagttgaaatatatgatgatatttatgcatcagtgtttataatagcaaacagttggaaataatacaaatgtctattaacagaaacaagaaaatgctgtatattcataccatggaattc

SEQ ID NO: 196587 - DNA, 1000 bp, Homo Sapiens
ggctagccagttatctaagcactacttattgaataggaagtcctttcccaattgcttatttttgtcagctttgtcgaagatcagatggttgtagatgttcagccttatatatgggttttctattctgttccattagtctatgtgtctgtttttataccagtaccatgctgttttggttactgtagtcctatggtatagtttgaagttcggaaatgtgatgccttcagctttgttctttttgcttaggattgttttggctatttggcctcctttttggtttcacatgaattttaaaatagttttttctagtctgtgaagaatgtcattggtagtttgataggaatagcattgaatctgtaaattgctttgtggcagtataggcattttaatactatcgattcttcctatctccataagcatagaatgtttttccatttgtttgtatcatctctgatttctttgagcagtgttttgtaattctccttgtagagatccttcacctccctggttagctgtattcctaggtattgtattcttctggggtcaattgtgaatggtattgcgttcctggtttggttctcagcttggctattgttggcatatagaaatactagtgatttttgtacagtgattttgtatactgacactttgtgtattctgacactttgcctaagttgtttatcagctaaagaagcttttaggccaagactatacagttttctagatatagaatcatgccatatgcaaacaggaatagtttgatttcctgtcttcctatttggatgccctgtatttctttctcttgactgattgcttaggccaggacttccattactatgttgaataggagtggtgacagagggcagccttgtcttgctctggtttccaagggaattgcttccaccttttccccattcagcatgacaagcatcactcttttcaaaagaagaggatgtacaagagcttctctaatcttctttccctcatagcttgggaattc

SEQ ID NO: 196588 - DNA, 1000 bp, Homo Sapiens
tctatgtgaaggtctttggtttaagttagggcattaactactctaggtaggctgatgcccatccttgaccatttctcctgttaaaccacattgtcagagggagacagggagaaggtagttagttttcttgtgaaaagagggtgctcaaagaaaagaggaagacaggtgcttgtcagaatagatggcaggctggggtcatggtggctcacgcctataatcccagcactttgagaggctgaggtggaggatcgcttgagcctaggagtttgagattagcctggacaacatggcaaaaccccatctctacacaaaaaaatttaaaaattagccgagcatggcagtgtgtacctgtagtctcagctacttgggaggctgagatgggaggatcatctgagcccaggaggtcgaggctgcagtgagccatgattgcaccactgcactccagcctgggtgacaaagtcaccctgtctcaaacaaagaaaaaaacagatgccagtaagaattccatgtacttccccttctacatacctgcattcttcttcacctgtgtcccttccaggatttagcgagataacggaagtgacggtacaggccgtcgttcttcccatgacaatcctctttattcctgttatcctctgcaattgctaatagtgccccctttcacactgaaaggcatcccaatttggatgacaaattctccggtcctagagataacagccctgtatttcagcccttcctagctgaatatttggggaaaattcttcatcttatcaggttcaacagatcttgaggattttttcagcgatcttgaagactggctgaaaaagctctctgagctctcaaatgttccacagatactgttgttattgtgattcatcggtgaggtctccagccctgagcagggagctcctctctgcctctctgccagccctggggaaacgtggatgggcagctgagagcaggttgcatgttctcagcaggttgcaggttggcagaattc

SEQ ID NO: 196589 - DNA, 1000 bp, Homo Sapiens
tgacaactgtatattagtagccagaggatgaaaatagcattgcaagaagaaccgcttaaattagagaaaagagcctttggtgacaccagggattttaattactggggtggggaataaatgtcctgatacatgaattcggcacttctcaaactttaatgtgctcacaaatcacctagggatcttgttaaaatgtagattctaattcagtgagtccagggtgggcctgagattctgaatttctagcaagctctcaagtgatgctgctactgctgtccagggaccaaacatacttagtcaatcctcttctcttttagaatggtacaatcttatttaattacagagtacaagtttcaaaaatgagacattgaaactaaataaaatattctgcaacccctaagaaggaagtcagggcacaaaccagccaagcagggcaggatgatgagttgtttttccctatttggcatccatacagggcctgcacgctgtgatgaacttcccaaacacattgcttctctcatatttatctttccactcatgccagatgacagcatagaaaaaaaaaaaagcacagctacctccaagtgttgattgtaggctctcagaaagtttctatttgcttccaaaataattaccttttgattaatgcctggaattctacagctggtgcttcattcttttagcttaaaacttccatctcttctgcagtggagatctcatcagttatttgtagttcagtatggatggcttttaaatcttttcctgatagattttaatggagggcaaaaagacaccataaggatactatactggggagtagacaagagtgaagaatgtgaggacagcccaaccatttaacacataagagtgaggtctaaagaagaaaggtcaggccaggcacagtaatgcacggctgtgatcccagcactttgggcagccgagatggtttgagaccaacatgggaaacacagtgaaaaataattacgaggaccacggtgaattc

SEQ ID NO: 196590 - DNA, 1000 bp, Homo Sapiens
cacacattgctagacccccagagtttctgattcagcaggtctgagatgaggcctgagaatttgcattcctaacgagttcccgggttatgttaatgctgcaagtctaaggatcacccttggagaaccactgctctagagaacggcaggacacgcaagggaggaaataagtttcctttggcttttgtgttgtgacagagctcttgaaacagcagcagggctcatccacggtgttgcatgagaacacagcaagtgatggaggaggcactgcaaatggtaagtgaactacctagattgttttcatcaggttcttttaacgctgtccttggcaacacagtggtacatatagggaagtgtgaccttgaggtcaggcacaactccacctcaagtctgactttatagttatttgtatggcaagctgttttactgtttctgagcctcagtcgtcttaatctgtaaaatggggacaataatttctgtctcatgaagtacatattagctccatgtacagagccatgtacaagtactaacattttcaaatacttagcaaatgttagtcctcttccctttataggactgctggcaggatggaatgagatagcatatgtaaaatgcttggcatacattaaagggtacatcccttccccacccaaattcctttcctggagctccaagttagaaacatctaacaagtgagaacaagatggtccccaaagtaaatttgtgcaatttgttttcatggttgcttgcctcctcttttatgtgccctttctttcttcagcttcctctgtcttccttgagccttggcacaagcaaggtttcctgtagcttcacctggcactgaaaagcttccaagaccccagaagcagctgctgcaaatgcaggtggcctgcagactgccacctggccccctgctctcctgggaagaggggagctaatgcattgcacacttcagggaccactgattggccttaatttttgcactctattttaaggcaagctt

SEQ ID NO: 196591 - DNA, 1000 bp, Homo Sapiens
gtgtctcctcttgctagactgccgggtacagatcacgtggcaattaaggcaaatgttaataaataccatgaaacagtggtttgcatagtcttctgaatagccatggctttggttagtcagcaacaaagcctttcacccttaccctggataatcaagagttgacaacagccagaaagtactgggaatagtggcttttggccatgacatctgctcattcttcattcatgtaatgggtcaaatcagaagtaattctggagatacggtatggtaagagaagggcctaaagagtctcaagagattagaaagcatatgccattgtaaggaaggatggggagagacagtgccaagattaaatggactcagccatttgacttaatgggatgcactgcccatggtggcaccctcccctgggagttcttccttgatcttgagactttcccaaactggaatccacttagctctgccacatcggtcccagatttggtgggactctcctctggtatcagttttcaacgccacttcttgtttggagtcattcccagtgcagtcatggactctatgaacaaatacggttatttaaatgtatttgtccagtatgagaatcagaatgaactagtagaggctttacagatcagctggtctgacccattttacagatgaggaaacaggcctgagaagatggagggagttacccacaatctgaaggggctctaccatgactagacccaggtcacctgcctcccaggcctggctctttccactccgaggtgctggctcaccacagacttattctttaatggaattttggaaaggcctcactccagtgactctttggatctttcttctctaagtagatgggaagcctgtaagaagagacttggaggcaaagcaaagggaatcagcacttaaccctcacccaaagggcccaagagaatctttagtaactggaggcagagcagactggagcctctacggggcatctccccatattggagaattc

SEQ ID NO: 196592 - DNA, 1000 bp, Homo Sapiens
ggggcggccccagatctatgggtttgtttccgagagtgaggatgggttgtggccctgcagggttgccgctgaagctggtttctcatgttgtgttggaaaaggccattctgggagctgggtcacgagctcctggagaagcagagttccccagccctttaaatggaggagctcccataacaaccaaacaagcaggattccaagcgggaagataacaatgatcttggagcttctccctactcagattagatgcatgaaggtaataaaaaccacccaaaagaaactgcaaaaagaggccttgggaagcacattcaagagggtgaaaaggaagaacagaaggaacccgtggaaagaaaatcttccagaccaaatgatggtccaaaaataatgagaccaaagttcaaaaaagtaatttaaaccaaataaggcagggaaagcctagccagcaaggggcgggctcactctgcagggagcaggcgagcagaggggatggagctgagcagagttcagttcaggacagcccatgggtcagagggaactgaggaatgtgcccgctgcccaggtcagcaaggggggcagcatcagatggcatgctgtcttacctcccctgccccaaggggcctggagcattgccaccaccctcactggtgatagggctgcttgaagttgcagagcacaacccatctgggtgggtttgccgccactgcaacagagagcctgtgggaccaggcaaatgaaggaagccttacttgctcatagccaagcttcttttcaggttctattttatattttattgcaacaaagaattccagggccatactctgagccagggatgatgggtgctaagctcattaactgcctgctcagtttgtggacttgttcctgctgaatctgtagtccaggtactgccagtttcttagtgtcagagccctcatagggttcatttgtgcatcctgcatgtggatatgtgtgtgcatttacccagatttttaaaaagctttct

SEQ ID NO: 196593 - DNA, 1000 bp, Homo Sapiens
agaggactttgtgaagtggagactgtacatgattccaccagcaagcatgtgtcttgacaaaggttgttaaggacaagaagttgtgccttagctgtaaccaaaacccagcctaagcaatcaggtgagttgaagtagatgttgtcaaagctaaaaagaagccaagcgtggtggctcacacctgtaatcccagcactttgggaggctgaggcagtgggattcttgaagccaggagtttgagaccagcctgggcaacatagcaagatcccatctgttaaaaaaaaaaattagctgggtgtggtgatgtgtgcctatagtcccagctactcaagaggttgaggtgggaggatcgcatgagcccaggaggccacagtgagccatgttcgtgccactgcactccagcctgggcaacagagcaagacagcatctctttttttgttgtaagacaaacaatcccatagcatttattgccatcttgtaataacataagggtaatcaaaacaatatgaataaatgttcatattggacaaaggacagctaaaaacaaactgtatccttctcaacaatttctcacttcattgatcatttctagctggagacactttgtagcagaggaatacctccttttagcatgatccgacccagttgttttcttgactttgttttagaatgaatctcttccgcatcatctaataacaaggttcgtatactcattaaaaccaatgatacagccttctgtccgcatattcacttgctcatagagccacacctgaatctgcgatctattttgtaagtatctgaagatgaggttgatgggcgcatcttcaccttctgcactttctggccctggccatggtatgccatggtggaatttcacaaagagcacacccgcacgctgcctctgagagcaacttccagaatcaagacaccgtctcttaaaagaaaaaaaaaaaaactaaaaagaataagatgtaggcttagggcttcctcccctgaggaattc

SEQ ID NO: 196594 - DNA, 1000 bp, Homo Sapiens
tttcagtttattctcaagccacttcatccaagaaaccattgtctaattaatcttctggatttgcactctaataaaatcactaccatagttaaaagtcttcaatagcctctcaatgcatgtcaatcagatacaaatatttttaactagcagtcaagatccttcaatttgtctcaagttacctctccaagcttttcttcccttctcgttatcaacgtatcctgtattccatcaaatatgagtatcttagtgtaccctcaagtaacatgtctcatttccatctattatttctcaccttgggagtacctacttccctttcccataatctttgcctgttgaaattgtatccatctttcaggttttagctcaaatgctagttccttcaaaaaaattctttcacattctcttaacacttaagcgtgtgatctctccttaatttaaaacagtgcctagcacaaagtaagcaagcaataaatgttagctattattttcttgcatactttaatcacatatctctcatatcatctatcatttttctcacaatattagctggggatgtgctctatgcactactgggttattcattcatgaaagcaaagtttatgtattattttcctttgcattattaacagtacaaataatggtaccttgtatctagagctgttcaataaggagagagggagaaaggaaaggacaaaatatggagggaaggaaaaaaaggtagagaaaaagaaagagaaaaacagagagaaggaaccaggcagggatctttgaagactcagtagcataaaactaaccttagagaattcctattctacaatacactattaaccatattgataaccataaatgggttaaaataaagctgttatttacaaactggcaatagagtgaacaataataaagagctaaatcacagatactactggatatatcaataacataagcattttttaatgttattattttaaactcagaaaaatagctacctgtttactaccat

SEQ ID NO: 196595 - DNA, 1000 bp, Homo Sapiens
aagctcagaataatcttctcaccgggcgcagtggctcacgcctgtaatcccagtactttgggggaccgaggcaggtggatcacttgaggccaggagttcgagacgagcctgggcaacatggtgaaaccctgtctctaccaaaaaaaaaaaaaaaatatatatatatatatatatatatacacacaaaaaaaaaaaattagctgggcttggtggcgctcacttgtagtcccagctactcaggaggctaaggctggaggattgcttaaacacaggagatggaggctgcagtgagccgcgatcatgccactgcactggatcctgggcgactgggcgagatcctgtctcaaatcatcatcattatcatcatcatcatcatcatcatcttctccatgtaactatgtctgtcgctccacctggcagaaatgtcgtctctgggccgggcgcagtggctcatgcctgtaattccagcactttgggaggccgaggagggcagatcacgaggtcaagagatcgagaccatcctggccaacatggtgaaacctggtctgtactaaaaatacaaaaattagctgggcgtggtggtgcacgactgtagtcccagctactcgggaggctgaggcaggagaatcgcttgaacctgggaagcggaggttgcagtgagccaagatagcaccactgcactctagcctgcctacagagcaagactccatctgagacaaaaaaaaaaaaaaaggtcttctctggtttctgctccctgaacatctagatttttgcctctcttggggcttagctccctctgccttatgcacagctcctcacatctcttttagactgtgagcactttgaaaacaaggatttgtggttttttttttttttttgcattctcctcagcacagagcatattgcataagtaaattagtgataatttaaatccaggtgaattttacatcccaacttagggtctggagaggtcaatctcagggtaaaataaagagaattc

SEQ ID NO: 196596 - DNA, 1000 bp, Homo Sapiens
aaatgagagctatcacaactgataccacaggaatacaaaagattattcaaggctactatgagcacctttatttccataaactggaaaacctagaggagatggataaattcctggaaatatacaaccctcttagattaaaccagcaagataaagaatctctgaacagaccaagaccaagaccaataacaagcagtgagcatgaaatggtaatttaaaaattgccaacaaaaaaagtccaggaccagacagattcacagctgaattctatcagacatacaaacaagaattggtaacaatcctattgacactgttccaaaagatagagaaagagagaatcctccctaaatcattctatgaagccagtatcaccctaatacccaaaccacgcaaggacataacaaaaaaagaaaactacaaaccaatatccctgatgaacatagaggcaaaaatcctcaacaaaataatagttaaccaaatccaacagcatatcaaaaagataatccaccatgataaactgagtttcataccagggatgcaggggtggtttaatatatgtaagccagtaaatgtgattctccacataaacataattaaaaacaaaaatcatatgatcatctcaatagacacagaaaaagcatttggcaaaatgcagcatccctttatgattaaaaccttcagcaaaattggcacagaagggacataccttaaggtaatagaagccatctatgatagacccacagccaacattatactgaatggggaaaacttgaaagcactccccctgagaactagaccaagacaaggatgcccactttcaccacttttattcaacttagtactggcagtcctagccagagcaatcagacaagagaaagaaataaagggcatccaagtcagtaaagaggaagttaaactgtctctgtttgctgatgatatgattgtatacctagaaaaccctaaagcctcatccaaaaagcttccagaactagtaaatgaattc

SEQ ID NO: 196597 - DNA, 1000 bp, Homo Sapiens
tcttgaacccccgacctcaggtgatctgcctgcctaggcctcccaatgtttcttcattttttaaccttttctatgagactttcaccctctccactccattggcacagctcttctcaaggtcaccaatgactttgactttcctaaatgcaatagtggattccccagtcctcatcttacttgctccatcagcagcactgggcatggtcaattgctccctttttgattcatctttgcttggcttccaggacacacaacacactctccttattttcctcctgtctcactggctggccctcctgtcttttttgcttgttttcctcttcttcgtaatcataaacactagactgtttcagggttcatgccttggacttctcttttccatctaccatcattttctcaaaaatctcatcatcttttggctttattttattttactttatttttgagacagagtcttgctgtcgcccaggctggagtgcagtgatgcgttcttggctcactgcaacctccgccttcctggttcaagtgattctaatgcctcagcctcccaagtagctgggaccacaggtgtgcgccaccatgcctggctaatttttgtatttgtagtagagacggggttttgccaggttggccaggttagtctcgaactcctggcatcaaatgatccactcgcctcagcctcccaaagtgttggaattacaggtgtgagccacggcacccagccatcatcttttggctttaaatgccatttattaattccggactcccaaaatttatctccaggccctgacctctccactgaattccaaactgactagttacttggcctttccactaggacatctcacagggatgtcaactcccgtaactgaatacctgatcttccccaaacctggacccgttaagtcatctctttcagttcatggcaattccctttttttggttgctcaagtcaaattccctggattactgcagtagtctcctaactggtctcaccctt

SEQ ID NO: 196598 - DNA, 1000 bp, Homo Sapiens
cccttccatcaatgtcatgtcacactgcgactccaccttggatgaataaacaaactcatggaagtacagcacagtttggccaggtgcacatacttcctccaagttcctattcttgccctgtgacacgctccatgtgtgttggccaagctgtggcctcacagactcatccctaaatcacctcccatcacctattccactctattctgacctactgtcaaagttctggctgctgatttttatattccttctatttattttcccactgttgctgttggatttggatttggcttactcagaaagccctaagtgacgccttttctatttcagcccatctccctctataccagccctgaacagaagggctgttctcctacccagccctccctggccttgcagacaggacttaggaccacagagccgtccaggggacattcaccacatcagaagaaggtcaaattggcatcaaccaagctagattcagcattagatgtggaggttccaacaatctccagaacctttggccaggctctacctcagggatctgagagcagcataatctacagagagacagggacacattcagcaggactgctgattccccagggaggctttgagaaagtagtgcttcaggaagcagcatctgggagctgatggtgctcctatttggcagcacagagctgtcctgtccttcccactgttccagacgcagtgatgatggagcgaagagcactacactgtggctgcagcagctcaagctcacagccaagtcacacaagctcaacatgttccctgcccattacatactatttgggggtagacattggagccaggcaggcctgaatttgaataccagtgtgactctttggccccagtcctctttgagtctcaattttctcagctatgaaatgacagtggttatacctccctcacagattaaaccacataaaaatgcatagcatgcacattgcttgatacagcagacactaaccaatgtgaattc

SEQ ID NO: 196599 - DNA, 1000 bp, Homo Sapiens
gaatatgtatgcaacataaagtagtggagaccagtacaagttctgaaattctaaaaatttttaaggaagtgtggactgcttcagagagctttacctcatttcttactttttcctcttctgatattgttaaaaatccatcactaatcatgtgatccatgatgtaggatgtcttgatgtccttttccagagcttctctatgttgaagcaaacaatttcgagcttttgcatccatcttccctcagatctttctctctctgagctgtcaaccatgagctacagccaaaacaccaaaatatttgtcaggccaataaaaatatgaaaagatacataatctcactaataaacaagaaacgtaaaaagaacaaaactgattttttttccttggcaaaaatttttaaatggacaaaacccagtgcttggaaaggtatgagaaaatggccattcttatgcactaattggggaaactagaaaatgaatgcaatttttctggaaagcagtaagatatggaattgtttaaaataagctttctctctaacccagaaatcccatttctaaggatttacttcaaggagacattcaaatacatatgtaaaaatatccacaaggagaattaatgagtttccaatcaggtgtggtagctcaagcctataatcccagcacattgggaggctagagtaaaaaataaaaagaaaaaagaattaatggaggatgtttcagtgatgaacgcaacctaaatgtccatcattctgaatatagattttaaaaattagggtatgtatataaaatggaatattatgcagccattcaaaattatgacacatatctccatgtattgacatggaaagatgttcataatactgttgctgaaaaaaaaaaaaaaaaaaaacagaaacatgatcccacatacaacacataacgtgggggccgggcgcagtggctcatgcctgtaatcccagcactttgggaggccgaggcgggtggatcacgaggtcaggaattc

SEQ ID NO: 196600 - DNA, 1000 bp, Homo Sapiens
ggcgtgaaaccgtgcccagcctccatttctcttctttcaaacctgatctctgagagcctatatagatttgtggtggactgggttccctgctagaaaaagtctgacactatattcaatttttggtctttcaaaagtcttcttcttctttttttttttttagatggagtttcgctctttgttgcccaggctcgaatgcagtgacgcaatctcggctcactgcaacttctgcctcctgggttcaagcgattctcctgcctcagcctcctgagtagctggaattacaggcatgtgccaccatgcccagctaatttttgtattttagtagagacagggtttcaccatgttggccaggctggtcttgaactcctgacctcaggtgatccgcctgccttggcctccccaagtgctaggattacaggcatgagccactgtgcccggcagagccaccgcgcccagcctcaatttctttctatttccttttttgagacggggtctggctctgttgcccaggctggagtgcagtggcacaatctcggctcactgcatccccccacttccacattggagtgattctcctacaggcatgcaccaccacacccagctaacttgtattttcagtagagaaggggtttctccgtgttggtcaggctggtctcaaactcctggcctcaggtgatctgcccgcctcagcctcccaaagtgctggggttacaggcatgagccaccgtgtctggcctaaaacgttaaactcttttaaaagagttttaatgacacggtctgtaggaaaactatattttatatctccggtgaaatggctaagaaaaacatattcttatattcctcatgtatgaaaagaagacaataggttcttgctttttgctgtttttttttttttttttaaattacaggtggggcacagtggcacacacctgtaatctcagcactttgggaggcccaggtgggcagatcacaaggtcaggagattgagaccatcctggct

SEQ ID NO: 196601 - DNA, 1000 bp, Homo Sapiens
taggctggggatagtggtaagcacctgtattcccagcaaatccagaggctaaagtgggtggaacacttgagtccaggagtttgaggtcaacctgtgcaacataatgaaaccccttctgtaataaaataaaataaaatgattttgttgaatctatgtaaaatactacccaatgggtaccattattctcccatttattttctgaagcatatgcggctcagagaagttatgaaacatcaatacaagtgagtggccttggctttaccccaattctaactccaatttctgtacgtttatctaccattcaaaactaaaatggccactagacactctaatcacttgtagtttgtctgttcaacaacataattacgtcctcaatcagctttgaattggaagggaaagcaccagccttataagccaaatctgttacttatctatcaggttccatgggaggtaaagtaataaggagaaatgaaatatcattgtaattgtcactgagtgtttagttcattaggcactctttcttccttctcttctggagcaaactctttcccttccactcagggttggctttcttctgcttcaactctggagggaatgccaatcgcgaaactctggggattgggcatgtagtgcaggcctggccactgtgacatgtccaggagagagcaggggacctaagccagaacaagcaaaggcattccctggtattctttacccttctgggaagaagggtggtgagagctccttccttcagatctccaagttgaaatgatataggcatgaagcttcactcaacccctgggcctcttgccagaaccctccacatgcactcctcagtacttggggaacagaagggaatgagatgaatgcacatggctacaagaaacgagaactaacagaaaataaaaagcctcgagactttcacttgatctagctaagagctctaaagcagtgttatttcttcagaacttccttcagtgtttgagctacccaggaattc

SEQ ID NO: 196602 - DNA, 1000 bp, Homo Sapiens
gtaatcccacctacttgggaggctgaggcaggagaatttcttgaacctgggatatggagattgcagtgagctgagatcacaccactgcactccaacctggacaacagagtgagactctgtctcaaaaaaaaaaaaaaaaaaaagaaagaaaagaaatcgtagaagcctacatctaatggcctttatttgctctgtgaagtaggaggcaaattcagtgcaaagattaagaaaagtagtaaactgtaaccgaggtcactctagctcagtatctcctttttcactaggctcatcagcccctcaaaaagccccacaggtgtttcaggggttactagaatgtctttacatgcttagagatacatgcatacccccttccgcctctggtgtcagggcgtccatgaggcccactgggcacccaccatgggtttctcccagtggcctgcatgggtggctgctgcatgaccaggtacagaggtcactcctctgatgctattcagctcctctgggccacagtccttcccactgctccttctggcctgcagccacctggcccctctgagtttctgtgttggcatggtccaatgctgtgttacccaggccttgatgggctgcaatatgaagagaaactgctccttcagtttttactcatagcatctttctctcttatatacagacaagcacccagagactggcttagggataatagccacctgctattcttggaatccctgagaatgctccaatgattaagcctctgttattagctcaacatcgctgtgccttacaataattcttcttgaagggatctgcagattccctcattcccctcactatgcagtctaaaccccagctatggacacaattcaagccaccatatcagcagatttcagaggaccctttcttaatagctctatcaacatttccagacagatgggatcatgacagcagcaaactaagacttaagttaaactctatgctaggaaagttttagaataactgctta

SEQ ID NO: 196603 - DNA, 1000 bp, Homo Sapiens
ctttgagaaatctacatactgtttttttatagggattgaactaatttacattcccaccaacagtgtataagcattcccttttgtctgcatcctcacgaacatctattatttttttactttttaataatagccattctgactggtgtgagatagtatctcattgtggttttagtgtgcatttctctgaagattagtgataagcattttctcatgttggccacttgtatatcttcttttaagaagtgtctgtttatgtcctttgcccactttttagtgagtttttttcttattgatttaagttctttatagattctagatagtagtcctttgtcagatgcatagtttgaaaatatcttctcccattatgtaggttgtttgtttaatctgttgattttttttttttttgctatgcagaatatcttaagtaagtctcaattgtcaatttttgtttttgatgcatttgcttctaagggcttagtcataaattttttgccaaaattcttgcccaaattctgggcatttccaatgtccagaagaggtttacttctagaattttttttaacagtctgaggccttaatttaagtctttaatccatcttgttaatttttgtttatggtgagaggtagaggtacagtttcattcttctgcatatggctagccagctttcccagcacaatttattgagtggggtgtcctttccccattgtttctttttgtcaactttgttgaagatcagttgattgtagatgtgcagctttatttctgtgttctctattctgttacattgatctctgtgtctatttttgtactagtaccatgctgatttggttactacagccttgtagtatcgtttaaagtcaggcaatgtaatacctctggttttgttctttttgcttaggattgctttggctatttgggctttttcgtggctccatgtgaattttagaatacttttttgtaactctgtgaaagatgacattggtaatttgataggaattc

SEQ ID NO: 196604 - DNA, 1000 bp, Homo Sapiens
gagtaggtttaatgaggtgaggaatcctcttggactgacttgtagacctatgcccaactttaacattaaatcccccccaataaattagtttctgcttcagggattaacaagaactgaatgtgagctgagcgaccctgctatctaactttggtgctttctaaaatttttactctacatccttcccttttaccccagagactaaaagctcctctgaagaagagacaacattagacagggggaaacaaacagaggagcgagcagcccctgaattgagtaaaaaggtgataatctcatgtttaggtcccacctctaaatgtatcaagggctcctggtgggactcaagataaaagagatagagcccctgacacccctattcttcctcgaaagtcatgagtggaagggcttctttctcctttcttagttcgggacattccctcttgaagtggtctgttcttccacatctatagcacctatcttgcccttactccctcttagttcagggattctttaaccctgctcccccatactctttagcgggacctggtagacgagggccttgcccctccagatggaggctggggtcctttaaagaagggttcggcccctttacagtttctggttccctggaaactctatctagaagtacctgggtttggagccatctgttggaaggtgggtaacataagttttgccttttgtttctgtttttctttgtcccttctcacgtatactttctgagcttctctgagaagctcacttagggcatggtcttcccaactgtctatcttttataacttttttgaaatgtctggccaacttttagtgacaaattggagtttcaacattccttgcccaagggtatcgtccaaattgaggcctgcatgttgcctcatttgctccctcagtctatctggaaatctcataggcccttcatccttttcctgttgtatatcaaatgctttagaaagattttgggttcggggtgctgattcctgaattc

SEQ ID NO: 196605 - DNA, 1000 bp, Homo Sapiens
gaggcagcaggaactgacacaggttttagctggctttgtgagctgcggatgtgcttgtgggttccagcttgttcttgctgtccctcactttccacctgcctttccctcttgattgcctctccagcatcagactggaagagaagagcctcacagaaactgttaatcagctcccataattgtaggaggtccaattcctgtaacaaatcacatcttagtggttctgtttctttgatagaatcctaatacagtaaattataaaaacaaatttaatatgctattttaaaaatttataataatacagtgcaatttgtagctcacattgtaagctattttactgtggaaactacttgtttgataaaggcctggtactcctataattaaatgtgggagcacacagaaaccctggtattctgtcttgaagagtaattatatttgaatttagcataataattcgaaataattttatttctttggacattctaatcaaaccttttcaatttaataaaagagaaaggtaaatatggctaaaaactaattgctacaatagcatgtaatttttttattaaaataaaatatcaaacattttaagatgaagtaaatgattttactttaattaaaatctttcataataagatctgttttaacaaaactcttaactattaaatctgagaatacattatgcataagttaatttcagcgtgtcttaaaaatctgattgatcgggaaaatattcttatgtttaaaagaattagcatcactaacttctaccttggttgctcaagtttgcttttctttccagctaatgacaaattctagggatgagtattgagaatggcaggaaatatttgctggtgtttaaatatagggaaaaaattatttttagctttcagaatttctgattgatgttctctgctttgctattgcaaaattctcccctgaataattcaccctttgaaaataaacaggttgattttaaaaatggacaagacatacaaacgaa

SEQ ID NO: 196606 - DNA, 1000 bp, Homo Sapiens
acaactctgtttagcacattataagtagccaaataccttagttattattatgattacttgcttgggtctctcaaatgtcaaaattgagaaaaacatctttgataataccttatgcatcctttacaatcctaacacatattttataccataatatatatccctttacaatctagaaatgcttgctattccactcaaaattccagttgtagagtgggtgataaagtagtaagtgctccacatacatttgtaaaagagtgaatcaatttcccttctcaggtattttttagcataatttggtgattacttgggttaaaacattttaaactaccttatattctctgaaactaatttcccaagatttccttctcgctttctgatactcaaatagtgtcctgctctaaatgaatcttctgttaagtcttcatgaccttggagcaaaatcacttaagcttttcagtttctgcatccataaacctgggggagtgaggtgggtagaaggaaatagtgaaaataataaacaatgttcctttccagattaaaaattctgagtatccttttttttttaattccgagtatctaaaacaaggaatcatatttagaatacagtagtaaataaaaccagatgtatattcttctcaaaaagtaatgttttctacattgtaaaacagatttttgtataaaaattagaaaatacagaaaaagatacacttcacctatctttccaaatcattttcttcttctaacacactaacatagacatacatagagctttatacaggctgagtaactctaacccaaaaacctgaaatcctccaaaatctggaactttttgagtgctgacatgatgccacagactgtccacaggggtggctgaggtagtgacatttttactttctgatgggtcaatgtacataaactgttgcatatacaaaattactaagaatattgtaaattacctttagggcatgcatctaaggtgaatatgaaacataagtgaatt

SEQ ID NO: 196607 - DNA, 1000 bp, Homo Sapiens
gcacccactgtccaagcagtcccaatgagacgaaccaggtacctcagttggaaatgcagaaatcacccatcttctgtgccaatcttgctgggagctgcagactggagctgttcctattctgccatcttggaacctgaccagtatcccctttttaaaaaaaaaaacaggtttattgagagataattcatgtattatacaattcacacatttaaagtctaaagcctctctttttaaactttatttttcaagacaaatggcctgacagtatctaaaattggggactgttcttatgaatcaagatatctggccaccctatgcacttaaataagaaagtccaaccttaagattccatggatatatgttcttctattagggcacgcaggaagacacagatgccttctttattcctcctgttatggctccacagaactccagaaacctagaaggatattgaatatgtagcaaacaggatcaaacaagtaacttcagtggcctgcagacctatttacttttagataagttctctaatcacaccgctatcattgtatccctaagaacatataaaccaagccccagtaatgactataaaagacatgttaccaaattatcagtacacacccaaatactgctgctccaaataatcaggtcaccaaggaaagaaaattatattttaactaaagatattctaaaaaatcaaaagatgctttcacatgacctttaaaaacaatcataagcataaatcaaagcagatgtttatcttaagggaaatgtgatatacattcttttatttctcccctttgggataatttttaattgttaaaaattatacaactagtacgtgtacactacaagaaattagaaaatacataaagccaaaagtacaagaattataagatctcttgatgctattattcagagatcctgtgtataagttctggtgtatatccttccaaatatttcttttggtgtatacttacataaactgtagctggtatattgc

SEQ ID NO: 196608 - DNA, 1000 bp, Homo Sapiens
ccatacaaggcatccaagtagggaagtgggacaaagtaatggtggtgatgagaaaggtgggctgggggcgcattggtgatttgttctacttttgaaagtgttcatgcttataaagatttcttcctttcaactgcaggaaggctaagaacatctctgccctctagggcattttgccagacctgctgtcagggaactgttgatagtaaacagaacaatgatttggaagaagctgagaagttaatgccttaggtgagagatctcttcccactcctgaagagggagggacagggagggacagggtaggcccaggtagagagccagcttcagcctgttttccaggagaaaagcatcctcctcctagaactacttcacaccctgaggtcaaaggttaacaggaaaggttgacaataaatgttaccaggcaaataggcacttacatctcacccacccctctgtctgctccaggagtcccagcgtcatcctcctcctggttaccttttgtcttaagaataaagggactgcccgctcgcattcttcctttcctccaatctcaccaggttccatccttctccgacaagagtaaattgttggagacggaaaacaggatgttgggttcagtggggaatatgtcagccttctctacaataggattgttgttcctcccccaagaggaagatgaggctttaagaagtgtctgcagcaatgggacccagctctcacactgcagcaccaaggaaagccaggcaggtggtgtcaatgagggacgcaggctgggagtaacacaacaggggatggcaggacctgcagggatcagagcttctgtgccaggtctacaaagggagcagctgttggctccgggccactgtggcccagcgggactgtgaagacaatgtggccagatccttccatttttaaaaaacaaccagaaacctggaatgttttgtggaattttctaattttatgtgttggctgcaacttaaaaaataattgtttaaagctt

SEQ ID NO: 196609 - DNA, 1000 bp, Homo Sapiens
ccagctgcatccatgttgcagcaaaggatatgattttgttcttttatatagttgcatatttcatggtgtatatgtacattttctttatccaatccaccattgatgggcacctaggttgattccatgtttttgctattatgaatagtgctgtgatgaacatatgagtacatgtgtcttcttggtatagtgatctattttcctttggatatatacacagtaatggaattgttgggttcaatagtagttttaagttcttagcgaaatcaccaaactgccctccaccattgctgaactatttacattcacaccaacagtatataagtgttgccttttctcagcaaccttgtcagcatcttctgctgttttttgatttttttcttttttgacagagtctcactctctcacccaggttggagtgcagtggtgggatctcacctcactgtaacctctgtctccagagtgcaagcaattctcatgtctcagcctcccaagtagctaggattacaggtgtgtgttactacaccctgctaatttttgtatttttagtagagatggggttttgccatgttgaccaggctggtcttgaactcctggcctcgagtgatccctctgcctttggctcccaaagtcttgggattacaggcaagagccaccatgcctgggcctgttttttcactttttagtaatagccattctgactggtgtaagagggtgtctcatggtggttttgatttgcatttctctgatgattagtgatgttgattgagcattttttcatatgatccttggccacttgtacattttcttttgtaaagtgtctgttcatgtcctttccccacttcttgatagggttatttatttttgtttgttgtgttgtttaagttccttacacattctagatattagacttttgtcagatgcatagtttgcaaatattttcttccattctgtaggttgtctgattactctattgacagtttcttttgctgtgcagaagctt

SEQ ID NO: 196610 - DNA, 1000 bp, Homo Sapiens
gagaattgcttgaacccaggaggcagaagttgtggtgagcagagatcacgccactgcactccagcctgggcgacaagagtgaaaaaacaacaacaaaaacaaacaaacaaaatgccacatgaaagaagtcagacaagaagggttgcatctcatgtgattccatgtatatgaaatatccagaataggcacatccgcagaagcagaaagcaaattggtggttgccagagacgaggggtaagggaaagttaggagtgactgctcagtgggtatactgttttatttttccgtgaagagaatattttggaactagatagaggtggtggatacacaacattgtgtctgtacaaaatgccactgaattgttgactttaaaatggttaattttatgttgtgtggatttcatctacccaaaaataataccctttctttgctcaatatcctgcaatggatccccagttgactcagagtaaaagacagcgtgccttcaagggccccggaggtcccacctgattgggtccctcttatctctcctctccctcccactcactccattccagccacactggcccccctgctgatcctcggaggcgccaggtggcctcctgctaggagcatttgctccagcagtttcctctgcctggaacactttccgcaggtatctgtccaattcttctaacttcctcatcttctccttaccaatcccctggggacaataattctcagtttcctctgtattctcagtttatcaatttttcctgttctagcgctggattacaactgctggtctccctgcctgccttccctgcttcccagagcacgaagaagcttgcctccgcaacccactatttgtgtgaccttggtccaggaactggactgggctctcctcctgaaagtgggtaaataatgtcaccgacctaatgaggctgttgaggcatggaatctgatcaggcagataaagtgcccctggcaaacctcaattttctgtttctcaacaaagctt

SEQ ID NO: 196611 - DNA, 1000 bp, Homo Sapiens
ccacctttaaagcaagtgattcctttgttctcttggtcttttttattttaatatgagtgaattaaaggaattcactataaagatatgcaggaaatgaaaaccctaggatttagacaagccaagtgaagaccagcagggctgtcctgctgtgattaaaactgtaatgatactgaagggaaagccatggtgtcacgtcaagtggaccaaagtaattacatcatcaccatcagttggaaaaaagagctttcttcatgtcctatctactaatcattatacaaattaatactggggtcatttcttttttggaaagtgtgtgaccaattggtttatattcccagatctttttcttatttccaaaatgaattgtgataaaccattattttcatctattagtatttattcagtacatgctcataccgtaatcctccttggtcattccaattattttttttaatatatctattatgagcatgaattgcttttttctttctttctttccttccttccttccttctctcttctctctttctttctctctctctctgtctccctttctctctctctctctctctctccctctctctctctctctctctctccctctctctctctctctctccctctctctctctctctctctctctctttctttctttctttctttctttctttcccttttagacagagtctcactctgtcaccagcctggagtgcagtggcatgatcttggctcactgcaacctctgcctcctgggttcaagcaattctcctgcctcagcctcctgaatagctgagactacaggtgtgtgccaccatgcccagctaatttttgcagttttagtagagacagggtttcaccatgttggctaggatggtcttgatctgttgaccttgtgatcctctcgccttggcctcccaaattgctgggattacagggtcgtgagccactgcccctagccgaattgctctttctatagattatggatcacttgaaaagctt

SEQ ID NO: 196612 - DNA, 1000 bp, Homo Sapiens
aactcaatcaccataaaccacttggcaatgaagggaatgaaccccttccccaccccagttttaacattcaaagctcttggaacagaagcctcccaacttcccagactcctgtcccaccctgctaccacacactctgcactgtgaaaccaaacattctaccatccttctctgacctcctctcctaagcgctttccctctgagctgttcttctaacccatcccagaaaccaacaggttgttacctaaattattaacaatgagcatcaacagggtatgccataacattaagaaataaattaaatgatagaatctcagaggctcagcaggttagtacaagtatacatttcaggacagtctggctctgtcccttaaaacatggtatttaagaattgattattaatatacctcacgcctgaaatcccagcattttgggaggctgaggcaggcatatcatgaggtcaggagtttgagaccagcctggccaacatgatgaaaccccatgtctaccaaaaatataaaaaattagctgggtgtggtggcatacacctgtaaacccagctactcgggaggctgaggcaggagaattgcttgaacccaggaggcggaggttgtggtgagccgagatcacgccattgcactccagtctgggcagcagagctagactctgcctcaaaaaagaaaagaattgattattaataataacagttaacatattttcatagcctattgtggtaaagcattgtattaagttttttatatacatgcctttcagttaattctcacaacagccttataaggtatataatattaacccgattttacagattaaaaaaactgaggttccaagaggcaaacttacttatggtcatataaaaataagtgacagggccactattaacacagttaacctcagatcccatgtcccttcccacaaccctattacctagaaaagtgtctatttagtgaaagcttacgggcatcctgagttgatggcgaagctt

SEQ ID NO: 196613 - DNA, 1000 bp, Homo Sapiens
tctttatatgttgaatgaataaatgaaagaagaatttaaaaaatagttatctacagcttggtagaccctgtgttggtatttgcatatagtctctaatacttatattgtgacaaactttcaaggagctactaacatcaccattttataagagagaaatgtgaaatacagggtggttaggggatttcccaaggttacagacttagaaggaaggaagggaggccgggctcacacctgtaatgccagcactttgggaggccaaggtgggtagatctcttgaggtcaggagttcaagaccagcctggccaacatggtggatccctgtctctactaaaaatacaaaattagctgggcatgatggtgggtgcctgtaatcccagttacttcggaggctgaggcaggagaatcacttgaacctgggaggcggagattgcactgagctaagattgtgccactgcactcctgcccagaggacaaagtgagcctccatctcaaaaaaaaaaaaaagaaaaaaaagaaggaagggagagaagaatgggacagagttacataatgggaaggaaagcatacaaaaagaggaatgaggatagactagacagaagagtgagctacacaagtgagttaagaaagtgatatgctaacacattaatgattaataggtacgaatttgtccatcaaatcttaaatagttcctcatatattataccttggacctctcttctgtttcttctgacaaggttttcttgaaataagaaacaaaaacaaatgactgccttcccaaggcaaagggtattttgggaaatctgaagcagcgttagaggtttagcccagtcttcctcactacagcctcttcaacatttctgaaaagtgaatgtccatcctccctgtgagaaaaccatctcccaagacagtccctgccactctttgataggctgaacactagaaaattcgtccacatactgatttccaaccttcccttcttataacttccaattagaagctt

SEQ ID NO: 196614 - DNA, 1000 bp, Homo Sapiens
gcctctggggactggctcaattgcttttttctccttccttcatcactcttaaagggaggtaacttggaatttgggagcctttgtgtcacaaatgctgacttttcacacaccagtcagacccctccttcctcctggagtggaaatctgtgggcaggagaactgggatttccgtttggcagccaagttgacagatgtatccttgaaacggagtggttctgaacttacagtcctctggacttgctctcctcacctttgtgacccagcacaaatcactttggccctccctattctcagtttaattgtctgcaaaatggggattttaatgtgttcccacaggtacatgtgaaaactaagtttgataactttctgtaacttagtaaacacaggtcaaatatacaaaatatgttttagttttcaagaattaagaaaaatcactgccacatacttctttaacatattttctttttatggttatatgtttttttttctctccctcaaattcatgtaaacacatacagtctagacaactagattttaagttcaattccaccagcactttttgggtgtcacctatgtgccaggcattgggtagaatgctggagacacaagtaagaattaagacataattcacaagatagagactgtgccttaagtagctttacttctgggacatctagctcagggtggaaagcaggacagacaatgaatgaacatctgctgatgcagaaaatttattgagccttgtttggtgttcagtgccagcactatgatcagtgctgagaagcatattaaaataacagctagtgcttgcaagagcttagtagatgccaagcactgtccttggcacgcattaccttatctgattttctggacaacataatgaaataggaaatgttattttcattttatgcatagggaaactgaggtcccaagtggcaaagtagttttctcaaggtcacagaattagtaaatggtgaaccggggatttgaacccaagctt

SEQ ID NO: 196615 - DNA, 1000 bp, Homo Sapiens
aaattgataagggaaaacataaattagcattactgagtttcactaaatgtaagttagcacaaatgatgagtttaaatactgaaaattttcattaggtgaacagataattgatcttgtgattttgtgatactccagtattaagaacaccatttaatatctaactcagtgttgcagttatagattttgctaggtcttctctaataaatagataaaattaagtaatatttagtagtaacttccagaacgtaattaatatgtaagaagacacaaaaatatctttttaaattaaggccccattacacatattcctgaaatcttatttataatcttagttccttaacaaactttacaaataattctacagaaagattttaccccatccattctgaataattaaaaattacaaaggggaatatactgagtaagattttaattatattacttacagattcttacaaggataataagagttgggataatgaaaacaaaacattttggcagactttaattttcatcttagtaaatacatgtaattatttttccccctggaagcactgatttttaaaataatgaagttgttcagtttttgttttagaaatgcagcctgaattcaatatatgcccaaaaaactctagatccacagctaccaccctagtccaaatgacatctttttggaccactgtaataatttcctaactggtttcctcatacccactttcacctatctgctgtccacacaataaccaaagccacccatttccctgcttaaaacctttaaatggcttcccaatccaattagaatacaaggcactggctcttcaaccatatctgctgtcattttatccaatacttactactattctccaactacaggctttctatcagttcctatattactcatgatctttataccctctatgtatgtcaaaaaggaccatgtaagagatgtatcgctcctcttcacaaacaattccatcaatactactggatatacaagctt

SEQ ID NO: 196616 - DNA, 1000 bp, Homo Sapiens
tcaaagaaaaaaatcaaaagggaaattcaaaaatgtcttgagacaaatgacaatggaaacacaacatatcaaaacttatggaatgcagcaaatgaagttctaagaggaaagtttagcaataaatgcttgtattaaaaaagaagaaagattccaaataaatagcctaacattatacctcaattatccagaaaaagaaaaacaaaccaaattcaaagttagtagaaggaaaaataataataaagttcagaatagaaataagtcaaagaaagaacagaaaaactataggaaaataatccataaaactaagagttggttctttaaaaaaatagataaaattgacaaacccttaggtagactaagaaaaaaaagacttaaagaaaaagaaaagtgaagacattacaacaaaagcttccgaaattcaaaggatcgtagagactattatgaacagttatatgccaacaaattggttaactttaaagaaatcaataaattcttagaaataaataaactaccaagattgaattggaagaaatagagagattgaacataccaataacaaataaattgattgaagaagcaattaaaagccttccaacaaagaaaagcctaggaccaaaagagcttcacagctgaattataccaaacagtcagagaagaattaatgtcaatacctcttaaattctttcaactaatttttaacaagggcaccaagaggacacaaggagggaaggatggtctcttcaacaagggtgctgggaaaacaaattttaacatgcaaaaaaaatggaattggacccttatcttacaccatacataaaaatcaactcacaatgaataaaagaccaaaatgtaagatctgataccataaaattttagaagagaacacagggaaaaagccccttgacattggtcttggcaatgaatttttggatatcgcaccaaaagctcaggctacaaaagcaaaactaaatgaatggtattacatcaaactgaaaagctt

SEQ ID NO: 196617 - DNA, 1000 bp, Homo Sapiens
ccagttctataagtgcattggccatgtgccatttaacctccctgaacctaagcccttatctgtaaatgcagatgataatagcatctatacttcacagggctactgtgaaaattaaatgaaattagagatgtgtattagtccattctcacactgctaaaaaaaggcatacctgagactgggtaatttattaaggaaagaggttgaattgactcatagcagcatggctggggaggcctcaggaaatttacaatcatggcaagaggggaaggaaacacgtccttcttcacatggtggcagaagaaagaagtgccaagcaaaagtgggaaaagccccatataaaaccatcagatctcatgagaactcactcactatcatgagaagagcatggagggaaccgcccccatgattcaattacctacccctgggtccctcccacaacacatggggattatgggaactacaattcaagatgagatttggctggggacacagtcaaaccatatcaagatgtaaagtcctttagcacaggaccagtcctagcccaatatacaatgggctagagaccacacagtggcagaggatggagaagacagcatggcctgtgcctcccaaagacctttccaagtagccaggcaaccaagctgtatggccaaggagatgggatattctcatacaccatgaccttgatcacaagcatctctgtgataggtgaatgggaccacatctgagctacctggatagagaatgaaggaatgcaaggtagtaccccagattaaaactagaagctgttactaaaaaaaagaataatggaggtgggaaggcaaacaagtgttcaccctgggctccaaagatggatcacagtttttcctgcaggagctcatgaattaggaaacgagttgttagacaggcagaatacaaagcactaggtattaggacagagggatgcaccagttataaagaggctaaaagggagaggagaaatgacggccaggaaaagctt

SEQ ID NO: 196618 - DNA, 1000 bp, Homo Sapiens
atggtttacaaatttcttgtacctaattaccaaatagctagaaagtgagggaggggatgagaacctgggatgatgagttctgggctcttgcctttttctgatgcactagactgcctctttccctgatgttttttattttctctctgtaaaaatgacaattgttttatctttctatctgacattagagctatttaaagataaaatggttttaaataaattagttattggtatctacgcatgaaattctatagcacaactacttttttaagtataaatacagtcaatcaaaataaaatgtccaatgacaaaagctggtgaatgagaaaacactgaaacagctcatatttgggactcactgcccatcctggaatgcctcatatgagttgtagtttgtctttaattcttcactgacttaaaaaaaaaaaaaaagaaaaaccccaaacagccaaaaaaaaaaccaaaaacaaaaacaaacaaaaaacctagagtccttactgtagcctacacaatcccttaaaatccagtattggattttagttagcaggtttcataacttgtggaacaaaagtaactttttcaggagataggtccctagctaacaagacaataattaggataacatttcactgatcttgaggtatagaaaacctataaaggtataaaagcaaaggaagaaactctacagaaaaaaaagaaatgactacacaaaaatttaaaaccactataaatgagaaatacaataaaataattaacaaactaaatgacacaataagaaaaattttacaacatatagggaaaaggattaattttaccacatatagagtgctcagagatcatcaggacacaccaacagaaaaacagtcaaagaatagaaataggaaaatcacaaaagaaatatgaaagataaatgaaggtacaaaaacgttcaaccttactagtaaccacaaaaatcttaacagaaaaatatttttctactaacttactattataggcaaagctt

SEQ ID NO: 196619 - DNA, 1000 bp, Homo Sapiens
cttctgtctggtgtcctaggtgccacacctggtacataattagaatcacttgcttaccaagtttttcaccaaaaataaaagtggctaagagttaacattgtaacatgtaattgagactactgaagaaacagttttacatgcaaggtgtgtaagggagaagggaaggaagaggagagaaggcaggaaagagggaagggagggaggaatttctctctcacatagtgttaggatgtccctgaattaagagttggctgacatcagtttttgtcacagatgcatgaccttggctaagaatttagccctttcatgactgttttctcatttataaagtcataatcccagccttgcctaggtcacctcctcacttcttgagaataaaatcagaggatgctcgagacagccctttgaaaactaaaagaagatgcttaggtgtcatcagtaaaccctgggtgtggggcaggggaggacagaaaaatcactaagccttatgtctctaaaccattataatttcaaaaggttaaagcaaggttagatgttgtcacataaaaagctttgttctggccaggagctgtggttcacgcctgtaatcccagcattttgggaggccgaggtgggcagatcatgaggtcaggagattgagaccatcctggctaacatggtgaaaccccgtctctactagaaatacaaaaaaattagccgggcgtggtggcgggcgcctgtagtcccagctactcgggaggctgaggcaggagaatggtgtgaacccaggaggcggagcttgcagtgagccgagatcgcgcctctgcactccagcctgggaaacagaatgagactctgtctcaaaaaaaaaaaaaaaaaactttgttctgtgaaatatttattccctgcaaaactttctgaacaaagcagaggaaacacaagagtcaaagaagatgcagctgagtgctatggttaaggaagcagacactgaagtcagctcagcctggtttgaaataagctt

SEQ ID NO: 196620 - DNA, 1000 bp, Homo Sapiens
tccattggctttggcagttggaggggagaaggggactaggaggaaaaggtagagaatatatgacaatcctaaaggttgattttccttcttttcagttatatttttaattattcttgggtttcgtttgttggtgtggccttcctctattctccagagagtataatatagcctcacattagacaaatacaggttcaaattctagatcttcttttaacctgtttgatttttcaatcttcagtttcttcttttgcaaaatcaggataatcataatatatacctcaaaggattattatgaattttaaataataaaaataaatcacttggcatagtgccatgacatattaaaaatattagctattattatttttcctatccagtaccaaaagttatatgttgtgtgttccattcctttagttcttgttgcatgaaataaaataaactgctaatctgatttttaaaaaatccttactaatctcttagtaggtatgaaatatttttcttttgtgggagtagggaagatttcaattccttttaagctttaatttcctgagtgtgttacaaagtgcattgaattatatttgacatatggaggttctaaagccatgtcaggcttctattaacatatgataatagaaagcaataggaagtccagcaatctgtgagatcccatggcccttccacttcctccccatggctgtaggcacaccgcccatcttctgtgagcttcactttcaccactcctaaaatggggatgaaatatcagcctggactgttgttcagattgctatgacactcaaaggaggtaaaaactgtgctgagtttttaaaattataaagctggctagatctgtaatgtggtttagctcattactgaaatatttagcaaagtaaaccctgtgacaaaacatcaaaattaacattttaattttttattaatactgtattatcatattggtgtcctcgagatatagataaaaagaggacagtgtggtcaaaagctt

SEQ ID NO: 196621 - DNA, 1000 bp, Homo Sapiens
cattttttatggctgcttatcttaattctttagctgaccaagaatgagaacaagttaagattgtgctagacctacaaaatatgaaagtgaagctcagaaaaataaggatggaaaagaaaaacaaacatattcaccaaggtggtcagctgtaatttgtttaaattgcgaactcctgagcatggcccacatacaattcataaacaaacattacaaattccctgttcagtgaagatttagttactgagcaaaacaatgaaaataagaaaagtattctgagtaagtccacaacttgaatagatcagatcaaacacctgtaacttcatgttctttacatgaagtttctttcatgattaaaataagacaatgaaaaagatatttttatatcaaattcacaactcaaaagaaacgagtgcaagtgggtctgcccattagatgataaagaaattatggggaaattggcaaatttgacaagaaagattaaaaactttttgcttctttactgtttattggaaggtgatcctagaaaagtttgtcacagctttctgaaatctgagaacatttccagaaaaatgtaagttgatttaaattattggttataaatttttccttgaataaacttggcagaaaagttaatattttgtattattgtaagtttttttcccaatggagaaactgtagaaacttttttaatattctaagtcaaaagacaaaatattttgttactattattacatatttcagtctgtcttcacagtcagctttgtccagtgaaagaatctgtgactggaaatacttaggttctcaattaaaagaatacaaaatgttatttgactccgaccccaaaaaatgcacacgcaaatactagaatggaaaaaaaaaagcctgaaacaacacaaatgattaacagtattcaacaaataaacaagcaaatacaaatatacaatatcgctgtgatattcttaagaaaacagtattagatgtgccatacttaggcaagctt

SEQ ID NO: 196622 - DNA, 1000 bp, Homo Sapiens
ccacgtgttgagggaggggcttgctgggaggtgattggatcatgggggtggtttcctccatgctgttctcatgataatgaggagctctcacgagatctgatggtttaaaaggggcaggttcccctgcgtgcacgctctctctctctcctgctgccatgtaagacatgccttgcttcctcttcaccttcttccatgattgtaagtttcctgaggcctccctagccctgtggaactgtgagtcaattaaacctcttttatttagaaattacccagtctcaggtagcatctttatagcagtgtgaaaactaatatgcttacaatatagtgggagagaatgtcactaaagaaagaatatttccaagaagtatacaattatagattatgtcaagttcagacaactgtaaacaatgttctgaatatccatctgtgaaaggaaagggtgatggctatgatggcaagataccatggcatgtttattattgatgggaatgagccagtagaaagaggttaaaaatacaagagcaagagaagggaatcctggatttatagaaagcttccttagaaggaagaagccggagaacaagttaaagggttggcttcaaatagaagcgaactgcctcaactgaaataagcaagagtgaggatgactgaaaatataccttagtttgtagattcagaggtttgaagaattgccaaaatatgggacaatgtcatctgcctagagcaaaggagtatattggaagttctgaggtttgaagagaatggagtttttaagtagtagtttggggaaagcatgctgaatagagaagggcagtaactgggcatgcttcattaagaacctgtattctgtcatgtggggcagattctaaatattttcagctctcttactgcaggcaagataaaggcaaaggagtaggtattagaagagagagacaaacttctagagggaactaaatttttgaagaggattgtcttccaactgggaagagagggaaagctt

SEQ ID NO: 196623 - DNA, 1000 bp, Homo Sapiens
acttgcatcggcctcccaaagggctgggcctacaggtgtaagccacagcacccagccttgctgctgactttttgttttgctttttgagacagaatcttgctctgtcacccaggctggggtgcagtggctccatctcagctcactgcaacctccacctcccaagttcaagcaattctcctgcctcagcctcctgagtagttgggactagaagcacccgcaaccatgcctggctaatttttttgtatttttagtacagttggggtttcaccatgttggccaggctggtctggaactcctgacctcaagtgatctgtctacctcggcctcccaaagtgctgggattatacatccggctgttttgttttgagaacgggtcttgctcaccgggagtggtggctcacgcctgtaatcccagcactttgggaggccgaggcaggcagatcacctgaggttgggagatggagaccatccttgctaacatggtgaaaccctgtctctactaaaaatacaaaaaattagctgggtgtggtggcacatgcctgtaattccagctgacacaggagaatcgctttaacccgggaggcggaggttgcagtgggccgagatcgagccattgcactccagcctgggcaacaaaagtgaaactttgtctcaaaaaataaaaataaaaataaagaaaaagagagagagagagaaagggtctggttctgctgcccaggctggaatgcaggggtgcaatcacagctccttgcagccttgacccctgctcaattgatccttcaatctcagccttccaggtagttgggaccacacacttgtgcaaccatgcacagctaatttttttatttttattttttgtagagatggggactcactctgttgctcaggctgggctgctgatttttgaaggtttgtagtagtctcatgtgttagaaattattgagcttgcaaagattagtgagtataagcaatttggtttgtttggaactttgtgaagctt

SEQ ID NO: 196624 - DNA, 1000 bp, Homo Sapiens
acatctttacttctctcccagagcacagactatttttaatctagtcttgttatcttttgtagtaagatacagtcttagaggccagagccaacttctttttctttttttgtctgagtcagagtctcactcggtcacccagcctggagtgcagtggcgcgatctcggctcactgcaacctccacctcctgggttcaagctattctcctgcctcagccttccgagcaacagggattacaggtgtgcaccaccacgcccagctaattttttgtatttttgatagagatagggtttcactatgttggccaggctggtcttgaactcctaacctcaagtgatccacccaccttgtcctcccaaagtgctgggattacaggcttgagccaccatgcctggccagccaacctctttttcatgtggagtggtaccttctttagtacctctgagggtaccacagagataaaatagacatagtcctagttatgcagcttatagcctggaagaggaagtaattgaataatgaacaattgaacaaattaattaaataatgagataatttaagattgtaatgagggctccagagggtgatgtaagaatatgtaactggagaacttagagcctagtcatggacaataagggaggcttctcagaggatgtgacatttaggccaagcgttataggatgattggggttggctgggtgaagaggggggactagagcaggggatggcaaactactgcccataggtcaaatctggcccaacacctcctttcctaaataaaattttattggggcacagcaacccctatttgttcatgcattgtttattgctgtttttatgccacaatggcagaattgagtagttgtgacagagaccatatggctcacaaagtcaaaaatatttactaccaggccctttagaaaaagtttgccaatccttagattagagcattccagctagaggaaacaacatgtgcagagattctagggcagggacaagctt

SEQ ID NO: 196625 - DNA, 1000 bp, Homo Sapiens
agtcttaactgggatgctcaaaggagagatccaaaggtttatcactgagatttagggctgcatctcaacccatacagcaattcttattgtttcacacgcttggtgatctcacagtagagtccatgtgggagatcacatgatttcacagacaaaaagagaaaactccacagtgcatgattgctttgattttcattcagaagacagagaccgcagttgtcaatgaagagtttgattttgaccatattcatgcacagctggtacaatcccagggaatttagctacctgaatactgttctgaagtacgtttaaagtaactgattggaacatagtgttaaaatttcagaggatcagggaattgccatttggatacataggaaaaaagtaaatatgcaaatatcaaagcagcagaagtcttaaccctctaagcgctgtttgcttagtggcatttggcaattttgaaaatttgtgaaaggaatggtgatatcagtatcattgaagtttccccagtgcagttttcaacaacttgttcttagatctttctttgcaagatctgaagtgctgttagtataatttgcactaaaagtaaaagaaatttcccccaaattttgtgtttggatggatgggtgtatatggtgtggggatttctgtcttacttgttgctagcaaattaaccctctcctcccacttactttttcgaatttgtacatagaaataagtccagtttatgaatttcaagagatgatacaggcaactctttaggaaactagggaaagtagatgaattaatcggtagaagtgctaaattatgacaagtttgaacaatgacttttatatttaattaaagtagacttctttaaaaacagtaatacacgcagatgaatcttgctgaactagagctccatgtcaggttgtaagaactgaagcacacatagaggacgattaaaaggtattaggatgacatgaaaggacattctgtacccaggcaaagagctaggaagctt

SEQ ID NO: 196626 - DNA, 1000 bp, Homo Sapiens
agaagtggagggggggcaaaatcctgaaatgaacattgctgctacaatgcttggttttccgaactgtagatattgcaactttcaaggtacagaaccgaataaatggcctaaaaacaaaggttggacttggagtttttcaaagcaaatgaggcagaattacggatgccacagctcaggcaaggggtccgaagggacccccatttgaaatgctctctttagttcttactatgaaagtgagtccctgaagcctccaaacgcaacgaaatgtctctggagctcagaaagactggacaagcccgagacaggcccgcagacttacccgacccagaccaaccggctcctacccagcaagagccgctcgccccccaccccgtttatggagacccagtgaggccttaggactctgggaaaccattccctagtccactggaccctccttccttctgcaaggctcgtgcctcacttgatattcttgtctatagtcccctcagcctccaaaaagaagacctccgcctgccaaagaccctcttttaccttcttcagctctagatccacgggggcggccatcttggtgcactgtaagcgcctgcgcagtgggagttggactgaaatagggtggggaagggcgcgtcttactttgtgcgccggtctttcttctgcgcctgcgcatgagttggactaaccgggcttcttatctttctctgagaattgactcctgaaatatttgggtttcggattccgtgtcttcactacctgaccggtcaggtctggcttgctcctccgtatcttccagacatagcccaacgcgcagatttcccatgtggctttaagcagtttgccagctagcttaatatgtgctgctaaattgagatgtatgtagatgaggtcaaaccctcatcagtcgatcagtccttcagctagtcgctgtgctctcaggaatgagtaagagtaagtccagaacctcaggcatgacagtttgggaaagactattggaaagctt

SEQ ID NO: 196627 - DNA, 1000 bp, Homo Sapiens
actctcaccatcactctgcacccagcaaagtgggtgagggtggggagcgttgaaggaattggggattgggctgagcccaaggcacacaccaaccacggtgatgttgatggccttttcatcctgatggtcattcacactctccgtcacattgcaggtgtaggtccccgagtcttctaactcggcactggggatgtgcaggatggagcggatgtggtaaggcatatccaagaggaagtcagtcaccggctccaccagccgcccactctgcagcaacaggttgggcaggccccccaaatcaggaggggccggggagaaatcagcctgcaagccagatatccacccgttcctggcccctcctccgacccctgcctggccccacattacttctttgcgggggtatgtccactcgaagttgaccacctcattcccgatcacaatgcacatgagggtgatgttctcaccctggcggaccacagtctgcactgcgttcacagagacgttgatggatgacactggtagagagagattggcttaggtctggggaagtcaccaccagccactagcacttcagcttggggatagggtagggggctagagagggaaaggatgactgatgtagaagattcattcattcaacaaatatttactgaatacctactacatgccaagtactattctggacactggagcaacagtagtgaacaaagtggacaaaatctctgttcttatggagctgacgttctagaagggataacagtctggaaatcaaagtaccctctggagatctatgtacaggagaaatgtattgagcacataacatgtgccaggtactctccatcttttatttaatcttcacaattgatcctatgaggtaggcagccattgttatccccacgttacaagaggggaagcaggctcagagagattatgtgctttgtgtaaagtcactcagacaggaaatagcaaagctgggatttcgacccagctggctctgaagctt

SEQ ID NO: 196628 - DNA, 1000 bp, Homo Sapiens
tcttctggaattataggagtaaagtgttgtctgcggacatcttggaatggaagagcccatggatggagaggacagaagaaggcactacctttaatgaactctgttggcaagtcacaccaagccagttcatttgatagcatctcactcttgttattgtactctcaaggcaggcaggtattattctccccattttacaggtgaggcaactgaggctcagagatttaagtcccctacccaaggtcacacagctagtgccagagctgagactatgattgtgttcttgcctggaacagtatggttcattcctttctttttctttttttctttttttctctttctttctttctttctttctttctttctttctttctttctttcttttcttttctttttttttttttttgagatggtattttgctctgtcgcccaggctggagtgcagtggcatgatctcggctcattgcgacctccgcctaccgggttcaagcaattctcctgcctcagcctcccaagtagctgggattacaggtgcccgccaccatgcccagctaatttttgtatttttagtagagatgggatttcaccatgttggccaggctggcctcgaactcctaacctcaggcggtctgcctgcctcggcctcccaaagtgctgggattataggcgtgagccaccgcaccaggcctcattcctttctttactgtccagccagtctgtcatccagttctgtcctagaatatttctagggacagagggggcagaaaagacttcagaaggatgaaatgggcagggaagacttcttggagatggaggcaggaaggaagctgggtcttgcaggagagtcaaaatccggtggtcttgggtcagagcccacacttgcctttctgctcccttgggaaagggagtggctagagttccttctcccttcctggagatcaggagggaagaaggctgtggggctgccaggttattagcggattagggcttcattttaaagctt

SEQ ID NO: 196629 - DNA, 1000 bp, Homo Sapiens
cttccaaagagattgtcccctggcaattagagatcaactaagtgtgtagtattccgattccactgtgagaactcttatctatgtatgtcccaggactgtttcaatattttctctttgggaaggcataaagggatataaagttaacatagaaggaaggttttcctcataaaactcagaatcattagctgcaatacctttaaagacatgctggctcatgcctgtaaccccggcactttgggaggctaaggcagaaggatcatttgagtccaagacttcgaggctgcagtgagctatgatggctactgcactccagcctggccagcaaagtgagaccctgtctcaaaaaaaaaaaaaaaaggaacaagttaaagtttttttgttttttgagacaaggtctctggatcacccaggctggagtacactggcacaatcttggctcactgcaacctacacctcccagactaaagcctttccaagtagctggtagggactacaggcacgtgtcaccacagccacctaatttttgtatttttttgtagagacagtgtttcgctacgttgcccaggccagtctcaaactcctgagctcaagccatctgcctgccacagcctcccatagtgctgggattacatgtgtgagccatcatacccagcttagaactctatattataaaactgaaactgtatccattgagcaataattccttgttcccccttttttccagcccctggcaaccaccatttgactttttgtctctgattttgattactccaggaacctcatataagtggagtcatacagtatttgtccttttttgacagggttatttcacttagcatgtattcaagtttcatccctgttgtagtgtgtttcaaaattttcttcctttttgagattgagtagtattaactgctgtatgtaatattgctataaacatgggcatacagatatctttgtggttttatatttacatgcccatgtcaaatgtgttgaaaagctt

SEQ ID NO: 196630 - DNA, 1000 bp, Homo Sapiens
ctgggtggcagaacaagattctgacccaaaaaaataaaaattaaaaatgtatatgaccaattagataaagtgaaattggtctcataggagttacgtacaggaaagtacaagctctgactcaaaaggacagctactactgagctccaattttcaaacaaaaccacaaattagtgttttcatatgaaatgtcccaatttttaaaatctggccaggagcggtggctcacatctataataccagcactttgggaggccaaggcaggtggatcacttgaggccaggagtttgagaccagcctggccaacatggtgaaaccccatctctactaaaaatacaaaaattagccgggcatggtggtatgcacctgtagttgcagctactcagaaggctgaggcctaagaatcacttgaacctgggaggtggaggttgcagtgagatcacaccattgtactccagcctgggtgacagagtgagactctgtctcaaaaacaaataataaataaataaataaaatccgtgtggaccaggccaggtgtggtggctcacccctgtaatcccaacactttgggaggccaaggaggatggatcatctgaggtcaggagttcaagaccagcctggccaacatggcaaagccccatctctgctaaaaatacaaaaattagccaggcatggtggtgtgcgcctgtagtcccagctacttaggaggctgagataggagaatcgcttgaacctaggaagtaagggttgcagtgagccgagatggcgccaccgcactccagcctgggcaacagagtgagactccgtctcaaaaaaaaaagaaaaaaaaaatccgtgtggaccacataaaatatgtttgtgaagctctacctatccacaggttattagcttgcatcttatgacataaagcagggatccccaaccccaggctgtggactggtatcagtctgtgacctattaagaactgggcctcacagcaggagatgagcaggaggcaaagctt

SEQ ID NO: 196631 - DNA, 1000 bp, Homo Sapiens
gtctgagactggctgcaaagtaatccaggggcgttggggaactgagtggagggtttgcgtgaaacgagcctgctcaggagttcctaactgttgaggctggggatggtacgtgggggttctttacattatctatctttgggtatgctttaaattttccaaggaaacaataaaagaaaaagcaaacaagcaacagcagctccctggtattctgcaggccagtctggttttgaactgcaccatccctgaacatgttcaccgcacacgagggcatctccaggcccatttccttcctgaacctccagctaacgagaacacacatggttgtgagccagggagctggtcaggtctactttccattccccaaatgtcagatctggtttgagctctgctccctctctggccagtgaagagctggagggcaggaagagggagctgcctgaggctaagagaggagtggaatcaggtccagactggtctctgtttcaccatcctgtttaccccctgagcctgacttagcacacctggctcctcagggtgctaaggtgctgtggagaggcataaagtaaaaagtaaaacagaaaggtgcctgcctgagggtggaagcttctctgggcttaggcctttcctacccctgccaaatagcctcccccgcggctgctccgatctgccacttccagagccttccttcccacgatataaaaaagagaaggatggaaagtgggagaaggcttacagttgagggaggggggatctatatatatgtgaagacaggaacagattgtcggggacgaagagaagcaacgaacccactgaggcaaacaatagcgtcttgggatgttaaaagcagctcagcagcaaaagcctcctgttagttccacctgcccacgccaccccactgggcctctgggccgtaggagggaggtggtgcagggggcttggctgtggggggttggggcggggcattagcctgtagagttcataaaggtgggcagtgaagctt

SEQ ID NO: 196632 - DNA, 1000 bp, Homo Sapiens
ggtgcattagctgtgatgatggctagcaagaggtgcctgtagtttatgatctgcaccttatccttcttttccttcttttatccaagtcgagatattatatttctacctgtaggcaggaacttcctctttctccattccctttccccacctgcatccctcaagcccattatctctgtgggcacggcccaggcacaagcctgcttcactttacagtgtttgtcaatgcactctgtgaaggacatgccacagctgtggttcaacttcttggaatcttgagtggtgagagcccacctttgccacctccccatgaatgtaaagcctagagcctgctggtctacagcccatagccgttgagctgtgtcatctatgcatagagccatgggaattggcttgccaacagtctccatggagaagggcactggttacaagagaagtcactgagcgacatgctgacgtatcaaaggatgctcaaggttgtcagggatcactttccttctcgaggtgggagaaaaataaaatctttatagtaggagctagattaagggggagggagaggcagaatgagagggtgagaatgacatctgtgtcaactgtttattttggtgattgtctgcaacttgcaggcaacatggctgagcaaagctgtcatggaaacacaatttcactgcagatgacaagttggcataaagacaatgtaggtgcaaaagaggtatgggaaacaaaactacctgtcaggcaggcaaagggaggaagaaaatctaccctcacatactttcccataattaaacgtcagatgtacacaatgcagtaaaataattagcatggcataattactgttccgatggagtcttgtgtatatgccaaacaaattgctgtactagagcacaagctgttaaaacaaattgagttacttaatttttacatgtagcagcctgttttatcatttcctaagatgcaaatgtttcattaataatgcaggttttctaaatgtgcaaagctt

SEQ ID NO: 196633 - DNA, 1000 bp, Homo Sapiens
ccaagaacccaccaattctggacacactaggattataggcgtgaacctctgcacccagccctacttttcttttaagagttttgtagttttagttcttacattcagttctttgatccattttgaactaatatttgtatatgctatgaagtagggacccaactccattcttttgcatgtaggtaaccagttgttcctgcaccatttgttgaatagactattctttttccaatgaattattttggtacttggttaaaaattaattgatgataactctcaggagttattcctaatgttaataatgatcagaatttttactggctcctggtttatatcaagaacctttgctcctttccctttgagcacgtctgtttcagagatcattccaggatctcaaatttgtgatcttgattaacacaacaatgaacaccctaaggggccagaagggcactccaagtgtgattagataagggtgtgtgggtaaataactttgtaaactttcctaatttataacatggggataataagaatacttggctgggcacagtggctcacacctgtaatcccagcactttgggaggccgaggtgggaggatcacctgaggtcaggagttcaagaccagcctgaccaatctgataaaacccatctctactaaaaatactaaaattagccgggcatggtggcatgcacctgtaatctcagctacttgggaggctgagacaggagaatcgcttgaacccgggaggcagaggttgcagtgagccgagatcgtgccattgcactccagcctgggcaacaagcgtgagactccctctcaaaaaaaaaaaaacaaaaaaaaaccgaaaacttgcccatagggtggttgtggggattaaaggaatttaaaaagttgtcaatggaactatgcattagagggaataattgtaaaatgctttatagatataaagaaggcaaacatcaatgctttggcaagagttggactaggatgtcaaaagcaagctt

SEQ ID NO: 196634 - DNA, 1000 bp, Homo Sapiens
acagactttagaacatcccagaattggtgaaaattttgaatcttatggtctgagcactttttctgatgagagaacagctagatagcaaccgcagcagcaagaatcctcttattttacaggttatggtggcctggcatttagtgaatcagcacttttgagtcagaagaacccttgaggggtgttttagtttttcacaatccccccgccccgcctttttttttttttgagatggagtttcgctcttcttgcccaggctggagtccaatgggatgatctcaactcactgcaacctccacctcccaagttcaagcgattctcctgcctcagcctcccaagtagctgggattacaggcgtgtgtcaccatgcccagctaattttgtatttttagtagagatggggtttcaccatgttggccaggctggtcttgaactcctgacctcaggtgatccgcccgcctcggcctcccaaagtgctgggattacaggtgtgagccaccatgcccagccttacaattttttttaaatagaggagtaacaaggagtgagcattaggatcagtatctcccaataaaatctctgaagtgattttacatgacccatccattaccctctgatatttcctgtgagaacctgaagtacataattgcttaccacaatgagaaaggagcagaccaaggactccaactcaaagagcaatttgggcttataagtgaggactgagtcactctgaaggctgatcttggagactcttgtggagtgtttgaactcaactcagtttgccacacccctttttcatcaagacagtcccataaatcaggagacacagcatggcattcacctgcagggcaggtaacagtgccacctaccaagtgttctttcccaaggaagtggctatggccccgaaaggacacttgtagaaagtctaggccagacatgagtctgatataagctcacagaagctattaagaaatatagtggtcaggactctactctgaagctt

SEQ ID NO: 196635 - DNA, 1000 bp, Homo Sapiens
gcggccaagctgagtcagcccggcgggcggcgcacgcggcgccgcgtgacccgcagccacgtgacccgcgcggggccgggccgccggcgcagtcgctgcagccgccgcgggaggcgtccgtgtaagtgggtagcagggctggcggggaccttcctcgcgggccggagcgcggagcgctgccccagccctacggcactcggggtcgggaccccggggagccgccctcacacattttccaggagggatcggaggggcgatggggtggtaatgggggtgggggacacgctgtaccccaccgacgaccgcgcgggccaccttcgcctctttccttcacactcccactaaccgcagtgctgggggaacaaaatgtcctccttctggagcgattaccttttcccttttgtgctttgggggaaactgaagacccagaggggttcgcaaagcaaggtgggccagtaggaagacccctccgctagtccagagagagcacacagctccccaggcagagctcattgccccacctgctctagtggcccagcatgatcccatgacctctctacttctggaggaagagtcttggggtagacggcggggagggggtagggtatcccgttccggtaggggcagggatgagggaggcggggctgagccgagcatctatctggatggtaacagccaacgtagaaaatactaagttgtttacatgcattctctcatttcatattacccgtcgtgaagtctgtgaagtaggtactattgtcccaatttttacataggaggaaacggctcagagagaacttaggtcctttgaccgaggtcctgcaggtggtaagtgaaggagctgagattagaacccagatctgcccccagtggcgcctcctcgtggtctgtgggtggtggagacgactggcctagcctcttagctcctctgtgaatagaaaggcctttttcctggctcagacagcttgggaaggggattgttgctgggtaagagaagctt

SEQ ID NO: 196636 - DNA, 1000 bp, Homo Sapiens
aaagaaaaatagtgacactgaattctctaaaattgaataatataacctggttattgagaaataaggcaacctctagccagtggagaatggcagtagcttctacttttatactataagaaggcctgttttaatactgactaatgagaggaaaagttagcctgaattaaagactttaaaatgcaattttattgttcaccaaggaagtattactgcaaagcagaaggcctaacaggcctgttttaatgaatagatgactcatctgtaatcagtgcattaattgttgggattcaaatgggtgctcttaaagtactgggaaaaatagtttcatttttaaagcaggttaagcattccccctacagccttttttaaagtatcaatttgctttgcaaactatctctttccaaagactgtagaagtaaactttcataaaaccctgacagatttatcacaaattctatgctattaaatttcaaattaaaaaaagccacatgaatttgggtaacattttaagtattacaatacaaaatcaacgttatcacttagcctcccagtccctagggttgacactgtaccttttgcctttcaaattatttcggaacttgtcctcatattggagttttgcctctctttccccagtctgaagattcagccgtacgtgggatcctgcagggacagcctgccctaaaagccaagaagagaaaaggctcatgaggtacaaggtctttggaaggctgtcgggatggccagcaagccaacaggacttactagttcatgaagacacgactcagctgtgttcagttacctcctcaatccacccatccctctcccttgaacacacacaccactcgcataaactcactttgctaatctataaggaaatctgtaagggaatgacgtaagatgggcaagaggattcacacttgaatctagagaccaatgtcccccagttagaacctgcatatttaagctcttctatgtcttcttgagctaataaaagctt

SEQ ID NO: 196637 - DNA, 1000 bp, Homo Sapiens
caccatgtggccacggggagtcctcctcactttgctaggccccttccttcctctttataatatgggtcggagagtccatacctgccttcctcagagggctgctgtgagggtcagatgagggaatggacttgaagataccccaggtgtttgttaagcacctactgtgtgcagacacaaggtgagcagaatagtcctggttcacgctcatggagtcatggtctgtggaagggagagacattagtcagataagcccccgggctgggcactgcgggcaggctcagggcacacagctgtccaagccgagacaagccagggacataggaagccatttgtgccccactcagaggcagagtcctcgggcaaggccctggcaaaggaactgtggtgaggtgtttgtgctgaggtcttgggaatcagctcttaccggtgtctgaaaacgtaggttttgtcattgctgtccaggtgtggtgaggctagcagatcagggctaatttccattggaaagtgtgtttgtgactcatagttctcaggaggagaggggatgccacaccccaaaggaccacacagaaagcaccagggccagttgagaggcagaaggacagatgggaaaatgtgggcaagagcctttgttatcacgtctgcaggaaggagcgggtgaggcagggtaagcaggcttaggattgactagttggaatagttgaagggggttctgcagcatagggtttgtccctagatgtctttgcctggccctggtgtgatcagggcagggggagagtggctgttgtgtgtgagctggatggaagacgtggtggatgtgagctctgggctggttagtttgcagaggaaaggcatgctctcgaggagtggttcactaacctaggaattggccagtcctgtcattgtcagtctccagggtcagcgaagccacagatgtcaaagcatcagaattacatggttaatacacccagctcccaatctctgctcagcaattcacaagctt

SEQ ID NO: 196638 - DNA, 1000 bp, Homo Sapiens
tggaaataattggatcccaaggtggcaggggccaagttgaggcactcaaccatgaaaggcaaggtggatgtagttactataatggacagcaaaggcaaagtagcaatcagaatagcatgatttatgtagagctctggctttggctaattaatcacagtgttcctagaagtgaaattgataggaagcctactgcatgcttacttaatttatataagcagaaaactttcaggctgaatggacaaaagactaatttgaattataaaaatagagaattacggcctgtcaatcatttccagacatgaaccagtttacagacccagaaatccttgaatgaaagggacgccggttctccttgaggaagaacctcactatactaccaacaatttatgcagttaatctttttcccatccttccctaaggagacctctggccttttaccagggtagctgtgcactggggaaaggggaatgatcagaactttcggggattctggccactggctctgagctgatattgatttcagaggacccaaaacatcattgtggtcctccagttaaagcttggttagctaaaatacggatcttatggggcttgtggagataaggtaattaatgaagttttagctctggtccgacttacagtgggtccagtgggtccccagactcattgtgtggtcatttccccagtgccagaatgcataattggcatagacatacttagcagctggcagaatccctacattggctccctgactggtagggtgaggcctatcatggtggaaaaggccaaatggaaggcattagagctgcctctacctagaaaaatagtaagtcaaaaacaatatcacaaccctggagggattgcagagattagtgccaccatcaaggacttgaaagatgcaggggtggtgattcccaccatatccccattcaactttcctatttggcctgtgcaaaagacagatggatcttggagaatgacagtggattactgtaagctt

SEQ ID NO: 196639 - DNA, 1000 bp, Homo Sapiens
atgacttatgtccaaactaagcaggaccaatctttacaagcttatctttgtattttagcagcagttcccttctctcttttctgattaattattatgttggtttccaaactggccacttaaaggggaaacttttttttaaatggttattacaaataaatagaaccaagaactaataaacttagtaataatatatggttaatgagcttctcatccactgccagaaaaactgcttcaggataaatttattcttctctgaggtagatttactctcaaagtcccaaggaagaaaccaaatatcccagaaacataggaaaattcaaggtgacctttttttttctaattttaaataaaattcaatgctttggcacgtcacttgaattaccccagagatattctgagacagtctcaggtagaaggaataacatgggctcctgtgccagaagcccgagttcctgtccctgaaccactacttcttaaccagctgatccctagggagttgcttgcaaccccccccacacccccacaatccccaccaagcctggtttcctaacttataaaaaccaagatcaataagtccattttctcacgagatgaaacaaggtaatatttgaaagtgttttttatactctgaaagttagtacagattttttaaaacatgaaactcatatctgaaatggtacatatttacaacaatgcaattacctttgaacttttctttaccattgtagggaattgcgaccacgttaggagttaaacaggctttcatatgtccaggcttgtaactaccaccaccatgggaaacttttctttttttcctttactcatcttccttccttcccttccttcccttccctttccttccttccttccttctttccttccttccttcctttctgctttctttttctttctttccttccttcctttcttttcctttcttttctttcttttctttcttttctttctttcttttctttctttctttctttctttctttctt

SEQ ID NO: 196640 - DNA, 1000 bp, Homo Sapiens
atgagagggttgaagtggttgaagagaaaagggtgttagtgaaactgctccaaatgttagattttattctttgtctttttcactgatcactctaatcatgtgacctttttaaaacctctgtttgagaagaggaagccataagcatctgaacatgcttgagaagagtggttttgatgccttgcttagctttggtaaggcataggtcctgacttcaagacaaaaagcatgatcttgggaatacagccacccttaggtctctctgacaatgagattttataataagatttaggaccctattctctggcattgccttatgttctataaaatgtgacctagagtattcgcgtctcagtggattcacttgacatttttaagtgatcattgctttcttattttaaagctaaatataagtgaatttggcttcctccagttaaaatgaatagatcttatgttgtctgtaaatgactctcttcagaaaagccaaggggactcaacactgtaaatttagaaatactctgaaagctatggaagtagctttgctgaagggtccaagacatatattcagctaagtaaataggctatccttattatcaggaataccctctgtattagttagggttctccagagaggtatcatatatatcatatataggatatatgcatcttatatataatatataaaatatatattatttagatatatacatcttatatataatatattatataaaatatatattatttatatacatatgtataaaaataggaattggctcacatgattatggaggccaagaaactccacagtccgctgtctgtatgctggagaataaaacagttggattctaaagccctgggaatgggggtggcaggggcagaagtggcatgatagtgtaagttctgctctgattcgaaaagcccaagaaccaggagcacaagtgtccaatgtctgagggctagagaatatggctatctcacctcaagcaaagaaagcgaattc

SEQ ID NO: 196641 - DNA, 1000 bp, Homo Sapiens
gagtctcacagctgtcacccaggctggagtgcagtggagcgatctcagctcactgcaacaacctctgcctcctgggttcaagtgattctcctgcctcagccttccgaggactgggtgctttatcccggagccaacaagggaggaaactgaggcccagggagctgggtatcccacgtgcaggctcttacctcaggtccatgcttcaggtgcctcctttgtggctcacccctgctgactccttacaaagccaggccgttggcaggcacaggaaccaggctctgaaaccccgtgctcccctgccagtggctcagttgatgtaatcaccctgcagtgggagtgctctttgagtgcggccactgcgccccctcccgacccgcatggccctgtatgtagtggcgctggcccctaccccatggggcccacattctgaaccacaggctgctcattagaaatgtaccgtcaccaacccagttcccctgagaccctccacaccagcaggacaagtcccccagtcagcaagatgtgtcttctgccagaacgtgctcggcatttttctgtgctgtagattcatatgtgtgattttgcagggaagccagattgcttttttgcaatttgcattgttcacctgccaatagtcatggggtcacgggcctgtctctgcccaaggcttgcaagaggctacgttgtgtggctccaactcggtgagtcagccccggggcaggacgtcaggcctgtgctctccacccagctgcgctcttccacctggagccttcctggctgctgggcgcagagtgggagattctccccatgtgccgggccacctgctgccccctgccctgattgcccactctggggcccgcagatccgttggaagtacatgattgtggacgaaggtcaccgcatgaagaaccaccactgcaagctgacgcaggtgctcaacacgcactatgtggcaccccgccgcctgctgctgacgggcacaccgctgcagaacaagctt

SEQ ID NO: 196642 - DNA, 1000 bp, Homo Sapiens
tgtaagacccaagtcagacgtctgacctccacagctgaaagaacacatctgtggtgttgtaagccactaagtgcattgccattggttacagcaggcacaggaaatgaaaacagtaactctgccctaaaatctcccttattccctaagagatataactgggggaggagatcccctgcgaaggtgggtgttggctgaagtccttcagggaaccaaaatgattctggggggctgggagaggggacttccagtaggcaaggggcagattcgagtgactggtgtcactttgctcaaaagtagtagtaggctgggtgtggtggttcacacctataatcccagtactttcggaggccaagccaggaggattgcttgagcccgggagtttgagaccagcctgggcaacatagtaagaccctgttgctactaaaaatttaaaaattagcccggtgtggttgctgtagagagggaacagcccctgctactggggaggctgaggtgggagcatcacttgagcccaggcgatccaggctgcagtgagctataattgcaccattgcattccagcctgggcaacacagcaagaccctgtctcaaaaaaaaaaaaaaaaagaagtagtagtaataaaaagaatgataaaaatggcagtaataaaaagaataccaataacaactaccggcatgtgcatctttattgcatgccggactctccgctaatagccttacacacgtgttcttttatcttcatagctaccctatgggacaatgagtccatcaaaatgggctgcattttcctgcagtaacaaatgacctcaagtctcagcggcttacgcctgcgaaggctgattgcctgcttacaccgtgtgctcatcccaggacactttggtgctgtgcttgtcattgtcctcacccaggctgagagagcagctaatccctggctcattgccagtctctgatcccagggaaaagcaggtgggataggcaccggcacttagtgcttaaagctt

SEQ ID NO: 196643 - DNA, 1000 bp, Homo Sapiens
ggtgtgagggccaacatctccttggtctctgggataggcatctaagtcccagtcacgccttttctctggatctgaagatttgggtgaaagtagctttaatatctggtgttggcttcatgtttcttccaggagctcagcagagcaagtaccctgaaagagaaaggcatgaggccttcatgccccctcaacccacactcaccaggcaagtttcagccccttctttctgtttgacccctttgcttcctttttcaggaaactggagaggcgtggctggaccaagacctccccccatgtgagcaggcttcctcctcccccaacaaccgttgccaccacgcccagaaacgtccttaagccctggccctcaggggaaaggtaacaggaggccagagccgggaccatgtgacggcgctggccctcgccaccgccgtcccccgaccctggccccaggcccggcaccatgatgttccgagaccaggtgggcatcctcgctggctggttcaaaggctggaatgagtgtgagcagacagtggccctcctgtcacttctgaaacgggtcacccgtacccaggcccgcttcctgcagctctgcctggagcactcactggcggactgcaatgacatccacctgctggagtcggaggccaacagtgctggtgagtttccacccttagagatgggagcacagcaggagggagacctggaacagatgtcacatggctaagaaggtcaacccaacaatgggactaaaaaacgtgggttctaggcttggtgggtggggagttccttaccttctaagttgtcatcatgggtcttctgggactgtgttgccataaatcctcaggcatggtatggtggacttatgggagaaggcaatgcaaactggaaactccccataacaggaagatcatgtagagtggcttatgtgggctgctgaaaggaacagactaaagtcattatgaaaggcgtatagaaggtgagcagtaattaatttcttaagctt

SEQ ID NO: 196644 - DNA, 1000 bp, Homo Sapiens
cggtttactttgggccatgggaggctctggcaggagataagggatgaggggagagaaaggttggggtgtttctcccctattgctctctgcctgcttgggccctggtctctgtctctccacattgacaggacagctcccacttggtggcttctcctggcctccggctcaggttccctccccacttcagcacctgggcaggtgacagctccccacggtgggtggtcgctggacaccttgccacccttgtgggtacccttcccttcccctccaccagtgaggtctgcatttgggtgccttcagttgaaccctccgagggaattctcttacgagctgagaccaagacctctaccctgagccaatccacgtaaaccacttggcacagttccctggcacacagcaaggctgcgattctcgtgagctattgttatttttattgttagtaagatgacattggtatcacccttgacccttggctttgacacccttttttgaccattgcttccccctgcaaggatcttctaccctccccccaatctcctgagggaccccaagcctgggctcattggcagatggccaaggagagggtctaggacaggacctctggggccctgagtcttccagaaaaggagaagggcaatgtggcctgtggggccaccacagagaggtccagagactcccatgttgagagtctcccaggcccggggctagaggagggaagacaccctggggacccctctatggccctgggagtggtgtccccacactggcctgagggctgtggctctctcctgcccactaactaggagagggttggttcaaacagaattgacttgaaacccattctttctgggctcctgacatagggtggtgtttgggagccggctcagctttcagagcttttgagtgtctcagttccctcagtgtactcatctgcattattaattcctaggccaggatgcaggaaagcccacccctcagtgctggccctacagccaagctt

SEQ ID NO: 196645 - DNA, 1000 bp, Homo Sapiens
caacttgagtctggacatctggaacatggtaagaccggtcttagaaacttgctcactccatttgaggggaagcatggcctgatcacccatgacgtgcctttatcggcattttggttttggttttgattttgtcttggcttaaattgcttggcaccatggttttggttttgattttgatacagtgtgaattaggcaagtgtgtgaccttttaccctttccttcttgtagtgtgagttttgtcttgtctctagagaaaaatgggtcagacacaaagtaagcctaccccacttggaactatgctgaaaaatttcaagaagggatttacaggagactatggggttaccatgacaccagagaaacttagatctttatgtgaaatagattggccagcattagaagtgggttggacatcagaaggaagcctggacaggtcccttgtttcaaaggtattgcacaagatatcttgtaagccaggatacccagaccagttcccgtacatagacacttggttacagctagttttagacccccccacagtggttgagaggacaggcagcagcagtgttagtggcaaaggacaggtagccaagaagaatcccactccacccatcgagggaagtcggttcctaaagttctgtctgaccccatatcagaagactcatggcaggaaatggcaccagtgatgcctcccccttatcgagatgagagacccccacttctgagcccacagcacctgtgcctccacaggacacacacacccctagaccacccagagtaaacaagagaggatgtgaagccatgggagaaacccctcccttggtggctcatttaggacctaagactggaacacagatgcccctgagggagcagtgatatactggagtagatgaggacaggcatgtggtaaaaagtcatgcctttgtgtatcaacctttcacctctgctgatctcctcaattggaagaacaataccccatcttatactgaaaagcctcaagctt

SEQ ID NO: 196646 - DNA, 1000 bp, Homo Sapiens
gagacagggtctcgttatgttgcccaggctgcgctcagccaagagaagaatttcatggagagaagagtaatctgtgagaaatgctgctgagagatcaagcagaataagaacccagaagagaatctgaggctgggcacggtagctcacgcctgtaatctcagcactatgggaggctgaggtgggaggaccagtctaggcaacatagcaagaacctgtctctaataaataaataaataaatgaataaagagaattcggatttagcaacatgaaggtcataggtgactcagcggagagggaacaaggttgggagagaatgtggaggtgaggaggaagcggaagcagcaatcacaaagtctttgatgtttatcataagggagatcaaacaaacataacaggtgctaaaagacagggtgtgtgttaatcatgttttttttctttttctttttgagacagggtcttactctgttgcccaggctggactgcagtggccatgctgtgcccgaactcaagcaatcctcccgcctcagctcctgagtagctgggactacgggtggtgctaccatgcctggctaatttttaaaaaatgtttttgcagagcttaagtctcactatattgcccaggctgttcttgaactcctagactcaagagatccccccgccttggcccctcaaagtattgggattataggcatgagcctggactattaattatgttttttttttatcttgctttgacattgtggggcttggagtgactgcccttcccagggctagcttattactacagacagcaaacaacttgccaaagaacatgccattcatatgcaaatcaaccaatcaaaagcccacattcccaatcatcttcttcatttaatgctcacacacaaagccaataatttcccagccctaaatcaccccagggccaggtactgaccaactagagaccactcctctagcacagagcctgccaaaattatttaaactatctaacctaagctt

SEQ ID NO: 196647 - DNA, 1000 bp, Homo Sapiens
acaagcaataaccaattagaaaaacttagcagacagccaggtgtggtggctcacatctgtaatcccagcagttttcaaggctgaggtgggcggatcagttgaggtcaggagtttgagaccagcctggccaacaaggtgaaaccctgtctctactaaaaatacaaaaaattagctgggtatagtggcaggtgcctgtaatcccagctacccaggaggctgaggtaggagaatcacttggacctggggggcagaggttgcagtgagccaagattgtaccactgtactccagcctgggcaacatagtgagactctgtttcaaaaacaaacaaacaaacaaacaaaacctaacagagaaataatacctttcacaatagcaacaaaagtacatttctagggataaaattaatataattaagcagaaaactgttaaactttactgaagaacagatgttatttcattttctttcattgattcgaaattttttttttttttaaatgagacaagttatcattctgttttccaggatggagtgcaggggctcaatcatagctgactgcagcctcgacctcttgggctcaagcaatccacctcaacctcccaagtagctgggactaaaggtgtgagccactgtgcctggccctatttctttaaaataaaacaaaatcggccagctgctgtggctcacgcctgtaatcccaacactttgggaagccaaggagggtggatcacttgaggtcaggagttcgagaacagcctggacaacatggtgaaaccctgtctctactaaaaatataaaaattagctgggtgtggtggtgggtgcctgtaatcctaggtactcaggaggctgaagcaggagaatcgcttgaacctgggaggcagaggttgcagtgagccaagattgcgccactgcactccagcctgggcaacagagtgagactccctctctaaataaatagatacataaaataaaataaaacaaaatcacactgtgaagctt

SEQ ID NO: 196648 - DNA, 1000 bp, Homo Sapiens
aactctcaccactgtggggtgctgagcccggcgcagtgcacccatggagtcctagctactcaggctgaggtttgagtctgaggctgtagcccatgaggaccatgcctatgaatcgccactgcactccagcctgggcaacagagtgagacctcatctctctacaaataaaacaaggccaggcacagtatcatcccagcactttgggagaccgagccaggcggatcacctgaggtcaggagttcaagaccagtctggccaacagggtgaaaccccatctctactaaaaaaaatttaaaaatttgccagatgtggtggtgcatgcctgtagtcccagctacttgggaggctgaggcaggagaattgcttgaacctgggaggtggaggttgtggtgaaccaagatcaccccactacactccagcctgggcaacagagtgagactctaaataaataaaaataagaaaatagagggtaacgtgcccagaaccgaacctggcatgtaggtcctctctagctcaccgtcatgcttggtccttactcggggtcgagttccttgcccactcggcactgggaggtgggtcacctgctttccctgggccacggcccaagaagcctcagagaacttggaccttactgtgttgtcagtgggagggggtgacatcacctgcgtctttgaacgtcaaacggggttaaggcagctcggggcaggggaggcatcttctagaagccatactgctcagtgacttcctgggcaaagaccccttcatccccacaaagttcatggccttggaaaaaaaaaaaaaatcaatgccagcttcctggttcccgaccaattcccaaatctccacctgcccctcacacctttttatttaccttagaagtctctaaacgtttgtcacactcccctattagataacaactttctgaaaaaacatcgcaaacaaacatcgaaaatttacgttgtgatctactgtcattctacacacggtatcagtgaagctt

SEQ ID NO: 196649 - DNA, 1000 bp, Homo Sapiens
tagctgtgactacaggcacacaccaccatacccagctatttttttttttttttgtagagacggggtttcaccatgttgcccaggctcgtcttgagatcctaggctcaagtgatctgcccaccttggcctctcaaaatactaggtttacagatgtaagccaccatgcctgtttgtgacctttctttcaatagatcctttttttctttctccttcagaaggtggtttcatcccatggtccaagtactttgactttcactgccacattctagaaaattaatgcccccatttcctcactccttgtatattcatgccctttgctatgtgacttgttttgggcaatggaacgttaagcagtaaaatatgagcagaggctttaaacatgcttgtgtagtttggtttgctaactttagcacttctggcactgctacagacacaagagtagctaaatggctcagtggagcccaatgcagatcaactcccagatttgtgagctaaataacatgcttgatgttttgcctctgggatttttgtgatcatttgttaggcagcacattggagcaatagctaactgatacacacattggctaacaactcccaaattcaaatcatggctcagactcctcctctgagctccaaacatatatttgcatggctgataatcatcttcaaaataacatgccccaaatagaacttttctttagcaagctacccttatcatacctgttccacccttataaatgacactgtacttccaactcaaatttatgactagtcctggattgcttcctttcctttatggtgacagacacctcatagtgactcaaacatttgtaaaatgaatgagtacagatatctaagtgttctgctaccaggatatgtgggacacagtattctggtcagttctgtcttcaaattcactatccacactaagtcttttgaaatgcgataagacttaacccagcaccccactctaagaggcccaaagtacccagagaagctt

SEQ ID NO: 196650 - DNA, 1000 bp, Homo Sapiens
cacgttctgggacacagcgttggacaattgccaggacctcttcctgctgggtgagtgttgcctgtccccaggggcctactcactgccctgcttggtgatcacccatgctctctaccacccacagggtgaagtcctggctcctgggctcctcagaatcagcatgacctagcccagcagttctcagctggccgaggagacattggcaatgtgtggagacatttttgattgttactccttgggccagcgcagcgtgccgctagcatctagctggtggaaccaagggaggctgccacacatcctacagtgcacagcacagccccacaaccaaggattggcccacgccagtgtcagtagtgctaagcctgggaaaccctgctctggcccctatctgcctccccagccttgtcttcaccactttcctacttgtagtcagtcattcttcaagctgatacttcaaagtcttccagttgccctcccctctgcctaagcggctctcagggcttacatttttaaagtttaacctgggaccctgttagaactccatacctcctctcctactcatcttgtctgtcgctccctcacgttctaactaccattgtatcattcagagcgggagctgtgtgaggacagggcgtgtccccagtgtttggaacgaacagtacctgctctagggcccagcagacagctctaaactaatgaatgattgagtagcagctcttaggacttgcttgttcaatcctccagtcaccccatgaagaagctgggttgtccctcttttgccgattggtctgaaactgaggttaaaagagtggcagtcaccttcccagctgtgtcagtgtccccaggagcacccacagattcagtgattggctaggattcccaggactcatcctgtagtcagactcatggctatgacttactacagtgaaaagattcagagcacagtcagcaaagggaggaggtacatggggcaaagtccaaggaagccaggcacaagctt

SEQ ID NO: 196651 - DNA, 1000 bp, Homo Sapiens
gttatgttatcatcaataccacccatccatagaacccttctcctctggcaaaactgacactctgtacccattcaccacaactccccatttctctcgccccccagcacttggcaaccacccttctactttccatgtatggatttgagtactctaagtaccacatataagtagaatcacacagtaattgtccttccatgtctggcttattttgcttagcatggcctcctcaagattcattcatgttgcagcctgtgacagatttccttcctttttacggctgtatagtattctattgtatgcatatcccgaattttctttatccaattcatctgctgatggtgtgtccttttggctgtttcagtacacacttgaataaatgaatgacgacaaggagggtggatctctgcctcccttcccctgcacaagacaggagtggcagctttgaacccatgaaggccattcattcatggattgtatcctatgctactggctctccagaggccagcgggacctctttctgcagtaatgtgctgtgctatggggtctggaccttggccaagatactgagcatttctgagggagggttttggcgtcaggaatgggcctctgctcagaccttaagccactgggtagctactgtgtaccctgagggggtcacagccctttccacagcacctggagcagaggcaccctggtatagctccctctcctaaccctgcaaggcaagctgtgccacagccctggccgcacagcggcctgtgtgagcccagtgctctgccatccgggaaggaggtgagggaaggggagggtgtgaccccacagtgcctggagctcatgctgggagtgagtgagcacaaacaggcaccagcgccccgtgaaaaatgtgtcaccgcccacgacaagatacgctgcgtggtttctgtaggaaactgaaattccagaaaacaacccctgtggtccagtgtgttttactggaagttcagacctccccttcaagctt

SEQ ID NO: 196652 - DNA, 1000 bp, Homo Sapiens
ataggcatgagccaccatgcccagccaaaccagcctttttgaaaggctcattccactgttgatatcaaccaattgcccgatgctacctgttttgtgattttgacacaactgaccagcattccttcgtgataagatactatcagtcacagagtggttctggccagtctacagagtttgcacactgagggccctcatgacctcggcttcgccttttgtttttgtttgtttgttttttgagagagtcttactctgtctcccaggctggggtgcagtgcagtggtgggatctcggctcactgcaatctccgccttccaggttcaagcgattctccttcttcagcctccccagtagctgggattacagacacctgccaccatgcctggctaatttttgtatttttagtaaagacggggtttcgtcatattggccaggctggtcttgaactcctgacctcaagtgatctgcctgacttagcctcccaaagtgctggaattacaggtgtgagccactgcacccaaccctctgcttcaccttttgatgtatagggcctaattgtaatgtgtttaaatgttaaattgtaatacatttaaatattcaccccagatgaacatgggatgcatgtgcatatgttggcctactatgcatgcacacgtttcccctttgtgaatattcatagctcctcctgtaacctgttgaatatatatatttggccaccccattcagcataaacccctgtcttcatcttcccaccttcaaagtgcctgtttttggcttctggccagaggctacacttctgagcttgtcagaatagaccacctgcaggctgcaaccccttatgagaaataaagctctcctttccaagtgtatgaacctcatcattcttcagctgacacagctaaatttcagggaacactacaactaaagggaagaagggaagaaaggctgtggggatgctgcttagtttctaccatgacatgatggcaggcacagtgctaagctt

SEQ ID NO: 196653 - DNA, 1000 bp, Homo Sapiens
tcagagactaggattgcaacccctacttttgtttgttttccatttggttggtagatcttcctttgtccctttatcttgagcctatgtgtgtctctgcacgtgagatgggtctcctgaatacagcacactgatgggtgttgactctttatccaatttgccagtctgtgtcttttaattggagcatttaccccacttacatttaaggttaatattatgtgtgaatttgatcctgtcattatgatgttagctagttattttgcttgttagttgatgcagtttcttcctagcatcaacggtctttacaatttggcatgtttttgcagtggctggtaccagttgttcccttccatgtttagtgcttccctcaggagctcttttagggcaggcctggtggtgacaaaatctctcagcatttgtttgtctgtaaaggattttatttctccttcacttatgaagcttagtttggctggatatgaaattctgggttgaaaattcttttctttaagaatgttgaatattggcccccactctcttctggcttgtagtttctgccgagagatttgctgttagtctgatgggcttccctctgtggggaacaagacctttctctctggctgcccttaacatttttcccttcatttcaactttggtgaatctgacaattatgtatcttggagttgctcttctcgaggagtatctttgtggcattctctgtatttcctgaatttgaatgttggcctgccttgctaggttggggaagttctcctggataatatcctgaagagtgttttccaacttggttccattctccccgtcactttcaggtataccaatcagatgtagatttgtattttcacatagtcccaaatttcttggaggctttgttaatttctttttactctttttttctctaaagttctcttctcacttcatttcattcatttgatcttcaatcactgataccctttctcccacttgatgaaatcagctactgaagctt

SEQ ID NO: 196654 - DNA, 1000 bp, Homo Sapiens
attaagggagggaaattgagtaattgtcacaattctaaaagctgggcctctctctgacatgtcttcttttctcttgaaaagagatcttttgtccgatgttcagaatcagaaaagacaatatctagatcataccttagaaatgatatccttttcctaagaaccgaagaaaaaaacgataaaagccccggtgaggttttgcttctttcttttgcctttctttccaatgactttgcaaggcttaagacaaataactattaaatggaaatacatacatttgtaatttaaaaatttaaggaaaactaaacagaaaccataaaatcaagattcaggtaaaggtggaatgaggaaatgtagcttcatacagagtgccttaagtgtgaatacaggtgaataaatatgtaagaatgtatgatgtacttaagttgtttctgattctttcttttctttcttctttctttccttcttccttttctctctctctctctttctttcttcttatctcactctgtcacacaggttcagtggcacgatcatggctcactgcaacctctgcctcttgggttccagtgattctcttgccccagcctcctgagtagctgggattaaggtgtgtgtcaccacgcctggctaatttttgtatttttagtagagatgggatttcaccattttggccaggttggtctcaaactcctgacctcaggtgatttgcccatctcagcctcccaaagtgctggaattataggcatgagccaccacaactggcctgtttctgatgtttctggtgtcaataatgtattaattttctgttgatgccaaaacagattctcacaaacgtttagcagcttgaaacaacacaaatttattgtctcacagttctttaggtcagaagtctggattggcttgactggtttctttgatctgggtttcaaagactgaagtcaaggtgtgggccaacagggctcttattggaagaatctgggaagaatccacttccaagctt

SEQ ID NO: 196655 - DNA, 1000 bp, Homo Sapiens
tgattgaatgccgatggtataagcttagtacacatcggctatttttactgaccatgaaaatggtcgtgcaccttcagccgtcatcagtcaggcatagtaggtacccacagcctgccaggtgccacacactttggtctcatttctgttccttccatagtcaccaaagttggggtgctatcaattattgtctcactttacagatggggagttgaggcacagataggggaatcatttgtccaaagactcagctggtgagcagccaagccagggcttgaacccacctaggccccctggttccagaggacaccaagtcttttgttgagacagggtctcactatgtcacccaggctggagtgcagtggcaggctcacagctcacagcagcctcaacctcctggactcaagcaaccctcctacctcagcctcccaagtagctaggactagatctccctatgttgctcaggttagtctcagaactactgggctcaagtgatcctcctgcttcagcctcccagagtactgggattacaggtgtgagccagtgtgaccagccctgctaccaagtcttaccagccagactgctgctaatacatactgacaggaataaaataatattggctgggcctggtggctcacacctgtaatcccagcactttgggaggctgaggcaggcagatcacatgaggccaggaatttgggatcagcctggccaatatggtaaaacttatctctactaaaaatacaaaaattaattgggcatgatggcacatgcctgtagttccagctacttgggaggctaaggcaggagaatcatttgaacctgggaggcggagtttgcagtgagctgagtttgcaccaccgcatgccggcctgggtgacagagcaagacactgtcccaatcaaccaatcaaaaaataaacaaaaataaaaagtaatattggctgggtgtggtggctcacacgcagaatcccagcactttgggaggccaaagcaggaagctt

SEQ ID NO: 196656 - DNA, 1000 bp, Homo Sapiens
ggtggaggttgcagtgagccgagatcgtgccactgcactccagcctgggcgacagagtaagaccttgtctccaaaaaaaaaaaaaaaggaggtttcaaactctggcaccaggctccagaaactgtacgcttaatcactgggcttatttggtgggggggcggctatgatgtaggtagtacatgcattagaatttgtggcgaccacccaaacccggggtatccatttccctttggcctgaccctggggtcccagcttatggaacacagagcaggtgtttacttcagcaggagctgagcagtcccaacacccctcctcctcctccattctgagcacctctcctccaccctccaggaccttttccgtgatcactgggggaagacaatggaatggcagcttagggacaaagggagagctcagttactaatgccacttctgggcagggttcctgcattccttagtggggaagggagcaaccgctgctggattccccgtgggttcaaggagctggaggacccaggagcctaaatctctgctcagatcctctgagctctgagtctggttttcccaaaaaactagatggttttccttaaaaaaaaaaaaaagttaccagacacaagtcagccgtgcccccgggagctgcctttgaaaagaggaacctggccaggagcagtgcctcacatctgtaatcccagcactttgagaggccaaggtgggcagaccacgaggtcaggagttcaagaccagcctgcccaacatggtgaaaccccgtctctactaacaatacaaaaattagccaggcttggtggtgtgcggctatagtcccagctactcaggaggctgaggcaggagaatcgcttgaacccaggagacagaggttgcggtgagccgagatcgcaccactgcactctagcctgggtgacacagcgagactccgtctcaaaaaaaaaaaaaaagaaaaaagaaaagaggagcctggtggccaaggtgctgtctcaagctt

SEQ ID NO: 196657 - DNA, 1000 bp, Homo Sapiens
agtgctgggattacaggcatgagccaccatgcctgacctaagtttcttggcaatagttccgtatcagtgtgtagaaagtgatgtcatttttggccaggcgcggtggcccatgcctgtaatcctagcactttgggaggccgagatgggcggaccacctgaggtcgggagttcaagaccagcctggccaacgtggtgaaaccctgtctctactaaaaatacaaaaattagccaggcgtggtggcaggcgcctgtaatcccagctactcgggaagctgaggcaggagaattgcttgaacctgggaggcggaggttgcagtgaggcaagatcgtgccattgggctccagtctgggcaacagagcaagaccctgtctcaaaaaaaatagaaaaagaaagtgaatcccacacgtgtccagtattagaaacgagagtttggtaaactccagtataccaagctgagctgtgtgtgagttttctaaaaatggtttcgcgctatacatgctgcttttttcacatgacgtcgtatctgggattgcctctgcacgccatgtggatctgccatgcgtctctggagggtgtgattctgggtggtgggcctggccctttcctggctgggggctgctgtctgctccacagacaggaccctgggagtgtccgtgcacatgtggcactgtggactcatgtgagcctttctgaaggacgcgtttccagaagtaggactgctagtgcagagagcaagcacattttattcatgcttccaggaggtcttggcacgcccctctcgaggggagcctgtgggcagtgcactggctggggggcgtgctgaaggccaggcctgcttcctcactgctgggagatgggcaccatgagccctgcactgagtcacactcccctgtgcagggcattctgggaaatattgaaatcaaaaggggtgggggagtccccttttgatttgtgtctgtctctctgtctctctatttctctcttttgaatctaaagctt

SEQ ID NO: 196658 - DNA, 1000 bp, Homo Sapiens
ctagacttcaagacacacctacccttgaaattatgtgtggacaagaaaatgcatataaaaagtccattgtattatggtttgctatcagaaaacagggtaacaaactgaatgtccatcatcaaagaatggatacattgattataatatcatcattgcattaatactgtagcgcagttaacataaattattaaaaccacatgtaaacatggataaatatttaaaatgtactattgggccgggcacggtggctcacgcctgtaatcccaacactttgggaggccgaggcgggcggatcacctgagatcaggagttcgaagccagactggcaacatagtgaaactccgtctctactaaaaatacaaaaattagtcgtgcgtggtggcgggcgcctgtcaccccagctactcgggaggctgaggcagaagaatcgcttgaacccgagaggtggaggttgcagtgagccgagatcacaccactggactccagcctggatgacagaacgagactccgtctcaaaaaaaaaaaaaagtaatattgattaaaaatcaaattgcatgagactgcacagcacgataccaagcaaatacaagttttaaatattacagaaaataatatttaaaatacaaaccaaatacataaatcatgcagggggattaagacgtttctggatagtggcaacagccgagagtggctggatgaatttcagagaaatttcatatattgcttcaattttatttaaaatatattattacctatgttttagatattttattgtaaataatgggcaaggatattataaactctgcagaagtaagtgtagtcgtgttttttcctactcacattgaagatggcccagatgcttgcactaaccgcgtttaccgcccacagccatcatggcgaccggaagtcctgagagcttgtttccctcgaatctcagacagccctccttctctatgaacattatttcaaaagaagttgagaactagagaaaccgaagctt

SEQ ID NO: 196659 - DNA, 1000 bp, Homo Sapiens
aattcaatagaagattatgatatcccgtaaatcagtgtaggcttctcatttttgtgtacaatgcaagaaatatacaaagaaatgaacacgtggttatctgtataagtattagatattatgttcaatatatcaactgagtgtccagatgagctagtatacaagtggtgtcttggagatgacaatgtccatagaagctttaaagaaaggtcagaaactaaaaactgtgatgaccacagcaacagcaatgactgaagttttggaacactccccatgtgctgggcattactccaaatgctttacatgttctaattcaaataataacataatagatagagagatagagagatttgttcccatgttactaggagacaactatgtcacagaaaacgctaaaaagtcacctaggtcaacaacctgaaaatggcagagcaggcatctaaatccagatgtctgagaatcagtcttgaatcaaaagaaacaaatggttaaattatggttacggtatgtcttagtctctctgtgctgctgtaccaagtaaaacagactgggtaatttatgaacaatagaaatgtatttctcatgattctgctggctggggaaatccaagatcaaggtgccagcaggactgatgtctggtgagagatgatcctcgcttccaagatggtcttgttgctgcacaggggacgaatgctgttgtccccacatggcagaagggacagaaagggcaaaaagcagtgaactccgtagaataagccttttgatatctcattgacgagaacaccatacccactgataaaggcagacttctcatgatccaatctcctcctaaaggccacgactcataacatttaaagattaggcactggggattaagtttcaacatgaattgtggaggagaaaaaaaaaaaaaactcagactgtaacattccacccctggcccccaaaattgatatacttctcacaaacaaaatacattctatcctaatggctcccaaagctt

SEQ ID NO: 196660 - DNA, 1000 bp, Homo Sapiens
gcgtggtggctcacacctgtaatcccagaactttgggaggctgagatgggcggatcatgaagtcaggagatcaagaccatcttgcccaacatggtgaaaccccatctctactaaaatacaaaaaaattagccaggcatggtggtgcacacctgtagtcccagctacttgggaggctgaggcagggaatcacttgagcctgggaggcagagattgcagtgagctgagatcatgccactgcactccagcctgatgacagagcaagactctgtctcaaaaaaaaaaaaaaaaaaaagaaaatggaaaaggaggccaggcacggtggctcacacctgtaatcccagcactttggaaggccgaggtgggcagatcacgaggtcgggagttctagaccagcctgaccaacatggtgaaaccccatctctactaaaaatacaaaaatgaattagccggatgtggtggcacatgcctgtaatcccagctactcaggaggctgaggcaggagaataacttgaacttgggaggtggaggttgcagtgagccgagatcatgccactgcactccagcctcggcgacagagcaagacaccatctcaaaaaaaaaaaaaagaatggaagaggaaacactttcaggtgtgcataccagagggcatacgaaggactaggacaaagcctctcaattacactaagctatccatggtagacagggattaagcgtgagtcccactgccttcctggaaaggctaagagaggccttggtaaaacacacctaagtcctgattgaggagagggacatctgatcctagaggatgagtttatgacacagtcaggccctgatgtcaggagggagcttcagaaacaggctgcagggccagatggtactttggagggcctcctgggagtggtcaccttagactttgctgtgggaacttggaggaagtccagaaaagagagaggagatacggaaaaaaaggcaaaagctctaatacctgccctgaagctt

SEQ ID NO: 196661 - DNA, 1000 bp, Homo Sapiens
tgaccacagacttccactcggctgtggggtctggcctggccaccaggcgtgccacatccgccttgtacactggagggacgggacagcagcaggtcaccttcttgccacccttcaagccccagcgtagccctctaaccccaggggctcaacctcaaccgtgcaatttctcagagggcaacactgtcatcactaaccaaaatcatcattctagtgccccccaaacacccccagaaaatcccaggacctccaggcaggtgtggacatccccattttacagagtgggcaactgaggccctgggatgtagaccaaaagtatatacagaagggagaggtagagactgttctctcaagctcctccccagccccatgcctgacaggtcctcagtgactccatgcctcggtttgccaatacagaagctggagcactgggcactcagcccctaaaccaaatatcctggtatgtccctcctcctccagtcccatttacttgggcccattctcctgccccctgccttgcagctacgtaagcccattttgtgctcctagagaagtagattagacccattttggagataaggttctctgaaaatcgaatcttttcccaaacacctacaattttgcataaaaaatttacagaggtagccgggcacggtggctccagcttgtaatcccagcactttgggaggccgaggaggggggatcatgaggtcaggagatcgagagaccatactggcaaagacagtgaaaccccaactctactaaaaatacaaaaaaaattagctgggcgtgatggcacgcgcctgtagtcccagctattgggaggctgaggcaggagaatcactcgaactcaggaggcggaggttgcagtgagccaagactgtgccactgcactccagcctgggtgacagagtgagactctgtctcaaaaaaaaaaaaaaaaaaaaaaaaaaaaaaaaaaaaaaaaaaaaattacaggggctgggcacagtggctcaagctt

SEQ ID NO: 196662 - DNA, 1000 bp, Homo Sapiens
gaacgaagttgggggctgtatcaggatccctgagctcttggccctgtccctggccgcaggctggagctgtccccggaggagggacccccatacagacccgagttcttcagcggctgggagccgccggtcactgacccgcagagccgcgcctgggaggacccagttgagaaacagctacagcacgagcggaggcgccggcaggtgacccaagcgacacagcagggccgaggctgggaagtccgggggcgcggccggtccgcctggccccgcctgacccgactgtcttacttcctacagcaaagcgccccccaggtcgctgtcaatgggtgagtgtccgccccagggcagggcaagggggtcaaggaggggtgcgtcccgggggctcccgatgctgactccgccccctttttttctgtgtttttccttctgtcttcctggctcttctcaggtgggtgagatggtgatggggcgggccggggctgggagagagggaggagcagggtgggagggggcgggacccagacttctggggctaagggagttgggaatggagacccggattcctgggcctaagggaggaagggggctgggagtgggtaaagtctgagaggttggatccctggatccccaaaaggctggaagaagccagtttgttttcccagggcctgggaagcaccatgcctgggctccctaggaggacagagccctggatattggaggggagaggctggggaattggacctttgggttttgaagaagagcccaagtctggtgcttgggatcctggagacccagaggagcaggcttgggacttcaagggcttgggggcaagtttctgggaaagttaggaagtggtagtatctctgggcccccgagaggggtaaaggctggacgattaaactcttggttttccagaggctctaatgcaattgtctaagtcgctgctgggtgtcggactgggttaaaaggtttgagggttaaaaggataagattgaagctt

SEQ ID NO: 196663 - DNA, 1000 bp, Homo Sapiens
gagtgaatcacctgagtcaggagttcgagaccagcctggccaacgtggtgaaactttgtctctcctgaaaatacaaaaaattagctggatgtgggggctggcgcctataattccagctactcgggaggctgaggcaggagaattgcttgaacccaggaggctgaggttgcagcgagctgagattgcgccattgcactccagcctggatgacagaggaagactgcctcaaaaaaaaaaaaaaagttgtgtgtgtaaagtgatgaggatcagttaagattattgggtgggccaggcacaatggctcacacctgtaatcccagcactttgggaggccaaggtgggtggatcacgaggttaggagttccagaccagcctggccaacatggtaaaacactgtctctactaaaaaatacaaaaattagctgggtgtggtggtgggtgcctttaatcccagctacttgggaggctgaggcaggagaatcgcttgaacctgggaggcggaggttgcggcgagctgagatcacgccactgtactccagcctgggcaacagagcaagactccgtcttgtgggggggaaaagattactgggtgtaatctttgtttccaatctaattctactatgaggatttttttagttctgtcaaagaattgtggttctgtcaaataagtttgacttttggcataattataacaaggttggaaggcaaaatttctcaaaagtggaaagttagagaatcattatagtatgtcttatcctcttctattatatatcacagtccaatgggtatcccagtggcattggtattttttcccgtggaggtctgaaagttgggtatatgtaatatgaatgattggtgtgatagctgtgtctggtgttgtaccatcttttagatctgctttgtaatcataatctttacttccttcgagttcggattggtaccagaattcacatcaagtatcaacaaatgactcataggagtatatatcatatttaagctt

SEQ ID NO: 196664 - DNA, 1000 bp, Homo Sapiens
atataaaaattagccaggtgtggtggtgtgtgcctgtgacatcccagctacttgggaggctgaggcaggagaatcaattgaacctgggaggcggagattgcggttgcagtgagccaagactgtgccactgcgctccagcctggacaacagaacaagactccatttcaaaaaaaaaaaaaaaaaaaaagtgttgatattgcaattccctggttggctcctggcatctgtattttcaacttgggaggatctggtagggggaggtgaggtgataaactaggatcccccaagatgccaaagaggaagtaactgacttatccagggtcaccctgccagctcaaagccaggactgtctctacagggaccctgccctaatcccctggcttcaatgccctgagcacagtagagaggtgtttcaaggggcactgcactctctgaaaactcaactccactcacttgccaggaaaaaacacaccatcctccctgccctcaaccagaccttgaccactgacacctccaggaaaggaaaacagggcccaaacacaggaagtacgaaacgtgaattcttacttttctcaatgtctgagggcccagtttccagcaatcaaagggattttacaaaagcaactttgactataagcaatcttcatcttactagctgacttcacacctggctagctgcctggtaaaatgtggctccatccttgctggagttcggagtgttgatgcacttactcagttttcccaaaaagtcgctgtgaaatcctcagcactcaggaaaaatggctaggatgagcccggggagggcggaaagtctgagtggcggatgctgcaggctgctccccatgactagcctctccttcctccttggtaacagaatcccaactgtatctggggcagcaatgagactggatcaccagactacatgtcccaggatcccttgcagctctggccaatgagataaaagtggaggtgccacacataacttccagcctcgaagctt

SEQ ID NO: 196665 - DNA, 1000 bp, Homo Sapiens
gggcaacaagagcaagactctgtatcaaaaaaaaaagcaccaaagtctcatgaagcagcactcagagggtctcctctctgccttagtcacaccacactggagagtgtttccatggccactgcattgcagagcggagatcatgccactgcactccagccttggggacaaagcgagactccgtctaaaaaaaataaaaaaaaaaaacagcagaacatagaataataaaaactgcatacaaatcccctgtagaaatgggggagcggagaaagggcaggccgcatgggggcagagtgctcacctttcatagtggggctggattatgagtaggtaacgatggcgtagatctgaacaaacctccagttgaagagctcagaaatgagtgaggtatgcttactatgggctgtccaggagatggcgctaggggaaaacaggctggcgaccgcagtagttgagggttcctctgaggaggggactttggctttacattttatagtttgagtactttgttttcttgccatgtgttacttttatttgcggcaggagttgggggtggggcgacggggaatggtaggtttgttcttttcttttctttttttgagacagtcttgctcttgttgcccaggctggagtgcagtggcgtggtcttggctcacggcaacctccacctcctgggttcaagcgattctcctgtctcagcctcccgagtaggtgggattacaggggcctcccaccacgccccgctaattttttgtatttttactggagatgggtttcaccatgttggccaggctggtcttgaactccttacctcatgatctgcctgtctcagcctcccaaagcgctgggattaaaggcctgagctaccgcgcccagccagtttgttcttttcttctcaccaattccttctgattgctgcgtgggggacaattgcagaggggtgaggctggggccggcaggtgggaaggaggctggaggcgggactcacttatgtgttaagctt

SEQ ID NO: 196666 - DNA, 1000 bp, Homo Sapiens
ccagcacctaggtgatgtgacttcttctgcctgggtcatgcccatagaagggagagtaacttactaccaagcccaccacagacatgctgagatacttctgcctgttgcttgcccacaggatgcatatgccagatttccgggcccatcacctagatgatgagactctcctcttctttctgggaccaatacacagtgggaattgtgatgcatcgtttagctcagcagctacatgatgtgaccctcttctcatgagattcctgcccacttgggtaattgcaacatataatgtagccgagtttctaggatacctgactcttctcttattcctgagacttacacagaatcggcaacatctctgatcttctcacctaggtgaggttacactcctccctgatctctcccttcagggaatattttgacatatagctagacccaacacctgggtaataagtgtgtgggctccgtccaagaagaaattgggatgtattgctaggctcagcacctaagttatgtgactcttctcttctgcctgggccctgcatacattgtgtattttgacatatcatgggctccaacacctaggaaattggcgatttctacctgtggcctgcccacaggaggccttgtgatgtatctctgcatcataacctaagagatatgacccttgtttttagcctccactttgcccacagggaaaattgtgacatatcactgggcccagcaacaaggtgatgagtttgttttgcctgcaccttgcccacagaaaacagtggaacatagcccttggcctagcactaaggtgatgtttcttttatccctggtccctggcctcaaaaatgactgtgacataaccctttcccagctctcgggtgatgtgatcatcctgctcgttctctactgacaaatgggattgttacatacatcttggcctggctgacaggtgcaatagtgactctcataccagtcaccaggagagatactgtctcttgtagctaagctt

SEQ ID NO: 196667 - DNA, 1000 bp, Homo Sapiens
acacctggttcacctttctattctttgatctagctatttcctgactttattttaaatctgcctattgttgatgtttcacagtcactcaatcttgtctcctgaccttatttcttttttacttcctttttttaagctgctttgaatcttctacttcatccctcctgtctatgatcatctatttttatttatttatttttgagacggagtctcgctctgttgcccaggctggagtgcagtggcacaatctcggctcactgcaacctctgcctcctgggttcaagcgattctcctgcctcagcctccctcgtaactgggattataggcaagtctcactacgctcggctaatttttgtacttttagtagagatgggtttcaccatcttggtcaggctggtcttgaactcctgacctcgtgatccacccgcctcagcctcccaaagtgctgggattacaggcctgagtcacagcacccggcctcatctgctattttaataaacatttccggccggacatggtggctcactcctgtaatcccagcactttgggaggccgaggctggcggatcatgaggtcaagagatcgagaccatcctagccaacgtggttaaaccccatctctactaaaaatacaaaaattagctgggcgtggtggtgcatgcctgtagtcccagctactcgggaggctgaaacaggagaattgcttgaacccaggaggcagaatttgcagtgagctgagatcaggctactgcactccagcctggcgacagagtgagactctgtctcaaaaaaaaaaaaaaaaaaggaaatatgtccccactgtgttccctcggacgactgcggcacaggctcactgaaaggaagggcctcctcaaggcagggggctgctccgagttccaagggaggccagggcaggagggaaaggcacgagcggctcccccaggcctcctgctgccaactccacacacctgcacctctgtctctaattgtcctgtcctaagctt

SEQ ID NO: 196668 - DNA, 1000 bp, Homo Sapiens
tccccctactcatatcggggccagaaactgacatggaatgaacatcatccagtgcaacacaggagcttcccagcgtcccaagcactagaacaccctcccctcccaggtgtgacagccaaacctctccagatattgtaggagtgggggcaagtcccccagggagggagaaccacggagttaagccccctcctcaagaaaaccttccagctcgcagtaccccgaatccctgtgcctctccatcctgtctcgctggactgaacctcactcattctcccatgaattaagaaaccaggggaaagagacgttgccaagtctctccccgcgcaccctggcccagtggcctccagctgccaggccagcacctccctgcctgggtacagagggcacagggagctcacgttgacttgatggtgatgcaacgctcctgctcgtccttccgggtatcagtgaagcgtgtctccccggcccgggccgaggcgatgatgcccgccttgcacaccagggagtctgtcagcgtggacttgccatggtccacgtgggcgatgacagacatgttgcggatgttggccttcttgtccatgatggcgcggatctggtctaccgtgaagttcacctgggcaagacaaggaggctcagaccagctcgtgatttccaggaacacagcatggcacggagcgttcagtccaaacgaaccagcatgcccaaggccaggagggggttggtgctggggtgccccaagcccaccgaatcttgccagcctaacaccccttaagagccaccccgcaatctccaaggaaccaccgttaataggtgtcattcatgattgacaacccagaaataaaagtgctcaggaataaaactgagtgtcaacagatttccttgataccaggtacaaatactaaagtctcatttggggccaaacacgtaagggatgaatcctctcctaaagccccctccacgttgtcaccgggccacccaaacttccccgagcaagaagctt

SEQ ID NO: 196669 - DNA, 1000 bp, Homo Sapiens
gtaaaatcttagttttggtgtgctcattccttttttttttttttcttgagacagagtcactctgtctcccaggctggagtacagtggcacgatctcggctcactgcatccttcacttcccaggctcaactacttgagagtgcctcagcctcctgagtacgtggaactacaggaacccaccaccacgcccggctaatttttgtatttttagtagaagtgcatttctacggcgcttctgtaagcacttgggcggatgtgacctcctcggtctctgactctggtggtgactcctgcaaggccggacctggttccagaccctgtaggtgcccagctgaaggtgtggtctgattgctgtgtggggagtgaaggttgccagcctagaaactgggcctcaagctcactcagaggctcttggaacaaagaagaggcaccatcttggctgggcacggtggctcacgcctgtaatcccagcactttgggaggccgaggtgggcagatcatgcggtcaggagttcgagaccagcctgaccaacgtggtgaaaccccatctctactaaaaatgcaaaaattagccaggtgtggtggcgtgtgcctgtaattccagcaactcgggaggctgaggcaggagaatcgcttgaaccagggaggtagaggttgcagtgggctgagatcatgccactgaactccagcctgggcgacagagtgaaactctgtctcaaaaaaaaagaagaggtgccatcccaatgcatgagaccggctgccattgtgtcaggggttatggtggtatccaccctgatgccacagccagctctgggccagcctcctcgccccagcggtgcccacccccagcttgatcctggaccctggcaatggtgtgacatgagctgctgctaagcgtttgcagtgctaggcccgggccggactttctccacaaacgatttagttccgttagttcacccaccctgtaaaacagctacgcttctcttccccgtttaaagctt

SEQ ID NO: 196670 - DNA, 1000 bp, Homo Sapiens
tctaatttatttgcgtagaggtgtttgtagtattctctgatggtagtttgtatttctgtgggatcggtggtgatatcccctttatcattttttattgcgcctatttgattcttctctctttttttctttattagtcttgctagcggtctatcaattttgttgatcctttcaaaaaaccagcgcctggattcattaattttttgaagggttttttgtgtctctatttccttcagttctgctctgattttagttacctcttgccttctgctagcttttgaatgtgtttgctcttgcttttctagttcttttaattgtgatgttaaggtgtcaattttggatctttcctgctttctcttgtgggcatttagtgctataaatttccctctacacacttctttgaatgtgtcccagagattctggtatgttgtgtctttgttctcgttggtttcaaagaacatctttatttctgccttcatttcgttatgtacccagtagtcattcaggagcaggttgttcagtttccatgtagttgagcggttttgagtgagcttcttaaccctgagttctagtttgattgcactgtggtctgagagacagtttgttataatttctgttcttttacatttgctgaggagagctttacttccaactatgtggtcaattttggaataggtgtggtaaggtgctgaaaaaaacgtatattctgctgatttggggtggagagttctgtagatgtctattaggtccgcttggtgcagagctgagttcaattcctgggtatacttgttaactttctgtctcgttgatctgtctccaatccatagaaaaagagggaatcctccctaactcattttatgaggccagcatcatcctgataccaaagccgggcagagacacaacaaaaaaagagaattttagaccaatatccttgttgaacattgctgcaaaaatcctcaataaaatactggcaaaccgaatccagcagcatatcaaaaagctt

SEQ ID NO: 196671 - DNA, 1000 bp, Homo Sapiens
tgtagggtttccactgagaggtttgctgttagtctgatgagcttccctttgttggtgacctggtctttctctctggctgcccttaactttttttttttatttcaaccttggagaatctgatgattatgtttttggggtggatggttcatggagtatcttattagggttctctggattttctggatttgaatgttggcctgtcttgccaggttggggaagttctcctggatgatctcctgaagtgtgttttccaacttggttccattctccccatctcttttaggtatgccagtcatttgcaggtttggtctttttacatagttccatagttctcagagtttttgttcattcctctttatttttttccctctaatcttgtctgcttgccttattgcagcaagatagtcttcgagtgctcacagtctttctttctcttggtcaattcagctattgatacttgtgtttgcatcatgcagttctcatgctctgtttttcagctccattggatcatttatgtttctttttaaactggttatctagttaacaactcctgtaatcttttattatggtccttagcttctttgaattgggttacaacataatcctttagctcagtgaagttcattattgcttactcacctcctgaagcctacttttgtcagttcatttatctgagcttcagccgagttctgtgtccttgctggagaggtttttttgcgatctattggagaagacgcattctggcttttggaattgtaagcatatttgcattggtttttcctcatctttgtggatttatctacctttgagatttgaatgaggttttttgtggtcgtcttgatgttgctgcttttttctctcttttttaacagtcttctcttctgcaggtctgctgcagtttgctgggggtcagtccactccagatgctgttcacctgggtatcaccagtgaaggctgcggaacagcaaagattgccacctgctccttcctctggaagctt

SEQ ID NO: 196672 - DNA, 1000 bp, Homo Sapiens
tcttctccattcattcaccaaacatttactgagcacatactatgtgccaggcactgtgctgattgctggggatgttgtattgtccagagatggacacggtcattgccctcctgtgttcatggtctggagcaggagacaaatggtgatggaagaattgcaggatgaagtgtagaatttgccaggtgcgatggctcatgtaatcgctgcatttggggaggctgaggcaggtagattgcttgagtctaggagtttgagaccagcctgggcaacatggcaaaatcccaatctctactaaaaataccaaaaattgccagggcatggtggcgtgcacctatagtcccagctactcgggaagctgaggtgggaggatctcctgagctggggaggcctaggctgcaatgagttgtggttgcgccagtgtactccagcttggtgtgcacacaggtgagacttctatttctggcagtgtggtcagctagatacccgactcatgttctccctgaaacctaactgtcaatattggataaaagaggaaagacaatattatttaatggattcatgaggtagccagaaaatgaggagcacacaggccacaagctaagagaagccgggcacccaagcagatgagccgcgtgctggagccagcatttgcttagaaggcatttgctgaactgggtgaacccgagtatcggttttggggccctgcagcctctgggaacagaagacaaagcttgtccgagaagttctcgaaggctgtacttcaaagtgagagtgacctagaaataaacccccttggggactatgaggaaaattacctgtctgaaacgttggcacggagcagccctcagactggttttcagcctgactttaccctatctgggtagtccaaaagcccctaagtcaacctttagtttaaagtgatggaaactggaggttccctagtgcttcacagaagcaaacacgagccttttctgaggaagcccattttcaccacaagctt

SEQ ID NO: 196673 - DNA, 1000 bp, Homo Sapiens
aaagaggctgggtgccgtgggtcacgcctataatcccagcactttgggaggccaaggtgggtggatcgcttgaggtcaagagttcgagaccagcctggccaacatggtgaaaccccgtctctactaaaaatacaaaaaattagctggatatggtggcacatgcttgtaatcccagctatttgggaggctgaggcaggagaattcttgaacccgggaggcagaggttacagtgagctgagatcatgccattgcactccagcctgggcgacaagagtgaaactctgtttcaaaaaaaaaaaaaagaaatgttgacaatggggcccacatatcgtggagagtgccactacccctaacactgtcactgtcttattctctgccagtcctagttcaggtagcctctctcattccacatcccacatgagaagccttctgaacaggcagctcaggggagtcctctgggtgagggaaattaggaggcctaggctctggctctggctctggctctgcccatgaccagctggaggaccctgggccagccctttcccccatgaccctcagtgtgcctatctggatcctggagacactcagccaccactgccaatggctgggtgatcctgggccagttccatgggctctctgagccttagtttccatgactgtaaaatggggataattccccccacccacaaaggctggggtgaacattcaacgaggtgatgactccagcctgccagcttagagccagagtgtgccctggctgcccggcctcatcctgtctcaccagaaccactgatccaacctccttcttcccctgacatgagtctctgatcttcccaactcaacatctggccccgtccctcccctgccccaaagccctgcatggctccctaccaccctaggagaaagtccaggtccctaacctgctgttcagaccctcgctttgtctcaaatcaccccactgcttacagctctaatgggagctgggcctttgtacaagctt

SEQ ID NO: 196674 - DNA, 1000 bp, Homo Sapiens
gcctttgcatgggctgtgccctctgccactacggcaggtccgagggcgccaactttgaaacataacaagctccctggatgggccggacccaggacctgcacaggcaagggctgggaggggcagaggaggggccgctcagggacgctgtacctatggaaaccgtgaacaaagggctgtctccagccacacaaacacctgggtgaatcgggcactggccagaggctggagcagcctgggatacaggtggtgggtgagtgcctggacccctgcagggaatatggggccgggggggggacttgaaccctgctccaatggtggggtggctctgcagacgggtgcaggtctgaggccccgcggtacggcccctcccactgtgtggccttggaccgacggtcaggtgcccccagagcctcagtttcctcatccccgttcccccaggggtcagcccaggtgggtgaggggtcttttgattgcttgacaattcagtatggtgggttccggaggcctcagtgtccctgtctgtccaatggggccacgaaagggtgccttgaggacaaaactccagccgttgacaggggaacactcctcccagagagacgtcaacgctaaaaaatgactcacacttgcccaggtacagctcaggtgttacagacggggagcagggcaaggaggcagagcgagaggcaggaacggcccagttccacagcatgcctgccccttcccagcatctcccgacacccctcagcagatgacctccctggaatcacacccgctcgagctttgacgcagggacctctggcagagttcttgggatcttgtaaatccccagcttctaggcctcagtttccccatctgtccaatggggctggtcatctcctttttcttgtggggctgagataactgtggggagggagggtgctttgaggggtgggggagattcaacaagatattgttaaaagcccgaggaggggattacaggacacagtacttctagaagctt

SEQ ID NO: 196675 - DNA, 1000 bp, Homo Sapiens
ggccacgagtacgcccatgtgcgcgtctgcgcccgcccctgccagcccacacaatcctcttttcttgtccttacaatgcacaagggtggcctccagcacgagctccacttctgtcctcccaccacttccctctctgcaagcggcgtgaagtccttcctaggactctgggacagagacccgggcgggacccccaaaatccagtgctccaggacttggggtgcggggggcaaagcacgaatggaggaatttcaggcactgcggagggtcagggcccatgggcgggtgcctgtctgccctactgcaaaaagcgagtggccactgactccccaagtccccatgttctaggctcctggtggaatttcaggctggggaccttgtgttctagcccctgtgcaagcagccagccccgctgcagggaggcagggacagacatcctaaaagatgattcattgttgccaggtgcggtggctcacgcctgtgatcccagcactttgggaggccgaggtgggcggatcacgaggtcaggagatggagaccattctggctaacactgtgaaaccctgtctctactaaaattacaaaaaaattagccgggcgtggtggcgggcgcctgtagtcccagctactcgggaggctgaggcgggagaatggcgtgaacccgggaggcggagcttgcagtgagccgagatcgcgccactgcactccagcctgggcgacagagcgagactccgtctcaaaaaaaaaaaaaagattattcattgtttatatggaattcagatttagccgggcacctgtattgtatcgggcaagcccacaaatgtctgcttcgatgcacccctctggggttgggtgtgccccctaaccccccagcacagtcctggccactccagtcctgctccggggcttaaagaacacggactaggttgctcagtcatcgcccaccccccgcaccgatttcccaccctctcagccccggccaagacagagatcatggaagctt

SEQ ID NO: 196676 - DNA, 1000 bp, Homo Sapiens
ggtcccatgcccgtggagcctcactcactgctagcacagcagtctaagatcgaactgcaaggcagcagcaaggctggggaaggggcgtctaccattgctgaggcttgagtaggtaaacaaagtggccaggaagctcgaaatgggtggagctcacagcagctcaaggaggcctgcctgcctttgtagattccacctctgggggcaggtcatagctgaagaaaaggcaacagaaacttctgcagactaaacgtccctgtctgacagctttgaagagagtagtggtcctcccagcacagagtttgagatatgagaatggacagtctgcctcctcaagtgggtccctgacccccgagtagcctaactgggaggcacctcccagtaggggccaactgacacctcatacagccaggtgcccctctgggatgacgcttccagaggaatgatcaggcagcaacatttgccattctgcaatatttgctgttgttctgcagcctctgctggtgacacccaggtaaacagggtctggagtggacctccagcaaactccaacagacctgcagatgagggtcctgactgttagaaggaaaactaacaaacagaaaggacatccacaccaaaaccccatctgtacatcaccatcatcaaagaccaaaggtagataaaaccacaaagatggagagaaaccagagaagaaaagctgaaaattctaaaaatcagagcactcttctcctccaaaggaatgcagctcctcaccagcaatggaacaaagctgaatggagaatgactttgacgagttgagagaagaaggcttcagacgattggtaataacaaacttctctgagctaaaggaggatgtttgaacccattgcaaagaagctaaacaccttgaaaaaagattagacaaacggctaactagaatagacagtgtagagaagatcttaaatgacctgatggagctgaaaaccacggcacaagaaccacatgatgcatgcacaagctt

SEQ ID NO: 196677 - DNA, 1000 bp, Homo Sapiens
cataaaaatagcgtcccatataaagatcgcactccatataacaacaggcaaataaatgttccatgaaggaataaagaaatgcatgtaaaaattaacagagatggatgatgttaatattaattccactctcttccttgaattttccatgttgattcactggctcctggctctgctgccccttccagtcaactgtaagtcatatctccttctccctacataaatggggagcccgcccttcaacctagagaaggaagggaatgaaagagagaggcaaaactgctgacgatcacattcaacctggggcagattcagatgtcctcaattcaaacatgacctcttcacccagaatctgcagattgcccggggtgggaacggtgcaactggatggactttgaggaggccaacaagcctctgtcattaggtctaaaactgggtgtgctgtcagagagaaagagaacctgtgtggtgttctgggaaatagctttgatcagattttcagtaggatcaatgacctaccacaatctaggggcctttgctctagaatgtacacctgggttagattgtgtgtatttattggtgggttttagatgagaaaaatatggtacagggtgggtaagacgtcttcctttcccagaattaacatccagtctccggttgagaagtggagatgacacttggttattatggagaccttccttatgctagaaattcagctggagaagggagggtctggattccccaggccactggtacccctgaagtttctgacttcagggtaaatgtgcctccaaaggggtccaatgcacttagaatgaattgcagctccccattctggttccctaacctatctcaggacctatggggtgcaatgaggtaccaaggatgacttaattcctttcatattctctctgaaccttcattggcaatatggttcccactggctaccatcggtcctgtccttcctgctgcttgtctgccaacagtgctgaaaggtaagctt

SEQ ID NO: 196678 - DNA, 1000 bp, Homo Sapiens
tgaaccaaatgaacattataccaaactgcagactacacattctgttcaaatgattacatcacatttatcagaataacattctgggctataaagtaagtatctataaattacaaaggattaacataaaacaatgtatattttctgagcctttacaattagcttagaactcaaaaagaggcagttctcaaatgtttccaaatacagacatactgtggagatattgcaggcttggccccagaccaccatgctaaagtgaacattgcagtaaagtgaatcacatgaattttttggtttcccagtgcatagaaaagatatgtttatactgtattattcagtgtgtaatagcattatccctaaaaaatacggtgcataccttaatttaaatatacttcattgctaaaaaatgctaatggtcatctgagccttcagagagtcataatctttttgctggtggaaggtattgccttgatgttgatggctgctgactgatcagggttgctgaagggtgggatggctatgacagtttcttaaaagaagacaataatgggccaggtgcggtggctcatgcctgtaatcccagcattttgagaagctgaggtgggtggatcacaaggtcaagagatcgagacaattctagccaacatggtgaaactctgtctctactacaaatacaaacattagctgggcatggtggtacgcacctgtagtcccagctactcgctcggcaggctgaggcagaagaagcgcttgaacccaggaggcagaggttgcagtgagccgagatcgctccactgcactccagcctgggtgacagagcgagactctgtctcaaaaaaaaaaaggcaataatgaagtttgccacatcaattgactcttcctttcacaagagatttctctgtagcatgtgatgctgtttgatagcattttacccacaggggatcttttttcaaaattggggtcaatcttttccaaccctggtgctgctttatcaactaagctt

SEQ ID NO: 196679 - DNA, 1000 bp, Homo Sapiens
acatgacagtataaatatctacccagtgatgaccacatcaatggcagctcacagttgttgagtgttggctatgagccagggcctgggcttagacgagggcttttactcacgtggactcattcagtcctcacagcaaccctaagacatccatgccgttttcccttttcagggcttgattttacagaggagcaggctgaggctgggccatcccagtgcactgcccgcttcctgtcaaggtgtcttctgccctggaggccacctgtgtccccctacttgagtagtttcttgcactttgtcaattgctttatggacattctcttactcagtccttgccagcccagggagggaggcttttcaaccccgtattacagatgaggcaactataaggactggccaaggtatgttagtagccacaccaggacttgaccctagactctttgcacccaagcaggccacatcttcagaatacatttttttttttttggtccatttgtatatacccctttacagactgttttccccatctgtggcttctttcttgggtccctattagagccactaaaaaattgtttaaatgcagttaaaaactccttactccgtttctgctgagttcctgagtttccatagggagggtacctgtataggtgcctgggtcttacttctagaggttcaggctcaggaagtctcaaatgaagtttgagctgctcactttttaagtagtgtcctcgtgattcaagtatacaggctgagtctatggaaccctgaatccaacagaggtaggccccattcccaaagggcccgacatgaaggaggtgttcggtaaatggaagccgatgttgttactgctctcaaccacatatgtgctagagcaccgctctgccagcaccagcccaggacacacctgccatcacttagaggaagggaaggaaacattaggagcaaaactgcacttgcgaaaagcagagtctcctgatgtgtagagcttgctggttagaagctt

SEQ ID NO: 196680 - DNA, 1000 bp, Homo Sapiens
ccaggcgcagtagctcacgcctataatcccagcactttgtgaggcggagacgggcagatcacttcaggtcaggagttggagaccacctggccaacatagtgaaaccccatctctacttaaaatacaaaaattaggctgggtgcggcaacaggctcttgggaggccgagacgggcagatcatttgaggtcaggagtttgagaacagcctggccaacatgatgaaaccttgtctctacttaaaatacaaaaattagccgggcgtggtggcgggcgcctgtaatctcagctgcttgggaggctgaggcaggaggatcgcttgaatgcaggaggcggaggttgcagtgagccgagactgtgccattgcactccagcctgggcaacagagacagactccgtctcaaaaagaaaacaatacaaaaaaagttgagttcaggccccaaagtgcagcccacgaatacaacaaggctgagcacagtaactctctccccgtcctgcatttactcagtccttccgtgtgcatttttcttatcctctgctgtacgctaagcggtgaacaaatagacccgattcctaggtctagaggtgggaaatgaacaataaacatgcaaacagaaaaatcaagatctcttcagaaagtgatggtgagctagagggcggcagggctgggatattttcaccagggtgttcagggtgggcttctcggaggaggtgacatttgtgcagagccctgcaggaggtgaaagagctagccaggtggacttccggaagcagagccttcagacggagggaacagagtgtgcaaagggcctgaggaaggtgcagtgttggtttactggaggaacagcaagaaggccagtgtggttgaagggcaaggagctgaggtgagagagtagatgaggggaggattctgggcatgaggccaaggtcagggctggactttatgctaaaggcggtgagaagccttgaggtgtggagattttacgtaaggaagggtatgatc

SEQ ID NO: 196681 - DNA, 1000 bp, Homo Sapiens
catagcaatgctatgagatagatgctaatatcaagcccattttttttaacacaaacaatcccatagtatttattgccatcttgtagtaacacaacggtaatcaaaacaatatgaataaatcttcacattggacaaaggacatctaaaaacaaactgtatccttctcaacaatttctcacttcattgatcatttctagttggagacactttgcagcagagtaatattacctccttttagcatgatccgacccagttgttttcttgactttgttttagaatgaatctcttctgcatcatctaatacaaggttcatatactcatcaaaaccaatgatacagccttctatccgcatattcacttgctcatagagccacacctgaatccgcgatctattttgtaagtatctgaagatgaggctgatgggctgcaccataaccttctgcactttctggccctggccacggtacgccatggtggaatttcacccattttttttttttttttataatttattttgttttgttttgttttttgagacagagtctcactctgttgcccaggctggagtgcagtggcgcgatctcggctcgctgcaggctccgcctcccgggttcaggccattctcctgcctcagccccccaagtagctgggactacaggcgcccgccaccacgcccagctatttttttttagcagagacggggtttcaccatgttagccaggatggtctcaatctcctgacctcgtgatctgcctgccttggcctcccagagtgctgagattacaggcgtgagctaccgcgcctggccctaattttttgtacttttagcagagacagggtttcaccgtgttagccaggatggtctcgatctcctgacctcgtgatccgcccgcctcggcctcccagagtgctgggattataggcgtgagccaccgcgcccggccctaattttttgtatttttagtagagacggggtttcaccgtattagccaggatgatc

SEQ ID NO: 196682 - DNA, 1000 bp, Homo Sapiens
caggcactcgccaatgtccaggacctaaagatacaggtgttgggggtgtcatgccatggtggggacagggagatgtgactcagtcctaaataggggagtctcctctatgaatcctaggataccctagagtctgccaatgactcttgcttggagaccccagaagagtcctgttgggtcctaccaggtgtcaccaaagcatctaacctagcagcctccttagaagatcccaatatcctactaaatcccaccaaaggatctgccaaatcccactaaaggatcctattcaagtatctgccacataaagatccctccaggctagatgtgatgcctcacatctgtagtcccagcactttgggaggcccaagtgggagaatcccttggggccaggagttcaagaccagcctgggcaacatagcaagatcccctctctacaaaaattggccgggcatgtgcctgtagtcccagctactcaggaggccaagatgggaggattgcttgagcccaggagtttgaggctacattgagctatgatcacaccactgcatttcagcctgggaaacagagtaagaccttgtctgtaacagcaaaaaaagatccctcagggcaaatgagattctactgaaggatcccactcaagggttttccatataatgattccaaaagatcccttcagggccatacaagatcttaccaggcacctcccctataaagaccccagcagatccttctcagggacccacgaaatctcacagggatctcctccacatggagtccccgtgcaggaatcatttccagtctagaatttctaaccaaggtccccatgaatcgtctggggtgggagtctctggatctccaaagaggttctcaccagatcccacagacggatccccctccagatgccatcagatcctaccagacacattgctcatagacatttcacccaggaactagggatctagagcaaacccccactaccctctctagtggctcccattggatc

SEQ ID NO: 196683 - DNA, 1000 bp, Homo Sapiens
aactgaaattggggttagaaaaacaacacaggaagaaagttcatgtattctcaggtacttgggtggcccaattggaaagatcacccaggtgcgaccagggagattgaggccgcagtgaatcacaatcacatctttctgctggacctgaatgatactgccgccagccagagccatctggacggccttagacgtgggaaggcgagaaccatccgttcgacttcagacatagcaaggcgatagccatctggtcgaccttagacatgggaaggtgagagccatctggtcgaccttagatattggaaggtgagagccatctggttgaccttaggcatggcaagctgtggactcattccaatgcttctggctgagatgggaagatcacctggatgagactgggaagatcgaggctgcagtgaatcacaatcccatctctctgttggacttgaacagcactgccgccggtgcgagccatctggtcgaccttagacatgaaaaagcaagagccatttgtcatgtctccacctcagacattacaaggtgagagccatcttgtcaaccttagacatggcaaggcgaaagccctctggtcgacctcagccatggcaagaggagagccatctagtcgacttcagacatggcaaggcaagagccatgtggtcaacctcagacatgaaaaggcaagagccatctggtcgacctgagacatgacaaggtgaaagccatctggtcgatctcagatatggaaaagtgagagccatctggtcgaccttagacataccgaagcaaatgccctgtggtagactgtagacatggcaaagcgagaactgtctgggcaatttcagacatggccaggctagagccttcttgtggaccacagacatggcaagaggagaactgtctggtcgacctgagacatgaaaagatgaaagccatctggtcgaactcagacatggcagagtggcatctggttgacctcagacacagcaaagcaagagtgatc

SEQ ID NO: 196684 - DNA, 1000 bp, Homo Sapiens
caggagggccagttagggcagggccagcccaggcaggttgcgagagtccctactgggacgtggaccacacgctgacccccacggccgcccctgcaggccaggatccctgagccaggacccggcactggcttccctcctggggaccctcaggcctgtgtgagacctgggctgccctggggtgaggtgcctgggaggagagcaggggctgggccacctttttcatgaccctgctaagcccactgtgggtggtgaggaggagtacccagcagggggaagggccgccagaccactcggcatggctgaggcctcagtactcagtactgggtactcaggtggacgcccctcccactgctcagatgctggggacaggctcaacttcaggcttcagcgtgagccccgtccctgacctgcagagcccccttgcgttggggcaggacagcccggcgccctcgggtcaggccatcctctgcgctctgccggggctgctgcatcggcctctgcgtgcctccactttggcctcacgtgtccctacccaggatgcgggtcctgctgccaacacccagatcccagggaaggggcttgggctagatcctgggcaccagtgcagacaggagtgtggggtggggcaagggcccagtggcggctgtgcccgctgatgcagagctggggcaccttgtccacagggtctgccccaccagagacgggctgggcccaagctcagacctatgggtgcaattggtgcctcctcaccaaggtcttttttatctttttttttttttggagacagagtcttgctctgtcgcccaggctggagtgctgtggtgcgatctcggctcactgcaacctccacctcccggattcaagcaattctgcctcagcctcctgagtagctgggattacaagtgcgcgccagcatgcccggctaatttttgtatgtttagtagagacgggggtttcaccatgttggtcaggctggtctcaaactcctaacctcatgatc

SEQ ID NO: 196685 - DNA, 1000 bp, Homo Sapiens
aaccgggctggggatggggaagggggattctgtaagtgctcccaccctctgctggaggccagagcctggccctttggggtgcagatggggggaaatggaggatttcagaccccggagtccccagtcccctgacagacacccccccaccccccaccccacctccgctagagtcctgccaccggggcctgtgggattctcctccctccactgagaaccattgtgtggatgggggcaatcgaggcccagcgggcaggggatctcctcacctgctggaacgtccctcagaatgggggaggggggctgggagaatggtggggtcggagaaggggagagccttggagaaggggcttccagaggaaacagggtgttagagcgggagaggtaaccagaaaggaatatgggcccaccccagtcctctctgctcccctctggtcccatccaaggagctgggagcatcgctgtgcctccccctcctccctctcctcctccccctcctctgcctccccctcctcctcccttccctccctccttctcccccaccttcctattcttccctcccttcctgctattttctctccctcctccctcccctcagttttctccccacgcccctccctctccctcccctccctccccctccctccacttccctcctctctctcctcccctcctccttcccctctccccctcctctccctacccccgcctccccgctgttctctcccctcccctccccctaccctcccccgtcctccgcctcattaggcgcggccgcggcgcggggcccattagccgatcaattagccgaggtcgcccgcggcgcagtcgttaagcgcggggcggccgcggcggggagggggctcggagcccgcgcctccgcccgcccgccccggcttcccggacccgagcacgcccccccaggacgcctcctgccacccgccccccagcgggccccgggaccctccccaaaccctgcgggggcctgggagacccccggatc

SEQ ID NO: 196686 - DNA, 1000 bp, Homo Sapiens
gtagagcttaacactggggagaaggtgggactgcgggatacagggcttcataggaacccgacttgttcccggggcactggggaactagagaaaattttggaataagggagggggagggtcaagtttgcgatgtcatgtggatgaatgggacgggtgaggctgaggctggacccgacggggaggccgcagaaggcgtgggctgaaagcgtggaatggtgtgggctgaaggcgtgcagggcgtgggagggggatgttggggcaaagtccaggaccctagcccactcctagtttgggagaggagtctctctcaccctcagggttcgtccccagcctggtgatctgctgggagctgccagccactcatctcttgaactggcccaggcctggggccctgtgtccccaggcagagctctcatagttccccgttagcctagagggtcacagctcccagtcccccagtgtgggtcctgccactcatgggccctggtgggcctgagaatctagtgggcctcctggggtaggctctgtccctgaatgggcagaaacaacctttcagctctcacagtggggtgacatagtggacgagggatgggggatgctgggtctctggacgcatgcctgggggtctccctagggggttgatggttttggccttcaggcagaaagaacctggtggcaaagttccagaggttagcggagcctagcatggaggcggtgagtggggctgcagtgtgtgtgcgtgggggttatgatgaagctgcagggagcagatcacgcagggccgtggggagagccagggctttctgcgggaggctctggggagccctgggaggttccgagtagggaaaggacagggtcaggtttgtgccttaggaacacccctctggaagggcaggacaagaggctgtgaggccaggtggaggctgagccaggaacgtgggcaggagaggccaggtcagggctgggtggggctggagggtgagaagggaatggctggatc

SEQ ID NO: 196687 - DNA, 1000 bp, Homo Sapiens
ccagcccaatagaggtttaaaagcttccaccaggccgagagcagtggcccatgcctgtaactccagcactttgggaggctgaagtgggagaatcattggaggccagcctgggcaacatagcaagatcctacatgtacaaaaaaattaaaaattagctgggcgtggtggcgcaagcctgtagttccagctacacgggtggctgaggtgggaggactgcttgagcctgggaggttgaagctgcagtgagctgtgatcacgccactgcactccagcctggatgacaaggggaggccagagaccctgtctcaaaacaatgacaaaaagagaaatagagtggagggcctagcctgggcctctggaacgctgcatgcgctcaagtgctggagatgagatgattttttttttttttttaacaatccactggcccaaagaatcagccagaggccttaacactgagttccctgtcaacttgtccacagcagcagcagccgaggcccagccaacaagccactgagccacccctggctctgcctgtcccggtccctgccatcaagctgcaccccacagccaccctctgcagacaggcatttccagataccaaagccagttcctgtaattcctcggcaaactgcaaagcattttgatagctccacacacacccccactgtcacccggcaccctgagccaggagggctccctgggaggagggtcagcccgggccccctcagagaggttcgcagctggcatgtgatcaggccctggggactctgagggacccagcctggcacacagcaggagtaaaggattaatctgggcagtcatccagcaatcacgctgccaaggccagggagtcagccgtcctcgcccaccacagggcctcctaactgtgggcccactggttgtacttgcgggtttttctagagagaggttctgcctccctcccaagcctgtgtcccctactgaagctggagctctgagagagcagagacttggtgtgatc

SEQ ID NO: 196688 - DNA, 1000 bp, Homo Sapiens
tctgacaaggaggtgatccccaggctggtgtcggtgaactgggaattcgaggggtggaggccttgggtccggagggaggaaagggtggaagacaaaccacacatatagtttttgagaaactgatcttttgtttcaaatgtaggaaggtcagtagtggaagtcagataaggtagcccatagagcatctcataagggaacaggccaagatctttccgaggggcagttcgcattctttttttttttttgaaacggagtctcgctctgtcgcccaggctggagtgcggtgggcgtgatctcggctcactgcaacctccacctcccaggttcaagcaattctcctgcctcagcctcccaagtagccgggattacaagcgggcgccacgacgcctggctaatttttttgtatttttagtagagacggggtttcaccatgctgcccgggctggtctcaaactcctgagctcaggcggtccacccgcctcagcctcccaaagtgctgggattacaggcgtgaaccaccacgcccggcctgttcagattcttagtaaggcaaagggaaggcattctgtgcgtggtaaccaggtttccaagattaattcggttaggtggtttttttagagtttgattcattctttctaccctccctgatgagggtggatgccagggaaatattcccatttcattcctagtgctggggttagccccgtaatgatgtgtgcagtgaagggggtccccttgtccgaatccacgttctctattagtgcaaacctgggtgtgacgtgttcccacaggcctctgactacattgctggctgttgcgctcgggaagggggtggcctctacccagtgggtgagatggttgactgttcccagtaaatgtttgaggtgggctattgggggcatttcagtgtagtcaacccaaacactttggaacggcctcaaccctgggtttcttccctgggaggttgcctcttttttttgagatggagtcttgttctgtc

SEQ ID NO: 196689 - DNA, 1000 bp, Homo Sapiens
tcttcttgtgaatttcttgttcaagtattttccctatttttctattatttttttctttgtcaaagaattgtaagaatatctatcatctacacatacacacacaaatacatatgcatacacacatgtatagcttcagtttgtggtctttatggatatatgtatacaaatatcttctattgtgtggcttgccttttcacttttgttttctatggcttgtatttttatgttcctaatgatgccttctgttaaacagaaattcatgagaaataaatgtttagcaaatttaaattgttctggattaattcacattttttctctttcttcttgtgtctgtattgatagttataatttaccaggatatgatctctttaattaaaaattgtcataaagttgctctttctactactttataattctttaaaaaacaaaaataactctactcaggccagatgtggtagctcatgcctttaatcccagcactttgggaggccgaggcaggcagatcacctgaggtcgggagttcaagaccagcctgaccaacacggagaaactctgtctctactaaaaatacaaaattagctgggcttggtggcgcatgtctgtaatcccagctactgtggaggctgaggcaggagaatcgcttgaacccaggaggcagaggttgtggtgagccgagatcccgccattgcactccagcctaggcaacgagagtgaaactctgtcttaaaacaaacaaataaacaaaacaacaaaacaaactctactcagtttatagccatgaactcttttcttgttcctaactctatttcatttggcccattgtatctttttcacttgataaatattgtcacagttttgtctattttcataacaagttcagatccttaatatatttccatcattgtagcatcttgattaatcaagagagacttcattctacatcactaatatatttaaaactcttctaagttttatcgagaatacggaagacttggaattc

SEQ ID NO: 196690 - DNA, 1000 bp, Homo Sapiens
agggccttgctatgttgcccaggctggtctcaagctcctgggctcaagtgatcctcccacctgggcctcccaaattgttgggattacaggcgtgagccaccacgaccggctcctaatttttatttactctgtctcccctcaatggaacgaaagctccatgagatcagaggctttgttttgacagatttcaacaaatgtacaatattgtatgatcaccaccacaatcaagatctaagacagttccgtccctccataaaactgctccagcctcttaatcaacttcgcccatcacccagcatcagcaaccactgatctgtcttctctccctatagttttgccttttccagaatttcatatacagggaattgccgtggtttgaatatctgttcctccaaaatccgcgttgaaatttaatcctcagtgtggcagtattgagaggtggggccttgaagaggtgattgggacatgagagctctgtcataatgtcctcataaatgaattaatagattaatgggctcaggggttaatgggttaatgggttaccgtgggagtgggactggtggctttataaaaggaagaagagagacctgagctagcacactcaggcccctcgcgatgtgatgccctacacggcttcaggactcaacagagtccccaccagcaagagggttttcaccagatgcagcccctcaacctcggacctctcagcctctatgagaaatgcctttgtgggacttctttcacttaagcatattgcttttaagattcatttatgcgcccccccacctccccgcttttttttgtgagacaaggtctggctctactgcctaagctggagtgcagttgcatgatctcggctcactgcaacctccacttcccaggctccactcccacctcagcctcccaagtagctgggactacaggcatgcaccactacacccggctaatttttgtattttttgtagagatgggtttttgccatgttgcccaggctggtctc

SEQ ID NO: 196691 - DNA, 1000 bp, Homo Sapiens
atactgtaattcacctcatcaagagttaattttatggccgggcacagtggctcacacctgtaatcctaacacttcgggaggcagatcactttgagctcaggagatttgagaccagcctgggcaacgtggcaaaaacccatctctacagaaaaatacaaaaatgagctgggcgtggtgactcccgcctgtagtcccagctgtatacatgggaggctgaggctggaggattgcttgagccaggtagcagaggttgcagtgagccaagattgtaccagtgcactccgccctgggtgacagagcaagaccttgtttcaaaaaaaaaaaaaagagttaattgtaccaggaacatgtggtgtcaaaatttaaaatatgtgaactctttgacccagcaatgctattttcagggatatatcctaagatcatcaccagcaaagtatataaggatgtgcatgcaaaaatattcatcatggctttctttatacaatgaaaaattggaaataaacttctcattaatgggatgctggttaaagaaaatcattactgtaatatgcagccatctaaaagggtaatttatatgtatatatatttacataagaaaaccctcatgtcatattgctgagtaaaaagaaagatgtcaatgagtattcatgatgtgattctatttatccttgcaaatggtggaaattcaattatatggtattttctctcttttctgtttgtttttcatatatgtatatatttcctttgaaatcagaaaaaaatcaagctattttcatcagaggaaaaaaatcattactctgtatttcagtcacactaaaatagtcacccaagaagccaattgtagctcttttatttctgtgccttctgttggaaggaaaactgtacataaacagaccacattacagagaaaatttgaatggatggtgtctggtgcctaaaccaaaacagaggtgaaatattatacaaactgaagaggatgactttatcatagtgtttgaaa

SEQ ID NO: 196692 - DNA, 1000 bp, Homo Sapiens
ctcctgagctcgtgatccgcccgccttgacctcccaaagtgctgggattacaggcgtgaaccactgcgcctggccaggccaaattacttttaaggttcaattatttaggttgttttgcatgtaggtaattttcttagaatgaaaaaaatatatattttgctggaattttttcatagtattctcccaaacatgaaatgatagcaggatacataatctcccacactcaaatttcccaacatgattcaaacaaaaatcattcgtgcaaaattatttgagcatttcatcagtttcctcaaaagcctctccaaagcccctgatattcaaataattttcttttgaagaacctgagcaattggtttgattgaatttacattgtagactcatataattagcatgcggctgctctggaaaaatgggatgtacaaggatgtaactagcattaagaggagaaatgtctgctagagtggggactaatttgataatattagtgatattttcatcttaagatgaccttcgcttccctgtgcaacctggcaacgcaaagactttgataatgagagctgagctaatgaggactcactgccatttcgcagacgttaactatcctgccttccttagggaacaaccccgggttagctgatctgatgagagtatttggtgaattttgaggcagaatcctaggacagcccccagtgatcgctgccacctggtactcacgctctcgtgtaattctctccccttgggcgtgggtgggacttgtcacttgcctttagtagatagataatgcgatgtatgtgattacatgtacattagtatgttacagaaggttgtaatatccttcttgctaacacattcttccttcctggttttgatggatctaggtgccctgctctgagctgctctatggagtggcctatgtggcaggaactgaagataatcttcaatgccagccagcaaaaaacggaggtcctcagtccaacatcccacaaggaaatgaatt

SEQ ID NO: 196693 - DNA, 1000 bp, Homo Sapiens
catctcacatccatctcccttccctcaacgggaaaatttccaccctgcaggctggcaggaacattcctgcagatcggctcactcctgcaacctgcggccatctgtccccaaggtgggagaaacatgacagcatttgggaagagggaggacggagaaggttggagcatgcagtccacagatctgacagtcacagagctcttcaaggcagggagccccgaatcccagggattcaggatcttcatccagggctgggcagaagtgaaccccccacccccgctgctccgttccaactgtggaactgcaaagccgtcaacactctgactctaaatctcaggaccacacagtcttcaagtctggggactttattttcttttagctgaagcttcacattttaaagaaatgaaatcctaactgcacaaatgataagaaaatgtattctctttaaacaaaataaagccccctttacctcccaccctcctaaatcttattccccgttccaatctctgcagaggtgaccgctgtcatctgtttggagtggatccttccagaactttttctatgcatttatctacatatatatgcctatagaaaataggaagtattacatagaccctaaaaaaaatggcatcattttacaaatttctttctttctttttttttttttttaaagacaaggtctcactatgctgcccaggctggagtgcagtggctttcacgggagcaaccatagcacactacagcctcaaactcctgggctcagcgatcttcctgccttagcctgggactataggcatgcaccaccaaacccagaatattaagaattttttaataaaagatttaaaatgtgccaaaaggcataaagatgaataccgtgaactctgatatacccctgacccactacaagaaacagaacatgacgaatatgatggaagcccagggtcaccacctctgttaaatcccctcgccagccctgccctcctcccatccccatggtgaattc

SEQ ID NO: 196694 - DNA, 1000 bp, Homo Sapiens
gaggactgagccagcctggggcgaggggggaggctttgggggaggctggaccctagggtatttgcagccccactgacagggtttttccagggtgcgtgtggcagagtgtgtgtggtgctggcttgctgaccccctggggactgtgcacagcctgcctttcttctcagcttttccactccccccaggatatttcaggactagtctttccctcacttgctcaggccaacgtgtatccagcgccctggcacctgaagatcagaggtggtgagaggtggcgcatcaagcacagtcctgatgacaccatcctatggccaccaccctgagcctactgtggctcctgagacctttgtgagtcttctttctatgcataattgttcttctcctcaggatgtacccgctccagccctgtgtgaggatagcatagatgatcacaataacaaaatgattagcttttatgtagtgctttgcagatccctctgcccttttacttgtttgtgtgtgtgtgtatgtgtgtttgtgttttattagtgcccattgagggcccagcctaattctgcacttcccagcaccatcacctttgaaattccagcccttggaagagaagagcctccatgccgagggcttgagtatgggagtctgcccttaaacttcatttatgtgcagaaggctttacacttcattgagccttcattgcactccctccatatgctaacaatatctgaggatgtgcttgatcccctggccagactgtcaacctcctccaagcaggcactatggtttataaatcattgtattgccaacatttggcagatgcctggtatagaagaggtgtcagtgagtattcaaatgacccaggctttcatgtacatcatctcatctgaacctcatcacctccctgaaaggttaagtaacaataaccatccctgtttgataggcaaggcaactgagtctgagaaagtacgagatttgctgaaagtctgggtaggggcagaaaagaatt

SEQ ID NO: 196695 - DNA, 1000 bp, Homo Sapiens
ccaccacgcctggctaattttgtatttttagtagagacggggtttctccacgttggtcaggctagtctcaaactcccgacctcaggtgatccgccctccttggcctcccaaagtgctgggattataggagtgagccattgtgcctggctttttttttttttttttttttgagacaaggtctcactctgtcacccaggctggagtgcagtggtacaactacagcttgacctccctggctcaagtaatcctcccacttcagcctcccatgtagctgggactacagatgtacacctccgtgcctggctaatttttttattttggggatctcactatgttgcccaggctggtctccaactcctgtgctcaagaggtcctcccacctcagcctcccaaaatgctgggattacaggcatgagccactatgcttgccttgtttaagaatatttttattttcctgtcattacttaactgaattttttattgaaatgattatagattcacatgaagttttgagcaataacacagagagatccatgaaaactttccccagtttaccataatggtaacaatccatgatcttattcagattttcccagtctcacttggatccatttgtgtgtttatggatttagttctatacaatattaccatttgtggctttgtgtatctgtcaccaagaagatacagatcagctatatcgcccaaggatcccttatgttgccctttcattcatttatttttaaattttaattcttttttttcctggacaggattattgcagtgtatgttgaccttttattatggtcagggttttttgtttttttgtttttttatatgccaaataatgttctacattcctagattttattttattttgtttctcacacatagaccacttaggtagaaaatatgccattgttaggctgggcgcggtggctcacgcctgtaatcccagcactttgggaggccgaggcacgtggatcacctgtggttgggaatt

SEQ ID NO: 196696 - DNA, 1000 bp, Homo Sapiens
acctgctctgcaaaatggcacaggctggcacctatgtggccactgtctcctacccagtccatgaggaacactctatccagggtctgtccaggggtactggctcctggtcttcaaaggggacccaatggcctctgagtgcacagaaatggggggacaccatgggaagttgctaagctgtagcaaagggagacttgctgtcacgtctgctgccccaagacctgagtggaccttgggaaccacagaaaaggggcttgggggtcaccacaggctggggatagtcacctctccagtaatccctgtctcgtgcatgtggcctgaggcttgtccagctgacattttcaccaggagaggaggctcactgcatccctgcctgccactctaacctacactccctgtagcctctctagctgctctggcctggccccagtaggcaaagccacattcagtggtcttcacccaaatgagctccttgctctcctttcatggtaaagggaagaagtgggatgtttttggctcacagccagtcatgcatcagccagtgtcacccataaaagcctcctctcagaattgccatggccaaggatactattggcatcaggtcattctaaccagacacgtcctgctaagtgacagcctttctttcttgttgcctcagtttccccatctgtaaaatggcgtttctggaaataggatggggaagagagatcacccagtttcttcttgtgctaaatccagaagtgagagtgaaatgttgtaggcttcacagagcacaggctatcattgaggttgggaagtttccacaaacagcctttgtggaggtgcagggcagagccacgtgatgtgatgattacaacacccaggggtggtgttcactgggtgacaaaaagctggtgctgaagtttctctccaaagactctttgcatctttgcttaagttgcctttttagctgcctgaatctagattgtggagagcctcaggaatgcctgccagggttgaattc

SEQ ID NO: 196697 - DNA, 1000 bp, Homo Sapiens
ttaaaataaagccatagggatcaaataacatgatcatttactaaacatagttgcagtatagacttgaatttctcccaaacaccccctgaacgtctcattaagcaacgaggagagaaaagcaaaacaaaattaaaacttacagatgacatctttggcaaaatcacatgacagaaaaatcttgcccccaattggagaggactgtatactaagcaaaaatctgggcatatggttttgagattgactggtgaaactgggaacaatacttgcaggctctaagtgctcataaacataagaggataaagaagtgctgtggtggtcctcagcatttgaaaatctcaaaaatgtccagcaaatgagctcttccaaaaggatatagcctcagcccaaaggaaagtacattaagcaaataaagatccacttgcataagagagaaagaaggctctgatcgtagaggaaagggcttagagaaagcagacacaagaaagtgatgcaacagctaaatacagcttcccaaaacctgtggcgttctggggctggaacagaaggaagcagaatgtcctcctggaccagacttcgctctgacacacagaagtggcctcaaagaaagtgctactttgagccatttgaacagcaacagagggacccctagagctgcaaagctataaaagctactctgccattgcctctcccttcagaggatcccacaagtcatcccagaaagctatacttacttatatagagagacaaaaaagagatatgtgctaattctatacacagttatgagcaaaaataaaagacatcaatgacaaagatgaatccatggcgctcagggccatgctgatgatagcaatctccctcctttttgtttcaagtcttttttttattaatgctaacatttcagtgtctgcatctaaatatcagaaaccacattactgacttcaatattttttaggcttttaaaaaatgcgtcctttcatttccacagtaaaattgggaattc

SEQ ID NO: 196698 - DNA, 1000 bp, Homo Sapiens
caccctgatcatctttagagcccacccctaacccaggtgggggcagcaggtccctgtaagcatgctggatgaaaccaggcggctgacagaacgggagggaggctgcccttgggcttccgcatttctggattcgagctctgctcagtcacaatgggctgtgtgcccttgagcaagttacttcacctctctgagcctcagtgtcctcttatcaaatgggatactaagatataattcaaaaatatgttcttgagaattcaatgggaagatcctgccggagtctggagcctgtctatttagtttgacaataaataattgggctagtatttacactgatctctagtaaggggggcacagagcagggaagggtgtgccgggagggctgaagtgtgcccctgggcatcggggcgactgtgccagcacccgcctctaggtttacagcccttcctgagaactagaaaaatcccctcctctgagcagatgccatccttggactcatgggcttggcacctggtttggccccacagaagagactcctacccagttctcttttctagcccagaagaatggcatttctggaccatctggaacatctggatcatctcccctgctgatgcacaaacagccaggcctccggagaaggggggtgggacagggtgttgcaggcagagggaacggcccctgcaaaggatcatcagggagactgagcaggtcaggatggctgccggaacaagcagcgtctcagtggacctgtggagggcaggggatgagcaggtgaaggaggagatgggtggagagcgtgtacctggggcaggcctggaggcgggagggaggggctggagccagagaaaggggcggctggtggagggaggtgaggctggaggggctgggcctggtactttggatgaagccaggtcactgcaaagatgaaatgtgatagcactgggcaaaggaagcaaagcccatcaccatgagaccagctcccaatccttccctggaattc

SEQ ID NO: 196699 - DNA, 1000 bp, Homo Sapiens
cggggctttgttgcatgaccatctttccttgggaggaggcggggtgccatgggtgcatgaacagaggtcgtaacgtcatctaggcagtcaggaagggaaggcttcctggaggaagggacattccagctgaaccacaaagaatgtgcaggaaggggaggagctcaaaaatgagcaaggttgagggtgggtatgagaagggggagaaggcgttctagagtggagaggagggggtgaggtgtgactgcatggaaataaaccagggcagggcccgcttgaagatctgaacttcagcatcgcaaagtggtggcgtgagatgcagagagaggcaccagatgctgatgtttgttctctgtgtggcggcttagagaatggagtggatgggagggaggccaggtgagatcctgcctgccaggcaactgcctattgtggttaccatggaaacattagactgcagacccagcagcctctagttcggcccctcttattaaagatgacgagactgaggaccagacaggggaagagatttgctctttcctgctggtggcctggaaacctctgtccaaaaatactgcagtaaaacacacttaagataaaagtcactatttactttgcaaccatttttatttattattattttagacagaatccctctctgtcacccaagctagaatgccatcttggctcactgcaacctctgccttctgggctcaagcgatcctccctcctcagaatcccaagtagctaggaccacaggcacacgccaccttgcctggctaatttttgtattttttgtagagacggagtttcagcatgttgcccaggcaggtctcgaactcctgggctcaagtgatcctcccacctcagtcttccaaagtgctggaattacaggtatgagcaactatgcctggataaccatttttaaccatctctagaatgcttctcatcattctaaactgaaactctgtacccattaaataatacccacctcccctccccccca

SEQ ID NO: 196700 - DNA, 1000 bp, Homo Sapiens
aaagataatgttagttacaggattttcacagattttatcaggttctcttatattactagttttttgagagtttttataatgaatagatgctagattttgtcatgatttttctgaacctattgaaatgatcatgtatttttgttctttagtctgtgaaaacaaggtattacattagttaatttttgtatgttaaaccaactatgcattcctgagataaatctcacttgattatggtgtataattctttttatatgttgccaaatttggtttgctaagattttgctaatatatttgtccctgtgttcatgaggaatattggtaattttcttattatttgttttatctggctttacagctgggtaacccacctcatagaataacttgggagttattccctcttcctttagtttctaaaagaatttgttttaaaacacttcttctttaaatatttgatagaattcatcaataaagccaactggggctgagcttttcttttcctaaaaacctaagaaagattttaaattacttatttttatttacttgttatggatgtattcagatttttcatttcttcttgagtcagttttccttatttgttcctttctgggaatttgcccatttcatccaaattgactaattttctgtcataaagttattcaaaatctgaagttatctacaatatacaatccttttagcttctataggatcagtagtaacatctttttcatttccaaatttgataatttgcatctctctctctctctctcttctctcctatctctctctctctctgagacagggtctcactctgtcacccaggctggagtgcagtggcgtgatcacggctcactgcatccttgacctcccaagtgatcctcccatttcagcttcccaagtagctaggattacaggtatgtgacaccatgttcagctaatcatttaaaatttttttcttgtagagatggtgtatcactacgttacccaggctggtcctgaattc

SEQ ID NO: 196701 - DNA, 1000 bp, Homo Sapiens
tggtggacagggaggagcttctttaggctgtgtaatcaaggaggcttcctggctaggatctgaaggaatgatgagaaggagcaattgcacaagactgtgcagggttgcagacaagagaacagacagtgcaaaaaccccaaggaagcgcagggaccggctgtcagaggaagaacagggacgtgttgggacagaaggacctaagaaatgcagagagcagactctgccccatcccctaaggtcttgtatgtcccagtggagcttggattttactccaagtgtgaggggaagaactggaggctgtaggggagggtggtggtctggcctgcgttgtaagatcactctgctgctgtgtggaggtgaactttaggatggagagaagcagcaggcagactgctcagcgggccactgcagtcaggggagagggctggctgggcagagaggtggagccaggatgtatttgggaggtagaagcaacaggtcttgctgaaggactccacgtgtgtgagaagggacagggtggtgccagttggagagggtggtcgagggaagcggcagctacacctgcgggcagtgtagagggagggtttgcgagcggctaggggacttggtcgtggagatgatgggaggtggtaggcaggataaaaattagggaaaaaaggccaggcacagtggctcacgcctgtaatcccagcactttgggaggctgaggcgggtggatcacctgaggtccggagtccaagaccagcctggccaacatggtgaaaccccgtctctactaaaaatacaaaaattagctgggtgtggtggtaggtgcctataatcccagctactccggaggctgaggcaggagaatcgcttgaacctgggaggcagaggttgcagtgagcctagatcgcgccattgcactccagcctgggagacagagtgagactgcatctcaaaaaaaaaaaaaaaaggaaaaaagtcaaaataaataaataagaaaggaggatccaagctt

SEQ ID NO: 196702 - DNA, 1000 bp, Homo Sapiens
ctttggtggtgatttctgagattttggtgcaaccgtcacccaagcagtgtacactgtacccaatgtgtagtcttctatccctcatcgccccaccgtttcccccaagtccctaaagtccattgtatcattcttatgtctttacgtcctcataccttagctcccaagaatttcccttttttaaaaattcagagtttaagtcgtttaaaaatacttgtttttgcaaggaatttttttgttctgtggtacgtgggttatttgttttgtttttaatatatgcatttcttcaatgactttacagagtgaaattctatagaacaaaaaatgtttcttaggcccttcatttccctgactttattttttatttttattgtttctttagggacagagacagggtcatgctctgtcacccaggctggagtgcagtgatgtaaacacaggctcactgcagcctcaacctcctgggctcaagtaatgctcctacctcaccctccagagtaactggaactataggtatacgctaccatgcctggctaattttttttaatttttaatttatttttatttttatttttttcgagacagaatctcgctctattgccaggctggtcttggaataagcaagacgccaactatgaaaaataatgggctgggcacaataacctgtaatcccagcactttgggaggccgaggcgggcagatcacctgaggtcgggggtttgagaccagcctgaccaacatggagaaaccccttctctactaaaaatgcaaaattagccaggtgtggtggcgcatgcctgtaatcccagctactcgggaggctgaggcaggagaggtggaggttgcagtgagccgaggtcatgtcattgcaccccagcctgggcaacaagaatgaaactccatctcaaaaaaataaaaaataaaataaaaaataatgataataatcacacatatatagagtacgcttttcattcgctttaatccagataccctcctagaattc

SEQ ID NO: 196703 - DNA, 1000 bp, Homo Sapiens
taattcaagcccaagccgcacttacccctctgtttctaagctgcagttaggtccgatttcacttgggtttttctccattctttgaggaatcttggagctggggagcccctccgtcaggccagggctactccagcattgtgtaaaggaaatcagggggctctagagtctggctatgtgattttctcaggccccagttttcttatctgtaaaatgagaggagtaacccctcccctagagttattttaaaaagtatttattgtgtaaacatgcaacataaaatttaccgttttgactgtttttaagcgtatggttctgtggcatgaagtacattcgcattgttgtgcaaccatcaccactgcccacctccaaaacgttttcatcttccccactggctctctattgatgagggtgaatgaataagaagttcccattaaacagtgattccccattcctccctcccctagtccctggcaatcaccatcttattttctgtctctgaatttgactactccaggtccctcatatcaatggaatcattctgtatttgttgttttgtgactggattgtttcacttagcataaggtcctcaagattcattcatgttgcagcgggtgtcagaatgtccttcctttttaaggctgaataatactccattgtatgtagataaccacattttgcttctccattcatctgtctatggatacctaggttgctaccaccttttagctgctgtgaatgctatgaacatgggtgtacaaatacctatttgagttcctgctttccattacagagtcattttgagaatcaagtaagataataaatattaacaacattgcacatagtaggctgtcagtaaatgttaatttctttcctgaaagtgtgttaaacccaggagctaatgccacagtggcctgatgacttcagtgagagtgatgtcacttttgctagcaggctgcttctgtatccctgggactcgctgatctgccatgtctgggaattc

SEQ ID NO: 196704 - DNA, 1000 bp, Homo Sapiens
aacagcatagataagttatatttaatatactgatatacacttgggtaactttggggattagatacctctagctgaagcaaaaatgtctttatctcttaattcaatatataggattcttatactaataaggtaaagaatttcatgtttcctaaaattgtacatttctgttattctgaggggtttttttctatcatatatataatatgtaaaattctggccaggcacggtggctcacacctgtaattccagcactttgggaggccaaggcaggcgggtcacctgaggttaggagtttgagaccagcctggcccgacatggtgaaaccctgtctttactaaaaatacaaaaaattagctgggcatggtggggcacacctgtcattccagctacttgggaggctgaggcacaagaattgcttgaatccggaggcagaggttgcagtgagccgagatcatgccactgtactccagcctgaacaacaaaagtgactctgtcccaaaaataaaataaaataaaattctcatattgaaactagagaagactgtgagaaacctgatagttttgacaaagtctttaaaaagaattttaagcttaacaaaaatagaactcagctagggctgcttatatggcatactagaagaaaggcttctagcaacattcaaataccagctatagtttaagaaaaaaaaaagaagaaagaaagaaactcagcaaatatttttgatacacatatatgcatattcattctttcaataaatccttatgacattcctatgaaggaaagcacattattattattagaaaattaacaccataaaccttgttttcttttgtgctcaattgagatcaacttccctgcaaagagtatttctgttgagccttgttttcactgaggaatctacagtgccagaagctataaggttcagtgggcccttgagttgacattaagattgctctgcagcatccaggtctgactgtccttcccttctccttggaattc

SEQ ID NO: 196705 - DNA, 1000 bp, Homo Sapiens
tttagaaggctgaggagggaagatcacttgaggtcaggaattcaagaccagcctggacaatatagtgagactctatatctctaaaaaaaaagaattaaaaattagctgggtgtggtggggcatgcctaaagtcccagctactagggaggctgacgtgggaggatcgctcgagcctaggatgttgaggccacagtgagctatgattgtaccattgtactccagccagggcaacagagagagaccctggcaaaaaaaaaaaaaaaaggcagactattatggcttggggctttagaggtcattgtgacttatttttactaccatcatgtatttttattcaatcctttctccattcccttattcactcagcaatatttgagttttctatgccaggaaaagcagtattcatagaatgatcataacagattatctcagcacatagttccccacagaagataagataacagagatattttttaacaaagtttctccctccccctaaaatttaccaaaggtctgtaaatttgtgaactctttcttaaatatataatcagtcctcacccagtgtttctgacctttttacttctataactctgtaacatggagtatcttttaaactgaagaataataggataagttacaggggaactcagaaatgctttgagtgcaagtctgcaatttgcccaatgtggttttgatcccacagagtatgagatatactcaaaatacagtacctttaataccttctgattcttagttttttattcttatgtagctctgaactcatgatgtccattcctatggaattcattttacttttcccaaaaattctatatgccatacaaattccactcaagatcaattttctgtttcccatgtatttgtggctttatctgccatctgccaaaatgctctcagttttgaatgttccactatttaattctcttctattttgccctctctctctagaacatgttgtcttgctatttgacattcaaattta

SEQ ID NO: 196706 - DNA, 1000 bp, Homo Sapiens
gctaatttttttatttttatttttgtagagatggaatcccattatgttacccaggctggtcttgaacttctgggctcaagccatcctcccaccttggcctcctgaagtgctgggattataggcgtgagccacggcacctggccaacaagtatttactgaatgtccactggctttctgagatctaggatttggtctaaaagatatctcgaggctctttcccaatctattgctctaagaaatgttttacagtaaactaggatggtaacctaaaaaagaaaaatatatgacaacctaaaaaaaacttaacaacacaaaatgactgaaaagaactcaggtaaaaggagaaaaacatacagaacttaaaatataaattaacttctttcaaaataaaaatagtttaatttccatcaagtatagcgatatgcagtctataaattctcacaaacacagctttaaaaagtgcaagttgcaggaactatgataaatttgaaaataacaatctttttattagacatctgaccaagaggatgctgtaagatgcgcaatgtcaggttatatggagcttattcacatgcttcttgctatactaaatatacactaaatggcttttatttaaaatttcataaaaggaacatttcattaaaaccaatttaaattctacaactactaagaacaaataaaactagtagaggtgaacaaatctctcttctccagtcgactggacagcaggattactgagtagtaggtaggccgagtcttcttcacccccttattatttggtgaggaagtcaactgtgagaagtgactcgaactgtcagaagaaatgagaaaagtgcttgggtctatgggcagggtactaagatctacagcgcctgttgccttgaaagaaaacgaggtaaatgtgtacaaaatgttaaaattagaaaatgatcatggataatcaaggtggtattatttcaaaagcttcttaatttgaataatatggagcatgtaattctac

SEQ ID NO: 196707 - DNA, 1000 bp, Homo Sapiens
tgctgtgatctatagaacatgagagaagtgacacaatgccagctccaggactaagccttaggaaggtctagaagtttacacttttgccctgaaccaccatgtaagtagtcctgctagagagagcatgtggagagatgatatggagggaaaaagacacccagtcaccccagaggaacccagctttccatgtctgatgcttcagtaggaagcatcagacatgggagtgacccatctcagatacttcgacgaggctgagccctcaggtgactgaagtcccagacaatatcatgaggagcagaagaaccacccagctgagtctaatcaactctcagaattgtgagagatagtacagttgatattgttgtaaaccctaagtctggagattgttattcagcaacagataatatcaacaaggaggaaaaggtatcatcatctgatcctttactatgggtttcgtccttcacatacataatctaatttaatcttcactataataatttgagataggtattaggacaccaatttataggagtttgggtgaagttacgtaagttatcctaggtcaggatttgaaacccagctgtggtttgtaactgcaaagcccattctctcaatattcttgttatgtttttcataaagtatatcacagaattactggtctctaaagagttgaagaactgggatgaataaaaaagaagtgttactaaataaacatttattttaaataatataataaataatgtaaatggaagcaatgcagtacagtgaaaaaagagctttcagttaggagcctggaacttgaattcaacttctgacctaatcattagctgtgtgaaactgaacaagcaatttgactatgaaaaaaaagttttcttttataaaataataaaataacttcttagatttttgtggtggttgtcagaataaaatactggacataaaggacttctgcaaacaaaaataaaagaaagaaaaaaggaaaaatgtcctatagatacat

SEQ ID NO: 196708 - DNA, 1000 bp, Homo Sapiens
ggctaatttttttttttttttttttttttagtagagatggagcttccccatgttggccaggctggtttcgaactcctgacctcgtgatccacccaccttggcctcacaaagtgctgggattacaggcgtgagtctggtcaacaagtggggcaatggtgaatacacaacaaactttgaaaaccatgtagtttttatgtgcatgtaatacgattattttacttccaatccaaattcacttctctagatgggtacagtgtcagaatagagatactctttattttcacagaggaaaagactgaagctcagaatttggtgactcctagatgaacgggccaaaactgttacagcatttcactttttaccatgacatgacatgacaagatgtgacaaaatcttacataaccactttgtatatcataatgtattatatgaattcatctgttcattgtttattaaacaaacatttgcaacagatgctgtccaagaccaggagatacagaattgaaccaaatataacttcctccaagaactcacattgcagtcatttggaagaatgtataaggaaccaagaatcacagacagtgttatagggaacagctacagttctgctgcaaatcttctggggaatgattccgtctgtactcactgtaatcatatgacttccccagggagttgtgacactccaaattgatgtggagctaggacctgatccaactgggccactttgatagcccaactttctggccatagttgattggtccaagggtggacatatgacataaacaaggcccatcaaagcctttcccctagaaaatctgaacatggagccaaggagagcatggctcagactgcttagtgccagccctgtctcttgacttgggagggaactccgtcagcacaggcaggaggctgaaagactgttctggcagtatctggatccctcagcccgctgtatctgcctttcccaaggtctggccatgaaaccttttctttggaattc

SEQ ID NO: 196709 - DNA, 1000 bp, Homo Sapiens
tgcctcccagcagctttctggtatcttccagagaattccaggctcttcaaccctgcactgagtgcttaaacccacattatcactcttaatcctcatggcatccctgaaggacaggggctatgtttgtgttttacaggcaaagaagctgaggcctgaagcgcaaagtggcttatctgaggccacgctggcagaatgcggagtctcactctggcctcacagcctccaaagcctgtactcaccatgttccctgcctggcttgaccatttctcccaccagtttctgtgagcagaccagggctggtggctcagggagcatgggtgcatgatcacacaaaagccacgtggctccctgaggtgcaatcccagcccccaagttcggaaccccatcacctgaggggcccagaccatcctcctctagctcctggccatggccaggctgggaccccacagagcagagctgggtagggagctctctgaccttgggaggtgcccagatgggtacagcgactctcccttgcttcggatatttactgttcttgttctccatgtttgcccaatgaagcctagtgatgggggtcctgggtgatccccattgcccaggctgcagaacagtgcctccctcctgtccagagctacagtgtccccaagctcatctcatcctccctgcctcccctctgtaggcagtaagtggggtggggttggggcgtttctgggggaaccatgggcttgccaggagctgcgggtcagcccaaggctgagaaggttctggtttaagcctggcctgagtttaagcagcccctcttggctctcagggactcagcaggatgaggaggggatacggagctactcacatgcctctggccccatgagtcctgcacacgcctgggacttgggtggtatctcagcagctcctggaggtcccagtggccctccctgaatgcatttgctgttgtgcagagttgggtccttggccccctcatctgggcagacgcccaccagcc

SEQ ID NO: 196710 - DNA, 1000 bp, Homo Sapiens
ggtaattgagatcagtcatcctgtccagtaaagtgatcccttctgtgttggttcagcagcatgaggatcccagaatgaccaggagacagtttcatttttttttttttttttgaaattaacaaaatgatgactttgttccatggtggaaatttctcctttgagcactagaacttcaaactcaccatgccaacaattatggtgataggaagcaaaaataatacaagcaaattattaggtctctaataagaggaaccattctcactcttcctccacccttggttcctgtacctgtgtatgtattctggccatggtgaaaaaaacaatatttattgtcctttgatttaaggcatatattgcatctatatgacagcaccccagacttacagggtattgtgttgttgacataactcagcctttagcagatcattccacatattctggattaatgggcgtatggcaagacctatgaattacatgtacgtgaattcattgctatactttctttcctgaaaaatgagttatttggaggcaacagagtatcgaataccgtggtaataaacaaccttaagtcaatgcaaatttgtatctggactatgtatttaatactttgtaaacaaattgctgccctctttttgatagaagtggttcagtgtaatgaatctgcccccatttccaggaaatggttttggtcttggcttttaggggcttggttttggtcttggctgttagctgcttggccacatagcagttgtgataggcatatcaaccttaatgaggggaggtccatattattgagcccatatatagttttcattcccactgccatgactactttgtacatgagcctattggataagcattggaaaagagactggttgacagtcataaagtagatcatcatgtctgtctgatggaaaggcttcttcacagtggatgccctttggtgaggattcacatgggacacaaatatattcacattcattgcccattctgggaattc

SEQ ID NO: 196711 - DNA, 1000 bp, Homo Sapiens
tgcagtggcacaatctcatctcattgcaacctccacctcccgcgttcaagcaattctcctgcctcagcctcccgagtagctgggattacaggtgtgcaccaccacgcccagctaatttttgtatttttagtagagatggattttaccatgttggccagtctggtcttgaactcccgacctcaggtgatcctctcactttggcctcccaaagtgttaggattacaggcctcagccactgcacccagcctaaagttagttttagattaagtgttttcatgttttcccttgcaaagtaataaactggtcaagttatcaccttgttccatctccatattaatcagggtccaaacaggagatagaaaccatgcaacaatttgagtagttgaataaagaattataaacaggagattagagtaataggggattagatagtaagaggtgaagagataggaacagcagatataaagaacaaccatttcctcctatggctgagataccatcccctcaccacactcccccacctactcactgagatgcagaccttattgaagagaatgtaactggcttgctgcgaggtaaagtcaatgaggcgctccccagtaccactctgaggggatgctggggaaaactgcccatgagaagagggcacatgctgctggccacttgtgctaaagaacttgaagtctgataggagtgcaccctaacctggcatagaaaccctttcttcctgctgagtccctctagcaccttatactggcaaagctttacattgcaaacctccattatcacagagcaagcaatgaaagatggactcagagctgaggcgataaattgatagctagcatagcctctaaactgacttttatgactacattttatggatagaaagtgttcttatatatattgtttctttacataataggggacttattcatggctgcagatgagaaaacagatcctaagaagttaagtgacttgcccaaggtcacacaaagaattc

SEQ ID NO: 196712 - DNA, 1000 bp, Homo Sapiens
tacccttctgggctcccagaatccaggccagcatgtggttgagttggagccccagtaggctggcctagtttccctttgcctagttcttatctcgctgcctatgaatgttgctagactgtgcttcaaggatacctgaatttctcacaagcctaaaatctgatcattgtctattctgaaacttaagattgggcttggcatcatggctcacgcctataatcccaggactctgaggccggagtggaaaggctgtctgagcctgggagcaaagaccagcctgggcaacattgcaagatctcacctctaaaaaaaaaaaagaaagaaagaaaaaaggaaaaaagaaacattaaaagaaaatgaaaattaaagatcaaatgattgttaaacaaaagctgatttccatccacactcttccccatcttcctagacatatctcacctcaactctacacaaatccagctaacaccagcccctagtgttcaagacctctgctcaaaaaccacctgtaaaaatgacggtgtctgcactgttcgagatggcaaagctgagtgcaggtaaggatgatttgaaagagatctctccattctttggttagaaattttatttccataatgtaggattaattacttaatagttcttatgaatgaaatcagttgattctcatctcacagccattcatagaattttttttttattctccttttggggctttggataacctcaagaactatctttgtgatagccaacacaatttttttatgaaaaaaatagaactctatattctaattgtctgaaaaagtcctcataacagtccagtcattttaagtgtagctgcctccattttctagatgaagatactgacgttctgaggagcccttggccaagatgtgaatctggagggtggcgggcatgggacactgagaactaaactttctctgttatctgtgctatcggcctttcctaacttggagatactgttttagtatcagattaggaggaattc

SEQ ID NO: 196713 - DNA, 1000 bp, Homo Sapiens
tctatttgccttgagccaaaaacccagttgttcaagattgaatttttttttattatggtaaaataaatgggacataaaatttatccctttcaccattttgaagtgtatagttcagtggcattaagcacagtttcatcttcccctttgaacactaactcctcacttttttttttttttttggagaccgagtcttgttctgtcacccaggccagagtgcagtggcgccatctcagctcactgcaagctctgcctctcgggttcacaccattctcctgcctcagcctcccgagtacctgggactacaggcacctgccgtcatgcctggctaattttttatatttttagtagagagggggtttcaccgtgttagccaggatggtctcgatctcctgacctcgtgattcgcctgcctctgcctcccaaagtgctgggattacaggcgtgagccaccgtgcccggccactcctcggtcttgtttgtgactgtcttttttcacttagtgtaatgtcttcaaggttcatcgaggtggtaacgtgtcagaattgctttccttttttaaggctggataatattccattgtatgaatagatcacattttgtttatccattcatccaaatataagacagctgggttgcttctaccttttggctattgagaacaatgctgctagtaagctgggtgaacaagtatctgtttgagtctctcctgtcgattcttttgggcacctacttagaaatagagttgccaggtcatatggtagctcagtgttggattttttgagaaaccatcatattgttttccacagaagctgctccattttgcatttccaccagcagttcatgagggtttcagtttctccacatctcacaaacacttgatattttttggtcttgctttttgatgatagccatcctaatgggtgtgaagtggtatctcattgttgaagtctcttaaagagtgtcttatgtgtatctttgtgagtgtgagaaggatgaattc

SEQ ID NO: 196714 - DNA, 1000 bp, Homo Sapiens
tttagtttattttttaatgctttaaaaacacagttaaggcataggagacagaatctggtagtacctatacctgtcgcgtcttccatctcgggtactgctatgactgtaacttgtacatagtttgctgaaggaaactagtttcaggtcaagttcattttccagctgtcgagcctgtttcctgagatctttaacaaaattataacaacaaataattagacataaaaagtagacacaaaaatcacagcaccattctaaagaaaacaaactatgaaaatgatcatatactgatcttgttacccccataaagaaaagtgttggctgggcacggtggtgcacgcctgtaatcccaccactttgggaggccaaggtgggcggatcacctgaggtcgggagtttgagaccagcctgatcaacatggagaaaccctatctctactaaaaatagaaaattagccaggtgtggtggcgcacgcctgtaatcccagctactcggaaggctgaggcaggagaatcgcttgaacgcaggaggcagaggttgcggtgagccaagattgcgccatcgtactccagcctgggtaacaagaacaaaactatgtctcaaaaaaaggaaaataaaagtcttaaaagaaggaaaccaaggacttgcccagcaaagcagattagtcacttataaacttcagagggggcaagaagggaaatagtaatggtagatgcaacttcgcagctttactccaaagatggctagaaaacaaatgttgttctatccttcctgaaactatttgtatagcaataactaaaattctgcaattcagagaaaaacaagaagataatacaaatcacaaaggaactaaaaatatggtttatgaccagcattatcaacttaccagttaatgttataagaaagaagccattattcttttgaaagggattttgctttttatgttccaaagctttattaggcttatgaacttcttttcataatagcaaaatgacttaccttt

SEQ ID NO: 196715 - DNA, 1000 bp, Homo Sapiens
cactgctacgagggtctgagtgtttgtccataacatatgattcaagagcactcccgctgttgtttgaatgtttgcccctcacataggattccagaacactgctacgattgtctgagtttcttcctcacctagaattccagaccactgagatgagggtcagaatttttgtccctcaataggattccagaatgctgctgctagggtctgaatgtttgtccctcacttaggattccagaacactgctgctggggtctacatttatgtccgaaacataggattccagaacactgctgctggtttctgagtgtttctcactcacaaacaattccagaacactgcgacgagggtttgaatgtttgtccgtaacataggattcaaaaacactcaagtatttatttgaatgtttgtccctcacataggattccagaacactgctacgagggtgtgaatgtttgtccctcacttaggattccagaacactcctgctgtggactgaatgtttgtccctcagaaagaaagccagaacagtgctaccagggtctgaatatttgtccctcacataggattcaaggaccctgctgctggggcctaaatgtttgtccttcaaataggattccagaacactactacgagagtctgaatgtttgttcctcacaggggattccagaacacttctgctgtggtctgaatgtttgtcactcacatgggattccacatcactgctatgaatgtctgaatgtttgtccctcacaaagaattccagaacactgctacgagggtctttatgactgtccatcacataggataccagaacactgcagctggggtctgaatgtttgtccctcacacaggattccagaacactgctgctggggtctgaatgtttgtctgtcacaaaggattccagagcactgctgctatggtctacatgtatgtccttcacataggattccagaacactgctgctgggttctgagtgtttctccctcacatagaattc

SEQ ID NO: 196716 - DNA, 1000 bp, Homo Sapiens
ggagttatgcttcctgtcctttagatggagggagtatctacataatttatttggaattcttctgcataggagaataattatgcatgtctattgtctcccatttatttattcaatcatttatatcatgtgagtacatgggtatttattttatactttgagttataatctaatattatttattttgttgctcaaattcttccagctttggcactaactggcctttggttatgtcctcatcctgcccatctttcatttggcttttgtatctttttgagaaagcgccatcattatgggactgtttttttttttttttttgagcacttccttactttctggcagtataagctgctccaggcttatcttgcatgtatgtttcctgctccagccctggaacagccatttcttcaagcatctctgttcttattgtggaatagcattggaaaccaagatctgggtgccgggtatgctcattgctaccaggttgccattgcctttaagttctcttcactgacagaacaagaaaatatatgtttggatagtaacccatgcatacacatacacctgtaaatatttctgtatggatccatctgtatctctgttaagctaaacgtgagttcatagtgatgttggaaacatgatcttagcttctggaaaaattatactaaaattctagaagtcttgaaaaataaaatagcagtctacctcctgccttaaacttctgttttatttctctgactgcgacagatcttctggatgtcctttccagctttaagattccaaggtcacttgtcagtttggaagccagctcactgggttaattttgtgaacaatggatgggcacctgtgatgctaatgctgcttagtaagcaggagtcaggcgtttggccctatgacctagaatattctcccaatgatgcactgaccccaactggaggagttggctttgagggagtcagattactcagccagcatatggacttttgcaagcatctgggaattc

SEQ ID NO: 196717 - DNA, 1000 bp, Homo Sapiens
aaactaagtgaacaacaataaaaaatgatcagaaatgaaaactcctccttctttccctactgcatgtgtgtgaactgtctctcgacacctctgtaggtgcataatgctctccaatacatcttccagtctgccactccgacactgtttcattcaaaaaaaaaaacaccagaatcaggtgactcccttgcttatcctcttccatagttttccactgatttccaaaccatttaatgtggaatgcaaagtcccattctgacctcagcagatcttcccagcttcatcaccctcagtattccgcctctgtctggtgaaccacctagtaggaatgcttccatgttctctgttgtccccatctgaaacccaatgttcctctctgtacctacttgactttcagggactgtgttccatcaactccatggatcttctattcacagcccacacttctacattcaggtggagcccacccacatgtccctaggagtcacattcttgctacatcatagcatgtaccactgagtatattttaactgttcatctaaccgactcccttctcaaattttgaagttcctggctacatgctaatttcatacctacatcatgttcagatttaattttttaggctgaggtgtttttcgacatctataaacaaaagcaaatccaggtaatttctccatgtagatgagtcttctgtattaaaacaggtcacacgtattcttatgacaacaaaagaaaatgtttttttgccatagactcatgtgccatttctcaagtttccatcagtatcccttctgatcttattttaaagttctctttaatcagttttaatttgcaaaactaaaattcctgtcctgccttcttcagaaactccaccctcaatttacagacttactcatacgtcttatcatttacaggacatgtaaaaaaacactcgcactttaaaaactatactaatataaagtcgtttcttatcccaaagctgaaaattatttttcctgaattc

SEQ ID NO: 196718 - DNA, 1000 bp, Homo Sapiens
aggactaaaaccagtggtcagtttgcccactgccaattttaaacagagaagactttgagcaaatggggatctaatttgaggaaggttttcttggtgcttaagtagctgtttgaaaacatggggctttttttttctactgaaaaaaagtgctcatatggcctctgctgtgttctgaatatttgtgttcccgcaacaattcatgtgttgaaacctaacttccattgtgataatattaagaggagggcttttggaaggagattcatcccattcatgaagggattaagtgcccttataaaagaaaccccagagagctagctagtctcttacaccatgtgaggacacagcaagaaggtgccatctttgaagcagagaatgagccctcaccagacactggatctgctggcaccttgatctttgacttcccagcctctggaactatgagaaataaatttctgttcataaggtacccatttaatggtattttgttatagcagccttaatagcccaagacagcctcttttcctagaaacacatagaatattattttcaggcattcttgtcaaagataacaatagaagatctagtagtgaatcagcacattatagttctgttgatgcttctgttgccaaggccagttgttttacttaagaatacaatgtgcaagtaagatgttttggggttttaaaagtgagtatgtgacgagaggatcttcgccttagcatttttccttctacaggcctcttgaagacttccacctggtaatgattggcgggaggggggcacctaaagtcacactctgtgctttacattaagaaggcagtttatagtactggaggactggatgttttggatgcatcagataatttatctaggaagccttttcaaattcacaggtatcactatctgtctgtgctcccccacctccgtgttaatcagaatcagttgggaacaccaatttaaactgcatcagtttggaccagacttcccccttccaaagatc

SEQ ID NO: 196719 - DNA, 1000 bp, Homo Sapiens
tttgatcactccttctagaaacactactctctcggcttctgtgatatcacactcaactgatttcctttctacctctcttgctgttcctgcttgttctcctttgctaatttttacttctttactcaattgccaaatgctacagcattttggatttgcttcagtctctgttctctatccattttctattcattgttgacctcatccaaccccatgaatttaaaaacgatctctatgctgatgagtctaaaatttctgtcttccatcctgacatctccgctggtttcagatgtctaatccacatctccctttgtatgtttaattaaaatggttgtcacatgtatggaaaaggacttttaactatcctagccttgtccaactaattaaaccactatttaccttgttgttcaagccatttcatagtcttttgtttttgtacctctccatagctcttctcttctctctctacagactagcttttctgctgtgtattactttcctagggctggtggccagggctggatcccaattccagcccctggcctggaaaagtcactgtggatcaggctatgtcagctataaatcctgatcctccacaggcagaataggataataatcatgttctatgatcaggtctcaggcatggctatgggtggggcaattttcagagaaggcagttggtgatgcatgggttgcgcagtcttcccagtaatgtttactacacagccttgccaaattttcaggagtttttatattcctgacgcccttgacttgcacattcatgtaaagaatcagaaaggaaagatcatgcttttatcagtcatgactgtagtccaaagacttctttttctgctctatcatttgtctttttcttactgattaagaaataacttggcctatgtgatttaccatccctccttgatatgagacctttcttcaagatcagtccagcaggttttattttactttattttttccctgaatgtgccagccgagtttagac

SEQ ID NO: 196720 - DNA, 1000 bp, Homo Sapiens
cagtacaaagaacctgaatgataattcagaacattggttaaagtccaacaactaggctcagacaggcccatgtttggcagttctgtaacttggggcaagttactcctcccttctgatatggtttggctgtgtccccacccaaatctcgacttgaatttccacatgttgtgggaggcacctggtgggagttaattgaagcatggggacaagtctttcccctgctgttctctgatagtaagtctcacgagatctgatggttttaaaaagaggagttcctctgcacaagctctctttgcctgatgccatccacgtaagacatcagtgacttgctcctccttgccttccaccatgattgtgaggtttaactgctaactaacaaaaaaacccaacaactaactcttcttttactactgtcatgtataattaagattggaaaatgttaaatcaagaaattcagtctcaaacccaatgattccatttctgtagggaatttgcaaactaacaaattagtcagggatttaagaagcagaacagaaataagaatacatggaaatgaggtgtttcacagcccaagacttcgggaaaattgaaacaggcacactaaataaagctgctggtatttttgcttctaaagcccaagcaggatatcatacaaatttatttctgttctttcaaacataatatgcagattcgccttaagaaaaaatcaatttctcctccatatacagcatgttctgactccttaaaatatttgttaaacaactacgtgcaaagccctataacagaggtacctgaggctgaaaatggcagtgttgttcctgccctagggttaactaacactttgtctgcgtctagggagttagacatgtaagcaatgaagacagacaagaaagatgttcctgttaatgagaagaacaagaaatgtgctaggggaatagaaactaattctgcctaaaaaaacaactacaagttatacatataaaaggtggcgttggaattc

SEQ ID NO: 196721 - DNA, 1000 bp, Homo Sapiens
agtgctgggattacaggcatgagccaagaccaaggttcttgttatgcagatgaagcctccaggtagcaggcttcagagagaatagatggtaagtgtttctcatcagacttaaaaaggtgccagactcttagttatatctctcctgaatcaggagaagacctggaaagggaaggggactctctacacagtgtagattttccctacaagagacagatttgcagggctgtttcaaaatatgtcaaagaaaaatttattttggggtaaaatacttctgtttctttcaggacctgctatctgtcatgtgatgctgtacttcagtcaggttggaatttggtatcttattgctacaaagagtctgttttgtcagccttaagatctctgtgttgatgttaatgctggtcagttgtgcctgaattccaaagagatgagggcagaatgaggcatgtccaacactccttcccatcatggcctgaactagttttgcaggtttactttggaatgcccttggcgagaaggagtccgctcagtaggttggggggcttagaattttctttttggtttacaggtgcaaagcttgtgatttagccaggagatttcctgcccctcccaagggggcagattttgcttcaaccctccctcaccatgtaatgaggggctggtcctatccctcccccagaaatacatggccttacttgtacccttacttccaccaggagtgaacctttgcctgtcctcaggggatgggaaggattcctgccccttcccctgaggcttaagtccttctgcttcttgtgagacaaggttctgggaggtaggagggggttcatgcctgagaaccactgagggagcctctttcttgtctcattgtacctccaatctttctcatgagcaccaagaggtggaaaagagattgcgagtgaacttggggtctgctagatcctgatgcacccagggggattctaagttgtcatgctggcccactcctggcctctgagaattc

SEQ ID NO: 196722 - DNA, 1000 bp, Homo Sapiens
ccaaaactgtactctgaaatacttcagatttctttcgaaaaagtccaagtaggggaggcaatcaattttcttcctttcctctaaaaaagaaattgtgtgatagaaacaaaaacatctcaacagaataggatgctgtatccaagccactctttcaatctcatgaaggtagatacttctcacagaaagaattcatgcctttttttttttttttttttgagacagagtttcacacttgttgcccaggctggagtgcaacggtgcgatctcggctcaccacaacctctgcctcctgggttcaagcaattctcctgccccagcctactgagtagcggggattacaggcatgtgccaccacacccaggtaattttgtgtgtgtgtatgtatgtgtgttttgttttgtttttgtttggtttttttggagatagagtttcgctcttgttgcccagactggagtgcaatggcgcgatcttggctcacagcaacctccacctctcaggttcaagcgattctcctgccttagcctcctgagtagctgggattacagacatgtgccactacgcccagctgattttgtatttttagtagagacggggtttctccatgttggtcaggctggtctcaaactcctgaccttaggtgatccacccgccttggcctcccaaagtgctgggattacaggtgtgagccaccacgccgggccctaattttgtgttttcagtagagacagtgtttctccgtgttggtcaggctggtcttgaacccccaacctcaggtgatccacctgcctcagccttccaaagtgctgggattacaggcatgagccaccacatccggccttcatgccttttttctaacaatctttgagaaatttatccctagtatacagttgtctaggcaaacctgctaagtggaacgaaaacacaaccatctccaccaatatccttgaagagaaagtaaataaagtgttgagaaattaagatgaggaacaattgagaattc

SEQ ID NO: 196723 - DNA, 1000 bp, Homo Sapiens
tgtggctgcacactgagaccccattaaaaactctgcatgctgaggcccaggtgagcatccctgcccagcaatgctgtgtgtgtggctggctgcacactgagacctcaatagaaactctgcactctgagacctgggcgagcgtccctggtcagcaatgctctgtgtggctgcacactgagaccccattaaaaactctgcatgctgaggcccaggtgagcatccctgcccagcaatgctctgcgtgtggctggctgcacactgagacctcaatagaaactctgcactctgaggcccgggtgagcgtccctggtcagcaatgctctgcgtgtggctggctgcacactgagacctcaatagaaactctgcatgctgaggcccgggcaagcatccctggtcagcaatgctctgtgtgtggctggctgcacagtgatgtggtttggctgtgtccccactcaaatctcttcttgaattgtaactgccacaattcccatgtgtcatgggaagaccccagtgggaggtacctgaatcatgggggcaggtctttcccatgctgttcgtgtgatagtgaataggtctcacaagatctggtggttttataagggggagtttccctgcactttgcctgctgccatccatgtaagacgggacttgctcctccttgccttccaccatgattgtgagtcctccccagccacgtggaactgtaagtccattaaacctctttattttgtaaactgcccagtctcagatatgtctttatcagcagtgtgaaaaaaaactaacacaggctgggaggggcccatgctaggccaagatctggaaatcagggcaggtgtgtgagtgtctcaccctgagtccagcacctcagtcccccaaacacaacagggctgagtcgagttgcatcgtagctgaggcctgggccacttggggtgtaagagctgggagctgctgacagggagcagtagcagaggcttcagctgccagagagtggcctgaattc

SEQ ID NO: 196724 - DNA, 1000 bp, Homo Sapiens
ggtatgcaccaccaaaaatggataattctttttaattctttttggaagacaaggtgtcactatgttgctgcccaggctggtcctgaactcctgggctcaagtgatcctcctatctcagcctcccaaagtggtgaaattacaggcatgagccaccatgcccgggctgaattaagttttataaatgttccacgattatgtgaaaacaatctgtacaccctgttagttggatgcaaaattacatacattctagtcaagctagttagttgtggtttttgatctgatatatccttatttatctttttgctacttcatctgtttctaagaaaggtgtgttgaaactcctagatcatattcatttttagaaaataagcccaaggtcatgtcttaaagaggatgaatataaagcataataaaagaacaagcattgcagtccttattcagagaagcattaaatttgtgcttttcagtctgttttctatgaaacgctgggattcatgaaaatactttaagagttctgtaaacttattaagatttttttttctatgtttgttttttgtttttttgagacagaatctcactctgtcacccaggccggagtgcagtggcctgatctcgggctcactgaaaccaccacctcccgggtttaagcaattctcatgcctcagcctccctagtggctgcgactaaaggcctgcgcaaccacgcccagctaatttttgtattttttagtagagatggcgtttcactatgttggccaggctggtctcaaactcctgatctcaagtgatctgcctacctcagccttccaaggtgctgggattacagacttgagccactgcgcctggactccttctattatgttttttaaaaactggaataaaaaaaagtatatagtcaaataagttacataccaaatttagagacctccaagttatttacttatgctactttgttaagctatttatggctacctttaacgtatacatgttatttggaattc

SEQ ID NO: 196725 - DNA, 1000 bp, Homo Sapiens
gaccagggcgggaggaagtacatggaggacgttactcaaatcgttgtggagcccgaaccgacggctgaagaaaagccctcgccgcggcggtcgctgtctcagccgttgcctccgcggccgtcgccggccgcccttcccggcggcgaagtctcggggaaaggcccagcggtggcagcccgagaggctcgcgaccctctcccggacgccggggcctcgccggcacctagccgctgctgccgccgccgttcctccgtggcctttttcgccgtgtgcgacgggcacggcgggcgggaggcggcacagtttgcccgggagcacttgtggggtttcatcaagaagcagaagggtttcacctcgtccgagccggctaaggtttgcgctgccatccgcaaaggctttctcgcttgtcaccttgccatgtggaagaaactgggtaagttccctggcttgtttggcgcccgcccctttttcaggcagttcagggcttttatggcaccagccccgcgtgggcccccggcacccagagcgcaaccaaagtatacactgatggaagtgactaaaagctgtaatagcgctttgctgggtggaggtccgggcaaaccaagcggccttggggaagataggattgccgtctccctgcagcctattcttgctttatttccatcctccaaggatcaatgggaagcagtccactcccttccctgcttcactttggtggcaaccagaggaaacgtgtttgaaacctggcgccagattttggccaaaagataaatcgatgttgcacctgggccaggcgaaggaaaaactgtagtgtttccttagagaatctgtcataattctgctcctgaaagtcttatccctctcggttgcctcctaccggtggtgtcagttctccagattgacccgggattgctggggttggttgctggagtaaagcgtaagctaatttagaagggctgaaacgtaaccatccggcaacttaaagttttggaaggaattc

SEQ ID NO: 196726 - DNA, 1000 bp, Homo Sapiens
ctaaagatgaaacttgtatgtgtcccccataactcctaatacactgctattgatgaatgtgctcctcagaaaggattcctagacctctagcaggctgtacaccaacatgggagacgccctcctaagagcccttgatggtatttttcctcaagtggctcataatcaatgagagatgaaacaaaactgtgcaaatgaaagaaagccaaagtgattaaaaagtccattgaaccaatgtgttgggaattctactgaaatattagaggatgtatacaaaagagaaatcatacaattgggttgggcacagtggctcacgcctttaatcccaacactttgggaggccaaggcaggaggatcacttggggttgggagtctgagaccatcctgggcaaaatagttagtccctgtctctacaaaacaaaattaaaaattagccaggcacgatggtgcatgcatgcttgtagtcccagctactcagaagccaaggaaggatgagcccttgaatccagaaattcgaggctgcagtgagctatgattgtgctactgcactccaggctgggtgacagagtgagaccctgcctctaaaaaaaataaataaataaagagaaatcaaagaatcatggagcaaataaccaagccatacacaactcttcaacaattcaaacaacctgattcctccaagtcccttgagacctcctctcataggcctgctccagccacactggccttcactggtttctcaaacacattgagctcctgtccactgcaaggctttccctaggcagctttctcaatagggaaagctctcttcctcctcctccactgacatcctgccacctgctcacgaaaggctggcaaactcccactcaggttatagggttggacacattccctcaaggaagtcttccctgatcgccctctgcctcaccccaggccagggtagaacaccaggtcctcccgcacagcactccctgcagttgccaaggactgttagtttgaattc

SEQ ID NO: 196727 - DNA, 1000 bp, Homo Sapiens
gccaaatggtgcagtgccttaaacggcagatcttggggtttggacttgatttctcatgatgtcgtcactaggagttactgcagcttttggagggaagccaggcttgaggagggttgtgcctggggatgaatgtctggcagcagtgtgtgaggtcagctggagagggtgaggctggaggcagggaggcccggctgagagctactgagggccaggttcagatctgctgcccaagggggatcaggtgggatgggatgaagggtcagagatgcctctgggaagaggttctggagccattgctggatcctttggagccacaggcagccgttcttcctgggcaggaaggagcgctgtccagcttctgatttctaggcctgtcatctgttcagtcttaacccaattacagtagaaagaatgaaattaatttatttgctattttgagctgggcatggttgtccatgcctgtaatcccagcacattgggaggctgaagcaggtggatcacctgaggtcaggagttcaagaccagcctggccaacatggcgaaactgcatctctactaaaaatacaaaaaattagccaggcgtggtgttgtgtgcctgtaatcccagctactcaggaggctgaggcaggagaatcacttgaacctgggaggcagaggctgcagtgagccaagattgtgccactgcattccagcctgggcaacagagtgagactctgcctcaacgaaaaaataaaataatttgctattttgcattcatttctttgtccagcaagtacttcttaagatctgtgatgtgccaggggctgtgttgatgggagcagagcgggcatccatattttcatccctttcctctccccaggtacggagatacaagggcctcatggactgtgccaagcaggtgctgcaaaaggaaggcgccctgggcttcttcaagggcctgtcccccagcttgctgaaggctgccctctccacaggcttcatgttcttctcgtatgaattc

SEQ ID NO: 196728 - DNA, 1000 bp, Homo Sapiens
gaaagcacagatgccttatcctgacctcccctcttcctccacctccaaccagaagagttacactactttctttctcagcctcccctcagctcttccaggactattttgttttaggtactgaataatttcccaacgtctccacagggagcaacctggtgtattaggaatatcacgttatgaagggtttgcacatccctgcaagtacaccctcagaaacactccctcacccacacaccacacagacagacccactgcacatggctacagccctttacagtccacaaagagcattatcacgttttatcattgccccactcccagagacaagcaaagctatgatccccatctatggaaagggaaaggaaaactcaaagaagctaggtgcctaagccaaggtcatgcaggaagtaaatgaaagagtcagactggtacccaggtcttctgtggtcttctgattcccagttttcagttttgttttggttttttttctgcccatgtgctcagagaccctcacaggtacacacatacacacacatctatactgtacagacacagatgtgacacttattcatagtgacacatatagaaatatcatctgatttacaatggaacatccaaagacaacgcttccacacttgcggagtcctccctcccttctcttcttcctccctcctttcttccccctcatccctctgatctgaactcttctgccatctagtggttgtggtgacactacttcaccacaagtcagagattttctttggatgggggaggttctttaggttcaagttcggaactcctttcaaagttccccataattctttccagatacttcatagactataaacagctaagacacagtttttcagaaacctcagactcctgtcctctccagttcccctgctatctttctcttagttctggggcattccaaagccataggtaatctggcttttatatcaatcatacaatgttgggctgtacattaggacttgaattc

SEQ ID NO: 196729 - DNA, 1000 bp, Homo Sapiens
ctcctgccacagcctccgattctcctgcctcagcctcccgagcagctgagactacaggcacgcgccaccacgcccaactaatttttgtatttttagtagagacggggtgggggacagggggtggggtggtctcaccatattggccaggctggtctcaaactcctgatctcgtgatccaccctcctcggcctcccaaagtgttgggattacaggtgtgagccaccgtgccaggcccattgttccttttttaaaatagtattggtagttttgtatgtattgaattatttgaaaataagaccatccgggctgaagtctgttattaccgttgatgacaactgaaactggtggaattactaccgttgatgagacctgaagttggtcaaacgaaagcaaaacaaacccgcccaacgtggggctcgaacccacgaccctgggattaagagtcccatgctctaccgactgagctagccgggcagttagagaaaagtgttgttcctagatcttttcaaaggaataagattgttttgatttgttctaagaattacatttcgtattaaatgatttttctattatatatatatatatatttttttttttttggtaaagtttttcatgacttttaaaacttgtgtttcatgtctgattctgtgcgcacaaacttctgttgtttaataaaaatgtataaacagccctctagtggtcagcacctttccgtttccttaaaggtaaggcgggccaaggaaggcgatgccgactccagcccggagaataggagtgagtgtaggggtgcttccagttcatcctaaagattcccgccggcagagcgcccaccccttgaagcgcggggaccagagaggttctcagcaccctcgtggcccactgcaaaagatggctgcggagaaatgtcctgcacactctctggaaacaattggaactgaaagcccagctccagagctggctggcctctcggcatcgtgtgacttagagattttcggaattc

SEQ ID NO: 196730 - DNA, 1000 bp, Homo Sapiens
atgtcgtcctttatattcttgtccaattatttcctcgaaataaatctttggattaaattgcatgcactttttccccagagcatttgaatatgaattgccaaacaatttggacaggtgtgccgaactatactcccactctctgtggtgtattgttctgtgtaagtattggtttcctaatgttcttcttaacaatcatgctgatctttaatcttcatttaaccaattctaatctgatgtattaaaaatagtatttctggccaggcatggtggctcatgcgtataatcccagcactttgggaggccgaggcgggtagatcacctgagctcaggagttcgagaccagcctgggcaacatggcaaaatcccgtctctaccaaaaaaaaaaaatatttccttgttttatttctttgattatagtttatgcaagctgtataaaaatacattttggaaacatttaaatcaggaaaataccaaatttttgtgtagtacaaaaaagcaaatactgttttgaagtattatttgaacttggctaataggatgaaagttaatttgtatagctgatgtccagaactaactcaaagggcaaggttaagtaagcacatgctggcattggcctttggatatttacaacactgggtagccaactagtttagtacactaccctaaaaaaagtagattaccactaagtaaacagactacagatgcctgggtgcctcattcttcttaaaaactctgcgttcagatacttattcctattcccagactatgacgatctatacaaatgactttcatgtagcagaataattatgtgttaacattattctctgaaaccagacaaactggcatttttcatattcttaatctgatgttaaattataactgtaacacagacaatagtttccagcatataaaattcctttctcaattatcactctgctgctgtcatccttgctgggagtggggcatcacttgggaagagggcttttcttagtgtgaattc

SEQ ID NO: 196731 - DNA, 1000 bp, Homo Sapiens
tcttagctgggagatcacttgaggccaggagtttgacgctacagtgaattatgaccgtgacactgccctccagcctgggtgacagaaaaaaaaaaaaaaagattagagaaggcctctgacctcacagtctagtggggaaccagcttcttcggggatttttccctgcctcacctcgcccacctcaggctgtgtagaaacccccagtctaaccagttgtttccctccaactctgtacataccacggtgtgttgcctttttatttcaaacatgtgctggcctctgttctaatcacagcaacctgtatccattaatccatttaatcctcacaacaaccttatcaggtaagtattgtcattatttgcattttccaaataaggaaactgaggcacagacagattaagtaactggcttaataaggtcttctagtttatacgtagaggcagccaggacttgaaaacacaccttctggctccagctaaattaacatgctctgtttacttatctgtccccactgaaattggaggttgaacccgtggcatattcaaacgaataagtatcgcctgtgcccaccccaatatctgacactataggtcaacgataactcattcgtcaaacaggaaggaggaaggaaggaaggaaggaaggaaggaaggaaggcaggcaggcaggcaggcgggcaggcagaggtaaaacgattccacaatggtgtggttgctcacatttactaagcatcaacactgacctgcctgtaagatgcgctaacagagctcacgaataaatgaaggctgggtgtggtagctcacgcctataatcccagcacttgagaggccaaggtgggaggacggcttgagccccagagttcaggaccagccggggcaatatactgagaccctgtctctactaaaattaaaattaaaaattagccaggcacagtggcgcgcgcatgtagtcccagctacttgggaggctgaggtggaggatcgcttgagcccgggaattc

SEQ ID NO: 196732 - DNA, 1000 bp, Homo Sapiens
caagatcccgatagtgagtaagttcttccctagagccacctggtgttgctcacaagccggcatgtcctgattcccaatgcaggggaaacgatgccatttcccatccctttctaatttattccctagaactaagaagctacacatagaacaacatgacaagatggattaatcctaatacaagttaaacatccctaatcccaaaatccaaaatccaaaattaaaaagtttttgagcaccaacatgatgccacaagtggaaaattccacacctgacacctttgcttttctaatagttcaatgtacacaaatgttgcttcatgcacaaaattatttaaaatactatataaaattaccttcaggctgtgtgtataaggtgtatgtgaaatataaatgaagttgggtcccatcccaagatatctcatgatgtatatacaaatattctaaaatcaaaaaaaaattgaaatctgaaagacttctgttttccagcattttggataaaggatactcgaccagtatgaccatggtataatgacaaccctagactaagtcaagaaatctagatggtagtcccagcactgacactaacagaatatgcaaaatcaggctaatcattaatatttttgtggcttagtttcctcatctgcaaacgaaagaagtcaaaccctttctggcttgatgtagtatatgcctatcattccatcattcatttacttggccatcaaggcccttcaatgtgccttaatgaggtcagtgctcagtaaaagtagggaatgagacaaatatgtcccgtgaccacaaagatattatatttataaagaaaatggacaaataagaaacaaacattggtatgtaattacgtttatatcttttctgcaaaagaaaaggaaaatgttgagacagtcaccatttaggctagagtctttcctccccccgacagcacgcctggccctctaattccctaaaatgtggaacaacagatggcccatgcattccaagaattc

SEQ ID NO: 196733 - DNA, 1000 bp, Homo Sapiens
aatgacatttaatatcctaacttaaaaaaacctcatgatatatttgcagtatagaagaggtgatattgtctgaaataatgctcttcttttttcttttatactccattatatatttttaaaaattacatttaaaaatagaaaatgtgtgtaaaaatactttatattttgttgaataaaatattcttataattgatttaagaattagctcaacatggtcaagtatttgattgttttgtttcaagattgatgataatggttatttaaaagtctgtaaagttatagaagagaggagtcactcaaggaccaaacacgagactcatgctatttctcttgcagaagatttaatcttcaaggataaatgcggcattcagtttcccactgctgctagtccagaaggtatgcacacatttggataactgagctcccttttcttcccttggaaactgttttgagctcggaatttgttgtttagatcatgatttcatacgtcagaggattggaagtctcctttaggtacttggcagagccaggacatttttccatatatagctggaaaaacctttcttgcccattctggtttgaaagaatgttattaaaagttcattcctgctttcttttctttttctctttttttttttccttttttgctaaggaacagaagtgggcactaaaaattcgtgcctggaagaactaagacttgctccaacatagaggactggctgcgtgttctgagaacctcccctaggtgttctcggtcattccctttatagcactcacaggcacatctgtgggtggcaattattgattccttcctggcccacttcctcctcatggctctgggaagccccacaggctgactttgcagagatgaatcaaggcagtggctaatctcctgagtcatggccagaggctctttggttactctctgaagatgggatctgtttacctcagagttccctctctgagggtatttggaattttggatggtggcctggaattc

SEQ ID NO: 196734 - DNA, 1000 bp, Homo Sapiens
ttttgcccttctgtaaaataaaatcacatttcaatttagaaagataaataattgttttttgtttgtgaaatcttcgattttaagaattcaactttttattatgtgcttatataaacttttaagttgtccggtgctagaataaggattgctttaaaaaaaaattgaaatacttctaaagatttttaacttgaaaaattggtgtcttgagttatgaattgaggtaatttataacagtcgtttataaagataatgttttgacttctctctaatgaaatgcctaaaaagcaatatcaaataatatatcatttttggaccttttgaacctaaatgttggtgttttctggacttgtatttgtgagtttgtgcattaaaacaatacattcagaaaatattctcgtatgcatatatgtattttttaagaaaacctgacaatttaccaaaaactctttattgtaaattttgatacatacagccatatgaattccatttcctattttatttattagttttcaaaaatcaaactacaatttatttgactgtgacagtgagtttatatctgtgtggtttggggaaacattccttaaagtttgactttttttttcccccgagacgtctcggtctgtcacccaggctggagtgcagtggcgagatctcgattcactgcaacctccacctcctggatacaagtgattcttctgcctcagcttccccagtagctgggactacaggcgcgtaccaccacgcctggctaattttttgtatttttagtagaggcggggtttcaccgtgtttcgatctcctgacctcatgatccgcccgcctcggcctcccaaagtgctgggattacaggcatgagccactgcgcctggcctaaagtttggcggtttttattctgtaaaataattctgaatttcaggggaagccgttttcctgttcccacacactaactttccaagtctactataggtcaaatgtagtagatggcaggcactttgaattc

SEQ ID NO: 196735 - DNA, 1000 bp, Homo Sapiens
aaaatgtccagatctactttcaaagaactcctatagctgtggtgatcaaacacctatcattctcatggcagccccgagtccccaattttctgcccactgctgacacaaaccagcatttcttaaacttgtcttttgccttctactatcatttctgtcatactgggtatctcttgtactagtacttaatattttcctttaaatcacattttaaaacttaactaactctaagcaataatatccatgaaaacatggattttatttgctggttatattgtatagctattaaaataaaaaatgttcatctgtttaacacccagaaatcactgtgtaccttcagtggtaaaggtaccatacttgggaaaacactgcaaaaccactgaaatgtcatgtaagtttcaatatattggcattaaaactatattgccaggataatctcttatactacaaaattacgaaacttctcttaaagagttgagattttaatttttagtttggaaaatatgtattgaaagtaatgagctaggcaatgtgttagaagatgggctattgatattatctaatttttctttgtttaagcgttttgtggctttgttaatagaaagtttcagggagatatggcaaataggcttatttccaatcagttagtggaggctgccctgagtgctgtgtggctactttaagctcatcaagaatattatgtatatggtatgttgtgcctgactgggggcatttgccatgaatgtaattcttttctcttggacagactggtaacttaagtcaaggcaagtacatgagttaaggggctaacagtctgtccaagagaaaagaatggtgaagacaaaggtgacaaatttcaaaacaaaaatatgtaattgataagatgaaaccacaccataatagcagatacttttcattcattaacccacagggtcaaagtagggttcattagtgaactataaaatatatgctcagatagctattttcttaatccctgcatgcc

SEQ ID NO: 196736 - DNA, 1000 bp, Homo Sapiens
aacttattcagttcatttaatttatatgggtaaaaatggcgctcataatccttattacttttttttcaattaagataggactggaataagactggaaagacggaaagcgggatgggaagggtgtaatgtggaggctcttaaaggaagtaatgttaaactcttaaaactgtataagcaaaactaaagcaatgaggagcagagtagtatcggaaggtgattatggaggatggtatctaacctagaacaggttggcactttctttactgctgacagatgaaaaataataaagttttgtaacagactagtgtagagtcaggataaagtgataactaaaggtatcaatcaacaagaactatataagtattaagtatgcacagaataaaatatttacagaatccttcttacacatgtaatatatctattctacagaaaaaaaaaataagtcacttgcccagtataacaacatgtagctatgaagtgaagaagattaaagagttatgagaagttttgaagaaggatgataaataaaacttggtgaatggaactatttcagaaattatttttcatgtaaatatattattgtactaatattaattataattttaaaaaagtaggaatatttggattgtacagtgattagagatgtcagaggcattaaaaccaaagtaactccatcttgagtgagggataagaaaatgagcctgggacttgctgggctgcattcccagaaagtcaggcattcctggcctctagatgtttaatggaatgaattaatgtttactaaacagatctaaacttgggagtgcccagatatcctgatatctgcagaacaaaggaattcctatttttgccttaaagataataatgttgattcttgcaatatatagtaattaagaaaattaatcctttatcacaaacccttgcagcagagcatatctccccatatatacaagcattgtacctagagtggacgcattcctcctcttactttcaggaattc

SEQ ID NO: 196737 - DNA, 1000 bp, Homo Sapiens
ctgcctttcctgccctaaatcctgaaaaagacaaaaaaattaaattaaattaaattaaattaaattggagcaataaccaggaaacttaactgacataatatatttaaagttcctggtactctagaagtattatgcaaaattggtaacaatagataacactgggaatgggatcacaggctgggggccatgggtggaagagtctaactttagcatccttcataacccttggacacgtatgggcttctaaagaaaaccacataaattaaaaaagaaagccgtgcccaatacacactgggcatttaacaaaggtgagttttcttcgtaggtaacaagcccaatacaactggttagcaccaacaccaggactgaaacacaggactccaagtctttgcagtctttctacggagcagtgattgttttggataaaatgacagcccaaggtgccattgcaagctgcagctgcaatcggtgcggtaggcccagagtttttgttcttaatttcatttcatttggagctaagaggactaatttgatgattttcaatctcttctcccctgtcctgattttaaaagcctttctttttttttcttttctttttttaggcatatgtagtaacattataatttaaatctaatttaatttgggaaacgatgattcttaaaagagaaagtaaagcatgtgaataaactttgaagtgttcaccttagtttgggaccaaactgcctggatctttgtgaaaatcggttttgtatgtcaaggaggagtttaaggcctttccgatcacctgtgttccccttttctgtgcagccatgtatcacgtggagttgctcctaaccacacctcacgtgcccctgagccctatttcctaatttcttctgggctggacttcccattctccaccggcagctccagtatcccaaactttctagtcctgctgatcctcccagcaatggggtggaaactggagggcagtgtctggtctgttttctaagaaacgtat

SEQ ID NO: 196738 - DNA, 1000 bp, Homo Sapiens
gcaatattatggtgaatatacaaaataaaatattgttacatgataagatctcatcaaagcacatacattgaaatacataaaaagaatagagaaggagatttactttcctgtaatttcctgctaggaagcataaaaagaataaatgtgtgagagaagactgctctgcctatggagtagccatgattttgtttctttacttctctaataattaaacttgttttcatgtaagttaaaaaaaaaagggggggagtgtctgagcctactatggctcagaagggtgcctgattaaaaaaaaaaagtgtgagagaaaaacgcaaaacacatatttgatccagagccaaataaatatgggacttatttactaccaaatttaaataacagaggtcctttactacttgtctctctcatctctaaaccacttcaaaattaatccaacactgaccagtaaaacacactgaccccaaaataatacatttcttttcttttcttttctttaaaacacacaggtaaaatctctagatgtcctagatagcctgtgttgagtgaaaggttattattttggccaaagggaaaacaaaggtttttgttttttttttttatactttaagtttcagggtacatgtgcacaatgtgcaggtttgttacgtatgtagcatgtgccatgttggtttgctgcacccactaactcgtcgtttacattaggtatatctcctaatgctatccttcccccctcctcccaccccacaacaggccccagtgtgtgatgttccccttcctgtgtccaagtgtctatttgattttgatagagtgaggagtggagaaggaaagggtcgaccacgatgctggagtccacctcttctggaggagaatgagtctgtgagaagagagctcatatgtaaccagatggtttatttttatttctgaggcatgagaaacttttcattagctccttattttctcaagccagtatatacatttatttttaaataagctaaataaa

SEQ ID NO: 196739 - DNA, 1000 bp, Homo Sapiens
gatcatgggggcagtttgcccctcagtgctgctcagtgatagtgagtgagtgctcatgagatttgtttgtttaaaagtgtgtggcacctctcccctctctctcttccttctgctctggcctgctgccccttcaccttccaccatgattgtaagtttcccaaggtctccccagccatgcttcttgtacagcctgtggaaccatgagccaattaaacctcttttcctaataagttacccagtctcaggtatttctttatagcagtctgagaatagactaatacaagtggtatgccctaaattaccatgcaacctaaaacttaaagggagagattaaataaaacaacatttttgtttattaaaataaccatctatttaaaaatgttcattacttaataatgacctataatatccatttaagcatcaaattgggcaaaaattatttacaaagttctacttttgtttctctctttaaataaaatattggcttcagagcactcataagttaatagaccaaagagaattctaatctttcgattctcggcctaattttctcctttcattttcagtatgaacataggggttccaggtagacattgaaacaaaactttagaaggattaaagaaggaagtaagagccaaacaaggaaaaaataagaaacaaaaaagaatggggtaatctctcccatgacaagccctgaatataaataagggtgcggtcttaaagtgagtcattactccattgcctactcctttcatggcagagacagtgatgtcgtggaatagaagctgttaaagaggctttatataactattagcctctgaaacaatagacaggcagcagggtgttgttccagaaaatgttcaaagaggaggagtaattttgtcctttacaaatttaatatcttctcttttctcctatatcatttggaggaagcgcctttttcctttttctcttttttaagcaaaataagcgttatgcactagtaggtagtgagtgaatt

SEQ ID NO: 196740 - DNA, 1000 bp, Homo Sapiens
ctgtgagtgcaaagcccaaccatgacagcctaacctagagcccacagtttcttgaaatacatgtaagtttctgccatgtccacatgtttttctgtaaaaggggcttattatttcccattacatttctcatacaggtctccgatctcctaaaaggccaacttaaaattggatctaagacgacctaggcctgagagactcaggaaaagcagtgaaattctgagaggtggttctaaggtgcctggagggaccaaagcaacctatgaaccagggtcccagaggctgttagtggtctcagtctcgacaagacagatggctatgccagaacccatctgctacagcattaagccacggtctagttagtgagaatgtgaataaaggaagtagcatggtgacctccactctggtgcaagctcctcatcacatcatgagcccatgaacagtttaaaatctgagcatcctaaagagagaggattttcatcccaggaaatgtaaatacagtccaacccaaagtgaaaagtattgtaaacatattgctttctaaagcccctgtgctctcaagagattattttttattcatttatttattttgagatgaagtctcgctctgtcgcctagactggagtgcaatggtgtgatctcggttcattgcaacttctgcctcccgggttcaagtgaatctcctatctcagccttctgagtaactgggattacaggctcgcaccaccatacccggctaatttttgtctttttaatagagacagggtttcatcatgttggccagcctggtctccaactcctgacctcaggtatccgcctgccttggcctaccaaagtgctgggattacaggcatgaaccaccactccttgcctctagagataatttttaaagaactggagtacttaacaaaaagtcttataactctattgagaaaaacctgattcaaaaatagtttctatgtcatatccatagactaatacccacaactaagcaaaagaattc

SEQ ID NO: 196741 - DNA, 1000 bp, Homo Sapiens
caccataaaaagcacacttaaaagaaaagctaatggctagaaaagaaatataaacctttccaaaatgccagaataaaaaatttaaaaacagcagagataataaatcacacagaaaaacagtatacatatatatttagtaattatagaataacatgacaggtttgaggccaaatatatcagcagcttattgacatgaaagtatattcagattgcctcaggaagcaaaagaaaattctctgctgtatggcaaagagacactaaaacaaaccaattcaaagtggctaaaagagaggggtagggagaaaaaaaatgaaaaaaaaaaaaaaaccaacaaaaaacaaagtggctaaaagagatagagaatgataaaccaggccagtgggaatagtagaaaacagaagctgcaatcctaatataaagatatgtgaggctgggcacgatgggtcatgcctgtaatcctagcacttttggaggccgaggtgagctctgcttagtcccgggtgttgagaccagcctgggcaactggtgaaaccacgtctttacaaaaaatacaaaaactagataggtgtggtggtacgtgcctgtggttccagctacttgggaagttgaggtgggaggatcacttgagaccaggaggcagaggtcgcagtgggcagagatcatgccactgcactccagcctgggagacagagtaagaccctgtctcaaaaaaatattttttaaaaaaagatacatgtggaagaactttctagaaatagcacagaaaaatatagttggaaagagcacaacactgacacacagtagtgaagaccaagacatatctgagtaaaggcacgggaattcaaaatgtgaaacgaatccttttgtaagcaatcaaacccatcaaagtacttataaggatggagaatggggcagaatcatgaattctgaccttattaattcaataaatgtgtattagctatatgctaagtattaaacactaacaagctatttggaattc

SEQ ID NO: 196742 - DNA, 1000 bp, Homo Sapiens
tgtgggacacagtcaccagaaacccagactaccccttccagccatcacgccctcctcctctaggtgacagaccccaccttttgggagcctctccccctaccttcactgtactctggtttcctgccttgacagatggtaggcaattttactctgggcagccactcaggcatcaatggttcaattttttttattaaatgacctttcatcatttcaggtgtgatacaatgagaaacaaaaatattcaaaatccaattagtacatgcaacttccaaatatacattctgtaaacatagcaaactgtcctcataaatactatcatatcaacattttgccgaacaggaggtcacctcatttcaaagtgttgtggataattttggaagaatgaaaattctccaaatcttctccatgcacaacacagccgaacgcaagaagacattcacctgtcccagcttccccctagccctccacccctgcagaaaaggtgttaacaggaagaagtggaaacagcgatttctattgcagtcagctgacaggaataaaatcaattaagcatttgcagaggagggaacaagagaaataaatatctatttgcttcttcaaaggccaaaagaaaagataatttgaatcagaaaaataatccagattctaaatcccctttgagcgtcagcttcttaaagttactgatttaaaagatatttcctggaaatgccttcttagttaagtagaaatgtcataagtaataatgattatagcacacatttctctactgacagtatggcccccaaaccctgcttttgagacaaaaatgatggggactgggcagctcccagctgctgttcataagctacccacaaagcaattatctgcagatggttggtgagattatttaaggaatcggctggcaaagcatggaagttcactgtccaaatggtgaaactgaggccccaaaagcgagtccttctcagagacgtggggagcagtcaatatctgaaaagaattc

SEQ ID NO: 196743 - DNA, 1000 bp, Homo Sapiens
ccttagcttttttcttataaaagatattttagatccattttactgcatgaatcatttctcttccaaatccaatatgttaaacgatttcacagtatagcacttatcaaaacctacatcctggccaagtgcagtagctcacatctgtagtcccagcactttgggaagccgaggtgggcggatcacctgaggtaaggggttcgagaccagcctgaccaacatggtgaaaccccatctctactaaaaatacaaaaattagccggacgtggtggtgcatgcctgtaatcccagctacttgggaggctaaggcaggagaattgcttgaacccaggaggcggaggttgcagtgagccgagaccatgccactgcattccggcctgggtgacagggtaagactctgtctcaaaaacaaaaaacaaaacaaaacaaaaccctacatcctgtgccaggtcctagaatgattccacaatagtggtggtgtcccctgctgggtttgaccctgttctttatttcagctagtgtccgcagcaatgactctcagcagatgcttgtcacagcggagggcatgtttcatgctagcagctgcactgcatttgatgtgcaggacagccctaggagggttgctattcccattctacagataagggaactgacggtccagagtcacatagtgagagcagtgaagccaggatttagacttctgtaggtctgaattcgaacccagtcactgcactgtacatgtacgagtttcctctttcaaccacatggaactgactttgtagactctcgggaagcaaataagtctgacatgacctcctcactttgtccattagtgctagcaaaggtttcctgaagttgcaaagctgattcttgcagcctcatgggcacccatttgagggggttcacctaggcccagaaccccctcctcctggtgggagccccatggacctcccctccgcaaggccttttagaaatctgagagcagagttctaagcaagaattc

SEQ ID NO: 196744 - DNA, 1000 bp, Homo Sapiens
ctcataattcactgaaacgacttaccaggaaagttttgtgtactaaggttgggatggacactggaatgaaggccggtgaggatgacgaagacagttattgagacatagtcactgaatgactagtgaccagttaataaacttagttgtttccaaatagccacatggtagtcatatgggatgtatttgttgaatgaatacaaacacagatcagatagactcaggctttccaatgtagctgatgaaatgtgatcagaatcctgagagagtttatgacctttctaagaaaaggctctatgcagcctgtatgttgattcagtggggaagtgcaataatcatacttcaattgacagcaagcagctgaatggagacagagcctcctctgtggcattactaagaccctgaatggatatctacctaaacctgcatgtgatatatatgtatattgctctaggctgctgtgtttcactgaaaaactgctatgttctagttctgttagttctaaaaataaaggcaacaaagcaacatcttatattcagaagaacagatagtggcaatttctacaaaaaccaagaactaaatcttaaggatcctttgacctctgttatcactgaaagacagagctatgcctagctccagcccctagttggccagctgtagtcacttgcagcttccctaatataccaaatgtgctccttcattcagacactgaattgcttactcattcctttgttcatcaaatacaaatggagcacctactttgtattaggaacctggaaaatagagataagacagtcttggggggaggggagaaggggaccccatgtatacaagacaatttgagagctcaggtgaggtgcagctggtcagaagtagtaggcaggaaagattccccagagttgatgcctcagttgagtcttcaagctggggcagcacactgtggggagaagaccaagcaaaccaaagcttgaaagagcatggcatgtgtggggaactggaattc

SEQ ID NO: 196745 - DNA, 1000 bp, Homo Sapiens
ttttttcttttcctgctccagccctggaatcagtcatttttctaagaagctctagttcgccttattagagaaaggtatatagaaaccaaaatttggtgctagatgtgcttattgttcctaagatgtcagtacttctagccgttctcaacagatagagctaggaagtatatgtgtatacatatacatatgcacacgtttgtatctatatattaaaaaccttagggttcattctcactttcccccttatatgtaactcttttatctgaatgtgagaaacctggttgtcattatccacaatgtgtttacttatttgtgcaattctaagctacacacatagtagttttcagaatgctaacacataccccacgagaaatttgctaactagaatgtaacatttgtgtgcatttttttttgtttttagtgttagaatagagtactgttttctaaagttatttaggttcttctctacctactttgtgcttttgttcatttgtaatacattaggttctcttatttcattttgattaaaatcatgttggttttatttatttttaggtgatgtcaaatattgtcacagttctaagacttataaatacatgaaaagtatgctcagaaggtgtcatttcttcctcattctttctgactcattcctgtcctctttctgtagataatctcattacttcttggtttatccttcctgtatatatattttttacacacatcagcagatgcatactgtattttcttatttcctttttttatacttgaaaggtggtattttttgttgttgcacaaaaattgccacaaacttagtggcttaaaacaacacaaatgtattagctcatagtttctgtgggtcaggagtttggacatgggttagtcgggttttctgcttttctgctcagactcaccaggctgaaattcaggtgttggccagggtttcgatatcatctgaggcttgggagtccttttccaagctaactggttgttggcagaattc

SEQ ID NO: 196746 - DNA, 1000 bp, Homo Sapiens
tatcttgaacaaatgacaacaaaatacaggacaaagaaacctcctatctgcttttctaagacttgccggtcgagagtagccaacccactacgagaaaattctgaattcttattctgtaacttacagtagttacctctgggcaggagtctattgttcatgattaggacttccaaatgggagcaaatcccctggcaacttccagatttaccagtggggatttgcactttgatgaataagtcacactgctaaaaattcagcatgggtcttaatcggtgctgaagctaagttcggaataaacaaaggtcagaccctttttgctgtcattcctcctttgtgttattaaggtcttgtttggaagcattttgtcatacatttggcaaaagggtaggaagcaaagtagtgaagtccttgtgaatgtacaagcagtcaccagggcactttgttaccattctgagagaaatgttctcaactcggaaagagctctgacatttttaaaagagatattgcaaacgctttatgaagtctttgtgtcctccaggccggcattgttgtttagcgtaatagccttcactttctaagcaaaatggttgggaagcttttcaatgtaaggtaaaaggtgtcttcctactaccagtaagtaacatgctttcatctttttgtgtagtttttttttttttttttaaaaaaaaaaaaaggaacacattcaatgatgccatgaaatatgaatgagttatcttttccaaatttgtagttaacatccttgttattgtcaaagaattcaagactccaaagagtaaatttttgttgaatccaggacaggatgccaagctagattctttggtactgacttacatgtgtcagaactgatctccaacaacattgcaaatttatcaacaactgagttcagtatgcctgaaacactctgtgggtggcagaaataaacaccacacacctgtgactgactagttattattaatttctcagtaactgcaatgaattc

SEQ ID NO: 196747 - DNA, 1000 bp, Homo Sapiens
cactgagagatacataccttagggttccagtgggtcaaatggctggaaaaccatggctgcaaagggaaaggcacttaaccacattgtttccctatatttcatttatatcatcattcaagttctttgactctttccatgcagttctacatctcgctgtcagaaggaacagtgtatagggggatacccagatctggtcctggagccaaacttagtgggacgctgggtgcagggcaaatccctttgtgtgccctgactcttcacaccaaaaccccattatccaggaaccaccgtgggggaaaggggaagctgtaggtcctagagctaaaagaattaagaatgaaatgttccatagggacggtgtatataacagaaactattattttctgagatgcagttgtgccagctactgtacttactggtaattagtggttacaaccccctattgcatttgaataaatgcaggctcatcgagaggcaggtgattttcctaagatcctagagcttcccagatggattcctcctgcacactacactgtgctgtagggacgggcaccccataagagccatccggattgcacaggtgacagtgctggggagtcttcatgagaaccactgggcagctaagcactagctaagaattctttcttcctttctcttttatttaacaaatgtttattggagcctaggaagacctccactccctaaaaatactccatggaatctgaagcacagtccctgattcaggaagtttgcacagtagtgggaaaggccatgagtgaacctgggtttcatgggacctgaagcttaagcaatttggagagccctcttttggaaaaagaacaccaaattagaaagtggggcttggagggagcacagcaaatgaagggccctaaagcttaagccttatgagcaccactgtaattctgctttttgggaaacaagcaagtagaacagtgatgacaataaaatgtagtgtgggctgatgagagatcaggagagt

SEQ ID NO: 196748 - DNA, 1000 bp, Homo Sapiens
aaaaaaaaagatcccgataaactctgtgccctacacgaggtcatctgaattccctgacagttttaaagcatcctcaatatcacctggtgaatgagtgtgcccaataacagttttccccttcccttccccgctttccttctggacttgaagatacgctgtgaggtcagaatggagaagagatgtgtagtgctttgggtgctgacatggcaatttcaagacatacttttttcttttgtgagaatcaaggtgaaaaagtaggaagggtgaagtatgtggggggagtctgggcgcatattgtactacactacaatatgtgtagtaacggtagaattagaccgttgaaagttacataaccataatgaataataatttaatttttgtacaagcaacaaagaatagtgattgaatttttttcttaaataactcttttgactaaaataattaacataaatacacacacagagggctgggtgtggtggctcacgcccgtaatcccagtagtttgggaggctgaggcagttggatcacctgaggccaggagttcaagaccagcctggccaacatggcaaaaccccatctctactaaacatataaaaattagccgggcgtggtggcgtgtgcctgtaatcccagctactcaggaggctgaggcaggagtattgcttgaacccaggaggcagaggtttcagtgagctgagatcacgccactgcactccagccggggtgataagagtgagactctgtctcaaaaataaaaataaaaaaaaaaaataaacaaatacacacacagatgaggaacttgcagggctttagagacaaagacagagacagtcaaacatacagtgttccagggtaagaaccaattataccactaactccggggattcttgaacatgtttaatctcactgaatcccagttttcccacctataaaatgaaatgtttgacaagttgattgccaacgtgctttcctcctctaacattctatgattgaagaattc

SEQ ID NO: 196749 - DNA, 1000 bp, Homo Sapiens
aaagaaaacccagacaatgaagtaagggccacaggatttcaaagtcaggaaaggagaaatcagtgaaataaacccaactggatttcattcattcattcattcattcattcactcattcattcctctataggccaggacccaaatagatctctatagacccttctaggtttatagcctttctccagagtaccaactggtacaatgatgaaaggatccaaaaactgtggagctggaagtttactgatgaggaaaatgaggtttgtaaaggttacgtgcttgtttagatgaaaaagaaatgggatttagctggcaagactcgattagtgagaagggcagtccattcatgtgtaattcacagatttaagatttacatctttgttcagtggagtgacattatttgacaggaggtggtgctgaggaggttggacaggacaaagcccacttttcagagttgggtacactttactactctattgaacattttctttcctaagttgctgataacttccttattgtcaaattcatgggcttccttgtcttattgtctcactaacttcctccttcttgcaactatctgggcttccaagagaaccgacggtccttctcctgcctcctttttcttctttttgtctactgtgggttttccctaaggctcacgtttatggtttcaatcctcattttgtgttgaagggttccaagtctacattgctagccctgttttcccattgaaatttcagttgcgcatgtccaaatacctagcaggtctttttgcttgactgcctggctatgggacataatagcatgtccaaaatcagatcaaagtcccctcctaacccagatcatgtctctattttcacttgttcagtaaatgacacccatcatttccctagattcttaggctccaagcctacaaatcattttttcttcatccttttctgttaatgctttgctgagattcagtctgtagtattctgggggaggcagtgtgtcctaggaattc

SEQ ID NO: 196750 - DNA, 1000 bp, Homo Sapiens
acaatatttcctacaatttagaaggcctctcctaccatgtttcattttcattatattttacattatgttttgcatgctttgatatattttctgcctatttttccaaaagaacttaagaatcatgttgctaaattccataaaaagtcattgcagccccgacctcctgggctcaagcaatcctcccacctcagcctcccaaatagctggaactacaggcatgtgccaccacacccagctaatttttatttttttgtagagatgaggtctccctatgttacccaggcaggtcttgaattctgggctaacgcaatcctcctgcctgagcctcccaaagtgctgggattacagtttgatgggttgttacctgatactgctttttagcgaatagtaggaaaactaccatggaccttggggaccaagcatgcagtgccaagtggggcccgcctgcagaaaccccgccggctgcgtccctccttcagcgctgtgagcctctgcggcctccccagtaaaatgggtatagaaagtgatgaataaggaagctccggattttcctctttgtgtttccttaatcaggttttagggttaggaccacgtttgcctaatgggatagacatgctagcccaccattagaatcaagggtgggaaataatttttttttttttttgagacagagtctcactgtgtcacccaggctggagtccagtggtgtgatcttggctcactgcaacctccacctcctgggttcaagtgatcctcctgcctcagcctcctgagtagctgggactacaggcactcaccaccacgcctggctaatttttgtatttttggtagaaatggggtttcactgtgtttcccaggctggtctcaaactcctgggctcaagtgatccacccgcctcggcctcccaaagtgctgggattacaggcatgagccactgcaccgagccagaaataatttgtgatgtgagaattacttatttcttagaagtttgaatgaattc

SEQ ID NO: 196751 - DNA, 1000 bp, Homo Sapiens
atagctgggcttgtctccttcaggtttttctgctgttagaaaaaggggattggtggaattgccattccataagtgttgcagtttctccataagaagatgactgccaagagctgtatttgaagtgatcttttggcaattggaaaactaactcgtatgctattatctcccttactattactttctgctttttagaagtatgtcagctgtttgaggtgccttggttccattaaatgttccctgttattctagtttatttttttatttgacatattttttaagtttgggctctaatgacaaaaaagaacaaatctatttttatatgatcaccaacatccaaccttgttctaaatttctatcccaggctttcatcaaggcaaaaactaaacaaccattcaaataaacaaaaaccttacaaattttaagaaaatttattgtgcttgttctgccttccaggcactgtgccaggtgccaaaaatagaaaaataaattaaatctagtccctgctgtagagaagctcccagtttaatggtgggaaaaaacacataatcatggtaaagcgcataacgactcaattaatatttgagttcctactctgttcaagtttctgtggcttcaaaaatgaacacaacagacatgaagcctgcctacatgtagattagagtttgtcagagagagcaaccattgaactattcattacaagcatgatcagtgtctccatgggaaaaaaaatgaagcattatgaaaacgtttaacaggggcaccacttctaatttgaagggcagaacaaatattcatttggaaatagtcgtggcaactggggatggggtggagaaagagggtaggcagaagagttccaaaatagcatgtgcaaaagatccttgaggctggaaaaagaaagatgtgtcctgaaaccacaggtaagctatcatggcaggagtaaaaatgagtcaggacagcgggcatggctgcacgggttaaactcttaagagtagctgaattc

SEQ ID NO: 196752 - DNA, 1000 bp, Homo Sapiens
ataatcaaattcatgtaaatttccacagcagaacagattaatacggacactaaatgggatgataaagaccagaaatagcctcacattagctcaggtcaagttttgccaccaaatgaatttaagcaccaaaccgcaaaaaacaaaagactctgttttcagagctttatgatttcagaatttcaggttaggaattatcaactctttaatgccagggtggcacatcaagtcagtgatgagatttgtaaaaggcattgggattacatactagtcatttagaggaagaaaaggataaagttaaattcctacttaatagcaatattgtttatgtttaaagattttatgttaaaaaactaaagaatctataaaagcacaaaatatatacttaatctttatttataatcttgtggtagcagagatctttgtaagcatgataccaatagcagaaactaaataaattttaaaaagagatcttacagccagccacggtggctcatgcctgtaattgcagcactttgggaggccaaggcgggcagatcacctgaggttggagtttgagaccagcctgaccaacatggagaaaccccatctctactaaaaatacagaattaccctggcgtggtggtgcatgtctgaaatcccagctactcgggaggctgaggcaggagaattgcttgaacctgggaggcagagattgcagtgagccgagattgcgccagtgcacttcagcctgggcaacaagagagagactccgtctcaaaaaaaaaaaaaaaaaatcttagattactaagcaaaaattacaaagaacaccataatattaaaaactaatgtcaatgtggagaaaatgttggctatatatatagtggccaaagggttattgcccatagtttataaagagctcttacaggttaataaataagagatgcattctccacgacaaaatcagaccaaagatatgaaaaggtaatttgcaagagaagaaatacaaatggccgctgaattc

SEQ ID NO: 196753 - DNA, 1000 bp, Homo Sapiens
tattaagaatcccaggatacctcttagaatggtagaggtgatgttagcccttatgtcctggacatgatccagtttaggtaattgctaattacaatctgtctacttaattcccacggcccttgcttctgaatgttattttcttcacttagcaatatttaactattatttgctcttggtgtgtgactgttggaacatctgctgattcctccttctacgttcggcatgatttgcttttcatttggttatttgataattattattttcatattatttttgttctaaatatgtctatagatagaaaacagaagccctgtaaaagttttagatattttttaactgcgtgggctggactatgctttgtcaatcgagcatacagactttctggatgtaagtttgggaacagtgggcataccactggcccatgaaacactcactataagatagtgtcaactcagaggtgaatcacagatagaccagggttttcagtgtcttcaaaactagggctgaaatcacagcacttaggggcttataagtagatccctctaaggatctatcctattctggagccattccaaaacaagagtacctctgttttgggtgctagagcatgctttatttcaatcacaattcaatggaactgaagaacagaattagaaagtgatgagtcaaaaattcttattcaccgcaaatacagggctagataaactccaggtattccacacagtttccatccctctgaaggaagcgagattactcttgtgtccgctcagctatgagcaccttgatttgggatatattgcttggagttcagatggagaagacatccaggttttatctataaactaccctccatatctctaaaagttacttagaggaaatcactgagttgaaacttcattcattccctagcattgtcagatgaactgaagcatctttttcaatagtcaatatatcctgagccttcttagtgaacacagtgcttagaactttcaatgaattc

SEQ ID NO: 196754 - DNA, 1000 bp, Homo Sapiens
ggtggtgcatggctgtaatcccatctacttgggaggctgaggcaggagaattgcttaaacccaggaggtggagtctgcagtgagctgagattgcaccattgcactccagcctggggaacaagagcgaaatgccatctcaaaaaacaaaaatttatttatttactttttttatttttaaaatttttattattttttatgggtttgaatctactctttttaaagtcgctttctgtttatttttaaaatttctagttcttaaatttcaaattcccccattgcctgtttatgattatttcatcagattcctaacaggaaatagatgatatactaaaatttgtataattccaaggtggtttatttacaaagggaccatttacagagctgtgagcaggatgtagtgtggccacaaaggatagtgcaataacctggaaatggttgcagtggagccattactactccttggcctgaagagatgaggatagggagaagtgtctagaatttgaaagaaactcatgaaggaaagatcaccttgagaggtgcaatgaccttctgttgagagacacagccaacagctgagagagagtcaactggggaataaaactgatcccactttccaatattctgctagggtttcccattggctgaatctaacaagaggccagaagacatgagaactcactgatgtagtccatgtaggtctgcctccagcaatagaagacagatgtagcatagtggagagtgggtctacaggagcaaatggaagacatgcgatgtactttttctccatcctagcgaggtgtttctccatgtgatttgtaagttttggctgtgagttcatctttagctggttgttttatatgggagtcccttgtgccctgggttgagaggggtctcagttaggaagttttatgtttccctgtctctggccctacaagaaacactgtatttggatctcttttcatgtgcgtttttctacttagagtccctacaccgtgaattc

SEQ ID NO: 196755 - DNA, 1000 bp, Homo Sapiens
gattaaaagttgcatagaaatgaaagatggcattggattttgcaatatcaaagtttgagtggtatgtggcaggaagcctcccaggcagtagaatctggcttgatctctttctaaaggtctagactggaggttttcctggagaaaaccacaaccgttttctccacttttcggctactggagctgccagtacttccttgtgtttgactcaaccccacatcgttcaatcccacagctatgatatgacttcagcttactaactgaaatctaaattccagttcttctatgtcactgagcaacaaaagaagaaaattgtaaaatacagtacacaagaaatggagaaaatgtaaatgacaccttaattgttatcatcatttgctttaaaaagttaattttaaatatttctcttgcatattaatttttgaaagagaagactatctattcaactagaaatagatgcctgccactgcaacaaaagaataatatgagaaaccaaagttcaaaagttgaagatgcaataggaagggagtaataaattggcctccctaggccaggtagagagtagggggtgggacaaaggtgaccaaacagtttactaaatgagaggcaccacttccctcccagaagagtaaagaacagtgattctcagccaggtgggccaggcacttgtcatgctattcatggttaggagactgttatgccgactgacctgtctaaattacgctcaaaggaggatgaggggagaaccagtgttgtttaattaactgaatcttggaaagcaggatgtctcctaaccagcaaaagacctaacagggtcatcagtgtctccactggctaggcttaccattttttgtcaagcagccatataaactccttcccctccaaaaaaaaagtgtctgtctggatgacaaagtgtcaagatacttgataatctgcagacagaaggtatttcatgagcagaacaaacacaatacctggatatttttttattcaaaatgaattc

SEQ ID NO: 196756 - DNA, 1000 bp, Homo Sapiens
atctgcccacctcggcctcccaaagtgctggaattacaggcgtgagcccggctttgactccacctcttattgggagatgacaaggtcatattgtagaagattagtcgagatgggtgatagtgccatgaccatcgttggaaaatacaatctgccacttttcaataatacatatgaagacgttctggaccccatagcattctagccacaattgcttgtatcttttcttctttttcatcctacagcctctgaacttggatctgtttcatgctatgccaggcctgatactcacccaatgagttcaactcaaggtctctagcatcaaatgcttaatatgcagggattgggcagtaaccttcagaactgctttgtgttttccatcttgctactttatatctttctttcctcttcatatcttttcactgcttttacctattccgttgaccttttatcaagatagttgtgtgtgccctatttctactcattggtattctcagagtgtcctcatcttatctcaccactgctaggaaacaatagaaaagacttaagaaatggaaatatttgaaacataattttgagcttaaaaaactcataacagctcctcatagtatctagtgataaatatgaagcaagggagttttcatgagtagaaacatttcagcattcatagcagaaggttaattttagttctttaatgtccactggttcttataaagagtgtggaattattatcttaggccagatctccctaggtgagataggtaatgttattatttttatttttatttttgtttatttatttatttttgttaaatggggagttgagtggggagagaaagagagagaaactcttaatctttttgctcaggatgcaagtgaattccaatcaaagtatctgagaaacattagaccctaaggaaatacttgtttaaaaactagctgaatataatcaatatttaccagtgttaaccatgtaaataagtagacatcagttagtgaattc

SEQ ID NO: 196757 - DNA, 1000 bp, Homo Sapiens
aagcaaggcttccatcactcccctttcagaggcaccacattatcctatgaggttgggtcagacggtggtgctatgtttgatccttttctcgaacttcttgtaatcgtttttctaggcgatccaatttggcaagattttccttcagcagtttgctgtctggaaccagctgtaaggctctctcataataagctcttgcagacacatattttccctgggggtgggaaagagggagcaattacattctgatccatcacaaaactctctcagagaatgaagagactaagaaactgaccctctgcccagttttacattaatgttctcatatggaaactctgtctgtatgtgtaattttatccttgtctattggtgcttttgaagactccatttgttttaagcactagatcagttgcagaatgtgaaagaggagagttatactgtaaggataaatggcagaaaaacagattttcaattctactaatgcagggtgtgaggttaccatttcctggtgtcctcagggggctagtactgttccttgtaaaatggaaccatggcacaaaattcatgttaggggaatggggtggaggggatgggagaatgagagatgagaaaatgtttttaaaactgcaagaagaatgattaaatagtttatgtatccactctctctgtttagtgatagcagttattctagtcttcagcttaaaacgtaaaagtaacttttgcctaataaagttttttgcaatgaaaagacttgataagaatgtgaagtcaaattttttactactgcaggtttgcagcagtatgcattagctatatacttttagtgcagtatggtatgtgactcctgacctactaaacacaactgtccccaccctctgttggcttccaactgttttgtttgattcttcaactagcaaccatgtgtgcctggtcccagaaggggtccctggcaactcagtcacagctattagcttttttcagcattttttctgcttctggatgt

SEQ ID NO: 196758 - DNA, 1000 bp, Homo Sapiens
atactacatcacacttcttcccaccttctgtgtgcttggataaggattcaaaaattaaaagtcacattcagcaacctattagaattaaaatgctggctgaaggaaaagaacataattaggatattgttaaagcaaactaaatatggcctgagaaggactcagtacttctatatttgagtccttatagatgaactataacctagcttaacagtgagacaaaattgaaaacctaacttagtaatatgcacctgaaacaatagctgagtgttggccaatctcagtggcctacttcaaccactcacagtctgctgaatgttcaacctgtgttcaaacaaggcaaatgccgagctgtaaccaatctcactctttctgcacctcacttctgaaagtgaaagtaggtcattttacgtttttttgtctataaatttgttctgaccacaaggcacccctggagtctctgaatctgctgtgattctggggactgcccgatttgcaaatcattcattgctcaattaagctcctttaaatttaatttggctgaagtttttattttaccaatataatatatcaactgcttggccagaagtatgagaacataaggaacttgtacgtctagcaagagggtaaactggatgttcagatgaaaccgactatacatgtttaaacagaaaatatctcaaaatgctgagtaaaatataaaaccatacttttgcaaggttataaaattcattagagatcagaaatgataacaaagaaatagacgggtaaattagggctagagccagcatttgccagcaaaatgtccactaatacctggtggtctacagcgtgggttttaaaaaatgtttaaagaatagaaaataaatttcagatcaaaacacataaagtctcagaagatgaaataaaataaaactttcccttagtgattcacagtgtagatgagtgcctggttttgccttggtgaagcaaggggaatgaaaaacctctctcctctgaattc

SEQ ID NO: 196759 - DNA, 1000 bp, Homo Sapiens
ttcaaaaattctgctgaaaggccaaccatgtagttattgaacaagttcctgcctgattgtttccgttcaggtagtaaagtgtccaaagtaaatggattcatttgtaacatagatcgcccctacagcaggactgcttgacagtgtgcctgctagctgctgtgtccccccggccagccccacaccagattccagcctgaggtttgaaggaaaagggccgtcaagtttgtctaggacttttagacgctaaatgaagattatgatggaaactgtccttcacaaaattaaaactatcctttttcctaggaagctctcactgatagagaggcttgttttgatttccagatttatattgagaccatttatatgcaggcatgtgtgtgaatgtaagtgcgtgtctcagaaataactaatcctaacacagcagaatgatttggcttagtctatagcagccagtctaatcagagtatttcatagtctatctcacatcttgcaggagtttgtccatcttcgtcagatggctcattatgccagccaaaatgacaagctctacaggcccactgacccccttgtttcctcatgtatagataaaactcagaacacatgaactcgaaagacacagtgactcgatttgcaaagtcccaaagaaccactgcaaaaacttagctgccacttgcaatataaatgttaccatacctttgctttcatgttaactacccttcatattttaggaaactacagtacagttaaaactgaaaacatatccagacatagcaaacacaagttacatcttgtaattatttatgcaagttccttaactttaaagccacaaaccatttctacagtaattaccacactgcaagtacatacaattttagttctgaaggacaaacctatatgcttctctgtgatttcatagtgcattgctttaaaaaatttctgcaattcaatctaaaacacccaactttctaacttcaagcaaagtctccacaaaaatgaattc

SEQ ID NO: 196760 - DNA, 1000 bp, Homo Sapiens
tttatttatttttaaattatactttaagttctgggatacatgtgcagaacgtgcaggttacataggtatatgtgtgccatggtggtttgctgcacccatgctatccttcctctagctccccactccctgacaggccccggtgtgtgatgttctcctccctgtgtccatgtgttctcattgttcaactcctgcttatgagtgagaacatgtggtatttggttttctgttcttctgtttgctgagaatgatggtttccagcttcatccatgtccctgcaaaggacatgaactcatcctttatgggtgcgcatctgatattttcatgtttttttgtgtgtgtgttttttgagacagggtctcgctttgttgctcactggagtgcaatggcatgatctcggctcactgcagcctcaatttcttgggatcaagcaatccttctgcctcagcctcctgagtagttgggactacatcacatgccacgaagcccagctatttttaaattttgttgtagagacgggggtttcactatgttgccccggctggtcttgagctcttggtctcaagctcaaccactttgccctcttaaagtgctgggattataggtgtgagccaccgcacctggccatgatttattttagatgttcaaatggtctcaagattagcctgcaggaagcccttcaagatgtcttctgtatccatttgacatgtccttattgttctttgagcacttcctttgtttggcacagcaagatcttctagagtaccattcctgccccaatcctgaagtcaggtgtttctccgagccctggttccttttagtgaagaatggtatttagaaaccaagatctgggagctgggtatactcatgttattacagcgttgctgcttccaggtcctctatgcatacatacatccacatccataggtatatctctctacatttttttttcagtattactaccatactgaatacatcttgatattttgggaaccatgaattc

SEQ ID NO: 196761 - DNA, 1000 bp, Homo Sapiens
agttcatcttcgcctcagtttcctcctctgtcaaatgggatagtccttaccgtgtatggaatttaaagcactttgaacagtgagtgtgagccattactaactcaagtaataccccttcccaacccagaaccctataaggcagggacagtcagtccctctctctgctttagggggttgcaggataaagacaccgtcacaagaaatttaaacacagtaggtaaattttgagccacagcaaagcacagaggttgcatccaggccagcttagcactgttgaaagtcaccatccccagcactgcagaagctgaccctgaactcaaggtcacccagggcttaagcctcagagaaaaggcctgggttgaacctgagcagtgggtgagtgcagggcaggcctctggctccctggagggagaggctagccaggaagttgagcttgaacctgatcccgagggagaggtgtggggcatgctcatgatctgtccgggaaggtctctccagctactggaaggggagtgcccacaggggccaggagaaggcagttgggcagatgttgccgtagtccggacacatccaggcatacgtggttttgaatcacttcctctccaagggctgctgcttcctctccacccctcccaagtgttctggctctgggccccagctggccacctcagcccaggcaggctcctccaacctgaacgacaggcaacctccacgctgcctgccacggcaccccaaagtcaagacgtagaactcattccacctccttcacccgaggctgctttcccaaacgtcttcccagtcccaccttcagttttgttttttgttgttgttgttgctattgtttttgagacaagtcactgttgttgcccagcctggagtgcaatggcacgatctcagctcgctgcaacctccgcctccccggttcaagcaattctactgcctcagcctcccgagtagctgagattacaggcccctgccaccatgcccaggtaatttttgt

SEQ ID NO: 196762 - DNA, 1000 bp, Homo Sapiens
ttgggaataatggggcttagagttattcagtgcactgccctatgaacttcacacagctttcttggtagaagcagtcttatttctccagccttcacagcagctagtaatgcctgtcccctggtagctataagattggattgtgcagattcctacagactgtgttaaggactttaagccgtatctcaagtgcaaatgtaagacattggagagcctgaaacaggagaccaagcctgaaaattcgtttggtgtctgaactgtctccctgacactctagcaaaaaaacccagatgaaaggatgatttcttcccatcaccgtaacaggttggaaagctttatccataacagctctaattctcggattattcttaattcccccctcctttgttggagtttgtcttctatttgtttttgtcttactgtctatcagcttgtattaattctcggtttcaccttcctccctctcttatttctttctttacctcctttcccaatctctttgctcataagaatctcagagaaaagtcttagggaaaaggcctctgcttgaccattgcttccatctaaatttgcctattcaccacttgttttaagcttttgtaggggcctatgtgcccagcccttcctctcattttccctttataattaggaggtgctgggtcctccactgcttcccagctttggaactaatttcaggggaagcaggaggaggaggacctcctagaagggagacataattctcatttttccttgtggtaagccccacaggtggttgtcaggtgagaaagctgccgggtcagcaccaccccccacactaagctgcttatctctgactccactgggctgccgttttattagctttacttctcaaaggcacaacccctggattgagctgggagagagtcggaaaccacatcctcttagccaggagagagaaagctctcctgacgggggaaagcaggtttcccaatgcctgggtgactcctgcctcaggactgaattc

SEQ ID NO: 196763 - DNA, 1000 bp, Homo Sapiens
caaggggaagctctggagcgaggagtctgttggcaccagaatctgctctccccgccctttccatagcttcctcaggtaattttctgaccctcatagaagctgagggacttcagcaagtgaagattttctgggtggagcatccccgacagattgcacacttttcagatgctctgctattagaaacaatgatgcaaggggcatcctccatatactctacagcaagggtcccccaacctccaggccactgactgctaccagcccgtggcctgttacaaacggagccacacagtaggaggcaagtgagcattcccgcccgagttctgcttcccgtcagatcagtggtggcatgagattctcacaggagcgtgaacccttttgtaaactgcacatgcgagggatctaggttgcgcactccttatgagtatctaatgcctggatctgaggtggaactgtttcatcctgaaaccatccccgccccccgacccggcaatccgtggaaaaactgtcttccaccaaaccattcccaggtgccaaaaagtttgggccgctgctctacatcattggcacttgtttgtttccttagggaagtcttagaagtgaaatcaatgaaatggtttgcactttgaaattttgacactttttgccaaattgcagaggaaaaaaaactaccatgttgcacttgacaagactgtttaagaatacctttacaccgacaccccagctaaggctgggcatcatggctatggtcattctttttttttttttttgagacaaagtcttgctctgttgcccacgctgcagtggcatgatctcggctcactgcaagctccgcctcccgggttcacgccattctcctgcctcagcctcccgagtagctgggactacaggcgccctccaccacacccggctaatttttttgtatttttagtagagacagggcttcaccgtgttagccaggatggtctacatctccggacctcgtgatccacccacctcagcc

SEQ ID NO: 196764 - DNA, 1000 bp, Homo Sapiens
ttacagatacttggtgggctctgctctgtcttctgccaggttctccaggctgctgggaagatcaatagtactggtgggtaagtgcttttaagagtaaagaaggaagccaggtgaggctgagtgatgactccctctatgagcaaactcccagctttctgagatacagctgggagagctgggtccctgctccctttccaccccaccactaccaacctcctcctggcttcttctcctcactgagaccttggccctttgcctcctgctaaacatttctcctattacacattcatttctactgccacaattcttctctctaggcctgtggctcttgaaaattctgtatggagctgttttctgagaaattttcttaccccatctccaaatgcttcaggagcatttccacagtgatagcttaccagaacatcagaaacggaaatgaaatctcaactctcaatctagttaatcttccaattccttagcctcaacaaaaagcacccatccttctccttgccccaaacctcacgtaatttctgaacatccttcttaagcccatcaggcaccacatgtggcagatgttttatcccaaatgtccctcacacatctttttcctctgttttctcagctaccacattggtcctggctattgtcacctcaaagctgtattactacaattgcctctgaatgtcatctagcagctatccttccactggccaaaccaacttccataagtactgccatgccctccctcctttctgctcaatatttacctgcttcgaaactttcaacacctgccgcctacactccactgcctggcagtcactccttccatgtctgactgcccttccctgacagattttacttcttagcacataacttccatttcttacctccctgactttggtcaggttattactcttctttcacttccggcaagctaaacccatttcatttttcaaggcccatctgctccagggagtctttcccaactaccccagaattc

SEQ ID NO: 196765 - DNA, 1000 bp, Homo Sapiens
cttgcagtgagctgcgatgttgccactgcactccagcctgggcgacagagtgagactccgtttcaaaaaaagaaacatttttctttaagtccctacattcaaggccagtagtacttcagcgggaactcaaatagagaaatggtgatctgctccaatgctttaggtgcaatttagactatgtcattctgtcttaagctcaacctaggacccaacccctagcaagatgattccactggtcacatactattttttttttcccatttagtcttcaaagttgttctgaaccagtttatacagttgacccttgaacaactcagaggttagaggcaccgacccccttatgcaaaaatctatgtataacttttgactctcccaaagcttaactactatagccttctgttgactagaacccttactgataatataaacagccattcaacacatattttgtatgaattacatactgtattttgtattctcacaatagggtaggctacagaaaacgttattaagaaaatcataaagaagagaaaatatatttactattcattaagtggatcatcataaaggtcttcatcattgttgtcttcacattgatgaggaggggaagaggaggaggtggagggagaggaggagggactggtttgttgtctcaggggtggcagaggtggaagaaaatcctcatataaatggacccgcacagttcaaacctgtgttgttcaagggtcagctgcataatatgtcttgttctttagatacttaatacaagacatttcacagcatgaaatgtataagatgttcaatggaaatagttctcttttcatatcacaaaggaaacaaacatcaccatgaaaaaagacaaactaggaacaaatttacaaaccaggaatatatcactttattcatttccagattatgagtatgacacagcatatacatatatttagataatatataaaacatagaataaaccgcaggaagaaatattggtctggaattc

SEQ ID NO: 196766 - DNA, 1000 bp, Homo Sapiens
caagtggctaagcaggtgtgtactaatggaggtcagatcccttggataagccccttgctgtctgggaagtggaccctgatggaggaaacccagagagaggtggggctcccttgggtaccccgggacagtcaggtccccaaagccaggcaatctgcccccagcttggggctgcatgccaccatccctcccccttctcttggcaggccagccttgctggtgcgagcggcccgccactatgagggggctggtcagatcctgatccgccaggctgtgatgtcagcccagcactttgtctccacagagcaggtggaactgccgggacctgggcagtgggtggtggctgagtgcccggcccgtgtggatttctctggtgagccccttgtggcaggtggggttgagggtagctgccccagagccaggctggcagcttctgtgaccagcttgagtcttgccacactgccatagggggctggagtgacacgccaccccttgcctatgagcttggcggggctgtgctgggcctggctgtgcgagtggacggccgccggcccatcggagccagggcacgccgcatcccggagcctgagctgtggctggcggtggggcctcggcaggatgagatgactgtgaagatagtgtgccggtgcctggctgacctgcgggactactgccagcctcatgccccaggtcaggcaccctgggacctctgcaggtggggctggccagctgggggctcggggcagaagctagagactgcaggccagtggggtctggcctgagggccagccagtctggctgaggagcctgaagggaaggaaggggctgggagtcaacctgcaaagatgacacgtgtccctgtctgggagcccagaggcccttttgtggcttggggatggggccagtactgctgctgggcttttgtcccaccggatgagtcccgcactgggctgggaagtccagggtgggtgggtgcctgcgtctgcccatcgagactgaattc

SEQ ID NO: 196767 - DNA, 1000 bp, Homo Sapiens
accacgcttggcctcttgttagatattatatgttctgttattttggttatcttcttcggggtcactagttatataaatattaattttctttgtcttctgtaactaccattttctctttcaatttatttaactcttagtcatttttatttattttactattttcattcctcttctctatgtccattatcatgttataggaaatgtgttttttctgtgctgcttccaattcttttctatttctttccagagttttggcagtaattcatgttttgcctccttgtatcttttccccatgtcatctccaagctcttatattgtgtatttcttttacagtgttgattgtttcactgatttctaaaacttgtaaaaatgatacgttttgtcaaacatgttatctaccctatagcaatattttctgggagggattctgtgtcatttgtttgtcttgtttctcttcttttctttttcttgtagctttattgtataggtcctcagttccactttaaaattgctattcattttttgatgagttgaattgcttctgaaccaactattgtgtaagagttcatgtaagtgagaagccagagtattgttccagcgtaacaggaattcttattttgacacaggattgtgcatacgacctctttcaatcttttctctaactaattatcaacacagggctaagaagaaagcagagcctcttctttttcactttatttacaaatagatttaccaaatacctctgtagtttgtctgagtgaatgctcatttagttatacctccccctgatttttgagaatgtatgttgatgttaaacctgccactggagaatgtggcttattgtgagagtcaaatgggcttgcttgtgttcctggcctcctgatcctcccaagattagatcttagaacacatcacccaaggcaaaatttggtcttcagaacagacccatttacctgagtgtgtgtgatagaggcttgacatgtggttttcttaggaattc

SEQ ID NO: 196768 - DNA, 1000 bp, Homo Sapiens
acctgagtggatgccggtgcacgtgaaaagaggccttcaagcctgaagaacacgtaaggagccagaacagggtgccacagagatactacccttaaggaagacagaaaagcattcgtgccggggaaggggacataatccaatcagcgaccctgtgaaactcagacatgtccgggcacggtgactcacgcctctattcccatcgctttgggaggtcgaggccggcggaccccctgacgtccggagttgcagaccagcctgaccaacatgaggaaatcccgtctcttctaaaaagacgaaactcggttgggcttgctggcgagcgcctgtaatcccagctactcagggggctgagacgggagaatcgcttgaacccgggaggccgagtttgcagtgagcccagatgccaccattgcactccagcctggacaacaaaagccaaactccgtctcaaattaaaaaaacaaaacctcagaaaagcttccccagcgagggccagagacaacgccggtctctatttcttgacagcaattcaagagagaatctcgggtggcttgcaaaactcacaagagagcagaatatcctccccgaggcagagaagccacacgctctttctggaggtggagtagccaccgatcaccgtgcagcccctccccactcccagccagaaaccccagcccctcggaaccaaatccactggcaacaacctttcttcctggaaaacctttcccctgccaaaatggaaaacaaacatgacacaagcaaacgcatctcaaaacacaaacacaaggaaacaatccgagcaagctctagcccctcatagctcatcgatgcccccactggcatgctactgaaaacagcggctgcacccattaaactcattcattactggagaacgagacaaaccttagcagatccctgctcccacagcgacaatcccgctcgaaaacacagaaaggaaacaacccccgcacaaaatataaatctaccccagatagaattc

SEQ ID NO: 196769 - DNA, 1000 bp, Homo Sapiens
acaaggaaatttgaggcacaggtcactggagtctatggtgacatgatttatttgcaacagtaccatgttaaatgtcaccatattagggtggtgtggccacggctgccccttaagttttccagtcacaaaacagccctttttcccctcagaaatcctaaaactcccatataggaacaaaatcctacgccttatggtacacagacttcaggttgtcaatatttgttaaaaaggcatgatgcttactagaggacagcattggtctccagagctagccatgtgtgccaaacaggtgactggtttatagatggatagtatgcttaatataaatccaatcacttttacagttgctcttgaattccagcctcaagtcttggccttattccctcccagagtttagcagttgactttcggcaaaaggaaaattcgggatgagtggagagtagtcagcacaaattagatggattatcctttaacaaatacacagaaatctccttgctgttattgcttatcatcttctggttgcttgggcattggcaaattttctttcttggctttgtctactttgcagtactgtggtggtggaggtataggggtggtgatagtaatagaagtcataatgatgataggcaagattatatattcatcatactttatgcaactccctaatcttggtgtttaactcagtcttcatagcaaccttgtggtaaaaatcccatgatactgtatcctacaagtttagatgtaatgtagttggcagttggctccagaatccttgaacttatcagccagctagctaactttggtcatttcattaatctggcaataataccttctcatgtattatgggattgaatattttagattccatgaacaaaaacatgacagggctcactgtcctattagtatcctcattttacacattaggaaattgaagtctgacttacttaaaggtcactgctggaaggcagcaggcatgtagagtcagtgtggctccagaatt

SEQ ID NO: 196770 - DNA, 1000 bp, Homo Sapiens
agatgtttgtgaaatcattcactgggcagtgatatcagagcccatggtattaaattaaaactgtatttatgcttttttacattctcattttgatgacattcttgtcacattctgatatttcatatcagaatgattaagagtattataaagataatatttctcagatataaagcatgtatctttgacacatgttttagacatttgtgatgattttctgaatagtagaagattaattcaaaacttcaatgtgctaaaccagtcttagccatgtttatttacttagagattaaagaaagaacaattcaatttttagaactggataaatttcaatcttctatctctgatttctcagaaagatactgtaacatatgatttgcctgtgactagaatgtgtctgaaatcgcagtgtatggatatacatatatgtacattttttcggagtcagagtggacatactacaaggttgtttgtagacatacagaattcttaaaattatctgcttctgtatctttatacttataaataatgctccgtgtatttttcttattgactactagtaacagagaagcaaagatattgatgaagaaccaagctttgtgtgtgtgtgtgtgtgtgtgtgtgtgtgtgtgtgtctgagtctgaatatgtgtgcattttctttttcattctcattcaaattttttgtttaggatcagctgaaaaatgaaattcttacaagtggaaatatacccccaaattatcaatacagtaagtaatagtaaaagtttatttcatgttataggaagaaacatagaattaaatacattattttaacatagttttctgataaacttacttagtcaaagtatattaattttataccttactattatgatacaacatgtttgggttataacttattatttaggaatagatcgtaacacacaccactggagaataagagagagagaagggcagtatagctgtagttcattccctacagccaactttctttgaattc

SEQ ID NO: 196771 - DNA, 1000 bp, Homo Sapiens
taaccagggctcaaccataatgacagaccttcctagcctagaatttgtgtatcagtttgaacccacttcttgttttgaataattattaaattctttgtccacttaccatttgtcatccattgtgacaacagctttatttatttatttatttattttatttattttttgagatagagtctctctttgtcgccaagactggagtgcagtagcacaattatggctcactaagggatcaactttcaggactcaatcgatcctcctgactcagcctcccgagtagctggaactacaggcatgtgtccccacacctggctaatttttaaaattttctgtagagatgaggcttccactatgttgcccaggttggtctcgaactcctgggctcgagtaatctgcccaccttggcctctcaaagtattgggattacaggcgtcagccaccatgcccagcccccaacagccttatttacatgtactattttgttaaatcctcaaatgacataaattcttttctattcctactttacacaccagaaaactagggattaaaaaattgctaactgagttgggcatggtggcatgcgcctgcagtcccagctacttgggaggctgagtgggaggattgcttgagcaatctaggcttcagtggtctaggcttcagtgaagggtgatcacatcactgcactccagcctgggtgacagagtgagactctgtctgtagaaacattaaattaaataaatttttttggaaaaagagttaactaattggtccaagatcaaacagctggcaattgatctgtgattcaaagccaagtgggtctaacttaacttctatactaagatgcttccttcaggggggccagcaggctctctgtaaaggaaaatgccagacataacactgtgattgacagggcccaaaagacttatgtgtcagaaagattgccatcccagtcggcagagaaaatagcatgtcagagtcccacatttggaaaattgaattc

SEQ ID NO: 196772 - DNA, 1000 bp, Homo Sapiens
gctctgagattcacttcacatggctccctgcctatgctgatgcaggaaggcccgggaaagaatgtctggatgaagaagcagcaggtgattcccgactgaggagggaggaaaaagccaaatgaaatgagggagctgtagtcaaggaggggaggaagccgaggacggcaaggcctctcaatcatcgcttaccagggacagagggatggctgccattatcccttctcaccacgacaaatgaaagacgatgatacctaagaaactgccgcagccacacagagcggcaggaggcgagggtttgcctggtgaaagccaaacggcagccctgctcttttgcagcctcctatgggacatcatggcgagcagtgacggatggagaaaatgcagcatccctgccgggcaggacagcagcctcaggccagggctctggaggatggacaggcagaccccacggcccaggatccaggaaggccctctgccaggctgtggctccaggaaggccctctgccaggctgtggctgagagtggcctggcctggggcatggctgcagatgccgccccacccgccagccgcagggctgggggccggcacagattacattttaaggtgatagtcatctttgacctttgggacctccagggccactggtcatccatcttagagccgctgaccagcaacctctgggctatttttatggccggcaaacattgcccattgattgaattgattgaaatctgcatctggttcttggggaaaggacactggcctcacagccgcaatatgcagcttcgttttctgttgttgtctttgactctttcctttccatttgtcttcccacccccagcatgaaatgagtttggagacagggcgcacacaccaagacacacacggcctgaatacacacacacactaaacacacacgtcccgcattcttttccagcagatttcttactgtggcgctcatttttctgtcagaatttcaagggttcctcaaaggaattc

SEQ ID NO: 196773 - DNA, 1000 bp, Homo Sapiens
taattgaatcatgagggtggtttcccccatactgttctgatggtagtgaataagcctcctgagagctggtggtttcataaggggaaaccccttttgctcggctctcgtctctctcttgcctgccgccatgtaagatgtgcctttcaccttctgccatgattgtgaggcctccccagccacttggaactgtgagtccattaaacctctttttgtttataaattacccagcctagggtatgcctttatcagcagcatgaaaaacgaactaaggcacctactgtatttgttttcttgtctgtgcaccactgcggaactgtgagctcccagagtgcacagatatgtgccagacaccaagatcagaatgggtgcttcgcagtgctcaatacattatttattgaatgacttaatgtagaatgactagttacacagttcaggtgctaggaggcagtataaaagtcagagagcaaatgctttaagaaactgtagtatacaccaggaaatgcaattctttagttagataccttctcctttcagtaaaattatgttcagtgctgtaaataggcaactttcagtgatttgtttttcaaacaagtggctttttatcttttcctcttgacagtgagtgtctctccatgtgtgaagtattttctcctctcatatctgtgaagtcctgcttgtaagtgtttcggttatgcaacatttcatggggaatttgagcactggaattcttggtcgctagttaggtgggtcttaccgcatttgtcagaaaggaatgcgtccatcaggttggttgacgggttggttgacggtctgcaagttgcagtcttggcacaggcacccatcaaaatgacacacggtgactctggtttcttccagcatccccgagatgaagatgaaaaactgttgcatagcaggtggatcttgctagaagctctccagccatgtgattagtttatttgctcattttttttttccttttaatataaatatatcagaattc

SEQ ID NO: 196774 - DNA, 1000 bp, Homo Sapiens
gacagcttgaagcccagaggttaaggttgcagtgagctgtgactgcgccactgcaaccttgacttctggggttcaaggtctcctcccacctcagcctcctgagtacctgggactacaggtgggcgtcaagatgtgattcagcctgggtgacagagtgagacattgtctcaaaaacaaaaacaaatgacaacaaaaaaaatccagtctgaatatttaacatcgacaggtccatagtgactcacccacacgtaccaaaaacagtcagagggagtaagtaaggtcattcagaaagtgctccctaatctgttgtcttaatcaccatattacaggttgagtataccttatctaaaacgtttgagatgagaagtgtttgagattttggaattatatacttacagactcagcatccccaatccaaaaagcagaaatgcttcaaggaacatttcctttgagtgtcatggcagtgctcagtttcagattttggcatattacggattttggtttagggatacccaactgtgtagttctcccacagatcagcttttttttttttttttttttttgttgacagcctgaaaggcaactccaaggatagagccccaattcagtgatctgacatctacagaaaatacaggggttaaatgataaatggacttgtgattatcctccagtgttcagatgggtccttgtatgactagcttatttggaggacaaggggattgtaggcagagactgccagtgtggtattttctccttctcctctcagaggatagtaaggaaatagtaaggaaaacaaaaaagagaaatacagtatcctcctttcgcaaaattaggagacatctgaaatctcaaaccacaggacagaagaactgccaaaggtagggacaaccaaacagggactcaggagccagtgaaaggaggattgctttctttccttttttttttttttttttttaaagcgatagattctcactatgttgctcaggctggtcttgaattc

SEQ ID NO: 196775 - DNA, 1000 bp, Homo Sapiens
ggccaaattgggtagagtgttaaggaaaagaaataacaggtaaatagaaatcaatattattttcaatcatgtaaagttgtgaggatttgatgaataacatataaattgcttaatacagtgctcaataaaatatactgtctcccttctcccctttacccttctactgttaactacttttatcactagggagaaactaattagtttaaaacaaaacattagatctagcaaatagtagaggaacttagccagatggttaagagcttgggcatgtaaatcagatatgggtttaagtcctggtcttgtcacttacgtgtgttcttgggaaagttgcttaacttctttgagcctcagttaccttattagtaaaattagatgatagtagtgtctacttgatagtgttgttttaaggattatatgatataatgaatgtaaaatgattcccaccatatctatcacatagtgtttagtaaatgttacctattcatagtagaagcactttaataggattgatgtaaggattaaaataatccatataaaatatttagtggagtacacaaggtaaattcttgagaaatattagctactactattaatattaatgtatcttaaagcaataataaaatattaaaaactgaagagtaagaccagcttattgtataaatatcttgttggggcaggagtaaaggtattaaagattatataaaaggaatgaaatcatagcaatcactacttctaaaacttatagaagtcagaatttgcctttaatgatttaataaaaattccatgtacttttcttttgctgaagttacagttgaggaggtatgtgagattgattgatatatacattcttgtaacaaacttttgcagatgttcattgagcaaaacaagctaaagagacaaagccaccttctgctgcagagctccatccctgatcagcagcttttgaaagctttagacgaaaatgcaaaactcacccagcaacttgaagaagagagaattc

SEQ ID NO: 196776 - DNA, 1000 bp, Homo Sapiens
tgtttgtgctgatatttttctcacctcaataaggataggagcttcttttcctttttttttttttccaggtagaatcatgttttcttttaattgaatacttaactcacaatgtttcctgttttgcagctgctctgctaataattaggttcccacctctcaagatcattaggagcttcttttccaattcctctgttttgcatgcattggaaggtaagtttccttgtaaaccagattttggactctgcaggctttgccaaatggcctttttaccctcatgtatattgcattttctttggatagtctcatggattctcaaggatattgtattcctgtattttaccattcatgagtttagaagtgtgtttactttcctgagttttcattttctttttcttctgtcatatgtaatttacagagcaaatacctaccagaatggataacttgagagatgtggaaagtgagtttctttgcgcttatctagtgagggtgatttttagtcaataagcatttggtatatgcctgggaatccaacagctgctatttagattcagagccagcctttatttatcagctttctgatgctgaacccatcagtgaacttctctgtatatttgattcatcataaggaaaatggtgacgccgagggtgactgatttccaggtttacatcggttgccccaggggaagtgcctggcccccatctggtccttgctgctctaactttgccctgttaattgaagaaatgcaggtataaacacttcctgggttgttgctggcatttattgtcctcacagtttacagagaagcccatattttcagcctcttcctctgctttctgtcatttctgaaccatctcacccgacctggtgtaattttcattgtgtgtgagtttgcacagatgtaatttgggcctacatgtgtccaaagcctaatgcccacctcccacctccactaggatctggagctcaggacccactacctccccggcccactgcaagctt

SEQ ID NO: 196777 - DNA, 1000 bp, Homo Sapiens
tgggaggcctcctctcccaggaggtcacagctgggggtcagagctgaaaggaactttcccacccacaggcctctctcctttacacttggagaaactgaggcccaggcaggggaggggcctgtccacatcaccacctccagaggagcctgaacctaggacagaacccacccctgcctcccctggaccccgcccatctcccactcagagcccctcactcacgattctgagggcctgaccctggggggttaaggggctggtcctcaggacctcctgggtcaggacagggaggtgaaggctggggctgtcttgccccccacatcagcccggctcctcctcctggctgggccccaacatctccctctgcctcgaccccccactcttcaccagcccagcctcagagcccctgggacacaagcccgtccttgaggggaggggagtgggatcctttgggagactcagactgccctgggggaggcggcgctccccacgaggcctcagtgactcaccaggtgtggagggcggccctgtgggtgggaggctggagcctccagagtgtcctggaaggagcacgggaggcgggtgaggggcgggggccgtccatggagtgcacccttccactcccactctcctgcttccgcccagtggattccctggaaccatctctctgcccacctggtgccttctgcatgccaggcaggggagaacgggtggccacgcctaggagaacccctgttggcctcctcccctctgagggctgggtgccctctggctaagcctccctcacagcctccctcggtccatcccagccgagagctctcctgggggcctgggcctgagctgagcctttgagctcagagaggacggggtcagcgccctcacctgagaccacgagctccaggggctcactggggtgagacagcaggtgggggttggagctgtatgagccgtagcacctgtaggtccccgcgtgggctgaggtcacaggactcatggggaattc

SEQ ID NO: 196778 - DNA, 1000 bp, Homo Sapiens
acataattatcattggtcttatactctgttagtttatttaaacttgacttttattaacacaaaagcaaacagaagacacagcaaccttctttgcgtaacttgaaataaaatcttagcaacagcaagaaaagacaataatacaaattaataagcaacatttctattgaaaaatgtcttttacctctctaaagttaaaaggtctatatcctatgccactgaataatctttatttttttctagttacctgttactcttaatataaaatatactctgaggagtcaactttttcatataaaaagtgtctgttttggccgggcgcagtggctcacgcctgtaatcccagcactttggggggccgaggtgggtggatcacctgaggtcacgagttcgagaccaacctgaccaacatggagaaaccctatctctaataaaaatacagtattagccaggtgtggtggtgcgcccttgtaatcccagctacttgggaggctgaggcagggaaatcgcttgaacctggaggtgaagttgcggtgagctgagattgcaccattgcactccagcctgggcaacaagagcgaaactctatctcaaaaaaaaaaaaaaaaaaaaagtggctgttttttatatataatactaatcacactgggaaatgtttttctgtactaccactttgaaattttaggggactcctggaataatcagagtcaagagtaaattaaaatcaggccaagaaccactggattagaatatgaatttatatccttttattttaaataagcaatagaattccagtattgagtgaaaataatgaaagcagagtttaggaagggacacaaaaacaggtggtaagcaatcagaaagagatggatctaaagacaagaagctgggatgaactaggtatgacttttgacatgtttgaacttcattatttccataatacttttagtttactagacatggatccacagagattattagatactaaacaagaaaagaattc

SEQ ID NO: 196779 - DNA, 1000 bp, Homo Sapiens
atcttattttaaatgttttcctattatatgaaacatagtgttttacactgtaattaaaacaaggagcttatggaaatgtgaaggcggtttcacttacatgcctaaggaagaagatcaaagctagtaccatgtatatctttttataataatagattcttgcaatcaaaaaacatgaaaagattaggacaagcatagcctacacagtttactcagtttggattcaccctggcatgagaaaagcttagtataattacccttctgcacttacatgaaaacatctaattatgtattttaataaaaatttataataaatatttttgaaagtttgatatagccatagctgaaaaaaatgtatatatatgagctgtcacagactagctaatttatattttctcattttaaaatcaagatgaactgctaattttgatcttttcagaaaacagaaactatgtcaaatactaaaactatcatcaataggggtctactgcacaactatgtagcccccagctctttgaatattttaccatgattaatttacaaaaattttatgccatttttcctaaaagttcacttgttatactaatgttgtacatactaatattaccttaataaattgcctattgaatgtataaaaggacactatagaaaaactttaaggaaatataaatgattcattctgatagctaattacaaattaaatgtaaaggagggatagcttgcattaaacagcaatatccccagggactcagataataaggtttaaaaatacttttaaagaataggtaaattaaaggatagatacaatcttctgaacagctaagtattagggaaacactgtgacttatgttttcagagtttagttaacatcaaatatttatttattgtctctacatctcattgctaatttaaacataggatgattcataccacaacactcataactgctaaaagagaaatatggttatattttcttttgtctcatatagcagacaatgaattc

SEQ ID NO: 196780 - DNA, 1000 bp, Homo Sapiens
gggagaaactccatggctagggggagaaaccttttcggaaccatggaaatttgagctttactgaaacacctcctttcacctccaagcttccctgaagtccctgggaggatgagactttctggaaagcagcagcaggggtgggtgggtgctccccagtgatctcaggctgatggaatagctttgtcccagacgaattgtcagggacagtttggggtctttgtgcctggagttgggcaggaagcgcccaggacagagccagaaggcacctactgtccggcgcccattgggcagcccagggctggcacaccgcgcccagcgggtgcacttctgggcaaaggaagaagtcagcccactggcctcccgagggcttccctggttttgggatggggccgtttcgcaaagaatagggtaatctaggaagaaggagctgctctctggctatttccaaggccagcggatgggtaggcctttgttctgggcaaatcagaaaccttgtttgtgacagagggaaaaagagaagggggcgggtgctcggtgccaagtcaggggaccagagcttttttttttcggtttgtttttgatctttatttttccagcctataaaggcggcagaaatcccctgggtagactctggccctggcgccgcccgcctcgggcgctccatgctgctccgcacctcgggctctgggatgctccggcctggatggaggctctccgccctctcccagctccgagcgccccagccgacatgggcctggcgcgttccccagacagtcccggagttctctgggcctgggcgacgtgtttcgttgaaagcgggcaggtggtgccgggcggggctgcgctgaggctccggtgcctccccacctgcccctcgtacctgccggtctgtcgggtcccggcggacgcaaccagctactcgcaaaccctgcaccagcggttttccgtgttgtcctaagaggggcaggtcagggcgaggccagtcggctcacacgaattc

SEQ ID NO: 196781 - DNA, 1000 bp, Homo Sapiens
catggtgaaatcccacatgtactaaaaataccaaaaaattagctgggcatggtgatgcgcacctgtaatctcagctacccgggaggctgaggcaggaggttacaatgagccaagattgctccactgcactccagcctgggtgacagagtgagacttcatctcaaaaaaataaaataaaataaaattcagttccttagtcacactagccacatttcaagtgcacacagtcattactgtatgcactgggacagcccagaaatacaatcttggacagcccagaaatacaatcttgccatcactgcagaattggacagcactgttcttgaattatgaacaacggttcttggagggtcctaacaatacctcaaaggtttagctcaatctctttactctgcagtaagtaactgaggcacagtgattgatttctccataatcacacaactagctaatacaccatgactccaggccagtctaactccacatcttatgctctaatagtagttccaatctgcttcctatctcaaagatagattccttccttccttctgcttcccatctcaaaaattccttccttccttccttccttctttccttccttcctccctccctccttccctctctatctctctctccctctctccctcctctctctcctctctctctttctttcccctccatgggacacaaacctccctttcattttcctaagtctaaactttaagggctataggtacctattcctccattcccctaattttccttttgttatctgtaaattctcttactctaaaccaatttctcaggtttttctttcaaacttctcaggcaaataaactgtcttacatagcaatttcagctgtactactattctagaaagaatgggtggggtttaccaccttgggatcatgaaataagcatccttgctttatttctcatcgccaagtcttatctgccttccctgaatcattactttttcttttttcaacatctaccagaattc

SEQ ID NO: 196782 - DNA, 1000 bp, Homo Sapiens
tgtgtgtgtgtgtgtgcgtgtgtgtgtatgttttgttttggtctttgtttaaacaaccaaatctgtatcccaataatgctttgctcctccccctaccccaactccctccttctagctaataacaccctgtactcctactgcttaaatcagaaagctgggtaccaccagctgactcctcctcttgctcaccctgtccctccaatcagtcgctgattgttccagtttcactttaactatttcttagacgtgggtgccctcctttccatctttactgccttgtccttgcacacttttccttttccaaccatgtttctgggtcacctggccctgttctgtataccctccccaggggattgttctagccagcacccccggcccatgacacacctgctcaaatcctctccatgaccaaaccaaagaaatgtgcatggtctgtgaggtggggcaggtggtagtgaggagtggaggaattgttatgatataacaagaattcagagactttccagccacatgcaatgtgtgggtcttgtctggatccaacacaacactgtacaaaaacactctgagccaaatggggaaacttgaaaactggctgattattagtgacattatagaatgattgttcatttttaaggtgcaataatgagattatggtgttttaaaaaatagtctttttgtcttagagatacatcctgaactcctgacaaatgaaataatatagtgtcttgggggttgaattaattaaaataagtcatcagggggagtggagcaatggaaaatagaaatgaaacaagattggccatgtactgataattattgcacctggataacaggtatgaagaggctggttatactattctacttctgtgttaactattctacttctgtgtctattttaacatttcatggatgaaattttaacatttcatccatggtaaaatatttctttcaaagccaaaaaatacaaaaatccagtgtgcaaggaaacctggatgaattc

SEQ ID NO: 196783 - DNA, 1000 bp, Homo Sapiens
tggaatgtttaatatatttacacctaatgtaatttactcccatgttgggaattacctctgtcattttattatttgttttctctatgtcttatgtcttttatgttcctgtattcttctatcactgccttctttgatgttaaatattttctactgtttcattttaattccctgctgtttctttacaaatagtcccttttatttctgtaaagcattttatgcttgtatatactgatgtgtattacttcttcttcttcttttcttttctttttttttttgagatggagtctcactctatcacccaggctggagtgcaatagtgcaatgttggctcactgcaacatccacttcctgggttcaagtgattcttctgcctcagcctcccaagtagctgggattacaggtgcctgccaccacgcccagctaatgttttgtatttttagtagagacagggtttcaccatgttggtcagaactcctgtcctcaagtgacctgcccgccttggcctcccaaagtgctgggattattacttattttcttagtagttgtcctggtgattacaattaatatcttaaacttataacaaactagtttgaataatatgaacttagtttcaaaagtgtatactgtattcctatacaatgcctccattttatatagttattatcgcaggttacatctttatacattgtataccattaacagatttataattacgattttgccacttaaatcatatagaaaattagaggtattacaaagcaaatgatactggcttttatattgacctgtgcaactactgtgtaacttttactagtgttctttatctcttcatatggctctgagtttctatgtcctttcattttgacctgaaggaaggactccttttagcatttcttatagatcaagcctactagaaacaaaatctcttagcttttgtttatctaggaatatcttaatttttcttcattcttgacgtttaatttagttagctatagaattc

SEQ ID NO: 196784 - DNA, 1000 bp, Homo Sapiens
gtggttttgatttgcatttctctagatattttaacctcattagttaatgagggaactactaaggtgttatgattggttccaaggagaaatctaaagaaccacatttacattcagtacaataaataccaaaaatttacaaataaatgcaaaaactactcaatatttacaggatactaatcaattacattccactgaacatcatagctaattttcatttctatggacaggaatagtttgcgttcattttctattgcatttctatgaataagaataacttgcattattgtaaggattctacaatttttgaagtaaaatagaattgctgtaatgtctgtgagagagaactttctttatcagtgaatttaaattatcatggctcattccaataatagtaaaagtgaagtatcagttgtatgacatttagaagactattaccttttgtggctctggaaacatggttgactctcgtcacaataaaagtaattcactaatatttataattctctactcatcttcaaggggtagctaataatatgaaaatcaatacccgttacactttttccccccactggcttgggtgttttaagataagatttctttgtctatttgtttcttaattggaagtgtggggttggagtttttggtaaaacttaaaattctacttaatactacccatttgctttgccaatttattcatgacagctttttttcaatgtctcaggtgctgggaacttagtgctggagacatcaagtggatttatcaagcaccgatcttagcagctattggggtaagtttaaaagtttgtatagttaaaaaagggatgaaaaattaacctgctgctaaaacccagagaaagtgtgtctgtcactgcattctacaacagatctgagaaactgacaagtacagcaacatctattgggagagtctgggacagagatcagacccttattgtgactgacactgagatccatgcagaaagccttcctttaatcagctagc

SEQ ID NO: 196785 - DNA, 1000 bp, Homo Sapiens
acactccatctgtccacagattctagagcttctccactcagcttctggggccctcactcaattccctcccttttattgccgacctgtactggtgcctcctcacttcccttgactccaatgccatcctctgttttcccagaccctgtttcctcccaccccccagaatgcccctcttggttcaacccagctcctgcacccttccaccccaatcgtgccattgagggcagttacttcctcctcacttcccctggtgtggctggacagggctgctggtcaggaggcatgtagtcatgttggaaggcagcagtcccagagccaggaaaggggttaaggccatcacaaagttcagcaagaggcgggctctgtgtgggtctggggccaccagaactcgttgctcagaggtccccagtgctgggagcaggaggtaagtcctgaaatcagtagggcaggggtgagactgctgccagctggtcctgatggtgacccatgaggcaggcaggagtgaagcctccaccagcagaccgctgcctccccgtgtgggggaagcctggcccagcaggctgagaaccgcgcaggtaagctctggggactccccaggccaggagggcagccaggaggttggagatcagcaagagtcccaggttagaatgaagcaaataacccctgaaactaaatggggagaaatgcagtgttgcgctttgcagcttccagttctcaggcgaggtcagtgctttgagagaaagcaggagagagggaggtgaccaacgggagccagccagcggtcagcaagcacgaaccaagtggcctgactcgtgtttgctttcttcatgggttagcatggggacggccacggtgcggaggctgcgaggtgctttaggcaggacatgataaattatcctaaggcagccttgtgaacttgatggagaaacaaggagggtgagggactcagtttaaagatggtggcttcctttttttttttttttttttaatcagagaattc

SEQ ID NO: 196786 - DNA, 1000 bp, Homo Sapiens
atcttcccctaggccgcagatggccagcagctcacctgagctctggtgagtaggggcggggcagtagggacaggagctgccataccaagcaagggaggcaaggggtggcatgcccctgaaactgatccacccccccatacccctatctatgagggtctaacagggattgtcagctgaccatggcccaaacctagaaaggcctgcatgtctctctccactcctctcaacagactcagagtgccacagggaaacaaaaagccaggactacaagattcctctcccctctgggcaacaggtttagggtccttcctctgccctatcttttgcccccttgttactgtgcttgtcctctaaacctgtccaagcagccatggagcgggaagggcaggcttgttgagagaaacagtgctctcaccacactggccagggctgccacagatgctgcctatgagggctggccccaggcccttgggaaggtgcgacacacacttctgtgacctgtacctggagcccctctctggaccctgctatacaattctgcagcctctcctggctcagaattaggaggaagcaaatggtaggcatcagggtctctgcccagggcctgaaatgggggactcagtatattcaaaacaaaacagctgccaccagcacttcccacggtgccatacctcaagaccaagagacatcagagagggccagagctcccagggtctccaaggacagagatgggttacagatttcatgggagctgcccacagcctcttgcctggggaagcaactggcaggtgaatggacgggggaaggagtggtggcttcagttatttgactcccgtctcccagagggaagtgatcacagagacagctggggagaagtcctctagctccagagaggggaagggaagtctgagagtgcggtctccagtcctcatctctctaccaaggcttccttaccttgaggccagagggcaagaggtggaggtcaggaagcaaagaattc

SEQ ID NO: 196787 - DNA, 1000 bp, Homo Sapiens
gcagtctcttatgacataaccagtagaatagttatggcatgttttttagagtttgcattgaaggacagggtttcattgaacaatgctgctggcagtattttaaaagaaagattaaagtgtcacactgcatgtgactctgtctatctaattctgcatacaaagcagatggctgttaaatgtttgttccatccctggtattgtttgccttgtaaatgctaaagagagctgaaaccgagaattctaccacagtaaaggaatttttttgcctataatttgtttataacatattctgggctaacaggcaagctctctgctccctggggctatgctgtaagtgcacacacattccggaatgatcagccttttcctcgctgatgctaagagccccaaaatcaatacatacaatcatttatcactgacagattagcaatttctattgatttcttctgaaatgggaatttgcacactccacggagctttattcttttaataagcaactaggcaatcagttgtaatttcaggttttgaaatgctttggcaacagtttttatgaaacacacagaagaaaaacaagaaggggccctggatagtttcaaagtcttgcgaagatgtacagaagcgaatttcgattgcctgcctgtgccaacagtgtacctctgtcccctgaagcagatgctctgtcctttgccatgaatctaaggactactgttaatttgcaaacttccaaagtctggtgggcttcttgtctttcttccctttctaaaaaccattgtcaacctgggatacaatcttaggctgtacatcttcagagactagcaggcagcagtgtttggaggatccacttttaagcaggcttaacctagcgcttttcaaactctcctggggagccccttaaaatgtggattctgattctggggtggggtctcagattttacattttcaacaggctcccaggtgctacctgtggcaggactttaaactcttttccctgacagaattc

SEQ ID NO: 196788 - DNA, 1000 bp, Homo Sapiens
tcagccagcagagaccaacatcttctcagctaaaaggtcaaacttgctccagaaagcttgaagacttcccaggtatgatcttaagacttcatctggctgggcacggtggctcatgccagtaatcttaacactttgggaggccgaggcaggaggactgcttgaggccagaagttcaagaccagcctgggcaacatagcaagaccccatctctacaaaaaattaaattagccagatgtgtgcgtgcctatagttttagctactggggatgctgaggcaggaggatcacttcagcccagcaggtgaaggttccagtgaactagggttgtaccactgcactccagcctgggtgatagagtgacaccctgtctaaaaaaaaaaagacttcattccagctgtgtctgtctcatccataccctgcctctgatttccccttgctcattaactacagacaaccacattagtctgtgcctctctgatttttgcctgcttgtttgtgacagttttgggtcagccctgaggcttccactcagagatctttagtcctctgcccatgccttttgctccaatgtatataccatcacgattttacatttacataggctaatttatgacagccagtacttatgtagcatttactttgtgtcaggcacttttgtaagcacaaaattatgtttacttagaacagaggaaagtcatgtttccttagaccagtacaccaatcctggacagcttgttaattacagaaatcccagagtttctgatttaataggtctggagtggtgcttaagaatttgtgtttataacagtgttgatgcttctggtccaggcaccatactttgagaacctgtgttacagaatgtcagataacctgtaggtgggcttgttagaaaatgctcttgtatgacattggaaaggcatgcagtaatctttttgctttactttcaacttggatggttttccttaacaaaggaaaagctgaactgaactattcattacagtt

SEQ ID NO: 196789 - DNA, 1000 bp, Homo Sapiens
cccaataaaataatatctggagatttcaacaccccaatttcagcactggacagatcttccaaacaaaaagcaacaaagaaacatcagacttaatctacagtgtagatcgaatggatctaatagatatgtacagaatatttcatctaatggctgcagaatacacattattttcctcagtacatggatcattctcaaggacagaccatatgttaagtcacaaaacaagtcttaaaacatttttaaaaactgaaataatatcaagcatcttctctgaccacaatggaataaaactacatatcagtaataagaggaattttggaaactatacaaataatgggaattaaacaacatgctcctgaattaccactgggtcaaggaagcaattaagaaggaaattaaaaaccttcttggaacaaataataatgaaaacacaacataccaaaacctatgggatacagcaaaaggagtactaagagggaagtttatagtcatatatgcctatgtcaaaaaagaagaaaaacctcaaacaaacaatctaactatgcatcttaaagaattagaaaagcaagagcaaatcaaacccaaaattagtaggaaaaagaaataataatcagagcagaaataaatgaaattaaaatgaagacaataatacaaaagatcaatgaaacaaaacgttgattttttaaaagttaaacaaaattgacaaaccttcagccagatgaagaaaaaaagagagaagatacaaataaaatcagaaatgaaaagggagacattacaactaacaccgcagaaattcaaaggatcattggtggctactatgagcaacaatatgccaataaattgaaaaatctagaagaaaaggagaaattcctagacacatacagtgtaccaagattgaatcagggagaaatttaaaactaaaacaaattaataacaagtaacaatattgaagccataataaaaagtctcccagtaaagaaaagcctgaggcctggtgtct

SEQ ID NO: 196790 - DNA, 1000 bp, Homo Sapiens
tactactaatttgtcttgaggatctgttatgttattccttcatcagggtgttaaaattttcttcacgttatggtgagagtgaatttgttcacttggtatgataggctctgtgaagtgttcctaaagtgaccttgagagaaacttttctttctgtaggagtgaaaggtcaggcactctaattagggcagtgtatagaaacaaagggcagtgtatagaaggaaagttggttaaaaggattgacaaaatggaaatggttcagatgtttaaatccatgtcctcaacttcggggtttgagtgtgtatgtctagattgtgattttgggttagtttttagtagattgtttgtatgatatctgaaaatttcctttgtttttgaatccaagtagtaagggatgttgtcattttgtaagccatctgtagatattgagcatctctctggtgtttctatctagaatgtcattttaactattaagtaaagcttcactttttcttattgaattcagacgtttgtaacagtatagtttctttttgcccaaaattttcagagataattgtaggaagtattttctggctcttaatttttaaaaaggaatacagtttttcatttttcagttactgatctttttttgtggggcggggggttatttttagatgtacttacaggctttttgaaaatattgacatagggccagaaaaatgaattctcattaaattactcttcagtatttctatttttagatagttgtagattcatatgcagttgtaagaaactatacagagattctatataccctttacccagtttcctgcaataatagcaccttgaaaaattagtacagtatcacaactaggttattgatagtgatacagtcaagatgcaaaaactgttctgtcaccacaggaattcttggtgttggccttttgtaactgcatccacttttcaagtaattaaaaaaatggtaagattactaaatgccttctttctctgttaaacgtggagt

SEQ ID NO: 196791 - DNA, 1000 bp, Homo Sapiens
gagagcaaagccctcatctgtgttttcctcaaagcctgaaatcgtgcctggaagacacatggtaggtgcctggtcaacatctgatgcagggagggagccagggagggaagatgacacagggaaagtgggacactgtgtttctggtgtttgtagggtctacagcctctttaaccagggcagttttgcttctcttgatctgtggggtatgtaaaaaaccagtgaggttttatttaacaaaagatgttcacgctgaaaagaagagaaagagagaaaagagaaccactcactattctagtggaaagaacgtaaaggcctgatactcaaaggcttttcactgatgagtcttggcttttgttgaagaactttattttctgtgcttcaagtcttcttttcccaccttgaaggattcactttttagaatattaaggtaaaaatcaaaaaacataaaattagctattttaatgtgtacagttcagcgtgaggctgtatttgtgaagtgcagacatagtccccccaacccactgccttgtttctgggatgttgctcctcataagtgggcaatatgaattttgtagaagaagcaaaactaaaaaaccaaaaaacctctataaaatagctcatggtagaaaattaccttcacatattcagacttgctgtctttgcagattaccgtagtgtagcccagaatctagaatatatcacctatttatatctaccatcaacaagattaggttatctagtttgttttccctattctaaagccaggtatggtaactgctggctcctcacccttacagagaagagatcattaagggtataagacatgggattctctctgctctcctcaaaaaacttggggaaccattaaagtataaaggtgtaggggagagaggatccttgatacgtctctccagacatggtcctctgttgttcagtttctgtggttggttccatggaggcatagactggtttacctcaaattaaacaatatcaggaattc

SEQ ID NO: 196792 - DNA, 1000 bp, Homo Sapiens
ttttttttttaacatgactctttataaatgtttttaatatatttttaacttcacatttcaaagacttggtattataatttatgcattactttttaatacgcaagcctcacccaaagaacagtttttcatgaatcccacataaaccctcaaatttcatcttaacttaaattgatgtatgtttttattaataaaaaacctatacccttttaatggaaacaactactactacttaaaaagttatagaaatgcacccccaaacaaccttaccaaaggcaaactcaacctcaaaattttggttaaaaaatcataaagttacaataattcctatgctcttccagctacaaagggtcacataaaaaattattttttacccaagtgaacagtcctggaaaatcaaagaaatataagctagctttatgttctttttccctctatcctaagacttcagtttccaccttttatggaaaggaaataaacaactagcttcctgttcaatcactagcttacagccagtcttttacacatcacagaacacaacccgcctcctcctttacttctctcaaatgtctcttaatttaaacttgttgaaacgtgagaccattttaccacactaatgctttcctacgaaatttatcttacctatttcaacattaagaatacaagaaaagtcaagataaccatagatcatttcttattcctaaaatatttaaatttagataacaaagacttagtacccatgaaagtgaaaacttgatttgctaaatttaaaaatactgaaatttataggaaatggtttaatcttctgttcttgctattgtacacagctagaaaaagggcatcccatgtcactcctctttctattccaattacatgaaaatgtaaggccgctaacacggctattaataaaaaggattatctttttttaaagctaaatattactttaaccctatactttcttttaaaaatgggatgccttagcaaaactaagttagatgaattc

SEQ ID NO: 196793 - DNA, 1000 bp, Homo Sapiens
ggtctgaccttcatgcaataaatgttcaacaatggtagaggccaccaaaatggcaggaaaacacagcaggatatttctgccacctttaaataatttttagtctttcccatttaaaaaaaatgggagagtaagaaacagggacattcccttcataaccttgaaacactgtctcactttcttcctttcactcatgcctcaactcacaatagtaaagtttctggcctcatcactctagtgaaactgcctgagcaaaccaactacttcctcaaagttcctttagtgaacgatttttgttttcctactcacctattggggtcacctaccgctgtcgacctttactcaatcccttcattttcctctgaactctcttctttagctttcctgagaacattttctccaattcctcatcttctctgactattcgttctcagtctcctttgctagtttcttattttttaaaaacaatggttccttctctccctataccagtgattctcaaccctgactgcatattagaatcacttgggaagtattaaaaattctgattcctaggttctactctagtctaataaaatcagtctctagcatgtacactcctttgctttcaattactgcctcatgctcatgccacacacatttttagcccaggttttctcccaccttcagatgtgtattggcacatgaatattctaattgcatctcaaattcaatacattcaaattattcctctacttacatttctgatctaaaccaatagtatcactatctacctaattacataaaccagaaaagtcaactcttacttttttttcaaatccatcaaccaatcaagaggtaagccgcatcctttcaatctccctatcatcgtcataacttccctgtcttcttccctgaactctgcacactacccccagcatttactatccaagtttaggcacattctttctctcaattgcaatactggggtctcatcatattcatgggcaaagcatatgaattc

SEQ ID NO: 196794 - DNA, 1000 bp, Homo Sapiens
catcccagcactttgggaggccaagacagaaggattgcttgatcccaggagtctgacagcagactgggcaacataacttttgtctcaaaaaaaatattgtttttaaatttagccaggcatggtggcatgcacctgtagttccagctgctggggagtctgaggtgggacggtcccttgagcccaggagtttgaggctgcagtgagctaggatcgtgccactgcactctggactcagagacagagcaagaccctgtcccccttccccgcaaaaaaaggagtcatgtaagcaggttattgctctgctcaaaagtagtacagtaaaagccaagtccttgcaaagacctgtaagaccaaacaagatccacatcctccccactgtccattgcatctccaacctcatcccctactaccaaccctacagctgactttcttctagccgcctggcctctttgctatttctccagcctccaggcctccacatttgctatgacctctgtctggaatgctcttccaatccatatgtacatagcttgctccctcacctatctctggtagttaccccaatgtcaccgtctcagtgagggcttccctcaccctaccagatggcctaattccttccagtgtttccttttcctccacagcacttgaaggcatctcacgaatactacatatttcacatagttatcatgcctgtctccacaatgcaagctctgtagaggcagagatttgtttcttctgttcactgccatatcccatctctagaacagttcttgtatctagcaggtaaaataaatgaaggaaagctgcaataagagacatccacataatcaggggtagggtcttaaatttcttctcaagaacaaaaagaacatttcattttgcaaagtaatctgtggttcctttcgaaatgagaaaaaaaaggatcctattgatctatatagttggttattaagacaatgctttgaaacctgaaaagaactttccttttctattgacctac

SEQ ID NO: 196795 - DNA, 1000 bp, Homo Sapiens
ttctaccatgtaaggacacagtgagaaggcgccatccgtaagaaacaggccctcatataacacagaatctcctagctccttaatcttagatttcccatcttccagaactgtgagaaataaatgtgtgttatttataaaccaccaagtttatggtatttttgttatagcagcctgactagactaagacaggtggctattatgtccccatgaaatctcttctctaggtataactctctgtttcctgccctcattcctcaaatgcatggttttgagagccttggtctttggtttgagtgaaacattggttggaacaataccctgccactcattcctttggaatttaaaacttattggtctatcttcagctgccgatagaacacatcagcacaccaggtaccccttgatgacaagaatctctccgtaccaaaaaaggacaaagtgtcaattttagaatacaatgtaatggacacacagcccatctaatcctccgggaattctaaattctactttttctatcatgttttacaggtcatcagagagcaacatgcccaaatcacgtgagcatatgctcttacaggatgttttttctgagttatgttgaaaatccatttctcattcttttcatatgaaagcagtgctatcaaatcgtgtttgctgtttttataaagtcatttgtgccaactctgtcttctttttgtccctacagttcccctgggaatctgtctgtgactacggagacctcacaccatgagaagggactatacccccttggcccatgcacctgttaggctccctcacctgaccattagagagcaccttgacagagagctgttaggggctgcccatcctctgtgtgtctgatgatcaaagtaaagaactctagtttgtcttagtttttaaactccttaaagtttttctaagggtagcttcaggcagagggaaaggaaatgttttcatagatctgctgggcatttggggattttgaatttctttggaattc

SEQ ID NO: 196796 - DNA, 1000 bp, Homo Sapiens
cttatgattgacttggctatccaggctgtttttttgttctgtatgaatttgaaagtagttttttctaattctgtgaagaatgtcaatggtagtttaaagtgaataacattgaatctataaattacttagggcagtatggccattttagcaatattgatttttcctatccatgagcatggaatatttttccgtttgtttctgttctctctcacactttttttttttttttttttttgaggtctatcagtcagcttttcagagtggaacaatgtagttttcaatctgggaggtatgcatctctctactcatgttctggaagctagatgagaagaaacagcagagttaaatatgtagacatcagttaattactcactttcccaccctccatatgcatttattcatgttttaatttgcattgtgctttgctgtgccgagtttcctccaatccatgatctctcagattttctttttcaagagaatacccttctagctgggctggttagtcacagtgtagtggcatgaaagatcattacctggcttcacagagttggaatcttgcactataagttaggagtctgggaggatataagtcaggaggacatgcaccctctctttggcatttccctttgaagtcagacttagtcagttgctattattctaagacctttccatcaatgtaaatgaatataggtttcttacttgttcttgtctttctcctcttcattttttctatgtggcttagtaaattattttttttctttactaccatttagtggctttggggcaggggcaggagattaatcatgcatattcaattaaatagaagcaactatgtatcttattaatatgattaatatgattgctattccctataaattttccagtaatcctatgacattatcccatttagtggatgagtatattaagattcagctaaggttaagtgacttaccaaactgggtttgactcaaagatacagaaacataagaatacagaattc

SEQ ID NO: 196797 - DNA, 1000 bp, Homo Sapiens
attctttccccttctttaccctcagatccagtctgtcaccctgtcctgttgatttaacatcttacacatctttctaatctcttcacttcggcccatccatgctacctccacctttgccttggacttttgcagcctctcaactggcctacacataagctttccaactccctcccgtctgtactccttactttagccagaatgatcttttcacaatgtaaattccattgtgtcctttcctcttccctccacctctttcctgcttaaagccctccagtgccacccattgcatttaggataaacagaacatcaacatggctggcagggccctgtgtggatttgctcctgcttccctcctcagtctcatctcaggcctgatcctccctggccttttttttctgtctttccaatggtgctcgtcatgtgtcctccaaccacacacaggagctttgctcctcagcttgtcatttccctaggcttgcagtattttcacatagatttattgggatataattcacagaccatctggttcgggttggtgtttagatgtttttttttttaattcacagacctcacaattcacccatctagagtgtataattcagtgtttttaatatattcacagaggtgtgcaaccatcaccactatcttacttcagaccatcagtactatcttatttcagaatatattcatcaccccaaaaagaaacctgtatcctctagcactcactccccatcatacccactagcagtcactcttcagccaccaccaccctcaccaccaccatccctcctgttctggacaatttatgtaagtagaatcatacaatactgtggcatctttcccttaacataatgtttttgagtttcctctgcattttagcgtgaatcagtacttcatttctttttatgatggaatatatttcattgtatggacagactatattttatttgcccacgcatcagttgatagacatttgggccagcctttaaatattgaattc

SEQ ID NO: 196798 - DNA, 1000 bp, Homo Sapiens
agctttggaacatcaacggggatgtagttggaaaggagtctatacagacggtatggctagtgcttgccaatctctgaattgttcttaagtggaccctttaggacggacgccccgctaccatttccatgctttgataacagcagtagtaaaggcagagtgcagatagatcatcatggtttagtctataatgtcatatccaaaaagaaacagaaaaaaaaataccaccaagctctatttctggcctcaggatttggggaattaccaaatgtttgagcttctactaattcaggcagcgaaactaataatccagcaagtatctgtgttgttttgcagaaggcaaatgcgctggctgggaaatcctatcagactgtaccattcccaaaccaggcaacagacagcctttaaatgatcttgggaagaaggaggggctggccaaggtgttgtaagattaaaagaaaataaaataaaaaataaaaaagttaaaaaatttctttttgtgttaaaaaaaaaagcatgttaaagctaattttatttaatgttctgagaggaagcacagaaaaaccaaaggtgttggccttccggggtaggactgtggaagtgatggtcaagcagctttgtttaaagatgcttacgagaggtatttatttcaatcggggcataaacttccttgaaagtgtcttttacccctcgcttccgctgccgaacgttctcctacccagatgggtatcagaaagtgaggttcaggttttggcctgctgagccaggggaatacttggtctaaccatttacaacaactagatttttcctattccagtgtaggaaacctaattacaccctggtaaattctcttctgtctaccaaacacagaaaaaaacagtgacagaaactgaaaggccagaaaagagaaaagagtccctaagacctaatgaatccaaactaaacacctctccacagaaatgtcaaacatttctcttagcacaaaacaaggcttaaagaattc

SEQ ID NO: 196799 - DNA, 1000 bp, Homo Sapiens
tattgaagtcttaacccccagtacctcagaatattactgtatttgaaagcagtctctttcaaaaggtaattaatttaaaatgaagtcactacggtgggccctaattcaatgtaactgatgtttgtttaagaaggggagggacacagacatacaggtgagagaccatgtgaagatgaagtgagaagacagccctctaccgtctaaggagaaagccctcaaagaaaccaaccttgatggcaccttggtccttagacttctcaccatcagaattgtgagaaaataaccatctattgtttaacacatcatgtctgcactagtttgttgtggcatccttaggaaacttatacagagagtaagttatcaaagactggtcagcatatcactaccaaagaaactaaaaattaaaaaccttcaaaaggaatgaaaatggctcgcatgttaataaataacacgtatagctttgaaaacattatttcacatttattgagagcttgttacgggccacctgctctgctcaatgtgaactatcacattaatggcagtacagctctcctcgacaatggcagaggtgtgtgggatttgaggtggggtaaaggtaggagttcagggtgtggtagcagaaatatctaaagacagtaaaattagttcttatcctttctttttgttcacctgctgtgcaacctgagactattcactatactttgtagtcctcatttttcttctctacaaaatggaatagtgtgatttgatgaggctggcaccacaggtcccttaagagtgcatttggctttgtcatatttaagtttctatttccatgaacttaaacaaggagacagctatgagtaatgccaagttcaggcaaaaggtatggggctcccatggggtttacagataataacaaaatctataaaaatatgtatgagcacatattgggaagtaatatgaaacaaacaaaaaacaaacccattcttcatcacagggaaaagcagctgttgaattc

SEQ ID NO: 196800 - DNA, 1000 bp, Homo Sapiens
aagccaaataaaggcaccttcccatactcagatgaccgttagcccagcctgttagacagtgctccaagcaggaccataagaatactgtcatctgtttgcattactttttgaatcagagtaattttccttagtaagagtgaaatataaaaatatttccggaatttcgtttgtccaactctatgaaactacctgcagaagttgttggaccattcttggtagaggcttagcacgggatccactctctgtttagcaagggataaaagtcagtattaacaacatgtgaacatagaatttatgcagcactggtcaggatgacaaatgttcacttgccatttgaaatgccaaatgtattttacactgacactgatatacatggactttattttaaagccactgaattatgaagaaaaccgtcaagtgaacctggaaattggagtaaacaatgaagcgccatttgctagagatattcccagagtgacagccttgaacagagccttggttacagttcatgtgagggatctggatgaggggcctgaatgcactcctgcagcccaatatgtgcggattaaagaaaacttagcagtggggtcaaagatcaacggctataaggcatatgaccccgaaaatagaaatggcaatggtttaaggtaaaaataaatctataaccacatactaataatgtatttgtaatcattgagatagtaacttatttgaaaacattttctgatgctaaagactattttttttttattaacaggtacaaaaaattgcatgatcctaaaggttggatcaccattgatgaaatttcagggtcaatcataacttccaaaatcctggatagggaggttgaaactcccaaaaatgagttgtataatattacagtcctggcaatagacaaaggtaaaaaaaaagttttaatctggtattctataaaggaattagagaataaaatgtaattattcttatgcagatttattttggtggtaagtgtatggaattc

SEQ ID NO: 196801 - DNA, 1000 bp, Homo Sapiens
ttttagtagacagggtttcaccatgttggtcaggctggtctcaaactcctgacctcaggtgatccacccgcctcggactcccaaagtgctgggattacaggcatgagccatcgtgctcggcctcaacaggacaatttttttgtttttgagatgaaatcttgctctgtcacccagactggagtgcagtggcgtgatctcggctaactgcaacctccgccgtccaggttcaagcgattcttctgcctcagcctccccagtagctgggactacaggcatgcgccaccacacccagctaatttttgtatttttagtagagacggggtttcaccatattggccaggctggtttctaactcctgacctcgtgatccgcccacctcggcctcccaaagtgttgggattacaggcatgagccaccacgcccagcaacaggacaactttctatgacaaggtacaagcaaggagaaacacataggtccatccagggtgagggatttcgttggggaaaaaggagtgttgtggtgggattaagattaagtaggggcaggactgtattaatgtaccactgaatctaaaatggataaggaaggaagtgaagaggggattaatgtataagagataaagtagaggctttcaaccgattagatgctctgctctgataaagtgaaagaacaggccgggtgcagtggcttacgcctgtaatcccagcactatgggaggccgaggcgagcggatcacctgagttcaggacttcgagaccagcctggccaacatggcgaaacctgtctctactaaaaatgcaaaaattagctggcttggtggcgcacacctgtaatcctagctactcgagaggctgaggcagtagaattgcttgaacccaggaggcggaggttgcagtgagctgaggttgcgccactgcactccagcctgggcgacagagcaagactccttctaaaaaaaaaaagtgaaataacagtaataacagttatgctgtaattcta

SEQ ID NO: 196802 - DNA, 1000 bp, Homo Sapiens
cctcaaactcacacagattctatttaaaaaggaagttcccttttggggtattggcacatttagaatccatattgtctgttttaagtgtgtactctactgagaattgagctttggttctctatgtaccctttttagcttctcctttaagcatccatctctctctctctcttttttttttttttttttttttttgacaccgggtcccattctgtcgcccaggctggaatgcagtggttcaatcacggcttaccctgcagcctcaacctcctgggcccaggtgatcctctcacctcagccttcccagtagctgagaccacaggggtgtaccaccacacccggataattttttgtattttatgtagagacagagtttcaccatgttgcccaggctggtctcaagcgatccacctgcctcagcctcccaaagtattggggatacaggtgtgggccatggcgcccagcctcattccatccttttatggcatctattgcctgtgggtgatgagggtcctgagatgtcctggcaatgtccaaggtggttggccagtgttgggtactcttgactataaatgcgcatcatttgatgagatacattcagggaatctcagtatgtaacacaggtcatctgcgagtccctaaatttatgttacatctacctcctatctgtggtaaggacctacattgccatgccatacccagaaaggtgcctactgtaggaaatgcttaattgcatccccaagtggagcatttaggaggttatgtagcctatttgccaggactggccagaatctggtgtcctgagtttatatgtgccctggagttttctttgccccttgactgacaggctcatttaccagacttcggtggcttcctgtgctggagtcattcatctttgctttgggtcccagtcctgcactgtagacagaatgtcgtggcctctgtgatgatgtattcagttgtccttacctggaaggcacaagtctgattgggttttgaattc

SEQ ID NO: 196803 - DNA, 1000 bp, Homo Sapiens
atcaactgggaatctacctatctacaatattattattagccaatgctagtataggtaacttaaactgagctttaaagatctgcacaatttcatttttcattccagtacattttcctttggatgtaacaaaaataccttttatttaacattactagggaatgaggttctccacattaagtaataatacaagcctaactctttataaaaaaaatttttaaaacttatcaccctttaaagaaaaacatttctgaaaatctgtttaggatggctgaaaaaacatacttacaaagttatcattaataatataaattaacatttttctgatacaatgatgatctatctatctaatgaggtggcacaaggaaaaggtaaaggggcttaatatgacagtcttttaggaaatttttattctcttttcctgccagatgtcattccacatcactatctactttattagccccattctcctacaatctgctgcttctagttttgtataatttatgacactagattctattagaagtgagtataaaaactagattttcaatccttacttattatctctattttaagtcttaggttttatatttagtattaagtatttctagatttttaagggttattctgattagttccaatgttgaaaaattttccctttataagtaaggcatgatacttggtttaccttaattcttccataaagaacatatcaaggctattttgcaacactgtgctaaacaaaactagcattaaatatatagtctgacaatatactaacaaaatataaatggatacagattcaaggttctccactatctattaccatgaaatgagttaaaacacatgttctatgtatgcaccactcatagtaggacttggaaattttgtatatgaactccttgttcaattgaatgataaacgatcttttttctaaaaaccaaagtacgactttaaaagctacaagctcatttataatataaccctttaatgaaaagaattc

SEQ ID NO: 196804 - DNA, 1000 bp, Homo Sapiens
acttccttgaccaaaataaattttgagataaaatattttttgttttaagccagtaaattttggtgtattttattaaacgacaatagaaaactaatataaaccatatgaagaagcaaagctgagttgcactggtaggaaccatgagcaaagaggaagggtggttcccttctcctgcctgtagcctctcctcccagcacccccagcaccaagcactgctctgcttgcctagcagagtctaacaagttagatagcaaagcagaatgcaatttgcaggacctcacatttctaaagacagtagcctaatataatagctagtgccgtccacctctttgtccacctagcactgacactttgtgcacacattggaaattaccccaaattctatgattatgcataatgagatacagtgatcattcacgcaatgtaagacactctcaccctcttctgataatgaggagacaagaagtctcaaccatctgtcttgctgaacaagcatactgtccctctctggcgtatgttaattactgtttaaattcagtcatagtcccatctaaatattatgttacccaaaagataaattgtataggtaagctagaacaaagcttgtaaaatacaataaaggaatgtggggagagatgaatacatattaatatgtacagatggacacacgtacacatgtaatcaacaaagaaaatatacatggatattatagtccacatttatgtaactagccgtaaggttgtagctgatatttgtaatttccctttctttttatattcatgcttcctttaccctcagcttagacctcagattatgctattagtgggatatagaataatttttatttaacccaataccaaaaagttttttcttatgttttgttttaaaaattgtactattttagattttacatttacatctgtgttctattttcatattttaaattttatttttaatgttgtgggagctgtagaggtccttttgtgtgagtgtagaattc

SEQ ID NO: 196805 - DNA, 1000 bp, Homo Sapiens
aggcatgaacagggaatgtcccaggctacgtggatatagggtctccctaggcatgagttcctcagggcaggaactaggtctcattctgctctgtattcacaagaccaaggagggtctcagtaaacatgcagaataactcatgtgactactttctccagtaaatcaaatttgccaaaagcaatcggtatagtatttctaccagggctgccttgttgcacaagtccaggaggcactatcacagccccatgcagcagctgtgttcacataaaaggagatgcactttttttaagaaatttgtttttaaaccctctctaaatgagctttgaaatgaacttcctccacatccacagccaaccaaagctctgccctgaagccactttcccactgaacttgctgtgaccttccatgctcatccctcccttggcagggacaggctgtcagagccctgagagctgcagagacagctgatgccccatactgtgagcccagagccttttttcactaggccgctccaattctggcattatctgacttagcaactcaaatcaaagatcatcaggcatgatcagcagatctgcatgctcaagtctagatgctgacagcaatactgacagtcagaacacacattaagagcagaacggccctaaaacttgttctaagtcctttccctgtttgcatcagtttgctgtagttatccacaggtaaggtactaaaacaagggccctaggatttatctcttttccgaagagaaaacacccaaaaagcacaagtgaactttcttgcagggttgtttcagggacggccagaaacaagcacacagcaggagctagcactgggctctgagactgacagctgtgagtcctattaatggacctccagcacccttctcacatttcactgctttaatccaagctaccaaacaattctaatgagaccagcctataaactattcaggtgcctctgaagcaatcatctcaaagtcctcccacaagagggggta

SEQ ID NO: 196806 - DNA, 1000 bp, Homo Sapiens
cagcactgatgggattatcaggttccaatccacatagttttggccaaattactcaccttctcttctctctgtgtttggtgtgcagaacatgctgtggcagtgtgaggtttttggactcagtggaggcaagatgtggcttgttaattcattcagcagctgtttcctgggcacctgcgccatgttgtggcactgcacggggctctgggatgctcactagcacacatcttgtcctttacactcaggagacctctgagatctgggtctctccagtcacctggggatgctggttaaaaagcaaagatatggctgggcgtggtggcttacacctgtaatcccagcactctgggaggctgaggcaggcagatcaccaggtcaggagatcaagaccatcctggctaacacagtgaaaccccgtctctactaaaagtacaaaaacttagccgggcgtggtggcgggcacctgtagtcccagctactcgggaggctgaggcaggagaatggtgtgaacctgggaggcggagcttgcagtgagccaagatcacgccactgcactccagcctgggtgacagagctagactccatctcaaaaaaaaaaaaaaaaaaaaaaaaagcaaagatagagaagaagaacccatcagggtgagctaaggagttcccatcaaaaatgagttctctgagtctctgagtattgagattcttcagaatcagccactaaaaaaaaggctggagccaaggaccatttcctgcctcggacaccctctaatcagtaaagagatggagggcagagtttttataaagaaagatggtgaacaaaaatgctgtgacctagttctgttaattcatccctgggccctgtagaattgaaaatgaaaacaatattgatcttgttctgaagggactcgcagaccatgggagtggctgcagggaggcagccgggggccaggctggatgagtggggagctgaaacaggcaggtcaggcagaggagcagctcacctggg

SEQ ID NO: 196807 - DNA, 1000 bp, Homo Sapiens
ctagttctttcaatcccagaacctggggcggacagagaggccctacttaacctggcagcaacaacctagatggccgcccttctgccctcggggctcatcttgccttttcacatataaataaaaacatctccactcccacgccatgttcagtgggaagccagcccggcattgcccgtgtctctgaggattctcgagggacttacatccttggctttgatctttggggcccactgaattcatctcttgctcaggggctccctatggcttcctccttctctctactttgtggccctcaagggaacacacacacctttcctcagtttccccaaaacatccctcacccaaggcagtggtgtggagaggaattattttttccattcctgatgaatctttttaaatgcttacatgcatgaaaaaacaaacaggaccttgccttttacttcctaacttatgcagctgatttcatgtatttttgacaggttcatcatgtttctggcagttgtaacttttttcccttctggcttcactccctggtgctacatttctgggctgtgactcacccaaggttgtctcacagctggcacttaaatctagtattttttcttcattctaacatcttcccctgccccccttcatgcccatcaccaccaatatggtggctaatggatagactatgagcaaatacagcagctggtgagggcgctcacccaccctcggccgcgcaagtatccaggatctcacctccaggaggaaagatgcacctccctggacgagccagcctctccccgggctctcttgtcaccaaggcttgtccaaaggcagcagatgggccacacagcggggagtgaggccaggacagagcctgccccctccccaagaaaccggcagagccaagcctgtgcccccaaccacctccaaagccatctggcccacagacaacatgctttcatcctttgggatttcatttccagcaccacaaccagaagtttctagagaattc

SEQ ID NO: 196808 - DNA, 1000 bp, Homo Sapiens
ccagtgtgtctgtgcttggcatcttttaatcagcggtgttttctttttcatgatactgtgacactggctggatgtgttgggatatcaagtgacggacttcaaatagatggcaaattcactaaagtgaaaatgattgtggtagttccctcatttcctcctgcagtgtatgcaaaactgacttttaaagtgtttagtggataatagatcatgtaaggtcagtgctagccatggcagccatggctattattttcccttttcatgggagtgtgctcagcaaaatgagattgtcacactctttttttgagaggacagcgacagacagttaaaagcctcttcatgtaaggatgttatttcataaggacaccagcactggattatccccttcactttaaacttctgccagcttgtacaaagagataaaacaaaatagccctggtcccaggggtggggaagtgccggccagctcagcctgggtccacaggctttcattttgattcgtcacatgtgaggaaaattcacttaggctgagaggtaaatttaataccagttatgcccatgctgttcatatcacaaccattttcacatgatgccacttaattccctaagaagcagaaaggtaaatcggtggctggccagcaaaggtgtcacaatgcattaagaccaggactcgctgcaggggataatggttctgattgctgttgactcatgtctccaccaactgcctcatgtaaaataagtgacatttaaaagacatcaagatgtgagaagaggtaagggagagagaaagaaagagagaggagggtaaaaagtatgcgccactaaacttgccacccgaatgtgcagtttcttttccaccctaagtggtaggaaatgataactcgacatgccatgggtgacctgcgctaagcctttaacttcttgtcttgtgtttttagagaaaaatctgtaaaattgcttctgggaactgctccaacatgttatcatttatttccaatttaat

SEQ ID NO: 196809 - DNA, 1000 bp, Homo Sapiens
cctccacttcccaggttcaagtgattctcctgcctcagcctccctagtagctgggactacaggcaccagccaccatgcctggctaatttttgtatttttagtagtgacagggtttcaccatgttggccaggctggtctcaaactcctgacctcaggtgatccactcaccttggcctccaaagtgctaggattacaggcatgagccaccacactgggcctctcctgggttttaagcttactgactgcagaatgttgggacttctcaggcactataatcgtgatcatgtgagccaattccttgtaataaatcatatatgtataaggatatacacatatacaaacgcatatatatcttattggttctctttctctggagaatcctaaatgtatgggaaaactgggcagttccaggctttagaggtcccttcaaagtcaaagactggtgtaggaagaaggaggatgggaaagatatggaagaattggagatggtagtcaaaaggcagcataatggcatttaatatttgtgaaatggcaggatataatccccagagatcctaattatgtagggctagggtgtaaccaagaatctgattttaaaataaaatgatctttcacggatgatggtgcaatgcacccagggttgggaaccttcctgccagggaatgactgttagccaatctgacctaatgtgggagggccagcccctctgcccatcatctgcaaatgccacccttgccatctggcaaggggaagtctttgtgtataggaatccatatctttcttgtcaatgtatgcacttgttccattttctttcactgcagtcatttttcctgtattgctgaacaagacagcttcctccaacattccatcagcaacactggctgcctgctgtttttgtgaatccctgcatggcttctctttgtgttcttagcttcccgcctcttctctttcagcgttgagtcctactgctctgtggagaaagcagggatgttgtgaattc

SEQ ID NO: 196810 - DNA, 1000 bp, Homo Sapiens
aaggccttctgaaggtggagatgccagccagccacatctacagaagccccagctcacaaagaatggcacatcttgatccatttttatttacaaaacaaactctaaatgtgtttgtgtgtgtatgcatatgtgtatatatacacacagacttacatatgtatgtttatatacatctacatgtatatatacatctacattgtatatacatttaccttctatataaatgttacatttatagacatatacatttatatgtatatacacatatatatttacccatgtatctataatataatgtatgctatatataagaaatcaagaagtaggccgggcgcggtggctcacgcctgtaatcccagcactttgggaggcgaaggcaggcagatcacctcaggtcaggagtttgagaccagcctgaccaacatggtgaaactcccatctctactaaaaatacaaaaagttagccgggtgtggtagcgtgcgcctgtaatcccagctactcgggaggctgaggcaggagaattgcttgaacctgggaggtggaggttgcagtgagccaagatcgtgccactacattccagcctgggcgacagagggagactccaaacccccaaaaaaaacaaaattgagaagtaaatattctaaaatgtcagtagtggtgggatttttaaaataaacttttaaaataaaaattttattgacctatactttgcatacaataatctgtacctatattagttgagtttcgataacatactcatgtagccaccaggtggttcagtattttattttcttctttatgcctttctttaatttctaattttttaaattcagtggacaagtgtgatgagtaattaggtaagaacatgtacagagggagacaaagagaaataatttctaagtctctggcctcgcattcataatctaggggaggccagtccctgagagaggacagattggccactggagtaggctctcagctaccagcggcttcttcttc

SEQ ID NO: 196811 - DNA, 1000 bp, Homo Sapiens
ctgggggtcaactatgtatcaaacccaagaatagtaatagtaagacccattctctgcctccaagaagcacagtctcacatggggagacagagccacaactaacaattacactccgtggaataacagctgcagtggagaatgcagagaagcccacagaagtacaaggtgaatgacagaggaagggcgaatcattcaggcagggtaggagaaagaagagagttgagtccctgaggaggacatcccagacagaggaaacagcctttgcaaaggaggcagacacattcaaggtcagggtggcgaatgagagatgcgtggagatgcggcagtggataagggtgtaaaaggtggacggggtccactcatgcaggggatgtatgttatgccgaagagaccagactctgattgcaaccatattttcaatttaaatccttatcgttataatccaacaaggtagagatattttaaaatgaaacagttaaaatgattgtcaattttaagtttcagttgtcttgaatattaaacctgaaatcattagctacctgcttctttggactaaaagctgcatgaaggcaggaatcatttcctcaccaaagcacctactcgaattcatccaatagaggacccactagagacagctgatgaactcattggattccaacacttcttatgaagtaattaatttcccacagtgctcgactagatactgcatcaccaacactaaatagatgttttatctgatctctacaagcttgtaatctaagacataacagttgttattcttaattttgagaattaaaatgtcattgctctgtgtgacagattgagaaacaaactaatcataaaaatttttaggccataaaagctaataactaaagacagtaagtatactaaaataaatcaatgtcaaattataaacgttcagaattttcagttgtttattatgatttatttcattgagttgagaaatctattaaccttttgacatgggaagatggaattc

SEQ ID NO: 196812 - DNA, 1000 bp, Homo Sapiens
gcaactctgaaattagggtatagggctggaatatggaggatacaaaagagtctacattagccccaaatctggccatcacatgggagaggcagctgacacagatatctagaaagcaaagcagaggctcataactcctgcagatttcgggagtgtagtctggtagcctgacttccaggaccagtttattcatttactcattattttattctttcattctttcacatttcttgtacaactattatgggtcagtcatatgtggttaaatgcgctaacagttctgtcattttcctggttggaaaagtagagtcaatttacaaaaaagaacaaaactagggtttctgaaataaagatttgtaatttgcttttttcatgcaggtgcaaattatcttaaactgatataaaaaagaagaaacagaaattttaaaatatatgttttttacaaatgtgtaccatctaattatcagctagaagtcttattctgtgaagagctaacacaggttctagtgtaataataataatcagcataacatttattgagtatttactgtacatgccaaacaactgtgctgtgtgtttaacatgaatttttgcatttaatccttaggaaaaattctgtgagacaggtttgttattaccttcctttcccagataagcaagcagatcaagaaatgttgatcgcatagctggaatttagagcctgaaattgaacccaggcagtctgactccagagtctgcagtcttttgttgatgttacctgtctctactccagccacaggtggttcacgacctatgatggttcaacttaatgattttttgactttacaatggtacgaaagcatttggtagaaactgtacatcaagtactcgtataaccattctgtttttcactttcagtatagcattcaataaattacataagatattcaacaccttattatgaaataggctttgtgttagatgattttgcccaactgtaggctaataacatagttgttctgag

SEQ ID NO: 196813 - DNA, 1000 bp, Homo Sapiens
ctcatttctaagagtgctttgttaacaagcttttctcatcagagagtgctacatctacaaacgacttgtggcaccaaataaattagaggcttatacacattttcgatttttaaccgcgtttctggctgaatgaagtatgttgccctccatctgagcatcagattggtggagaagcataaatgaagatggcagcggcatctgtcggagccagtagcttccatatgccccctcgcattccagcctgtgtaatcagggcgtcagcacccttccctgctcatgcgctgggctggctaagtctgcaagggatggttttacagactcctgcattggtggtctccagcactcctgcccgttgttctgcatctcacactgctctctctaaactcagggttttttttaaaaaaccttgctgggcccactcaaataacagactgacctggtctttgaattttcagtccaggcaactctatcctcattggtgacaataccatctattatcccatcagcagagtcctgctagccctttctggggtccctgcttctcctcggagccgtggaggcaagtgggccagcagcaagaagtctgaccaccaggaaagctgctcaccgggagcttctgaccgtagcacccttatctgcaaaggcgagttggtcttggccactgatcttcatgacaactatgatctatggttttgaaagaactgaagagaccagagctagaagggactgtggagaccacccaggcctaatcctttaacagatgtggctgctgggagcagggagtggacacacgcataggccacgcagctagtcacaggcactgcagagcaaggagtaggcctggcgtatgccagcgaagagtcacaggggtgagctgttggaggtagaggagtcgcctgggggctgtgtcacaataatgcgaggacctctgtttcaagcccagtctctctcttcagagggtattcactttccaaactgtttctggttttggacttatgaa

SEQ ID NO: 196814 - DNA, 1000 bp, Homo Sapiens
atagctaccctgatttgatcctatgcatttatacatgtatcaaaatatcttcaggataagaacaactataatatatcaatagaaatttaaaaattaaagaaattaacaaaagagtctgtgcatggtggctcacgccggtaatctcagcactttgggaggccaaggcaggtggatcacttgaggccaggagtttgagaccaacctggacaacatggcgaaaccccgtctctaccaaaaatacaaaaaaaattagccgggcgtcatggcgcatgcctgtaatcccggctacttggggggctgaggctggagaatagcttgaacccaggaagcagaggttgcagtgagccgagatcacgccactgcactgcagcctgggcaacatagactctgtctaaaaaaaaaaaaaagtaagaaattaacaaacaaaagaaaatatattgtttaaaaataaaattacatttcataattattgcacgaacagatttaaggataaagtttccagttagaatgaaagagagaaggcatgtgtttacaaacaagcacgaggcccaagaataacttactgattagtataaaatgtaaatggttgattttgcacaaatgcgatttttctttctttcttttttatttttttgtggtccactggaatgagaaactcaaaatctttctttagagctaaggcttttttcttcaatcgacttcctcaggttgaaaggagttaaggctttaccaaagcaatttgaaggtttgaaatctccagggagattgatttatgagtacagtacacgttaaggctacctctgaccttggcagattgtggctgttaaattaggccctggagtcctgagacaggggctcttcatcttagcctcctagcctccttagtatctcactgtgtgtcagcaattccatgaatcccattggattcatgaaatttcattcatggaattggattcctactcatggaatttaatgtaattccattggattcatggaattc

SEQ ID NO: 196815 - DNA, 1000 bp, Homo Sapiens
taaataatgtatgtttagtaagaaatgataaaatatttacagtttttctaaagatactgtatggattttttcctctgccacagccatttttcttgaagtaggcaaaataggcaacttcaagggctctgagagtgacggggaaccatctacgaaggagaagaatggtccaaggcagtatatggaaaagtctccatgaggaaaagaaatgccagctgatcccagctatcaagatgcatatttcatatggttgaaggtctagggaggcattagcaaacaattttggtatccttaccattaaattgaagggttgctaggctcagttcacgtgacgcagtcatttgccaaagctattctgtgggagcgttgtaaacctcagaggatgatggtatgaccttccaagcttctaaataaatgccttttcaaaacctcccctacacattcactgaccctgaacatgatacacagaacaaaatcacagtgtcactaaatcatcactgcacctgtttgggaaggagcctgaaaaagctcttaacaaaggttttcaacagaatctcctgggagagtcttaaacagagattcccaggtcccccatcctcctaagaaattctgataggacgcatctagtgcggggctgggtaatctatttttgaaaagctttccaagtggtgatcatccaagtttgggaactgttgtaggttgaacaatggtctccaaagatacctgtgttctaaatcctggaacctgtgaatggcaaaataccttacatggcaaaaaggaggttgcagatgtgattacacgaagaatcttgggatggaggggttatcctggattatctgggtgggccctaaatgtaatcaaagtatacaagagggaggcagagaaagatttgactgtggaagaagaaggcaaagtgatgatagatgcaggatgctatgaagttgactttgaagatggaggaagagcccatgagccaatggatacaggtagactttaaagtgtg

SEQ ID NO: 196816 - DNA, 1000 bp, Homo Sapiens
tataaattagcaataaaattgcgcctcattcctggtagtttattaaatatttcatataaaggaatatatgtggtcactattaccctatgtattttttaagtaagaacagtatcttaaaacgaactaagaatgagtcaactggtttattttattagctcactattttggacaatttcagacaacaaaacatgggatgataattctatcaaactgtctccaaaatggttctgaacaaattctggctttgttggccagattatacctaagtgaccaatctatgaaaagccaaaagggcgaggcatgaactacattgaacctgtcaattctaaaccaaatctgacatgtgtggacggtgggaggagggaggacagaaaagatatcttaagataataaaaagtgaaataagcatttttattgtgccatgtaattttctatggaaaaaaaaacatttgacatggagaaaacaatggagaatttttagagatagttccagtactcagtggtcctagattctgttcataaaaggagtaacaagatgagaagagctttagatgatcagagttggtttcctctttggtatttaggtttacttctggactatgccaagaaagaaattctagggagcctctcagaacctattctggttcaggggctgcctgatgaaaaaaaattataatttaaaaaaaggaaagaaagaaattctactgatatataatgttactgaataatataagttcctacagattatcagcacagtccaaagtctccaatacaggtaagctttgacttcagtcacaatttgcaattttgagtcctaatgctcctccactttgcccactgtgaggaaaatatggggtaaaacattcagcatccattctgacccccttcttctttgcctacttccactagtgaggctggaaaaagaagatacattcccagagtcttttgcagcaaaaggtggccaaagaagtacagacagaagttccaggagagagaattc

SEQ ID NO: 196817 - DNA, 1000 bp, Homo Sapiens
atagccaggccaggaggtcaaagttccagagcctcaaaccctgtggctaggcaaatctcatctgctccagacaccaggctcttaggttcggtttctgtcttttttctggaagtgggacaaaggagccacaagccaagaagctgtcagggctggtcccgagccccaggaggctgggaaccaaaggtccacacccatgtaaacacgggccagcactgatacctcttacttggcccttgagagctccctccacattagttcctggctattatcttgcttatccctgcaggtctgctgggagccagggaggggcagagagtatcagccccacttcacaaccaggagaaactctaaagaggatgaaggtggtaatttgccaaagccacccagcgagtcgggatgcggctggaacaggaggctgagtctccaaggccctgtgggtgagagggtggtcaccagagctcatggcctgcttgccgggggaggcgaggggagcggaggtaaagaaatgtacacagtcccaggaatcgagggtccactgttgcataaggagagggatctcaccacccctggagagagacctatagggacaggctctgcttgctggtgtggggctctgagggaagacaggcagaagcagtggaacacagccacagagaatacaggtctgagggagggagtgatcatgtggcaggtgtcccaggtgtccctgggtggggtctgtgctgcttttctgccagctccaagttaccccaaggaacccttatgcccacccgggacccaaagacgcccctgctgcccctcactgctaagaagtcaggaagttgtcaggataccaggtgaggagagggacactggcacaggtgagggtcaaggagaccatggagctggtgacaatgactgagtctcgcttccagaggggttacaggtagggtgaccataacccacgttattaatagagctcctgttcagtcacaaaatcattgagtatgacagtgaattc

SEQ ID NO: 196818 - DNA, 1000 bp, Homo Sapiens
ctcgcagccatcccccgtgtggcttggacccaccgcgaagctgacctcattctactctccagcccagcatgcgcccggggagaggagcaagctctcattcttctggtgggttttccatttccagggattatggctctaaagaaaagcgtctttgggacagtttcaatacaaacaccaggatgcttttaaaaatagaactttcaaataatatctcttaaaccatggattttaagcattaatctcgttcgatagttgcaaaatcaaaaccttccgtcagcacgtcgacctggatcttgcagcccgcggcgctgtgcagggaagctctcctctcagacgccccttgagctgtggttgcttctcagcccctgttcagagcatagtcacatgggcgaggcttgtgagcttgtgagccaggcctttattcctccacgagggctctctcccattgccagtaaaactgcacacccgtttatttctatattttccctatttttacacctgccaaaacatccatttgtggtggtaaaatacttggactccctagcagtgaaatgaaaaaggttgtgatttatataaagagcagagtggcctctggggtgagttgggctgaattaaggtccctgtaacctccaagatgagcctggcaggacgcagctagtggggcacgtccatggctgcatggtggcctccaggccatgcttacccactctcctctccaacccccaaagccttctgctactggctggcatggtgagtgcctgggcaccaggaacagggcacaaggggcactcgtgggctggggctggctgtacagtgagagacattcaggaatgttacgagccattacattaaaatacaaaggtaaggaatatggaaaactaattttttacattttccttgtgtccatgccctgaggtgatttatatcttggacctcagggggaaatcctggggtgtatgtgcgattgtgcatctcttctaactccaagttgggtgaattc

SEQ ID NO: 196819 - DNA, 1000 bp, Homo Sapiens
tcttactctgtcacccaggctggagtgcagtggtgtgaccatagctcactgcagcctcgaccttccaggctcaagtgatcatgatccccccatctcagtctccctcgtagttgggactacaggcactcgccaccacgcccagctaattttgtattacttgcaaagataaggtctcactgtgttgcccaggctggtctcaaactcctgggctcaagctgtctgttcacctcggcctcccacattgctgggatcccaggcgtgagccaccacactggcctcacatgagctttaatgacagctcagcctgtccagtcagatgtgtcagaggtccaggaagcctgattaaggagaaagttcagaggggcttgtagacagttgcaatattatctgcttgtgagtgggaccatattttcatgattttttttttccacacagtgaacagtttttgtggacagatgcttctgccttctcatactctctgctccagttagcttgaccttgagcctactcgcaatggtacatcgttgaacccttttctgcagcagatatatagccctgttcttccttcaaatttatagcctagagcagtcttgagaggcctcacttaggaagacagcttggctggcaaataaatgtttgccagatgaatgtgtgttggacatagtatggagggatattcttgctttattagataaaatttgattttccctgtaaatgattatttatgagataaaacataaactaaaaatgattcatttccatcaagtgcaaagttagctgcaaaacataacattcttcctttatgtcacacagggaaattaatggcctggaaatgtacagctgctcaaccagtttacgagccattagtacctagtgtactggcagtgagccccagttagccatggaaaccagcttgcagctttcttaactctgtataggagaaataattgatgattcagtaacattaatgatcatatttacagcttgatgtttaattagg

SEQ ID NO: 196820 - DNA, 1000 bp, Homo Sapiens
cagtaaaactatctctcaggaataaatgtaaaataaagagattatcaaaaaaagagagagtaagttggcggcatgcctgttctaaaagaaatgctaaaggagccgcttcaagaaggaagatgataccagagaaaactgtggaacttcagaaatgagggaagagcaaatgacgaggtaaaatcgagataaatgtattatttttattcttttaagttcttgaaaatatgcttgactgttgaaagcaaaaaagaataacactttgatggggttttcagtgaaggtatgtgtaatacataataacagttacaggacaaaagggtcgtgcaaaggacctacatagttaaagatttatatgttccacttaaagaggtaaaatatcaactctaagtagaccatgaaaaattaggcattaatgttgtaatctttagagctatcaataaaaagtctactcaaagaaatacatttgaaaaacaatagataggttttaaattttcaaataatccaaaagtgggcataaaagggaaagagaggagaacaaaacagaaagcaaaagatgggagaaaaacaggccaaaaataaaatggaagacctaaatccaaacatgtcaaaaattacattaaaataaatggtcaaactacaataaggaaagagattgctggattagagagtaaaaacaagacacaactgtaagtcgggtactgaaacccacttcaaatataataatataaaaaagtgaaaggatacaaaaagatataccatgtaaatactaatcaaaagaaagttgggcaatgtttgtcttgttccaaagtttatcttttctgcatcccaattttggtaatgtttacacaattttatgtatttattaatatagaaccatacataaacaattaatttttgtgcatgcaaatttaaaaaataaattaaaaacctacttatagttctgccttcttaatttacttctttgtacactctatggttggcctccatatctgtggaattc

SEQ ID NO: 196821 - DNA, 1000 bp, Homo Sapiens
tctcttacccacctatgaccttaaagtcccctccccacctcaagtcttcctgcctttgcttcgagttgtcctgcctttccataccgaaccaatgttcttgcatatgttgcttgatgtctcctgtctccttagaatgtgtaaagccaaactgtgctctgaccaccttgggcacatgtcatcaggacctcctgagcctgtgttatgggcatttgtcctcaatcttggcaaaataaactttctaaattaattgattcctgtctcagatctttggggttcacacagttatatctcaacaaaattgtaaagaaatcatcctggatggaggctagaattacaaaatggtaaaaagaaacattacccagggattagcaaccacagaaagcctcattcatgcctagggtttgaggaacttaaggaaaaatggtgtgtttgcaaagcctgtgtttacttggccactaagactgatgggaccccactggtgctgctgttttaattatcatctctacttctcttcaggaagctaggagcacacactctcattaccctgcaggacctggggagcctgaagtcatgcataggtgttgtttttgctgctggagctagaacccatgaatacttcttccactggaagcacaaccccaggcagaaaaaaaaagacttctttcttccttttgttttccagcttctttccagccttctctcccattgacagaaacaaactgcaagccagctaggaagggagtttattttgcatgtttacagctctgtatgatgcggtgagggggaagtaaggaaagatgtttatggagtcaaagtccaatgggcaattagctggcacaactctctgatatattacttttgacaaggaaaatataaaagggtatgtggttcttgctttgagggatctttgtcagaacaccctggttcttccagcattacataactctctaatcccctgccatttctaaatagcccaatgtaaaagcagatataaagccca

SEQ ID NO: 196822 - DNA, 1000 bp, Homo Sapiens
gtacactttacattttcttttctattattttgacttagttgcttaatttacatatttttaaattacctatcttttaacgggctgctgttgccattagtgttttggatagatttgtctctgtggtttcagaagagatttataagtagactgcacatcacaattacagtattagagtattatgggtttatccatgttcttaattttaccagtttttatcagggttttataccaaataaagttgtctttttgcatgtgagtgttttattttatttcagactgaagaaatccctttagtattttgtaggacgagtctggtggtgttgaattctctcagtttttatttgtctgggaaagactttatttctcctttatatttaaaagataatgttgttgcaggcaataattttgaataacagtatttttctatgagcactttaaaaagattttccattccctcctggcctgtattgtttccattgaggagtctgtcgccagatgaattgaatctccgggatatgctatttacttcttctttcttgctgattttaggaacttctctctattttgatctttgagaatttgattattatatgacttgagatagtcttaaaggggttcaatatctgtagcagtcttagagcttcttgtgcctgcatatttatatctttctcaatatttgaaaagtttcctgttattatttatttgaatactctttctacccattgctcttgaacaccaatatttcttagattttgttttttgaaataattttccatatcctgtaggcagtctctgttactttttgtttttttcttttttctcttctttgtattttcaaatagccagtctttgagctcactcctctacttggtacattctgctctttagagcctttattgagattttcagtgcagcaaatgtatttcttagttccaagatttttgattttttaaattatttcaatctgtttgctaaattcctctgataaatttttgaattc

SEQ ID NO: 196823 - DNA, 1000 bp, Homo Sapiens
atatactaaataaatgctagataaaagagaaatttggcactctgtatctctgttcccttagtacatgaaacacatatgatgcatttgtttctcatttgagaggacaagaggattgttacacaaacaatatactttggccaaagggaaatggctgggaaagcatgccttgagatgtaacagtgtcaccccacccccaccaagctcatatggttgggcacacgctctctctctagcatacacacacattacacactcacacctcaccaccccctatagtcaggctacttattaaggtgccagtgcttccacaccgtgtttcatgctgccgtgtttcattccaccacgtttcatgccgccacattttatgctgccacgtttcatgccgccacgtttcatgccgccatctcatgccgctgtgtctcaggccacatttcatgccgtgtttcatgccaccgtgtttcatgctgccacgtttcatgccaccgtctcatgccactgtgtctcatgccaccacatttcatgccgtgtctcatgccaccatgtttcatgctgtcacgtttcatgctgccatgtttcatgccaccgttgtctcatgccgccacatttcatgccgtgtttcatgccaccgtgtttcatgctgccatgtttcatgcctccacgcctctgcctgtgctgtccaccctgcagtaaagtctgcccttgctacctcttcagctacttaagagtcctcgtatctaattcacataccatgccccccaggaatctctgccctgagctacttgctcctagctgggttagctatttttgtaaactctctcccaccagagctcttagcacacaatattaaaatgtgttcacatgcctcctgccatactgaactccttggaggagaagctgaggacagtgcctaggacacaggagaggggtgtgataaataagacgaatgaatgaaccaataccaacagcctgatttcatgattcatcacccttactggaattc

SEQ ID NO: 196824 - DNA, 1000 bp, Homo Sapiens
tctggtgttgggtgcatagattcgtatgctttgacttatagttttatttttcaaagtgttgctgctcttgcccttttttggtttccagttacatggaatattttttccactccttcactttcagtgtatgtgtgtctttgtgggtgaagcagatttctagtaggcagtatatagttgtgtctcattcctttatccattcagtttatttttttaattggaaaattgagtccatttacattgcatgttattgataaataaggacttactattgccgttttctggttgctttgtcacttttctcttcctttctttgtttcttactgtcttcctgtgtggttaaatgattgtctctggttgctttttatttttagtgaatctattatagttttttggattgtgctcaccaagaggcttacaaaagcatcttatagacataacaaattatttttaatatatgacaactaagatcacaaagaaaaaaatagaaacagaaaatttttaaaaactctatactttaactccatcccctttacattttgactttatgttgtttcaatttacatatttttatattgcctatatcttaactagttgctattggtattattgtttttgatagatttgtcttttaggctttatactagagttctgagtagattgcacacaattacaatattctgggtttgtctgtatacctaatttttatcttcaaaggctttctttttgcatgttaatgttttttctttcagattgaagaactccttttagcactgtttttgtaagacaggtctgttggtaatgaattctctcatctttttttggggaaaagtctttatctctccttcgtatttgaagaaaagcttgctaaatacaatattctcagatggcagttttttctttcagcactttgaaaatatcattctactctcttctcacctgtatggtttctatggagaactctgttgccggacaaattgaagctcttttttatgttattttc

SEQ ID NO: 196825 - DNA, 1000 bp, Homo Sapiens
atgggtgaatctcttgagctcaggagtttgagaccagcctgggcaacatggtgaaaccccatctctacaaaaaatacaaaaaaaagtttgccaggtatcgtgccttgtgctcccagctatctgggaggctgaggtgggagaattgcttgaacccagaaggtcaaggctgcagtgagccgagattgcgccattgctctccagcctgggtgacaaagtgagatactatgcagccataaaaaatgatgagttcatgtccttcgtagggacatggatgaaattggaaatcatcattctcagtaaactatggcaagaacaaaaaaccaaacaccacatattctcactcataggtgggaactgaacaatgagaatacatggacacaggaaggggaacatcacactctggggactgttgtggggtggggggagcggggagggatagctttaggaagtacaccttatgctaaatgacgagttaatgggtgcagcacaccagcatggcacatgtatacatatgtaactaacctgcacattgtgcacatgtaccctaaaacttaaaagtataataataataaaataaaatagaaaataaataaataaataaaaaataaaaaataaaagacttgatttttatgggttttttgtttgttttaaatagagacaggatttcgccatgttgcccaggctgatctcgaactcctgggctcaagcaatttgcccaccttggcctctttaaagtgctgggattacaggtgtcaaccaccgcacctggccagacttttatgtttttgatatgaaataaatatcagtaagtacagaattgctgaatatatttcaggatcagtgaaaagtatgtctttcacatctagccctctagtcacaactctggaatatcttaatgtatctgttataaatttggggttatttatcttaagaatctggaatagttatacattcatactattaaaggtattggcttggctcatctgggttttctgaattc

SEQ ID NO: 196826 - DNA, 1000 bp, Homo Sapiens
atgaaggaagacaaatgaaaaattgctttaccacaggctcaactccacgtaatgcagacaaattcacatttgcatatttctggggcaaccaaggttaagatttttaagattaagattttaactaatttctttttttatttttactttttaaacttttattttaggttcaggactacatgtacaggcttgttatataggcaaattgcatgtcacaggggtttgttgtacagattatttcatcacccaggtagtaagcatagtacctaataggtagttttttgatcctcaccctcctcccactatccactctcaggtaggcattggtgtctgttgttcccttctttgtgtccatatgtactcagtgttttgctcctacttataagtgagaacatgtgatacttggttttctgttcctgtgtgagtttgcttaggataatggcctccagctccatccatgttgctgcaaaggacacaatcttgttcttttttatggctgcgtagtactccatggtgtatatgtaccaaattttctttatccagtctactatttttaactgatttcttggaagattggcttctggtctgtgctttatctcctgtgagatattactttttttcctgctaatgatcttcagatatagttcttacctttccttttaggtacctacttctgcaacttggatcatacttctaggtcccaggtttgtggccatgaaaggctgatgcacaatctcagatttaatgaaatggtgtcatgtgtctcttcaataacatccctgtgtgtataagtttttaaataaaaaacatagcactcttctttttgtgagaaataaggatttatcaatttgaagagataataaatgatgagttccttaccagttaaacctgtttctaaaatagagatctcttcataactcatggtctggcttctgtaagttccatgctgctataaactgaatgtttgtgtcctccctccccaccaaattcatacgttgaattc

SEQ ID NO: 196827 - DNA, 1000 bp, Homo Sapiens
catataatcacaaacataaattataattatgaacacgtgttctcatagctctacagccaggatggtatgtggcaacctcacgtcaagaactgcttccctcaagagttgctgcttttgttggcatcagaatcagcatgaaccaggtgaagagagagaggaaccagcatgtggaaacaccctgcagtacaagtgcagcatcccaggaatggaaagaaggccagtggtcatagcggagaggagaacggggacaggggtgagatgaggcaggagaggacatgcagctggtgcatgcatggtcttggagccatgctgtgcctccagtctttatctgagtctaatggtgaaggctaacgcagaggagaaacaggatcggatttgcactttgctgcaacatgaaagcagattggggaagagcaagcaaggattcaggagaaccaagtgaaaagactattgcaagagaggacagtggcagtggggaggtgaagagaagtagctggaggtaagaggtatgtcgaggggtcataatgggctgggtatggagggagaaagcctccacaggatggctcctaggtatcagggttgtgcctgattagatggttacatctagatataagatggttggtgtgctctattctgagacaggaagcactggagaagcccagagttctttgctttgatttgtttgggtgagaggaagaggcatgatcagtctgagttgcctttgaaacatcacattaaaggtgtcagataagtaggtgagatgtacagatccggagctcagaggagaggtgggactggagagaatatgttttggagagtcatcagcatatggagagtgattgaagccttgagcatggattagatcatccaggggaagaagagaatggagtaaaaaaagagaagagggcctggcaaaacatcttctaggagctctgatgtctaatagccagggaggcaggggtgattcggcaaaatggggaaatgacgaccaatgaagcag

SEQ ID NO: 196828 - DNA, 1000 bp, Homo Sapiens
cctgtctcccaggcatggcacccaggacaagacgcagagcaattagagcaattggcttttttgtctttttatctcttcttgccacttttattttcttctcatcttctctttcccctcttttttgtttttctcgttttgctcttctttcccgcactccagcctcagacctcataacgagagctgcacagataaggaaaccttctctgcttcacataagtcaaacattttttctcacatctaaatagagattcgcgacactggaaataggtttttcattattactaatatcattcacaagaagtgacatgtgtggtgttatgataagtacacacgtgttggcttttgtccacagtttctggctcggaacccccatagtccctgttacagtctcgtgttatgacagtggctgtgttaggcctcaggaaacagaatctctctggccttctccagctctcctttcacctgccgcaaggcaggactcgtatcttcccccgcctttctgattgtgggtcttaagactctccccagagagggttctgtcctatgccctgagagaaggaacgctgacatcatgaagcttccataaaaaccccaagaggacagggttcagagagcttccggagagctgagcacacggaggttcctggaagctccatgccccttcccctataccttgccctgtgcatctcttcatcagtgtcctttgtaacatcctttagaatcaacgggctaatgtgtttccctgagttctgtgagtcactccagcaaattgatcaaacccaaagagggcgttgtgggaaccccaacttgaagttggtcggtcagaagttccgaagggccagacttgtgtctgggtcagggatagtcttgggactgagccctcaacctgtgggctgtaagactatctccaggtagacagtgttggaattgaactggaggacaccccgctgctgtccgcggcttagtgggacaaccccccacacatctggtcccagaattc

SEQ ID NO: 196829 - DNA, 1000 bp, Homo Sapiens
ctgttgtgctaggagttagaccccaaaccgtgcccttgcaaatgtcttgaagcactgtgggcacattcattcattcattccatagctgcgtgttgggtgccaaccttgtgccaaccatgatgccaagtgttacacatccaaacatcactagacatggtgggggctcaaggcccaggatagcgcagtgatggtgaattttaggtgtcaacttgactgggccacaggatactcagattaaccattgtttccaggtgtgtctgccagggtgtttctggatgagattagcattgaaattggtgaacttggtaaagtagaaagccctccccaatggggctgggcttcatccaagtccttgagggcctgaacagaacaaaaggcagaggaaggagaaaatcacccctttttttctgcctcactgcttgagctgggacgtctcctcctctcctgtcctcagactgggtttatgccctcagttccctggttctcaggcctttgaacttggacagaactacaccaccagctttcctgggtctccaaatttcagatggtagatcatgggacttctcatccgccacgatttcatgagccaattttcataatcaatctctctatagatgatagatagatagacagagatacttatataaataggtaggtatgagcttatctatctgtctatcctattggtctatttctttgcagtacctgacttacacagggacacagacccacagagagcaaatggtaatgttacatttgggactctgaagacagacagtcctcaagtctgcccttatttggggctcctcactggggaagatcccactgagtctgaggacttgggggaattgttttaaggtggaagagtagcaacaactctgaagagcagagagaggctgggaaattggagtctaaggactccacgtttacccccgcagaagtgggtggaatgttcatgttactgtcatgttgctagaaaaaccaaagagggagagaattc

SEQ ID NO: 196830 - DNA, 1000 bp, Homo Sapiens
gtctttggatggccttctggggaaaccggaatgtggtgggatgccagttagaagaagacaagagctcctagccctaagacgccttgtatggggccgccttgcgagggtggaacccgcccttgtagcccggggagaacaggctctttgaggcctctgcttcctcccttgcccagtgctatgctgtaatcaggagatgagtgtgctcccctttcaagcttctgatgagtaacaggaccaaggcaacacgggaagtcagggtggggatgggaggtactttggctttcctcgccaatgcctgggacctttcctctctgaggggtttggctgataggctcttcactccacgcttggcctccttccctgtcacaccaggtggctttcagaaaacacattccacatcattcttatctcttgtgtgagtcgggctgcctcctcctctgcactccccaatagttctagtgttggctcagaggctctgctcccttctccctgtagggacagctcacccatgcactgagagggagagggactaaatgtttatgagtatctttctgtgttgggcacagagctacagtctctctcatgtgcgtcttcttaaatcacatcaatactgaacagtggtgggtttaatttatgtatttatttttttacaaataaagaggcagagacttgttgaggtcacataatttgtgcaaggtgatccagtaagactcagattgtctggctgctgaaccagcaccttttcttccataaagtgggactttattcttgaggtcacaaggcctttcctggagagaaactgaggcgtgtaagaggaggagaaaacatatctgaagaaaatgtcaactgctctgagagaagattctttcagctgaagccattagttcattcagatcatatgtacagagagtctcctagcactggccaggctgctgccctcatccaccaaacctccccacttgacaggctcagccttcaaggagtacttgaaagtgaattc

SEQ ID NO: 196831 - DNA, 1000 bp, Homo Sapiens
tctggttcccaactggaagtgggtgaccttggaccttgagcccagaagtggctcaggtctcttagtggaattaagatgggggaaggtgagtttcagctgccaaacagacttaacttataatccttatcctggtaaaataatgggacatataagccaagatgtttgttcaaggatgctcatcccagcaataatgtgaaaatctggacgcagcctaaatgtttaattataggaactggttaaataaactacaatatatccataagaatggaataatctgtaattaccagacatgaggatgtagacttgtattagctgatcccaaaggacatttataaatacatttggacatttggtgggtgggtgggtaagggaagtagagtatgtagcgtaggatcccactttttccaaatgtatttgtactagaaaagtctagaaaaacaaacatcaaattactattagtggttatctctgacaaatgcatgctgggtgattttaaattatcttcatgtatgcttttttttttttaacctttccatgattaaatatatgatacaattaaaatagaataaaatgtataatgcaggccccagtgtgggccaatgaacaaactccagctgcagcagctgcaggtccacaggccctacgctgagactcccactctgtctgcacacgagtgggtctgtgaagcaaaggagccttacttccaccatgaaccagacaacgcctatgcacactgcggtgcatgcctgacacgcagcatctcgcgtccccctaacgcgaacagcgtggaagggctggaccctgctctgtgtacatggaggtgcagtgtcctccataagcctggccaggggctgagcctttggacagatctgatctcaagcccacactaaaaggggccaggtgactgcttcaggggagccccagggcagtgagcccagcactcacccaaggtgaagcctctttatcaaagccattttcctaaaacagcgtgcactcattt

SEQ ID NO: 196832 - DNA, 1000 bp, Homo Sapiens
tttccatttcaactcctatcattcaaggatctcattgtggcctggctgaggtttggaatgtcctttaacacctggtctacctgtcagctgttactgtcttcaagatgattcgaatgccgcctcctactgggagtggtccctgacttctccaggttgagcacagtgctttgagctctgagtgccttatgctgagtgacttgggctcatccctgttagcacacttggcacatcattatgaggatctatgcatatccctgtctacccacgagaggagccccagaaggcagggtgaggtattcatctttgcacccctttcctccagtgccaagccctaaataagttttcatgtttgaataagtacatgaaaaaataaatcaagtgtcttctcaggttgcctgcactgccttgaggaacaggaatgagaatgcccactccgtgagaatgggaaccacatccattttgttaactctgggaacaaacatcttgctcagtgcctggcactctgtatttgcgcaataaatgaacttggcagaaatgctcaggtgctcatccccatgaaaccctccttggttccccactctgctcctccaataacaacaggccctctttgctgtggctccaggcccttcccataccctctgttatagcatgcccccatttgctcctcacagggacaatatcttatccatctttgcagccctaacatctagtaaagggcctggtaaagtttgatactcaatccaattttgagagctgaatgcacgcatatctgttttatgaacgagaagttttgcttctctaggacatggccagcctttgactacaggtaggcagccacctcctggagaggagaagaagaggctggagatgcccacgttgctgggtatttggcacacccatcacggcctaagggcccttgtactgaggagctgctatatgactctgaaaaggaaacaggaggggatgagtggagagacatgctgggggaggggtggaattc

SEQ ID NO: 196833 - DNA, 1000 bp, Homo Sapiens
tgggctgcgtccgcgggggcgaacacccgacgctatccgaagacgtcccgcgcgggccggcgggggcgcggtctgaggacgtcacttccggcgccggggctcacttcctggtgcgggaaggggcagagattggtgcagccccggaggaagaaaaaagggtgaggagaagcagcggctgagcgggttggcatctggggcagcgggctcgctccaggccgtcgggggccgctcgccagcgtcgcccgctgtgttgggagcgcgggccgtgggcgtcgctcggccttgtccgcggcgtccccgctgccggccacggcgctcagcgcttgtgctctgtattgcaggtctaccccgagccccggagcgagagcgagtgcctgagcaacatccgcgagttcctgcgcggctgcggggcttccctgcggctggaggtgagcgcgggcggccacgggccgagggaggggccgggaagacggggttgggcccggggtgggtgcttcgctccagccggacctcctgcctcctccgcgcccggatccgaccctccccggctgctcgagagtccgggatgtgtggaacggggcgttgcgggtttgggtaatggccgggaggtggcggcgcgcgggccacccccagggcagggtggagtctgcgtgtggaaccccagacattgctctcgttccagtgaggaagagtggttctggtcgctggtggtgcaggtgacacacattttcaacaaccgtttatcaggggtgtgaaccgatttcttggcacctgcctcagcatgaactctgcttttagagattgtcatctaagggctggcatctaggtctgggtcaggccttagaatcctcagcaggtgatcaggcaaagtcgtgcagaaataaaatgggccagccctccgcctgcttctcccagccgcactcctttctctgctttttcttcctgagaccagaaattcggtggtttttccgtaccctcaacacttaatgtccagagaatt

SEQ ID NO: 196834 - DNA, 1000 bp, Homo Sapiens
tttgaagaatgggtagcccttcaatagttagatgtgcccaggtgtagaatacataagtagtatgcgaatggggaagcatattctagttttctagaatagagaatgaatagaaaagcagtaggaaatcattctgatagattggggtcatgttgaggtggatgaggaatttatgtttaatttgataaactgaaaattcagactttttgtcctgtgcatgatttaatcacgaacactgattgtcctggcacaggtttgggtagtagtgactcattgaactatacatttgagatgatttggaagaggggtgttggaacaacaggaacaatgaaactatatatagaggaaagccaataagggagagggagaactcaagagaaggtcagttttttagtgttgtgaatccccccctaaaaaagcaatacagaaagtcagaatacagaaaatcatttagatttctttttttttttctttcttgagatggagtctcactctgtcacccaggctggagtgcagttctgtgatctcagcttactgcagcctccgcctcctgggttcaagtgattctcgtgcctcagcttcctgagtagctgggattacaggtgcccaccacctccactggctaatttttgtatttttagtagaggcagggttttaccatgttggccagggtggtctcgaacgcctaacctcaagttatccacccgcctgagcctcccaaagtgctgggattataggcatgagccaccattcctggcacagaaaatcatttagagattttggaaggagaaagtgacaagatgattgtgtagttttggttgttgttgtttgtgtttggttttggttttgagacaggttttggcccaggctggagtgcattggcatgatcatggctcattgcagcctcaatttaccaggctcaggtgatcctcccacttcagcctcctgagcagctgggactacaggcatgcaccaccacacgcagctaatttttgtgtttttt

SEQ ID NO: 196835 - DNA, 1000 bp, Homo Sapiens
cctgcagcgccgcggccgctccgggacacgctccgggcagagacgaagcggctcctctgaaccccgggatgtacagtcagaaggcggctcgcccggcgctggaggagcgagctaagagcagtggggagatcaaagaggagcaggcgcagacagggcagcccgccggactgagccagccaccggccccgccacagatttacccgtggatgaccaaactgcacatgagccacggtaaactttaggacttcattttgcgctctcgggtccgcctgggttttataggccatgcggggcaaataaagaaaaaaaacctgcggccataaattttacgatccaggcatcaatggctcgtaaaactgtccactaaaaggcttagaggctgtgtgcgcccaaatttacgacgacataattggatcataggaacaaaacgtgtataaaaggcaatattcaatttttgggggagagggagggagttaaaaaaatagagggatctgaagggtgaggagcgcggggctccagagcggggatccccccgcggctccctccctccctcccctgcggagccggctccgccggcgcttgcggctccggaggattccagcgactcgggaggggcgggaggggggtccccggtgctcggatctcgagggtgcttattgttcggtccgagcctgggtctccctcttccccccaaccccccctcagcccctccggctgcagagtgaaggctgcggtggaaagtttcctgcctgggcggaggcgcctctcccggggctgggctgggctggcccgcctgcggcccgcgtggcctgtcttgcggctctcgcctcctctccctccggccgcgggtgggggcctgggctggggtggggacgggggaacgctgcaagctattcaccccttcctggcttggggtggggtttatgttccagagacggacggcaagcggtcccgaaccagttacacgcgctaccagactctggaactcgagaaagaattc

SEQ ID NO: 196836 - DNA, 1000 bp, Homo Sapiens
aaaccctctggggccatcccagctccagagccccttgtggggtcagtgagacctcattgtggccacattacagcccagtgcctctccctgacaagcctgtacccagccggctcagcccacagcactgtcctatgaaccttcctgcacgccattctccacctcagtatctgctttcggggaacccaacctgcgacagtgcttctgtgtgttttcagtcctgcaggtttgaactctgactttggagacttttccagttatctcgtggaatgacagattgtgcctgtatgatatcaggcacaattaatgcaaattaggcagacctatttattctagatgtgaatttgctatttattttaaatgttgattttatgtgttatgtgactctgaacttattgccaaataaaagtttgaattgtatcatctggtttattgtcagtcacctattttgtgtgcttaagtctgccacgttaaattctgatgaatccacagtatcgttttctaaaaaggcatttttttccaggacttgaggttatttctacaaaaatagataaaggagatcttggattaaaaaaaattctaagggacttcaaaaagtttatccctgagagaagggataaccttttttggggaaagctcaaaggtttcttctcactacccccatctccccccacccacagcaagcacacccacttgttttcagagcttgaagactgtcattcctcccatggatatcttttttttcctcccttcgatcacctgcctttgtgtacctgtgatggtgggtgttggtggactcactagcaaatctgtcccatattgattttttgggggcgattttctggaaacttggcatgtcatctaagaggaaatgacagcctgctcctctgcctgaaatatgggctgcttctctttcctggagttgtgaatgagcttataagacacttggggcttccagaactttgggcttggctcagcagaaatcccgacgatgtggaatgca

SEQ ID NO: 196837 - DNA, 1000 bp, Homo Sapiens
ctcacaggagaaaaatcactgaaaaaaaccactggtgtaaaagctgagtctgtcctttgaaccgctgccctgattttagttacaaatgaagcaaaaaatccttaaagatccatattcctaaatttagaccttgacctcaaagatcgcctcggaaaatatacaaatcattgtttccttcatttagtcaactatctattgatttgatccctacttcctgttcaactcagcatcccttgtcatgggcaaaaaaagtgaatggactcagaccattgaaacaaataaacttaatcttggttagaaaaattccaagtcaatgaattttaaaaagtgagttagtatcataccaatttaagtgttttttaaataatgtttaataagcaggtgaataattagcattggcctaagaaggcagcattcttaaatcacagaaaagaggtatttcagctgtggctgtatgtcggactttgtgattcctttatttctgatttccttagtaagttattcaaccttacagggaaactttttaaattttacgttgctcttttaaattagcctaagaataataatggtgccaaaatcttgtatagcacttgctatgtgctaggtacttaagcattacatatatattaagtcatttaatcaaacaactgtatcagatagatattatattaacccatattacagaggttcagagaggttaagcaatttgaccaaggtcacacagctagttcatgacagagtaggatttgaactcaaaaagtctggattcagactccatgcttctagccataatatcgtacttcttattattaaatattagccacaacatgctctccacgaataatggccttccttatagagtcagttccttctccctcccttgaattcctaccttcgagcattctagattgattgattaccctggtcctccctacctccctcctttcctataaaatgccatgtcatgtcacatgaaccttgacatttagaagatagaatt

SEQ ID NO: 196838 - DNA, 1000 bp, Homo Sapiens
tgttttgttaagcactaaacacagaagcatcaaaatcctatttagctttataagtaatggcatagctgttctttttcccaggtgcaaacctatgattatcttttaaacgttccatctcagaaaatattctagtttggtaaatttctttcttttttggtgctgggaagattttcagcagtcttagaaggctaatcaactttctctgcatgaatgaacttaatcttcttacattttaagcttattccattctaggaaaaatctgtgtttcctatctacctcccatttgaacctgtaagaaagttatgaccttgctaacacaaaaagtttttctcaaggtgagtgtttttagtgaattaagtaaaagaatgtgagacgataaaaacaaatttgtattctggttcattcattcaacagtatttattgaacaccttttatatacatgatcatgtgttaagtacaacaaagcattaagatgtaagacctattttcaagggcattttataccaacagataatttattaaaacctttcctttcccactgtcttggtctgtttgtgctgctataacaaaataccacagtctgggtcctttataaagaatagaaatttattttctcacaggtttggaggctgggaagtccaagatcaaggcgcaggcagatgctgtgcctgtaaaagtcttgtttctcatagatggtggtgtctaggtgtcctcacatggtgtaaaggatgaaagggcaaaaggtgacaaaggctgtgttctcacatggtggaagagcagaagtgcaaaaatagcctaaaatgactcccttcagccctttcataaggcgtgaatccactcttaagggctctgcttaatcacttcccaaaaggccctgcttcttattaccaccacgatggggattaagtctcaacacatggattctgggggacattcagatgatagcatcaattatgcacatgtgtttttagttaagcataggagatatttaatggaattc

SEQ ID NO: 196839 - DNA, 1000 bp, Homo Sapiens
attattttagctgcagtaactggaacagagactgtctctgtgtttaataaatattcatcagaatatacttttccagaataaagtaaaacttttgtaaaatatatgtgaggtggaaagagctctggccatggagtagatatttgctctcatatcgtgtattacaagtccctcaagcatcctgaggcttcatttccctttaaaaaatctaccctgtcgccgggtgcggtggctcatgcttgtaatcccagcactttgggaggctgaggcgggcagatcacgaggtcaagagatggagaccatcctggctaacacagtgaaaccccgtctctactaaaaaatacaaaaaattacccgagcttggtggtgggcgcctgtagtcccagctactcaggaggctgaggcaggagaatggcgcgagcccaggaggcggagcttgcagtgagccgagatcgtgccactgcactccagcccaggcaacagagtgagactccgtctcaataattaaaataaaataaaataaaataaaaaatctaccccgtcagtaatgccccttttatccgatgtcagacatccacccagaatactgcaaataaggcctttgagtgacaaaaagaaaaagtttctaatgaagtccatgcatgcactttatgcatagtagaggcctactgattcttattttaagtgcgtgtgtgtgtgtgtgtgtgtctgtgtgtgtgtgtgtgtgtgtatttgagacagggtctcactctgtcacctaggctggagggcagtagcaccatcacaactcactacagcctcgatctcccaggctcaagcaatcctcccacctcagcctcccaaggagctaggacgaaaggcacataccactatgcccggctaatttgttaacatttttatttttattttgtagagactaggtctccctatgttgcccaggctggtcttgaactcctgtgctcaagtgatcctcccgtcctggcctcccacagtgttggaattc

SEQ ID NO: 196840 - DNA, 1000 bp, Homo Sapiens
tatataccttaaagagagaatatatggatattcagcaggattagtgagatatctgaagggaaaaagggaggaaggaagggagagagtaaggaagggagggaggaaaggaaagaagaggagagaggaagggagggtatattagaaccccggaaggtgggaggaggctatgaggccactgtttctggcttctgtctgcttagatcttgctgccttacatgggagtgagatggtggagtcatgtggtagcggctttgcaatcaggtgcttcctctgatgtattggggcatctatctaaaagaccatttcagccccggtagctcttatctgctgtgaaacagccaagctgcaaggccttgttatcactgaaatctaagacccaaaccaggcatttgcaaaagcttctaattcccagaatatcctgcaggaaatatccctcatgactgtggtggttatgtacatcttaatctctacatttgaaactaaagtaacttggtgcccctttagggctcaaggtagttctcttctctgcatccttcatcagacaattttgaaaatgaaaagcgatgggaaatactgaggtggaattacacaaacaaaaccctggctgaggtttcttatcagctttcacttcttccttagaacctttctttctcaatgttaggtccaatgtttaaaaagaaagtgataccctcctttgcctacttcaccaaatatgatgagggtgagagatgcaataactcccagtgctcagagtcctgggggccttgtaagctcagcacaactcggatgagtttcttttgccatctgagaccagcctgtgggtgtatctgcgagccaccttcctgtctagtttctgacccaggtctctcccttctgttgcagacaaagcatacatgctgcacatcggcaccctggataaggtccgagaagagtggcagagtgagcacatcaaggcctgcgaggtacccgtaaccggaagctgctcaggactggggtgggt

SEQ ID NO: 196841 - DNA, 1000 bp, Homo Sapiens
tgccccatctggctttcttggagcctgatactccatcacttaccattagggatttttttcttggcattccttcatctgttgctccagtgaatttgcagttttacctgggggagaatgtgctccggttatcctcagtgcaaatgataatctagacattttcctagtcatttttttttttttgagatggagtatcgctctgttgcccaggctggagtgcagtggtgtgatcttggcttactgcaacctctgcctcccgggttcaagcaattctcctgcctcagcctcccgagtagctgggactaccggcctgtgccaccatgcctcgctatttattttttatttttatttttatttatttatttattttagtagagacaggatttcactatgttggtcaggctggtcttgaactcctgacctcaggatgatctgctcaccctggcctcccaaagcgctgggattacaggagttagccaccacacctggtcaagaagctttcctagtcagtttagactatctagcccaggagataggttagagtgagtatcctcagattttgaagatgaggttttatgtttttaacttaccaagtaatttgcatgacttatcttagacttaagtgatgaatgtctaatgaactattagattattggattctaaatttaagataatggcaagttgtggtcagcccttgagaaaatgtcttatagtaccttcagtctttctgtcttcctttcagggttccttttgttgggtactgatgtggtttgactctgtgtccccacccaaacctcatctggaattgtaatccccacctgttgagggagggacctggtgggaggtgattgagtcatgcgggcccttccctcatgctgttctggtgatagtgagttctcacaagatctggtgctttaaaagtgtttggcagtttcgcctatgtgctctctctctctctccctctcctccctctccctcttcctccctctccctcttcctccct

SEQ ID NO: 196842 - DNA, 1000 bp, Homo Sapiens
ttgatgaaaatatttgcctattaagccctctaaaacaaatctagaaaacatgcacaccacataattttcatttgtagtttttattttttaagttttatgggctttgatatcttcaggaaaatgtgaagaaaaacacatacattcatcttgtgagtatataaatagatagatacatgggtataaaaacagaccatattttgtggatgggaaatatgactgacatactgcttatagttagatgctgtcattggatgacattgggcaagcttgtcatgtgtcttctgatgtctcccttgtcctttatcaactcaccttcttgctgaacacttttggagtttcttgtgtgtttattggctactgaatctccttccaactaaattatgtagagtctaggaaacacagttctgaaatttaatcctggttcatttgctagaactctggatttttttccccaaatagtttggtttcttatacactaatcaggaccattttcctagttggaaaaaagcaggcacaaggtgtggtggcagacttgcatggtgggtggccctgaggcggggtgcatggcaggtgaggacctctggcctttgaaggacttggggagagagcagagatttcagaggaaaaagaacaaatcgaacagactcaaataacacacaaatgagcaccagcccattttattgtagaaagttgggtacttttttttgtgtgtgtgtgtgttttgtagagatggggttttgccatgctgcccaggctggtctcgaacacctgggctcaagtgatttgcccgcctcggcttctgaaagtgctagggttacaggagtgcgccaccgtacccagccaggtactcttaagtgatgagcagacgtgccatatttagttgaatatcttcaagagagaagcacacactatagggccacaagctctaaatgaatgctgtcatactaatttagagagcaactttacccaagtgtcttccccagtacttccctaagaattc

SEQ ID NO: 196843 - DNA, 1000 bp, Homo Sapiens
catttgggaacagctgcagccagcctgtgtgcagaaatacacaaaaatgattatcttcctaaaatcaatctttgcagttctggaagaagacagaagacggaaatagctctttgtggagctgagtgacatgttctggccaggcattctttgttaatataacagatgagaattagacaaattggagctggaaagcgctcctgtcataatgtggctgatgggtctgtggaacagcagcagccacgcctgcaggatgtgctcactgctttcctgagctccttttaaataatccaagctgtgacacttccctaagtggaagctgatctctaaattaggtgaaatgttaatattatgtagtttaatccatccttgaagtcagagagtttgcagagggggtggcttgggagcctcctgatggattgttcattcattctttcaggcatttattcattcatgtattgaattcagaactgcccagtagagctttctgctgtgatgaagggtcccataacagcactttctgatactgtagtcgctagccatttgtgactactgagcacttgaaatgggggtacaagatgaattttttattgtatatgatttcagttaatttaaatttgagtagttaaatgtggctagtggctaccgtattggatggtgtagctaaacattcattcatttaaaaatatttactggatatctactaaaaggcctcttagaaggtgcttggtaaatattttaggggaatagtgggtactcaatatatatatttttagtgacatgaggaaggcaagctgggtccacaaatatttttagtaaaacagggactaaatattgtaaaacacacatacaattttatgagactagatatacatatatctgatgatagaataacttattttattaatttatttttaattctattggtttaaaatgggcaaggcaaagattaggtatctcttcatgtcaaagatatatttgtgttgaacctggaatggaattc

SEQ ID NO: 196844 - DNA, 1000 bp, Homo Sapiens
tacctagaagtggaaaaaaaagagagaatggcaaaacaactaaagagatggcaaagttatgtctgcacccacgcaaaccagttttgaaaaaataaaattattcatgagcaatcagtaacttggaaatatgggggttttttggggtctaattgggtatagagatcacattagaaacccagtgacaatatatgttttctatatattacctatcttttatagagtcatgaaacctcatctgtcacagaagtagagaaaaaaaaagtcatgaaaactgaatattttaggaacttgaatgttttttcttagcaacctcattgaacacataacctccctccccggcttggtatgaaagatggctggctgtgctctgcttccgcctggaatggagtttctctgtgggcatttgtctttcaggtttctccctgagagcactcacagaggctggcgtgttccttattgttttttaagcaccattatccatttgcatctaacatccattgctgttgtgttggatctactaggcgccggccacttaagcctttaagtgtggctagaacgtcttctctgacagaaggaaaacctaccatatcacttccgcagatgatgggttttgctgttctattcatcttgctgtgttttcacgttttaataattgttttgtttatatttctcctacagacatgttctcgtgtttataatgcaggaccaaatctttccttggcagccttagagcttggtggtcttgcattcagcatcccccagcatcgctttccaggggctgtgtgacagtggcggttcctgcatcccagcaggctttgtccttgcctttcttttctgtactgactcaaaaaaacagaactattcaagtattttattgtaaaattaggaacatatagcttgctttttttcaagaatattctcttttcaaaggaacgtaagattaaggtgcacacatctgcagtctgtaaaaggccttgaggatacatcttttcaataaaaa

SEQ ID NO: 196845 - DNA, 1000 bp, Homo Sapiens
attcatgaaccctcccacctaaagggactgcaaaaaataaggctcatttctaaacaatgtaatcagccaggctattcccagcctacactcatttcctagacaatagtcacacagttgtttaaataacatcagctatttcaagcctggcaaaataaatacaggctcacagaaaagtataatttgtagtaaaagacctaataccattgctcttgatcaaagatgtgattcctttttcagagtcttttccaaaacggaatgaatacagaaagtttttttggtttggatttttttttttttttttaagtttccaacatacagctgaaaactgccctttattctcggtccctgatccataataacatcctccctcctaccttctgattcccatttatgctcaaagtgaaaatggaaatacaaaaaaaggggaagaagataaaggaatggctgaaacttcttcccttgctcagtttgaaaacacatttttaccctcctccatacaaactaaaagagtcatcacattttagctctacaagacgctggaggaagacaaggcatagagaaggagctagttgggtgtgattctgatgaagcctccactctttaccaggtgaacgtattatttcgtgtggctggaggctgcatgtactcaacaaccatgagtaaggcctggatctcacactattctgtcatggaaagtcatttcctttaaaactgaactcagactcaaatgtgaacttggtatgaagctcctagttcctgtagggcctctgaaatcttcactgaattttcacaaatgtttctttattttcatcattgaatgccttgaaggctgcctgcctctaaaatctatcaacgccaatgttttatggccattaagagattctagaaggcacttcttcctccagggcataagttaaatcactggtataatggtgtttatcaacaatacaacagcagatggtcaacttaaacagatatttgtacatacacagccaagctt

SEQ ID NO: 196846 - DNA, 1000 bp, Homo Sapiens
gaacagatctgatttggctgaaaggaagagcaggcaagggagggagccttcccactgtctttctcctcagctcaccatagctggatggactcccggggagcccctgggagctaagccctgctgactcggggtgatctgtgctcactctctctggctggatgcagcccagcatgctgactctgctggtgccatggccaacagcaccctgcacccgcacagtgatgcagcacaggaggctaatggaattttcattgattttcttgtcgaggccagtgagagtgtcatataacatgaaagaacactggagcctagtgtggcttaccaagaccaagggggcagggtctatgtgtgtgtgggcatgtgcagcagcagcctgccaactgcatctgggaacagtgatttagatatcttatcactaggcacacttgagtgggatggacatcccacaaattagaatgaccattctgaggcgcgctcctggtcctcagtttccctccaaatctgtggttggtgataaaacataacattcatcatggcatgacagatgctgcctttatccctagacagtggttctgaatctcaggaacagcaaatgaatcacccaggaagcttactgggaatgttgattcctaggttccatccctagaggtgcagggtgagcccagacatttgcatttttacaagtcccacagtgaagctgatgcagtggtctatggaacactctaagaggcaccaacacagctcttgtggtttgctcccagggcaccccatactacctcttctgtaagccatgtctgccaattcttattagtggagttggtaaaaattcagagccactggtgaaaaaacacttgatcagccctattgaggcgtccatgggacataagatcaggaactcagcttgtcccagaggagacataccatgtggcaaatattggcactggctaccactgtttatggccaggcagcccctcttccctgcattgtgcttgtgaagctt

SEQ ID NO: 196847 - DNA, 1000 bp, Homo Sapiens
ggctcagctctgcagggcacagtggggtttgctcccggccggccctgaggccgggcacagggaggccagtgctcatccagggggccagagagaaagtagcaaccccaacctgcctgggccacaacagccaagaccactgtatcagaacagacgccagcggggcagcctgctcgttggccgggcggagcagggtcggcacacagcccgggctggccttcaccccagctcccgacagcgttgggtccctgagtgcagggcctgcccctttctcatcctcctgcctccaggtcatggggcaggggtgccgagaggccctgcgggagccaggacctgagaggtgatggtcaccacccagacgaggggccgggggtcgcacaaggaggcttccagggggatgccaggagcagtggggccctagacccagcagtgggtagacccagcagggcagcgctcacgtcacaggttctgggggttggggcttgtcatctgtgcaggtgcagctgggatggggatttggtgctttttgttctgcaaaagccagaacgcatgtagctgagccaagatcagacggcatggtgcctcatgcctgtggtcccagctacctgggaggatgaggcgggaaaattgcttgaactcgggaggcggaggttgtaatgagccgagatcctgccactgcactccagcctgggtgatggagctagatcctgtctcaaaaaacaaaagaccacgcatcctagccggcaaggccactctgtactcagacccggcagctgtggctgtggcacaggcgcttaccctgcggcattggccctttcagtggttggtgttgaccctccacagaggggctgggtggggtgtgtccagtcccatctgggtagactgagtgttggggatgggagagtgtttaaggaggtggcggttacagactccagcatcgggacacggggccgtgggtcatacccacatccgtgggggctgtgagacagccgtccagaagctt

SEQ ID NO: 196848 - DNA, 1000 bp, Homo Sapiens
attcattcttcaacaaccaatgggtcaaatgagaaattgcaatagaaaatactttaaggccatgagactctgtctcaaaaaaaacaaaaaaaaaagaggttgggggtggtgcctcaaacctgtaatcccaaaagtttgagaggccaagatgggaggattgcttgagaccaggagtttgagaccagcctgggcaacatagtaagactctatcgctacaaaaaaaattaaaaaatcagccagacatgcacatgcacctatagccccaattacttgggaggctgtggcaagagggtcacttgagcccaggagttggaggctgcagtgagccctgattaggccaccacactccagcctgaatgatagagtgagatcatgtctcaaaaattaaaaaaaaaaaaaaaggaaaagaaaaagagaaaataccttaagaccactgaaaacaaaaatctaacacatcagaacttatgagatgcagcaatggcagtgctaagagaaaattttatagctttaaatgcattaattgcctgggtgcggtgggttacacctgtaatcccagcactttgggaggccgaggcgggtggatcacgaggtcaggagttcaagaccagcctggccaacatggtgaaaccctgtctctactaaaaatacaaaaacttatccaggtgtggtggcaagcacctgtaatcccagctacttgagaggctgaggcaggagaatcgcttgaaccggggaggtggaggttgcagtgagctgagatcacgtcactgccctccagcctgggtgacagagcgagactgtctcaaaaggaaaaaaaaaaagcattcattgaaaatgaagaaagaactccaataagtattctaattcttcagtttaaggaactagaaaaggaagcgcaaacttctttaaaaaggtaggagacaaactgggtgtggtggtacattcctatagtcccagctgctcaggaggctgagggaggagcattgcttgaacccaggaattc

SEQ ID NO: 196849 - DNA, 1000 bp, Homo Sapiens
gaagcaaaagtggaaacccctgataaacccatcagatctcctgaaacttagtcactgtcatgagaatagcacaggaaagatcagcccccatgattcaattacctccccctgggtccctcccacaatacatgggaattctgggagatacaattcaagttgatatttgggtagggacacagccaaaccatatcatcctgcccctggtcccaccaaatctcatgttcttacatctcaaaaccaatcatgccttcccaacagtcctccaaagtcttaactcatttcagtattaacctaaaagtccacagtcgaaagtctcatctgagaccaggcaagtcccttccgcctataagcctgtaaaatcaagagcaatctagttacttcctaaatacaatgggggtacaggtattgggtaaatacagctgttccaaatgaaagaaattggccaaaacaaagtggttacagggcccatgcaagtccaaaatccagtagggcagtcaaattaaatgatctcctttgactccaggtctcacattcaggtcatgctgatgcaagaggtcggttcccatggtcttgggcagctccatccctgtggctttgcagggtatagcctcccttcccagctgctttcacaggctaatgttgcgtgtctgcagcttttccaggtgcatggtgaaagctgtcagtggtctaccattctggggtctggaagacggtgcccctcttctcacagctccactaggaaatgccccagtaggaactctctgtagggactccaaccccacatttcccttctgcactgccccagcagaggttctccatgagggccctgcccctgcagcaaacttttgtctgtgcatcctggagtttccacacatcttctgaaatccaggcagaggtttccaaacctcaattcttgacttctgtgcccttgcaggctcaataccactgggaagctgccaaggcttggggcttccaccctctgaagccacagcccaagctt

SEQ ID NO: 196850 - DNA, 1000 bp, Homo Sapiens
ctttttattagtaatgccttattccagtgtttgaaccctttgatagactttaattgccactgaagagacttacatttcatatatttagtgaaagcgaaatatgaatatttctacttatatgaatgagtgtacataagtatagcctttgcaattctgtcaaatataatatgacactacaaaatcaaatgtgccacttaaaggtaattcaaatgtagaatgtggttcaaaacactgatgttatgcaatgccatgtagagttgaaggaactagatcaacgccaagaaactaatggttggacaagaaccagtcagccagccatgcatttaactaatatttactgagtgaatgctagatgccagccactgttctctgtactaaagaaaaagacaaactgcttctcttggtatacttaattccaatggacagagacagatataaagaaagtaagtataacagtatcagtttattatgaatgttatgagaataatagaagatggtaatatgaccaacaatgactagaagaagaaaactactgtagacagaatgagagcaaaacttccatgaggaggtgatattcaagctaagatctagctgatgaagaagagttaatcattgaaggaacaagggaaaagcatttccaagagtggaggatgaaaaatgcaaaggctttgaacctagaatagcttgctagtttagagaaagaggagaaaatacagaacgaatgtattacaagacacctgagggtcatgggacaagactatgtcaggtaggtatgacctttacttagatacactctgaatggtcacagccaatttgtgggccatggaaaagagttcagattttattcttagtataacaaataactatcatggctttttttttcactaattcaaaatcataagatgcttgttaaatattagtcaacaactcattcctctctcaatagaatactagtaaaaggtacattttccctggatacaattttattacctataagctt

SEQ ID NO: 196851 - DNA, 1000 bp, Homo Sapiens
ttgtcctgcccacactggactgcgttttgagcaagaaatgcactttgaatggttaaaacactgcgattgagggttgtctgttagggcagttttagtcaaagtaattaacacacaacttggttttctttctgtagtatcttatttttcaccattagagagtcctttatatcaaatatcattttttcctcttaaaatccatttgctaccatttgcctgtgataaatatggaacataactagctagtagcattagaattatgattcatttatctcaataatgacccacattaaaacacttatctgaattaaatcatctcaatttatttgatttttcctgaaaattcataattatcaactcttcagttgtcatgtcagagtggtttgtaatactcttcttagctgtagatccagaaattgaaagctcatgtatgttgagtgtaatcagagaatgtttgaagccgtttgtagacaagttaaaagttgagatttcctgttgctgctttgacaaaagaaactagtctaaggagaattttctattttgaatttgttcaggggaattcatgacatttattgctgttctctcctagagaagaaaataattaaattctccaaccacatatactggctggtgtctatcaaaaagcttatataagcatcaacaaagctgtgagatgatatgctttattatccacacaattctctgcactgtgatgacaactcttcacaggtggtcagcagttagaactttttcctcttttaaattttcaaaaggtattgctaaattttcttgttaaggcatcccgtcaattcttgaatcctacagcgtttgctaataaaggctgttttcccctcataataatttcagccaactagcactgtcaacaattacaagattctaaaacatcccaatataaggaagcaagcaagcaactacttgagaagcagagtagccttccaagccctgagagtggacacgtatcagacatatagagcccaagctt

SEQ ID NO: 196852 - DNA, 1000 bp, Homo Sapiens
tctgctgctgtaacaattacctttggtctcaagacccaaactataactccaaaatataccaccatttttttcagcactttatgttacgggagaccagtttctggaaaggcccctagaagcaagtaatatagatgtatgtgccagtattttacttgtttattaaaaaagaaaccaaaagttagcaatttactttgaaaggcagtatgttatattgttgagtaggaagaactgtgttgggcaaaggtaatggacttttctttttcttctgtgtctttgcattcctgtgtactcatctgtgtactcacctggggaactttacatgcttatttataagttttccttatgtattttggtcagtatgcttttattacatttatatgtctatgaaggatttagggcctgtggtattttattatggcatcttgcttatgtagtttgtataatataggttagatttgtaaagtatgtttatcagagtctagtaagttgaataatttgttgtttgtatttctttcagctatgtgttcttcttttaccagagacctttggccagagcaagacataaaagattcttttcaacaagtgatactgagaagacatggcaaatgtgaacatgagaatttacagttaagaaaaggctccgcaaatgtggttgagtgtaaggtgtacaaaaaaggttatgaactaaaccagtgtttgacaactacccagagcaaaatatttccatgtgataaatatataaaagtctttcataaaattttcaattcaaatagacacaagacaagacatactggagagaaacctttcaaatgtaaaaaatgtgatgaatcattttgcatgcttttacacctacatcaacataaaagaattcatattagagagaattcttaccaatgtgaagaatgtgacaaagtgtttaagcggttctcaacccttactagacacaagagagttcatactggagagaaacccttcaaatgtgaagaatgtggcaaagctt

SEQ ID NO: 196853 - DNA, 1000 bp, Homo Sapiens
caacttcatcaattcttggtactggtagtgtctgggctagccaagagtataaaataaacatggcacctgtgctccaaaaccttcccctgagatggctgggccgagtgaacctttcattaactatttctttattatacattcattggatgcttattatgtgccaggtactgtgtaagatttggtttatctgtccaaggctctcaaaagtggagtagtatgttttggttatggaaaatatggctggtcaggtgcggtggctcatgcctataatcccagccctttgggaggccgaggcaggtggatcacctgaggtcaggaggtcgagagcagccaggccaacatggtgaaaccccatctctactgaaaatacaaaaattaggctgggtgtggtggctcacacctgtaatcccagcactttgggaggtcaaggtgagcgatcacctgaagtcaggagttcgagaccagcctcgccaaatagtgaaaccctttctctactaaaaatacaaaaaaattagtcaggtgtggtggtgcacacctgtaatcccagctacttgggaggctgaggcaggagaactgcttgaacccgggaggcggaggttgcagtgagccaggactgcgtcattgcactccagcctgggcaacaagaacgaaactccatccccaaaaataaaaaatacaaaaattagccgggtgtggtggtgtgcacctatagccctgctactcaggaggctgaggcaggagaatcccttgaacccaggaagcggaggttgcagtgagccaagatcacaccactgaactccagcctgaatgacagagcaagactcagtctcaaaaaaaaaggctgagaattaagcaaaaccagagactttttttgaattacttcgagtttatttttttgtactcttaatacattggaggactttgggttggaagaggaatatgagagccagtgctttgagaatgtcttctttgtactgatcaggattccttaagaaagctt

SEQ ID NO: 196854 - DNA, 1000 bp, Homo Sapiens
ctcaaagaacagaactttatgttcttcccatctttaaaaacttggaatcataaatggaaaacacaaattttggagataatttagctaaatggtaccagcatccaccattactgtagcaaaatattatagatgtggaatgtgattcttgtcccctatttattacagatataccatattaaaatcaactgatatttctgaaaattaattcacttaaacatcatatctaggctaatcctggacctttttgcagcgagtcaggggtatgttacaatatatccctcagagtacagtctagagtcactggtatgataatttaaaggccaatatttgaactcaggtctctttaggcaattaagagggtgatgtgtcataaaaatacttttccctttgcacgagtcatgtatgtaaaaataaagtatgcttacaaagtgattctagagtaagcctcacgttaaatacatacacattcaccccaatacccctgatatcttagcaaatccttaatgccctagataaagccccacaggagagagaaaaaccctgtgaggctagctcctgactactgtactcaaagtagatttggaaaaagtagattgaattgatgcctgagatttaaaactgttcatattttaagagcttcgtttttgaacagaaacgacaacaaagagaaaccaaaagagttacactgagccaagatgtaggaggactaacagggcctgtaaatgggaacttcctaccagaaagaaaaacaacgctaagattacataataaggggatcattgagagattggatgtgccatttatcagtatgaatcagtatcagtaaaattttccttttcacaagacacgcatacaaagatgcccgaaagaccatgaggaactggaggctaccatataaagagagagagtgaggacggttccctgggcttcaactggagacatttactgcttcacaggacaggaagaaaaacagttgtattaactttagtttgagaagctt

SEQ ID NO: 196855 - DNA, 1000 bp, Homo Sapiens
aacatgaggccctttgttaaaatcccagaaagatgtaaggaattgcttctcaaaccctcatggttagttagacaaacaggcttctgaaagaacaagtgtgttctcacacagcaccctgacatgcaccccagagagggagcgtatcttaaaaagattggtggagatggtttttatctaacacagtgaatcccagtaaaatccacagaaaactcacaatgtttttaagagaactgaactaacacaagcaccactagcttggactaaaatggacaaagactgttcaaaacaaagccactgggctcctaaccatttactggcaggaaataggctgaggaaactatttggctgcaaatcagggtttttgttgttgagatagggtctcctccgttgcccaggctggagcacaatggcacaatcacaactcactataacctctgcctccctggagtagctaggactataggcacatgccaccaagcccgcctaatttttgtattttttgtagagacggggtttcaccatattgcccaggctggtcttgaactcccagcctcaagtgatcctcccgcgtcagcctcccaaaatgttgggattacaggcatgagccaccacgccaggcccaatcacgctttttcaaatagtaaaggaaggccgacccagaaggtggagttaggaagtaaatcaggtccagctgtgtgtggataaggctccacagggatggctctgtgggtgcagggacccaagaactaaaaagacaagttatctgcctcccacattccttgtacaatgtgaggaggaaaaagataactacaatagagaatccctttcaaaaagtaaggatgagtgtatgaaatctgaataaggtttgcagtgcagtttaaacagttcatagtgtccagtgcttctgataggtcaagtaaagtaaggacgatggacgtggcaacatggaagtcacccatgacttcgaaaagcagttttcaatttaagtgtgtgaaagctt

SEQ ID NO: 196856 - DNA, 1000 bp, Homo Sapiens
gctggtggtatagagtggactggtgcgggaacacgtggccccggtgccaccagctggtcacagtggggtcacagtgtggtcactagctgtctgacgcatgaccactggggcgtgccctggatggagtcaccctgaggatgagatgggatgacttacagggaagcgtttggaaaactgcagtggattgaattaaaatgaatgagagcatgaacatgttattcttttccttgtgaaatcttaaggagggccgctgttcttaggagttcatcaaaacccaccgtttggtaaaatggaaaactgctacccatttctgtaaaacaagttaagcttcacgtttggctttttgcacttaatctactgattattttcccaccttgttcaggttactttttcgcagtactcgaacgttgttattttcggtgtgcctcagatggtgagtatgcactttcctgctctctgtttggggttagatgatgttgaaggcccttccagccacaacaccaccactcacccgtgtgagggtgatggcctcccagagattttagggaacactggatttcagttcattgatttaataaaatacttcagagtcttagaagtttaatcataaaagattcagtcatacttttaaactttggcttcagattaaattctcaatgatttccctaagccttaaacattccagtttggaaactgctttctgaggtcccgtgtctaatgtagtttgcagttttcacagccgctcacttccacttcgctgaaatcgctccggaaagttaatgagatgttccctctgaattgatcattcctcccatttggaaggaagataattttctgggtggatgagcattgagtagtttcagtttacctcagtttactgatttgctagaggatggcatattgaactttgattatgtactttcaaaagtgaaaatgccacagtattgtactgaaaatggccctccttagcctttggaaggatggtcatggtgggaagctt

SEQ ID NO: 196857 - DNA, 1000 bp, Homo Sapiens
actttgggaggctgagacagaaggattgcttgagcccaggagtttgagaccagcctgggcaacatggaaaaacaccatctctacaaaaaatacaaaaattagctgagcgtggtggcacacacctgtagtcccagcaccttgggagggtgaggcaggaggatctcttgaacccgggaggtggaagccgcagtgggcaatgatcatgtcagaggtgtgtgaaccagagcaactccatcttaaataggagccgggaaaaatgaggctgaaactactgggctgcattccctgatggttaaggcattctaagtcacaggatgacatagaaggtcagcacaaaataccagtcataaagaccttgctgataaaacaggttgcagtgaaggagctggccaaaacccaccaaaaccaaaatagagacaagactgacctcccatcatcctccctgctacactcctaccagcaccatgacagtttacaaatgccacggcaacatcaagaagttaccctatatggtctaaaaagaggaggcatgaaaaatccactccttgtttagcatatcatcaagaaataaccataaaaatgggcaaccagcagccctcacggctgctccgtctatggggtagccattcttttattcctttactttctctctttttttttgagatggagtctccctctgtcacccaggctggagtgcagtggcgcgatctcggcttactgcaagcttcgcctcccgggttcatcccattctcctgcctcagcctccagagtaggtgggactacaggcaccggccaccacacttggctaatttttttgtatttttagtagagatgaggtttcaccgtgttaaccaggatggtcttgatctcctgacctcgtgatccacctgtctcggcctcccaaagtgctgcgattacaggagtgagccacggtgcccctcctcctttactttcttaataaacttgctttcacttcacactgtggcatcaccctgaattc

SEQ ID NO: 196858 - DNA, 1000 bp, Homo Sapiens
gactgggggcagggaaaaattccactaataggctaaagagatgctgaaagtttaataacacattaatttgcccacagaattttaaactgtaggtcacaaaaaaataaatttcaaatgacctaggttgacatcctgatcaaaacttgtaactactggctaggcatggtggctcacgcctgtaatcccagcactttgggaggccgaggcgggcagatcacaaggtcaggagttcaagatcagtctgaccaacatggtgaaaacccgtctctactaaaattactaaaattagccggatgtggtgacgcacgcctgtaatcccagctactcaggagggtgaagcaggagaatcgcttgaacccgggaggcggaggttgcagtgagctgagatagcaccactgcactctaacctgggcaacagagtgagactccgtctcaaaaaaaaaaaaacaaaaaaccacaaacttgtaactattattcatgggataagatataattcctatttcctaggttcccaatgttcctccatctatcttgtttccaaacttcaaattgacagaagtcaaatacatcaaaataaatcacaaatagaccaaagacatggaatatacacatgctacttttttttttttttttttttttttgatacagggtctggctctgtcaccaggctggagtgtggtggtgtgatcttggctcactgcaacctccacctcccaggctcaagcatcctcccacctcaggctgatgagtagctgggactacaggcacataccactatgcccagctaattttgggggttttttgtggggcaggggatagagacaggtgatatggtttggctgtgtccccacccaaatctcaccttgaattgcaataatcctcacatctcaagggtagggccaggtggagataactgaatcataggggcagtttcccccatactgttctcatggtagtgaataagtctcaggagatctgatggttttataaatgggaattc

SEQ ID NO: 196859 - DNA, 1000 bp, Homo Sapiens
tatgtaagttgttctgtttgatgatgccccacgggatctgtggggctatgttcacttttccttgttttttttctttctgttcatcactcagtaatctcaatggttgtatcttcaagtttgctggttctttcttcagcttgatcaaacctgcttttgaacccctctaatgtatttttttttcatttcagtgattatatttttcagctccagaatttctttttggccctcttttatactttctacctcttcattgatattctcattttatctatgcattgttttcctgtctttgttcatgtcttccttcagttttttgagcatctttaagacagtcattttaaagtctttatctaggaagtccaatatttgggctccttcaaatatgttttccatttatttattttgctcctttgaatgagtcatactttctatgtcttgttattttgttgttgttgagagatgaacatttgaatcttataacatggtaactctggaaattgggttttctcccttcctcaaagtttgtgttgcttttgtttttttgcattttggtgggatgtttctgtcttgagaatcagtttaaataaaaacttaaggtcttttaggttttatctgattctacctgtttccctgggaatgcacaatggctttataaatttcttcacatgcatgtttttggtgtccaaaacaacaggtactgcttttttaagtatcctggaatctgttcaatttttggtgtccaaaacaacaggcactgtttttttaagtctcctggaagctgttcagttaatggggtttaaaacaatgacaaacagcccccatgcctgccccatcagtgatcagaaacagcaatccatagtcagaacacagaaccctaatatttggaggacaaggtccttattgcccactctagctccagtgagccatacaagaaacattggttgctgtccctacagctgcctgctgccagctggggatttgagatgggtagtcataactg

SEQ ID NO: 196860 - DNA, 1000 bp, Homo Sapiens
gatatcactttaccagttccaccaatttttgttagaacggtcagagtcaaggggagagaaactagatgctacttttttttttctttcttctttaagacagtgtcttgctctgttgcctaggctgaagcacagtggtgcaatcacagctcattgcagcctcgacctcccaggctcaagtgatcttcccacctcagcctcctgagtagctgtaactacaggcatgtgccaccacatctggctaatttttgtatgttttgtagagaagagttttcaccatgttgcccaggttgatctcaaacttctgggctcaagcaatcacctgccccaggctcccaaagtgctgggatcacaggcatgggccccggtgcccagcctctggttgctaccttttgaaagggaaagtgtcaaataatttgcatatgtcttttacatctaccataatggtcttttgatattcttttactttccatcttattgtgttcttatgttttaggtacacctcttgtaaatgaatatagctggaattttattccaatgtaatagcttttatcttttaactggaaaatgtagcccatttatattatttgttgactgctaataaattaggattaatttttaacacttttttcttaaatgttttactttcttcatagttcctgtatttctttttttctctctccctcctttcttgccaccttttgaaattatttttccctacatttaaaaatttcctctctgctcattttgcagctttacattctatttatattctcttactggttactctatgcaacttagcgtgcatatttaacttcaaattcttaagtaaatcaatatcttccttataaatttatgttcattagaactttgtctgtaggatttaagaattgggttttaaacaaacttttccagagatttgtatttgcttgctccttaaggcagcaccaatataagaccactttaaagttggggttggggaccacgcatatagtgtgaattc

SEQ ID NO: 196861 - DNA, 1000 bp, Homo Sapiens
catgggtaacatctataatcagttgactttaagtaaaggagactaccgtgcataacgtggttgggtctcatccaatcatctgaaggccctaaaaaaccaaacaccacatgttctcactcataggtaggaattgaacaatgagaacacatggacacaggaaggggaatatcacacaccggggcctgttgtggggtggggggaggggggagggatagcattaggagatatacctaatgttaaatgacaagttaataggtgcagcacaccaacatggcacatgtatacatatgtaacaaatctgcacattgtgcacgtgtaccctaaaacttaaagtataatattaaataaaaaagagcaaaaactgaagttttccaaagaagaagacattctgcctcaagacagtaacagcaactcgtgcctgactttccaacctgtcagcctgccctatggctttcagacttgccggcctgccagcctctacaatcctgtaagccaattccttaaaataaagctcctgatataacatagggtatatatatcctattggttctgtttccctggagaactctgactgatgcacttgccttacgttttctgagaatatcaatataatacaatttgtacaccactgacattgttatgttccttaaagggtctctgtacatctgctcttgcccctttctactgtccttactccttgccaaaatttcaattttcaattgtagttttgatactataaattctcttcatttcttgcatcctgtcttagcaatattttctgtcttgaaagtctttctattttctctattttatctctaaattagtgagcatgatcttaatggatagaacaaaaaaaaaactgccatcaactggctcccttcaatcttcctattaataaactaagtagcactttactttatactcaaaatatcttacattagtcacacacacatacacacacacacacaaatacacataaatgcacgtacacactgaattc

SEQ ID NO: 196862 - DNA, 1000 bp, Homo Sapiens
gccacaatttcaatggcatgaaaatatcaaggagctggttcttcctgaggttaacccagaagagagggttctaattacatttaataaagatgatgatgtgggcaaaacacagctgaggggctgtgatcttttcaggagcagataattaagatagattgggtcaattaactgagttcaattgagagagtagaaaacatgtggctgaaaacttggtggcttgaaagcttccccctcagttggatgcaaaagtgcttcacagtgaatttaacatgtctaattgcttccagtattgcccctctttaatccattattcacactatcatcagaagaaagtttctgaaaagttaatattactatgtctcttccttgatttctcatcaatttcaaaataaaatataaacttagcactccagagtcttatgaacactatttcactaaaccactctcttggacatcatgaatgtctaaaaaattttttatctctgaaaatcttaactccaatatcctcttttataattagaactaattcttccatttctctcttcctcaaaaattctaagcttgttttccaattcaatcactacttcagttcttagtctatccattactcactacacatcattctctgctattaaacccccaattcagcttcttaactctagccttgacccactgtgcaaactgatatcagatgtattctttaatcagatgcaaccatcctattcctattccttgcctttaatcagcaacatcttccattccctcagtggcgtttcaactctcaggactcttctcaagctccctacgccttctcaccaaaccctgcaaagatgagcaaaaccctcaggctcaactcaacaacaaattcatctccgcttatccctcttcatctcctctgcagtctgaaccccattctctcccatctcctccaggaccctgttccataaatctctcctctcttaaatacattttttcattaaaataaattttagtcattata

SEQ ID NO: 196863 - DNA, 1000 bp, Homo Sapiens
gattaactataccagagaaatgcagtagatacaatttaggagtgtgagttctttaattaattacaaagaaacttttattttacacaggggccacccctgagagggctttcccatgagctaggggagtgagtgttcaagaaagcagcttccaatgactcagacccctcacccaaggtgaggattgaaatgagaattaagcaactagaggcctatgcttgcccttactgagagcattctgcaaagcaatacagacaaaaggaggtcacagcacgggagagatgaaacaaatgaggttggagaattgacacatggcatctactttttagagaactttgtagtgaagagaatgagaaaaaaactaccctttgacagcacggcaaggtcaagagaagttgttttgttcatcaattgtcatatgggtttgttatttgattattttaagagaagggggaatgagctttctagagaggctgaggaaagaagcagagaggtagcaaccgactatacgaggaccccagggtatatcaaggtcctgtggccttggagggtagagcccagtaaggcatggaggagctggcccagggttggagaaaacatgagaagaatgggaggacacacaaatacatttggaggttattgggaaacaagtgaatggagttcccagcagatctcacgttcctctgatctcaacatccctctgctaagaaatagtatgaagagggagcaggaagagagagtggtaaatgtggaaacaaaccatttcacaaatgacagaagaatcaaaggtggcatattcattttctattgctgcataacaaactaccataatcttatattcatttattatctcagtttctgtgggctaggagtctgggcatagcttctctgctcagggtctcattaggctgcaattgaggtgttgactgagatatattctcatctgaaagctcacctggggaagaatctgcttcccagtttattcaggttgctggaagaattc

SEQ ID NO: 196864 - DNA, 1000 bp, Homo Sapiens
cagtgagactccatctcaggaaataaacaaagaaaaccaggctgtcataaatgttcctagcttcagtacatgtttctgttgttgttgttgttgttgttgttgttgtttgttgttgttgttgttgtttgagatggagtttcagtcttgttgcccagctggagtgcaatggcacgatctcggctcaccagaacctttacctcccaggttcaaccaattctcctgcctcagcctcctgagtagctgggattacaggcatgcgccatgcgccaccacaccaggctaattttgtatttttagtagagatggagtttctccatgttggtcaggctggtctcgaactcccaacctcaggtgatccacccgcctcggcctcccaaagtgctgggattacaggtatgagccaccggcctggcctaaatgtttatctttatcttgtgcatctagagccctggttctcaaagtgtagttcccagatcagcagcattggcagtaatgggaaaatattagaaatgtaaattattaagcttcaacccagacctgctgaatcagaaactctggggaccttatgaggtcagcaggacaggtagcatgatcatcatttcactgatgaaaatggagattcttgtccaaggtcaaatggttaggtaataataaagtcaagttctgggtctagaatctggattttttttcccctagctccagagctctcctttcacttgattttactgtcccgctcactgtctgtacagactatttcttcagtcttttctctgctcactgggtttatgttgatctcttgtcaaagctggctactatttccatagaacctgctttgagcgcctttattccagaactactcattctacttccagcctgtgtgctttggggagcatatcttgcaggtttgaaggcacagatccaagcttctccaactttagggtccacatgcgtcacctggggacctggttagagcaccgagctctgattcaggaggtgtgag

SEQ ID NO: 196865 - DNA, 1000 bp, Homo Sapiens
aaaagtaagacaaagtatgcaatatacttttaaacccatttatttcaagatgaaatcatagattgctttttctttcttccagtggttaaactttaaaaattgttcatgtttcccctgcatttttatttggcttatttgaaaatatacagagaatgacctagcagatttctctacttggatgtcccaaagatatttcagtctcagatgcccaaaactgaaatagcattcttccaaatctcttcctaccttgtgtgccctggtaaatggcatcttcatttatctgacttcccaagctggacctggctcatgcagcccgccctggttttcctaatagttatctgccctttcttggtgctcttgtttgggcccttgtcatttcttgccaggaccattgcaaaagcttaccgaactctctacctctactctgaaatgtttcctgtttattgtcctcaaaaccaataaaatgatatttctgaaacataattcttagaatcaaataaacgggtttagaattgtcagtgactcttcattccctacaaagtaaaatctaaggtcctttaaaaggtgaataagacccttcatgacacagttcctttctctccatccaacttcatcttctgcccttctgtcgtctaagtaacaacactgaccttgcaattccacaaactttccaaatcctctcctacatttttgcttttctttctttcaagaatttcctccttccctctctaaacctgtaaaattcctacttatcctgcaagtgtgaatcaaatgacagctcctcagaaagatcttgatgcttcttctctgacattcttaacaccatagtgtatatatatcgctattataatatttattgccttttattaaattaacttgtacctctatcttgatgtaagggaccaatgcttagcaaagtgcatggcacatagtagataatcaataaatgcatgctaagagaatgaatgaatgaagtagacttgagaagaagctgagaatt

SEQ ID NO: 196866 - DNA, 1000 bp, Homo Sapiens
atgccgagaaaaggcagcgggccaggaggaccccctgcctcttctctaagcatatcccacccacccctatgccatgacctaggctgcagctgctctctaaggactccttggtcctgcaccctcaatattctgggagatcacaggagttgccctttgggcagatccaaggacacccaggagcagcatcaccagcacacgtgggcagggaaggcatagttcctgccacagaagcagtgacacagggagcaggatacctccagggtgagagacaacccagggatgttgtggggaaatggggagcaggaagagatggcaagtaacacacactcagtgttttctgcatatcccagtgaatcctccaactatccccattctgcagaaaatttcaataacttagccaaggagccaggatcaaccaggtacttccaccaaagtacctgtaacagaagacaagagtgaacgtctttccctgcatgtctgcctgaaaaatacgtttttaacttaacattcacatgaattttacagtctagtgctgccttaagatatccatgttcatttcaatggaaaaataatgtctttagttaactaacttaaaaaaattaaccatctgtgaaatcacgctaatcccatgagtacatttctcaggggtaccacctcgaggggcacaagaatcttgggccaagtcagggccacaccatcctgctgccccaggcaccatgagatgctccttcttttcccaacttggaggttccaggtgttcattaggagatgcagcaggttataaaccataactcagagaagaggaatagtggggggcagcaagcaggagacgacgcagcacaaagaagccccaagaaaggtgatcgacagatccagaccaacagagccaaaggaacacaagcacctcgggactccaatcactttgcccttctcaggtttgtgaccaacactccggtgatgaagggctagtaatcaacagtaagctcatgcacgggaattc

SEQ ID NO: 196867 - DNA, 1000 bp, Homo Sapiens
ctcctgagtagctggaattacaggcatgcgccaccatgcttggctaatttttgtatttttagtagagatggggtttcaccatgttgatcaggctggtctcaaacttctgaccttggcctcccaaaatgctaggattacaggcgtgagccaccgcgtgctggcctgggctattattaatataaaattttcagaaattgtatgctttatgggaaatttctagacaatcatcaatgtctttgctgtccatgatatgtttatgattcctggtgctcctttgcctaatattagacaaaaacagtatagtgctatcagttataatttgttagtttttaaaatgttaacttggttgcagctttaattctctaatgtgaatctactatcttctgggccagggtttttaattgaggattcacatcacttaactatggagttttattaatatacaggtgtctaggacctaatccagatttgctgaatctctttcctcaagtcaaataaaaacaaacccagactacgtaaggagactttattggagcagttattgcaagggggtgtggtaaggaactattgccgggggaggttgctctgaccataagatctgcaagtatctgagagggtgggcaaagtgcttttattttgtagagaggagtaaataaggctagaaagatccaggtatgggaaagtggaatgggagggtggcattacaggatagcagacccaagaatgtcttatcccaaagccagtctattttcctcccactccgcccccgcttttttttttttttttttttttgtgtgtgagtctcactctgtcagcaaggctggagtgcagtggcatgaatatggctcactgcagcctcaacctcctgggctcaagtgattctcctacctcagcctcctgactagttgggtctacaggcatgcactactacatctggctaatttttaaattttttgtagagatggagtctcactttgttgcccaggctggtcttgaattc

SEQ ID NO: 196868 - DNA, 1000 bp, Homo Sapiens
ctcatcaaaaataattcagatagttctaaaaacgtcctataagtaaacaatgtcaggaaaaagtgagatatgttgaaatacgaacaaacgaatgaatgaatggacaaacttcagaacaaactatctaactgcagcaagaactgggactggaaacacctaaccaatgacagccccatagtggtttctggatgctaaatatagacaaggtccaaattcccaaagtctaactctggctttatcacacatacttggcaaaagaatgttatcctgataaagccctcctgtctggccatgcttaagtaaatgtcccaacatggactgtcttccacctagctgccaggggaaaatggatcacttctgtactcttggtgtctagccagactatattaaaaagtccttcatcctgcctcagcaacaaaaagtgcactgccaacagttacgttaaagctgttgtgtgataaatttgaatattgcataatggaggggaaaaaatcaaggacttacactacagctataaaagggatatgtgaagctatttagtcatgattttgtcatggagtagtgacctagacaactcaaattccaattaatacttgaaaagcccttgggacatagtgtgatatgcattcttataaaatggctcttggctgggcttggtggctcatgcctgtattcctagaactttgggaggccaaggcaggcagatcacctgtggttgggagttcaagaccagcctgaccaacatggaaaaaccccatctctactaaaaatacaaaattagctgggcatggtgatgcatccctgtaattccagctactcaggaggctaaggcaggagaatcacttgaacccgggaggcggaggttgtggtgagccaagatcgtgccagattgtgccactgcactccagcctgggcaacaagagcaaaactccgtctcaaaaaaaggataaaataaaataaaatgaaataaaacggctcttaaaataatgcatttgaattc

SEQ ID NO: 196869 - DNA, 1000 bp, Homo Sapiens
gaatcaagtccaccaatatggatattagatttatgaacaaaaaagaatgtatgtcaaattgggcaggtgtaaacaaagaaagcagctagtgaggtaatttggaggtttctgatgaggcgacttgtggcaagtcccttaatggaaagcagaagcagaagttagaaggatgagggtaacccacagggtctcatttcttctccctagaagttttgcacatcaatgatacatgcttcgttcacatcagatttttgttttttgttttttttttggaaagctgtgtttgctgaggtagttattttgtaaaacaacctgagagaccccgatggtatatcatgtgaaactagattttaaaaaaaaggaatcaaagaatgtattttaagagtactaaacagataactgccaataatcatgacaatcatgacatatgtatatatatgtattatgtcatattggttggttatttataagaaaagaagtctctagtgatttagaaactttgtttagtttattttcataggaatctgattacacattatttcattgatgtgtatgtttttgcaaaagtggacgaagagacagtgagaaagttgaactgctgaatccaggaaatgtagaaacatcaggagtcttcatgagtataaataaaatgattttttaaattataactcttagattaagtgaactcacttcagatgcatttagaatatttgcataagggatgatttgatttttggctgctccaggaactactggaagcaggaaagagtgatagaattgggataaaccacagtgactcattgctcctctttgttaccattgggcaccagaggtatatgttttgttgacattggttattcaaatgagataaacatgaatatgcatacattggctttgtttttcaaggagctattggataaaatagcaacttaataaaaattctctagagaataacatgatactttaaccagactattttagaagtgaaaataatgttgaattc

SEQ ID NO: 196870 - DNA, 1000 bp, Homo Sapiens
gtataataggatataaataggaaaaacaaaaagttaaaaagcaggagggatgaaggtaaagtgtagagtttttattaggtttctctttgcttgtttctttgtttatgcaatcggttttaaattgtcatcagtttaaaataatgggttacaagatattatttgcaagcctcatggtaacctcaaatcaaaaaacatataataaatacacaaaaagtaaaaagcaagaagttaaaacatactaccagagaaaaatcaccttcattaagaggagaggaaggaaaggaggagaaaaccagaaaataacaaaatggcgggagtaagtacttacttatcaataataatgttgaatgtaaatggactaaacttttcaatcaaaacacatacagtggctgaatgaatttttttaaaaaacaagactcaatgatctgttgcccagaagaaacacacttcacctataaagatacatatagactgaaaataaaaggataaagatattccatgccaatacaaaccataaaagagcaggagtagctatacttatatcagacaaaatagatttcaaaacaaaaactacaaaaagagaccaagaaggccattatataatgataaagtggtcaattcagcaagaggatataacaattttaaatacatatgcacccaacactggaaaaccaagatatataaagcaactattacagccaaagagagacacagacaccaataaaaatagtagctggagacttcaacaccctactttcagcatcagacagaccatccagacagaaaatcaacaaagaaacatcagacttaaactgcaccgcagaccaaatggtcctaatagatacttacagaacgtctcatccagtggctgcagaatacatggttaactcagcacgtggatcgttcacatgttaggccacaaaaaaagtttcaaaatatccaaaaaaatgaaataatatcaagtatcttctctgactacatggaataaaacaagaaatca

SEQ ID NO: 196871 - DNA, 1000 bp, Homo Sapiens
ttgattttctgattatttctatgtagttagtagtaagtgactctgcaggcagcttatgaagggaagtcatagcagcatccttgtcattcagggcctttggctgggggattacattgattagcatccgtcccatggcatatcaatgtagaaggacagtttataaaacatatatttttcagttctacttttaaaccccttctgagtcattttctctcccaaatagtatataagatgcattttcaatggttattttttattgatcagtcagaaaccttgacaatttatagaactgattactttgagagttatttttctctgacccttcctgtcattggtgaaatagccaaaggagatagaagttcaataagatctatgtttatctataaaaggttaatccgtggcccagataacctttgacaagggttgtgcacacacttgtgtgtgtgtgtgtggttttttttttttttccttctgctagaataataaatttgaattcttcatttggggagtggttttgtattaagaggtcagtttgttcatttataagtcggcaatacttaatgtacatctgtgtgctaggtgctgtaggaagtgctaggacacagagactggggacattcagtctgccgtgaacctattcttttgaaaagtttaaaaagatgctgcccagcagtgaaaatatctcagtttaggaatctctgctttagcatgtgactgacttctttgaaactttggagtttggcggggggaaagaaactagtaaatcatccctcgggttttttgtttatttttgacaaaaaatatgcttaaggtgtacaccttgatgttttgataaatatacacattgtgagatagtcattacaatcaagctaatccatcaccttacatattaaatagatatttttttcatggtaaaaacacttaagatctccttttttggcaaatttcaagtatgcaatacagtattgttaactatggtcataatgctgcacactagttc

SEQ ID NO: 196872 - DNA, 1000 bp, Homo Sapiens
tgtatcatgagacttctcctcttaacaggattttgggtgcaaccgtgctctgaggtctccagaacgcactcctcttgctggcctggagcaggattagttcctccctacgcccctcccacagcccctggctgccactctgtgattctatgaatttgaccctggtaggcccctcattgaggtggaatcatgcaggatttgtttcttctgagccgtgttctagtcttataccagtcctgacagaatttgctctaaaggtcagagtgctggccagctccccgagatgggggcaacaggaggggaatgggggcgggagtggatcttgctgacccaagaaagagggtctgtgaattttgacacaaaccctagaccagggctttaggataagattgccaggggctacttggttttctggttctggcattcaggttcctccagggtggattctcctaccttggggtctccaccagccagtcctcctgggccatgctccgagctggctgtcaagagtgctcaggaggaggggtcctcggacatgaaccgactcagctatgcatagaaaggtggttttctctgctttggcttttctggagacgcctccgttacctctccagctcccttgttcaggttgctgtgttcaaagcttggggaatctcggaagcttccctcctggagcttgtttgtggcatcacccgtccgcattcccatctggtgaccaggctctcggaatacaaagcctagctatttgttttggtgggttggaggtctccccctgagggcctggcagaggcacttcagcatggcacagcatggggtggggtgacagttggagccccaggcctggcagaggcaggagcactgtgagcctcactcatcccacccagccctcagcccttcccagcctccctgggaggtccacccgcaccctgtccagttctcaccctgcttttcctgacagctctgggagttctgcccactgcaggatgtggacctttgactgatg

SEQ ID NO: 196873 - DNA, 1000 bp, Homo Sapiens
agtcatgtggtttttgtcctttattcttctgatatggtgtattatgttaattggttttgtaatgttaaattaatcttgcattaccgaaataaatcctacttggtcattgtgtataatatttgtacacattgctagatgggatgtgctaataatttgttaaggatttttcatttcacgaaatatcatatttttctttcttatgatgcctttttctggtttaggaatcagaatgatggtgggctcagagaataaattgggaagtattcccttctctattttgggaagactttgtgaagaattaacatttactttctttaaatgcttgatagaatttaccagtgaagtaaattctgggcccggggtctttttttgtagacggttgttttttgtttgtttgtttacaaactcaatcaattaactttctataggtccattcgaatgttctatttcttcttgagtctgtctttagaaatttgtccatttcatccaagttatctaattcattggcatttaattgatcatagtactgccttacaatcctttatttctgtcaggttgatagtaatgctccctctttcattcctgattttaatcatttgagtcttcttggtcaatctagctaactacttggcatttttgttgatccttttaaagaaaaacttttgggtttattaattttttcattgctttttattctttatttcattaacttctgctctttatggtttctatcttctttgagtttagttttctcttgtttttctactgtcttaaggtggaaaatcaagttattgaatagataactcttttctcagtttgtagtagcatttacaaccacaaatttccctctgtttactttagctttagctgcaccctgtaacttttggtatgttgtgtgtctttttcattcatctcaaagtgtttttcaactttctttattgcttcttctttgactaatggcaattcagcaatgtgttatattctacatatttgagaattc

SEQ ID NO: 196874 - DNA, 1000 bp, Homo Sapiens
gctgatttgtttgagttctttgcagattcctttgtcagatgaaaaaactgtgaagattttctcccgctctatgggttgtccattaattctgctgattatttcttttgccatgcagaagctttttagtttaattaagtcccatctatttatctttgtttctgttgtgtttgcttttgggctcttaatcacgaagtctttgcctaagccagtgtctagaatggttttccagtattatctcctagaatctttatagtttcaagtcttatatttaagtctttgatccatcttgagttgattttttatggggtgaaagaggaggatccagtttcattcttctacatgtggctagccaattatcccagcaccgtttgttgaatagagtgtcctttcaccactttatgtttttgtttgctttgtcgaagagcagttggctgtaagtatttgggtttatttctgggtcctctgttctgtttcattggtctatgtgcctatttttatatcagtaccatgctgttttggtaactatggcttagggcatagtttgaagttgggtaatgtgatacttccagatttgtcctttttgcttagtcttgctttggctatgtgggctcttttttggttccatatgaattttaggattattttttctagttctgtgaagaatgatggtagtattttggtaggaattatattgaatttttaggttgcttttgcagtatggtcatttttgcaacattgattctacccattcatgagcatgggatgtgtttccatttgtttgtgtcatctatgatttatttcagcagtgttttgtagttttccttgcagaggtctttcatgtccttggttaggtatattcctaagtattttattttattttatttgcagctattgtgaaaggggttgagtttttctgattctcagcttggtcactgttggtgtatagcagagctactgatttgggtaccttaattttgtatccagaaacttttctgaattc

SEQ ID NO: 196875 - DNA, 1000 bp, Homo Sapiens
gccatcctctccctgactctgacttaattaatatgcttgtgtctggggtgattctgggtttagtccaagggccatgattccaaatccattttactacaactttctaagccactttgacgttcttaggctgataactaataatctggtgaaattatttgaataagtttatactgccactctgtacaggaaccagatgtgaaaacatgagctttgtgtttgctaactgttccactatcaatcatttattcaaacaagcatttagtgatgattgctattcatcattaaagattatgtactagagatgatgaagaaacaagcaataagtccctgcccagagttgcacgtattcttataaagggataagaaaattcatggtaattttaaatgataacaggtgctgcaatgaaagacctccaagagtggtgtggcagcactaaggactggaatacagagagggtctaagagcacagctgggaggggcaggaaggaattcacgtggtatatagagttggaggaagcttcaaaagggaagttagacttaccttgttcaacttcagaggtctggatgggacctgtggtaaaattacataatagaattaggactcaaaggaactcggaccacctaccagggttcctcaacctgggtactatcaacattttggactattcattatttggctgggggttggggggcagtagtcctatgaattttcagatgttcagcagtatcctgacctgtacctactagatgccagttgcacgtacccaccctgcacaaccaaaaatgtctccaaacattgtcatatgtcccctgggggcaaaatcaccctgattgagaaccactggacaaaagtcataccctcaaaagaagtcctggagagcacctttttattcctccttttaatatttaggctacccgttcttgaataataatgaaagtagctaaaatttctgcttggattccttatatttttagggtgaataaaataatcatgaattc

SEQ ID NO: 196876 - DNA, 1000 bp, Homo Sapiens
ttcgtgtcctttgcccagtttttaatgggtttttttttcttgttgagttgcatctcaagtgaacaaattcagcaacagaaaatcaaatactgcattttctcaatgtagtcgcttgtaagtaggagctaaacataaggtattcatggacataaagatggaaataatagacactaggactccaaaatgggggtaggagaggggagggagtgttgaaaaataatcgattcggtgcagtgttcaatatttgggtggtgggtagattaaaagcccaatccccaccattacacaatatacccacgtaacaatcatgtacatggatcccccaaatctataatttaaaaaacatagatgaattcctaagtcattctgtaattagagatatcttttagtttcacaaaaacaaatacaatttctagaacacatctttagcttctgtgttataatgtattgtctgttttttacaatcttaaattatccccccaccccaggtcgtaaaagtattgagatcactataaatgagttaatggtatgaggcctagacccaaagttgtattgtaacttacgggtaaccctaagattttgtttcccctgcttttgcatttcccctttatattgaattattcatttagaattcttccttccctggcagtcttttttattttaccttaataaaataatttcattgatatttacgcatggaaaagactttgtttggcaaatcttttattgtctggactgaaattacttaatccaatgaaataagttcaataaattgcttcttccacaatagatgaactctggccttttttataccgaactttacttcttgtaagaaatgttatgatgatagtggaattttgttggcaaaggttatatttcagcaacttgggccatatacaaatactcttttatccaatgatctacaactgttttccctgttttcaattgcttttttatgattagtgtattatcagggattattagccactcatttgaattc

SEQ ID NO: 196877 - DNA, 1000 bp, Homo Sapiens
gctaacatggcaaaaccccctctctaccaaaaaatacaaaaaacgagctgggcatggtggtgcttgcctgtaatcccagctactcaggaggctgaggcaggagaatcacttgaacccaggaaggagaggttgcagtgagctgagatcatgccattgcactccagcctgggcaacagagcaagattccatctcaaaaacaaaacaaaacaaaacaaaaaacagatacttaaatactagaagtacatgaatggtcatagtagtactatttgtaatagccaaaaggtgaagagaacctaaattttcaccaactgatgaatggataaacaaaatgtggtgccatccatactatgccatattattcatccataaaaaggaatgaaaaacttatacatgctacaatatgtataagccctatatacattttgctaagtgaaagaaagcctcccataaagactgatgggcatcacatccaaagaccacacactgtatgtgaaatgtctagagtaaacaaatctatagaaacagacagtagattctgtctcctccaggggctatggtggagggaaaagtagggagtgactgctaatgaaaatagggctctttatttatttatttatttatttattttgagacagagttttgctctgtcgcttaggctgtagtgcagtggctcaatctcggctcaatgcaacctctgcctcccaggttcaagcaattctcctgcctcagccttccgagtagctgggactacagatgcacaccaccacacctggctaatttttgtatttttaatagtgatgggaattcaccatattggccaggctggtctcaaactcttgaccttgtgatccgcccccctcagcctcccaaagtgctgggattacaggtgtgagccaccatgcctggccaataggtctctttttatggttatgaaatgttccagaattacatagtggtgatggctgaataacttgtatacatactaagaaacaatgaattc

SEQ ID NO: 196878 - DNA, 1000 bp, Homo Sapiens
atattttatgtgtactcctttgaatgtattttttctttttcccaaaagttacggtttttggccgggcgcggtgcctcacgcctgtaatcctagcgctttgggaggctgaggcgggcgatcacctgaggtcaggagttcgagactagcctggccaaaatggtgaaaacccatctctactaaaaatacaaaaattagccgggcctggtggtgggcgcctgtaatcccagctactcaggagcctggggcaggagaatcgcttgaacccgggaggcggaggttgcagtgagccgagatcgcaccaccgcaccccagcctgggcgacaaagcaagacattatcttaataaaaaaaaaaagttttgtttttctcttgctttaatattaagcaccgcagcttttacaatccacatgctattatttgttgacttcagaaatgtagaaccaggagggcatggtggctaacgcctgtaatcccagcactttgagaggccgaggcgggtggatttcttgggccccagaagtctcatttttttgtagagacacggcaaagccccatctctgcaaaaaatacaaaaattagcagggagtggtggcgggcatctgtagtcctagcaactcaggaggctgaggcgggaggatttcttcagcccgggaggtcgaggctgcagggagccatgatcgtgccactgcactccagcctgggtgacagagcatgaccgtatctcaaaaaataataataataaataaatagaaatggagaatcaacttcctgaagtttgtttttgttgttgttttgagacggagtttcactcttgttgcccaggctggagtgcaatggcgtgatctccgctcaccgcaacctccacctcccgggttcaagcgattctcctgcctcagcctcccgagtagctgggattagaggcatgtgccaccactcctggctaattttgtatttttagtaaagacgtgtttctccatgtttgtcaagctggtcttgaattc

SEQ ID NO: 196879 - DNA, 1000 bp, Homo Sapiens
tggctgttcctgggttcttagatgaatgtcactttttaaacttctgacaccctgcagatgttcactaagcattgatggaaatggagagaagtttcaaagagaagagagctcagatttgggctatgggacaaatgtggaaggaggaagaaggaaatgaaaggtggagtgtggacagagtggtgactcttggaaaggaagacctgagggaggtaaggtgaggtgtctacctgagatatcagagtacagaggggatggcctgtggggcacttgtacctgaggcccccttctccatgggtggcaaatcctcacctatcgagtgagccatcatgccctggaagtccagcatccagtggttccaatctctctgccataactactgccaaaactaaaaaactactatgttttttagttgctaccacttcaaaagagtgaagagtcatttcaactctttaattctcccataaattaaagataatgaccatagtgtgcttggaaaactatgtttaggccgggtgcagtggctcacgtctgtagtcccagcactttgggaggctgaagtgggaggatcgcttgagcccaggagttcaagaccagcctggtcaacatagcaagacccttcatctacaaaaaaataaaaaaattagccaggcttggtggcatgtgcctgtggtcccagctactcagaaggctaaggtgggaagattgcttgagcccaggaggtcaaggctgccgtgagctgtgatcatgccactgcgctccagcctgggaaacagagcgagactctgtctctaaaaaaagaaaagaaaagttatgtttaaatcatgcttaaaacacacatatattgcagttttggtataagtctccaaccaggactgattaattatggccgaactttgagtaggaaacctattttagaagtacaaaaccttatcataagagaatggtcccgccacatccactgtgtttgactgttgctgctgtttaaaagttaggttttaga

SEQ ID NO: 196880 - DNA, 1000 bp, Homo Sapiens
ggttctccttggagtcctgattttaacttgtgggaaaagtcactttaacatccaggcctcagttattttgccgtgaatggggagaatattttggatattgcctattcagcaaatgggtggctgcatttaattcgccttctaaattcagggctgatttgtgttatctggtcgactctaagatcatctttctgatctgcaccagaggtaccagaagctcagggaaacaaaaggcagttcagctcagagagggagctggttttaacacctcaagaacagcagggcttgtatttctccccaggaagggcaaaagtctcaaaaaaggagccaggagcagctgaacggtgggctctatcagattataaaaagataagtgggacagatgagaactatcaggctaagtgacaagcatcctgaggcccccagtgagaaacaggacatgcacccatttaaaacgagaggtcagaaaaaggcagacagccatcaccagagccctacacaagagcgccccaatttcagaacacccagtgcaccaacatctgaacttacaaaggagataaattggaggctgatgattagcatcacaaaatgattattccctttgtaaaaggcttcactgcaggactgctttaaatagtgcatttaaaccatgatctgatttgctaaattcgatttatacacatctactgcctaagctggcgtggggctgtatttacatgtcttcccttggcacagaggaggggagaagccagccattatttggggcctttaatccttgtagacagtaactaatctggggagctgaaccctgtttttcttccacagctggggctttagctgcaaacaagccctagttacctactctgctttgcccatgcagattctacccaaagatgacagaatttggccaggatctgttggagcctttctaccaacgggggctcccatcaagaagcataaccctccccacatccaggggtgacacctttccagcctagaattc

SEQ ID NO: 196881 - DNA, 1000 bp, Homo Sapiens
tactctattgttatatcttcaagttacctgactctgtcatcttcatcctactattaaccccattcagtgaatttttcatttatttatttaaatttttttgagatagaatctcactctgtcacccaggctgtagtgtagaaacattttcaattataaaatttcttccagctctttttcatacgtctctgatgagattttctatgtgttcattcattccaaatatggtttcctttacttaatggaacatggttacatgggctgctataaggctcttgtctgaaaattccaacatgtggagtcactcagaattgttctctattgatgactttttcggtgagaatggattgcattttcctggttcttcatatattgagtgattgttattgtatctcggaatttatgatgttattttgtggagaccctggttttacctccccagagattactgttcattttgttttagctggcacttaccttggagatattcaaactgcaaattccgacttgcccacagtgggcagtagttcaagtctcacttctgttcttttagccataaatgcaagttgctttgaatctgtttcacttgagtatggttcaagagtcagcctaagacttgggctaagtgtacatagattttggagctccctttttctaactccttccggtctgagattcccccttcattttctgatggccatggtggccctgggatttgtcccctggttccttggcccaaaaagttggtaggctttccactgaagttacaactaccctattccacaaaatgacagtctttcttctggccaaaatcacacacaaaaagggaaacccaccttgaatcagttcctttaagtttcaactcctctccaaaatctgactaatttgttaactctccagaaacactggttggtttcttttgcattttgctcatcatctatagtgatcttggtggggggacagtctgttaggctcttactctgctatagtggaagtggaattc

SEQ ID NO: 196882 - DNA, 1000 bp, Homo Sapiens
gtcttctgagatgtttcaactttcatacttgcatattgaggacccacaactgcatagacaatagagaagcggtttctgaacagcagcagcatgtactttttctaacttttctgggcttcagcagcttttcttttctcataacagccagaagggtcacaactactgcaaatgtgctattaatctctagccagtgtactattaatttagagaattttcctggaccaatggaaactctacatcatacaccgatagaaaaatttctagtaagacttgtaagttgaagtaataaaaatactaaggtcttcagagaaatgtaaacaaatattctaaatgttccctttaaatgttttttaatgagaagagaatcaatttccaaagttttacatttgtttattatatatgtcttaaatactcacaaaagtaatatcaacacaaggaagatatggtatttcatttcatggactggtgggacatgtcaacaagtatgtcaacaacagaaagtgagaactgagtaaaagagatattcaagggggtgacaaaggccatgggtaacaaaagagaatggcaaaaagtcacttacaagtatcctgtaacatcaaaatggacctaacccttaaacacttaccttgtgacatctagagccttttgaacttttgcttgcacagatccaagtaaatctgctcccattttcttaagtaattgtgtgagaagaacaaaaagccagtcttgtaaatcatccttatgaattattataaaatccacaagagtctccaaaaacatactgaaaacctagacacaaatgaaaaccaagtagttcacatattgaattcacgatctcctccaaagtctacaaaacattaaaaatgcccatacgtgctttgcccagactcttgtaacttaggttaacactgttaacaactgttcatagtacagaaggaaaatgtagtgcagaaaacagataaaggaaaaagaaatggaacttactctctgttgtgaattc

SEQ ID NO: 196883 - DNA, 1000 bp, Homo Sapiens
agtagatctccacaggagggatgatgtcttcatagtctttcaggtgaagagctaagaaaaacagggcaattggggttttttaaaataattattatgatatcatgaacatgcaaaagaagaatctaagttaaggtgatttcattgaacttgcatgaacgaactgaaagcaaacagtgttgagagatgggagcaccaagaggaggaactaggctacatgatatccaaggttctgtgaagctggctaacagctcatcctatgaaaagaaccaccaccaaatgctgcacatggctgtgccagctcagaaatacacacacacacacaaaattttggtgtcaaaacatccacattttcttcaatttatgttagaaatttctgtggcacttcataaaaagcaaatgagtattatactatgttagtcataaactgcaagataataccatgtttccttttgttaaaaaaaaagcaaaacaatataagcaaaacagtataaaataatatgttcttttctctgtgtttctttggacagattattgcttttgtattactgcttttgtcatttgtctcactgaaacaataggattttgtgaaaaagtgaaaatgagtctccaagttgtcagttgagacaattcaagttacaacatcttatttgcaattatactggagatgaaaaaatctttctttaaaatgcactgtattcttgggcctgttgggggtggggggctaggggagggatagcattaggagaaatacctaatgtagatgacggttgatgggtgcagcaaaccaccatggcacatgtatacctatgtaacaagcctgcacgttctgtacatgtaccccagaacttaaagtataataaaaaaagcagacttaatattagatttaatattaagatttaatattagatttataaccaatttgtatctttttcttctctagaccttggaatcttaaaaatactttgttatagtatatcaaaaacttcataaaaccagttta

SEQ ID NO: 196884 - DNA, 1000 bp, Homo Sapiens
ctctgcaaggtagccacacccagtgctttctctacattccttttcaagtcagtaattgttaactattagtgaagtaggagacgttgacaccctgctgggcatcctgcagaaaacatacccactgaagtagtaaagtcaaggactaagatcactagtaactgtagttaggggttgttaagtgccttgggaggcacagagtgttggaggcctcaggaaaaagctaccgcctttgttaagggcatcaaggctccaggtatagctgaaagcattctgtatgtagtgaaggcatggatcaaggaaaagtaaaagaggtgtaagggaacagccttgtccaacttgttaggcatgcagaagtcaggagaaaaaagcctgcagataagttaaatccggtgggcatggagggacctgaagccaaagcagagtcagcttagtttggtaaaggatccattgaaggtttttttttagcagcagagtcagatgggagcagtgctttttaggactacataaattagtggaaagagactggaaactagggtcacatacttctctgtgacagtgagtgccagtttacctacaaaaccagtgacattatcttctagacctactgacatggcctcgtctgattctctgcttttcagttgtgttcttacctctaggtgagaaaactgagtttcttcctacagtgaggtttcccctattccttcacctctgaaatttggaaactaagttgccctctgacagttcaagcattaaaaaaaacccaacatatagtaattaaggtaatagaggaagtcaatctggcctagagtagtatctctcaaaatttgtttggcctcactgcaggtgtaagcctttaattcttaatttgccttcccagccaccctgacgctggggagagtgagctccggataaaggacgtacatgttgttcttcctggaaaagaatttctaggttcatcacaaacctacaaatacactgcattctagttgatagtgaattc

SEQ ID NO: 196885 - DNA, 1000 bp, Homo Sapiens
atgagttctatttataataaaaataataaaaatcatagagcttaagaaaataaagagaaataaaaaaccttctgggcttcatacatgtgtatatatatgatcgaatgtattttttttttaccagataggcgagatgtctttaaaccaaaatctgacatgttggtgtttataactaatgtttcttaaatctaaaaaatgaattcatgactgcactttaaaaccatctctgcggtgttcacagaggccatctccactgcaacattatttctgaattttttatttgctgccatgggctgttcacattttctccatccatttattattcccagatagctttcttcagtaaattgaagagattgtaaaaaaattaaaaaaaaatttaaaaaaaaaaaaagaaaaagaaaatctctagttatgaatgtctaggtttgcagttacctaaacttttctgaaaagctaagaaaattgggaaagaatgtagaatttttctctaggaatgacattaaagatacagactggtttttatgtgccagctggtcaatgctttcatgccaccctgttaagatgtcaaaactatttacaagagttatctcagaatcttcttagattttggccaaattgacctttaaaattctctcctttacccagttactctctcatcatagacagagctactattcagtcaagcaatggtctttggaggctgtgcaagacagggcctgagaatggccaaggtaatagtcatgcctctattggcacatctgcttttcctttcaggagcactcactgtcctcacatttttctcatccacctttggtttcatggtaatcattttaataacagtctttgccaacattgtaaactgtcttcttactttagggatttttatccaacttgtctcgggggaaaatcccgtctttcaggaatcccttttcttcatttatacgcctgagtaggcatcgttcctagaaacagatcagagtgattccactatgaattc

SEQ ID NO: 196886 - DNA, 1000 bp, Homo Sapiens
tctaaacacttatttgacatacaaattttctaataaataaaatgaacaccattttagatttgtataacacagaaaacaacatttgatctctattcagataagtttcacctaattgaaaaagtaatacttcagaattgcagcctgtacttgtaaagtgaaaatgtatatgttgattctccattaaaggagttggatattttattgttcttgtcactgggaaagcattttattcctttaacagaattattagtaccatcaccctatcttatcaaggatttaaggcaattatacaatggaacgatacgcaagtatcaaaggaaagaggccattaagaccaaatgtatttcaggttcaaaaagactttagttcatacaacaacaaaactatattaaaaggtaaaatttatttctgtgagattctgtggccaatttccaatgataaattttcttattgagcactgtatgaacccaaagatgcctacatatacaagtgctaatcttgagaaggaaatgataaatgctaaagaggaaaagaaatactagacatcaatactgaggcaatatcatttcaagaaaactttagtacttttcttgttgtattcattcacctactgatttttctttgaagttaagaaaggttatctaattattcaacaagcatttaatggctcttggggagtgcaatatttacaacaatgacaggcatttttttctttacatttattcaatagtttagccataacatataataacattggagatatttgaacaaactgtttatatcacgcttacagttcttctgaattctcaagaactcactctacagagtaaatctgtgtcattctgcagccttgttttctcaggattttgaaggcgctcaggttttcctttattctaatctagtgtgggcatctgtgcaatcatgtaaggcaatgacaaagttatttatactccacttactttactttaaaagggaattaaaatagcttcctgatgggagt

SEQ ID NO: 196887 - DNA, 1000 bp, Homo Sapiens
aggagaatatggcagtgtggcatgtaattgtactggtaacccccagagaaggtctgagatagagtccctcagatcctcacagtctgcatgtggagatccagaagtcctgtcatgatcccaggggaagcatggaaggcctgagagatggaatagatcagacaagtcttgggattagaacaaaaagatggtggatcttgtgaacagagacttcagcagggacctcaaacatgagctgtggataccactgaatacttctgattagagtaatgtggagaatgtggtacttgagagaagctggtcttgacgctgggttagttcattgtacacacttaggaggcagagtctcaaaaattgagcccttacacaaaagaacagcagccaaggccgggaggcagtcttccagagaattacaagattgggctacttcaagggaaaccagatattttcttgtagcatctcgtattttaagcattatatttttttaacctagaactgaggagagagaacagtgatggctttctgcctctgggaactctgtctgtgaccagtgcaggtcttggttctgtcacctggggggcagtcatctgaggtgatgtttacctggttgcatagatcatagctataatcactggttgtcaatgaacacatacagctcgtctttccttgtacataacatttctcatcctacaatgcgtgcctttatcattcaatgcccaccaacatggccaaaatgcaaaacaaaaacccagaaatacagttaataagcccaggggaaatggttattctccttcgatcttaactctgttgaactggatatgcagtgtgaactgagctcttcaagcaaatgataaatcaagtttgctcctgaagtgggggatacattatttcaagtggactctactactgagcatcttttaactcgttctgagcatcctttccttcagcctacatttctagactctggctaaaaatcctacttggtggggagtctaatgaattc

SEQ ID NO: 196888 - DNA, 1000 bp, Homo Sapiens
gctggtctcaaactcctaggctcaagcaatcctcccacctaggcctcgcaaagtactggaattaaggcatggaccaccatgcccagccccacagccaaacttcttgaaagaatggtctatatttactatctttactttctgaccttctattacctcctcaacccactccaccagaccaccacatatgggacttcccagggctccagcctgggtgccctcttctttaaatactcagtactaatgaaaaataaattcaacatataggagctgccttttcctgactcctccctccttttgctcatcttcagctctctattccatccctctcttcagcagaacaagagattgtgtttgtgtggtggtgagggcaggagaggctaagaacaggattgggggaacaagagtatagcaggggagatgggccctatctatcagcccaagccctcagcagctctttacacagccagttacctgtggcagcaagagggggaaagtcttgagagcacagaagagggaagaagggggagataaaaggaaatgtgctgaaagagtacagctgtaagactgcaaaagagagagggctcaagaacaaacctgagtcacaatgcagggtgtgtgtgtggctgagtaaggctttgtgctaagagagactggcccagaggagtttccagggagacagacaggccctgctatgctgtgaccaccactacagcagccccattctccttgctgtgctactcacctgggggttgctgagccagcagggcctccggatggggtagactgaatagcagtactttcccgtctgagcaggccagagccaagagacccaaccggggcaggagaggagcctaaagggtaaaaggtatgctgaggcttgctgccttcagctgactcacagaaaacctttgaggttctagtccctgaaatactgtatgaagttgctggaaaaactccatccactacactccaaccttcgttccttcaactctaagaattc

SEQ ID NO: 196889 - DNA, 1000 bp, Homo Sapiens
ttcttccttgttttgtttcactcagcaacttttgtattcagtttactgtttccaaaactcatcctgtttcttttattcttgactcttttctttcctaatggctttctctttgagtatcatgaaagatacatcctcttgcacagtactcaattgaggctgccaagctaattcttagaattccttctgattcctctaagtacagagctttcccttggggaagtaaaaaggttttcttacagtgtccagcactagaagagcaagtaatgcatcattcactgtttagttcttgccttgctattttctgggagttttagtctaaagagagaaagatgagtgggttcggggcgggtagaggggagagtgaggagggtgagtaaacagcctctggctgctcaggtttatggtcttccagatcagggtctctgaggctctgcaagcataagtttaatccatgtttgtgagccatatatttagttgaaatacttcttagagtctagtaataagttgtctgtaattcttattattttactggtggtgtgagtttcatatttttctatgactttataggtattttagtgaggaattgggaaaggccatttcaagggttgccagcccggctctatttaaatcagaagtatttagctataattccaaaagatctctatggaatagattttatatcccaggtgacttattccttggattttatagtggacttggatttatctcatctttcttctttttatctgaaagataatcttgaaaatcttatatttctatataaccagaactgagaattttcttttgggagcagaaatgttggtaactcatgcacaaaaaccaaagcaacgtatgtgacttaaaaaagagaagtataaaatacttagtttacttacattcataatagataatagaataaagaatccagcattttgttttgtgaatgtgacaaatagcaacaggagagctggcagaatgagagaaagaggacgggagaatt

SEQ ID NO: 196890 - DNA, 1000 bp, Homo Sapiens
tcatggtgaatgattcttgtaatgtgttgttaaatttggtttgctaatattttgttgagaatttttgcaacaatgttcatcaggaatattggcctgtaattttctttttttgtagtgtgcttgtttggctttaatttcaataatatattttatttaccccattatatctaaaatattatcatttccaaatgttgtcaatattaaagtattattgagatttagcaccttcttttttgtttcatactaaaccatatctcatttgagactaggcacatttcaagttgacccttgaacaatatggggctggggtgctgacccctcacatagttgaatattcgtgtataacttttgactatcccaaacctaactactagtagcctgctgttaaccagaagccttactgttaacatactgttgattcacacatattttgtatgttatatgtattatataccataattcttacaatagaaaaagctagagaaagaagaaaagaaaatgttattaaaaattataaagaagattatatgtattcttcataagtggaagtacatcatcataaaagtcttcatcctcatccttttcatgttgaggaggctgaggaggaggagaaagaggagaggttggtcttgctgtctcagaggtggcagaggcagaaaaaaatccgtgtatagatggacctgcacagtttaaacctgtgttgttcaagggtcaactgtattcagtagttacatttggctcctgtattgaacagcacagatctagaatctattgctttagttcttctgctgatttagcaaataataagccgggcatggtagctcatgcctgtaatcccagcactttggaaggctgaggtgggcgaatcacttgaggtcaggagtttgagaccaggctggacaacatggtgaaaccctgtctctactaaaaatacaaaaaattagctgaacatggtggcacattcctgtaatcccccctctactcgagaggctgaggcagg

SEQ ID NO: 196891 - DNA, 1000 bp, Homo Sapiens
ggctaatttttgtattttttagtaaagacaaggtttcgccatgttatccaggctggtctggaactcctggcctcaagtgatcctcccacctcagccttccaaaacgctgggattacagatgtgagccaccatgcccagctaaaatttaattttatttaaacaaatacttattgtttgctaagtggtgtggatacagtggcgaacaacacatacaacatggtccctgtcctcttgatgggtttcaccatgttggccaggctggtatcaaactcctggcctcaggtgatccacccaccttggactcccaaagtgctaagaaatctctaaggctttttgctccaatccctggcttccggacaacatgtctgtacccacctgggacctgggggaacttgctgccctgaaggggaggatacaaacctggctggcttcaccacctgctgactatagagccctagggccctgagtgaacacaggtggcagccatgtagtggttacagcgggccttgggcgagaccctgtgctgtgctggcttcaagtctgacccagcagtctcagcagtaatggccagaggggtgcttacatcaacacactccagttcaaggtggctcagcacagaaaaagagactccatttgtttgggagaaagtgaggaaaaagaacaaatctttgtctcgtaatccagagaattcttccagatctttattatccaagaccaccaaggtggtatttctatgaatctgcaaaaaccacagcattattggactcggggctcaaattccttcgaatacctagaaagccttctgaagaaggacaggcacaaacaagcccagattgcgaagactataaaaaatacctagcttgtcaatgcccaaacaccaacaaacatctacaagcatcaagatcatgcaggaaaacatggcctcaccaaaagaactaaataaggtaccagggaccaatcctggagaaacagagatatgtgacctttcagacagggaatt

SEQ ID NO: 196892 - DNA, 1000 bp, Homo Sapiens
aaatctgcttagtttttaagtatttatcactaaatcagcagcaaactttccgacagaactgcaaacccttttcaatatgttcaaatatatcagctaatcaaacagttttacatttgtgccctcaaatgtatccttctctgaaatatgaagtccttcatccagctccaaaccttttcaagcctgctgcaagctgccatcctggagctttccttcatcattatcctgagaatttctatgcctaatgatattaccacaagtatctgcttgctttacctcacatgaaacctgaatagtttcaaaataccaacataaccactaaaaacacaccactgaatgcaatataagtttttttgtgcttacaatatagcatactaggaatgcacaatcaatattgtgatttaaaaatcagtttcaaaaatcctttactatgtaggtaaaactatctggttgatacagaacaacgttcatttgttttgtttgctggggaagcagggagagttacttatatttgttcagtttcataaaacatttacatagttccaaagtcaatactgtgaaccagttacatttacagaggtctaattttcttctctaattccttcccaactttttcttgcctcgctagcagtcatttttaattatttattcttctgttgtttgttttttgaggtggagtctctgtttgtctcccaggctggagtgcagtggcctgatctccgctcactgcaacctctgcctcctgggttcaagcagttctcctgcctcagcctcccaaagtgtgggattacaggtgtgagccaccatgcctggcctccgttgtttatttgtaaatataagcacatattttctctttttcttattgtcatggagatactgttgctttagatccttttagtggatagagctaagaaacacacacacacacagagacacaaagggtagcatataatactcattcttctgcaccttgatttctacttaacagtacatcatggaattc

SEQ ID NO: 196893 - DNA, 1000 bp, Homo Sapiens
tcctattgagagacttttaagtttttacaatttttcactattaaaaaatgttgctatatgaattcatttatatttctccttagtgcacacaccagagttcatctggggtatacaaccaaaaaattaccaggtcttagggtatgcacaatttcaaacttaataactagaatgaaattgctctctggagtggttgtatctcaccccgtgtcctcataaacacttggtattgtcaagtcctaattctaccaatttgatgggtgtgaaatagtatctcattatagttttattagagtttggttgataactagtgagtaatatctcattgtagttttattagaatttggttgataactaggaagattgagaatttatgtgtttatttagctatttgggtttcttctgtgaaggacattttctaatcatgtgatttttctgttgatttcttttagtgatttgtaggcagtctttatatattctgcatatcaattctttgtggtctatatgagtaaaaatatcttctggttcggggcttgattgttaactttttaaataatgccatttgttgaataagagttttcttttaatgtcatccttcctttgggcattgtttctgggtatattattttagaaattctcccttaggctgaggtcatataaaatatcctctgtttacgattaaaagttttaaagttttgcttttcacaatttcacctgctgtccctctaaaatagttttgtgtatagcatgaggtatagttgcctaattttgtttttctcatggatgacctgttgtcttagcaccatttaattgcctttgcaacccttctccaccaatgcacagtgccattctgtcctacaaacttctgtctatgtagatctatgtctttttgtaggggcgggggggggggcggctatttagttccactggtgtatttcttttttcttgccccattttcttgcttttttttttttttttttttttttttttctgagatgaattc

SEQ ID NO: 196894 - DNA, 1000 bp, Homo Sapiens
caaatagaggcagggaaagcaaaagactcactttcccaaagtctcttaattgttagaggtgtgagtccctcaactgctgtgtgacagttttggccagtaagaagtctgctggagatgttcagagatttttttcttttgtgttatggccctgaatgctgacttgctgcctgaggctgtggcaggcatcttgcagtcaaatgggaaaaaacaggagcgtcaccatgatgctggtcctgacaacactgagctgctgaagcaatgtcatctgccacctcttcccagcttttctgtcatgtgagaaaaaataaagccctatctttttaagccaatgtcaatctttgttgcttaaaacggaaaagcatttgtaactgataaagagtaataaaagtattttttaggtacacacataaccaagttcaaagaagaaaattacatgaagtaggcaccactgtaccccagcctgggtgatggagtgagaccctgtctcaaaaaaaaagctgtttgagtttgagtagcttatatttattaaagtccattttatgtttattttatttatctttctttccagtgtttcttaaccatgaaaacaaaaacatcttaatcccatttaatcatgacaaattactatttattaaaaaaattaaactatcagtagccaatgattcattgtgcccttcacatgattattatatgtatatattctaaaaataaatacaataatgagctccttgcttctgcatagatacgacatcaaaattataggatgtgcaggcttaagatcagagcagtaagtcagaactctgatcctaaccagccccaggcaaagctgttgataaaaaacaaaacttattttaaataacaacaacaaaaatcctatcccagtgcagggaaacgcactgtgactacttgttcattagattcaaatatctttgctcctcatgggcgagtccattaaagaggcgaatgaaaagccaaattttcttttaaaaaatgagaattc

SEQ ID NO: 196895 - DNA, 1000 bp, Homo Sapiens
tccttctcactgggccaaagtccaggtgttggcaggactggcattttgggaataaccttggatagaattctttttcttgcctgtttcagcctctcaattctacttgtaattcttaggtttttgctcctatctccatcttcaaagccagcagtggtgcatcttttaacctccgtgacttctgctttcatggccacatctccttgtctcactcttttgcctccttcttttctgtataagagcctttgggcccatgcacataattcaggacagtctctccattgaaatatccttaatttaatcacattttcaaagtctttttgccatgtaaggtaacacgtttacagtttccacagattagggggactaatccaactttgggggactacttattctgcctaccacacatattgatagagctaaaaaaaagtactatacaaaaaaaaagaacagtgatcctgtttttttttaaaacagagcaagagagaggaactacattagtaatgttagtaaataaacatcaaactaactgtaaagaaaataaaagttaaaataaaagttaaaaaagttattcaaagtcaaagtattaatacactattgagaaaatcaatagagcaaagagttggtcttttgagaaaacaaatatgtttgataaactgctagaaagaataaccaagacaaagcatgtataatgcacaaatcatccatatcacaatacgcatacataaaaagttaataagagattatgaattgttatatatgaatcaatttggaaacttagatgagatggataaaatttcccaaaaactgcaacttagtagaaaatacaccagaagaaatataagttctaaatagtcctatatctatttaaaaaatgaatacctaattaatgaagaaaacttttgtgagattagaacaaacttgaagcccaaaccagttaagacattataagaaaggagaattgctgacctgtctttctcataagcgtagatacaaagaattc

SEQ ID NO: 196896 - DNA, 1000 bp, Homo Sapiens
aggaataaagcataaattaaaatatttaacattttggccatagttaaatataaatgcatacatgttattgttttaaaactagaatcacactcaaaatattgtgatctctattttaatctttttgtatatatattcttttaaataggatttttataatggctgcagagtatctcttcatatgcaaaggtgtaatttgtttttatcagttctccattataagatattcagatggtttcgacactgaaaattgtattgtgttaattgtcctaatgaagcaggatatttccctgaccccttcgcggaattcctgacaggggtgcctcatttactcagccccgctcgctgctctcagctcctcgcgggagggagtgcacgagcgaacgagtacgggagctggaatgaatgagtgctggaatcggctggccacttggcgctggtaggacccaaccccactcactcggacctgcagcgttccacccctcatgggagggagcgcacaggtgagcaggtgtaggaactgaccccacactttagaaccggcaggattgaactccatgcaggccccacagcagactccaaccgggggtgcctgcgactctcagagccccagagggcacgttacagtgctcttttagctctgctgtccgcagtccgcagtccgcagtccgcattagtgttaatagctcagtggggcctctgacttttcacatgaggcggctgccttccaccagccagggtgaagagccagtgtgacagccagactcttctcgaagttacgaagttacgccaccaagctgtccctctgaagtcaagccacttctctccgatgcccagctgtatcctgtctactggctgagtctgggattaatataggcacaggatggggcggggtggggccatgagtggtttaggaaaaagcaacatttgagcgggaaaacagggatagaagttctcactttgggctgtggtttcaggcttttcagcttgagggtaggaattc

SEQ ID NO: 196897 - DNA, 1000 bp, Homo Sapiens
aatgagtgtaaattgtcccaaacacttagtagagcaagtcctagaagttgacattgctcctgtcctttagctcagcaatttgtttgtagctgtctaacagaaactcatatgaataaagaagcatattcaaaaacgttcatgcaatttttgtgataccaaaacagtaaaagcaaccttactatccaccagtcaacaaacaacatcgcttcaaaaatggactaatacaatagtcattaagaccaaaaatattcagatcaggatctcaaaaagtagggagaccctccaaataattggagaagggaatactgattaaaggtaaatttaggatcacctgtggtcctagcatataatgaaatactataaaataaatgaactaagtaggataaacaaggaaaatcacaaaatgtaactataagtaaaaaaaaaagttggaaaaagatatcctgatggtataccatttatgtcattcaatataatatatactaaatttatatattaataaaagtatataacctttaatttatataatatatacataatatttactaatacatacaatatatgataaatgtataaaaccataccttgatgtgatatacatcaacttggagaatggagcttacaactacaatctagactgggcatttcacgaagaaggaacttatttacagctattccttacacctagaagactgcccaaaaaatagtagatgcttaacatttatctttgaataaaccagtgaatgaatgaatggtttcatctgggaggagaatgagatgaatagaacagcggtggggaaaaatttaggtgtatttttaacattttctttgtagaatggttatgattcatataaaacaaagtcatattatcaattaagcctaagtgatgggctttctattttttaatattatatcatttcaatttaaaaattttaaacatgtctgtaacagttttttcatatagatagaattagtgccccctccccctaccgaagaattc

SEQ ID NO: 196898 - DNA, 1000 bp, Homo Sapiens
ttttttttttttttgagatggagtttagctcttgttgcccaggctggagtgcagtggcacgatctctgctcactgcaacctccaccttctgggttcaagtgattctcctgcctcagcctcccaagtaggtgggattacaggcacgcaccaccacgcctggctaatttttatatttttagtagagatggggttttaccatgttggccaggctggtctcgaaattctgacctcaggtgatcctcttgcctcagtctgggattacaggcataagccactgtgcctggcctagatgagaattttaaccttttataatctcatcccgctctctgtttcagttctttgttaaaatggtatgcagtggttacattactatgcctgtataaatattccatttagttaagtagcctactatatttcctttgttctgaagttaaaaattcctctttatttgattaatctccatcttcctatgtactccagcaacctctcaaaatgaatttccacatagccaaaccaccagataataatcttttggtttctgttgttttcctggacacctctctgctagatactttctctgtcctgcttcaataatggactggttattaattatgcctggttgcacaattaatgccttgggaatttcctaagggtctctcctgtatgcgataccctgtttttttgcaatacctttctttgttggtttactgcctttgagcatatcatcctatcgtagctttttgctaaaagggtacatggtaaaggaaattttttgaggctttccatgtttgacaaagtctgaattcttcccttttcactcagttgagtgtttgacaaggcatagagttctaggttgaaaacagttttcccttaggactttgaaaacattactccattgtcttctagttgctgacagttctgataccattctgattctttatcctttatttgtaggataattatttatttatagtagcctagtttatctttggaagatttc

SEQ ID NO: 196899 - DNA, 1000 bp, Homo Sapiens
ttcctttcactgcctgagatgcttccaagcacccatttctaaaattcagcctgtttggctgggatcatgatgccctcccattccacagacattttttgagcacctaatatgtgtcaggcactgtgctaggcacggggacaacttcactccctttgtgatgttaagtgcttccataggggaattgacacagccttttggacttactgaaaaactgctaattgtgcgaggaggggcttggttggagaacatttctcagaaagtcatgactctgacttaaatcttttttgagacagggttttgctgtgtcatccaggctggagtgcagtggcacaatcacagttcactgcagcctcaaaccaaggctcaagagatcctcccacctcagcctcccaagcagctgggactactggcatgcaccagcacactcggctaatttttgtatttttcgtagagacagggtttcaccatgttccctgggctggttccaaactcccgagctcaagtaatccatcctcctcggcctcccaaaatgctaggattacaggtgtgagccaccacgcctggtttctgacttaaatgttttttgttttttttttttactggagacagggtcttactttcacccaggctggagtgcagtggtgcaatctcagctcactgcaacctctgcctcctgggctcaagtgatcctcccacctcaacctcccaagtagctggaaccacaggcacacaccaccatgcctggctactttttgtcttttttatagagacggggtttcaccatgttacccaggcttgtctcgaactcctgagctcaagtgatccacccgcctcggcctcccaaagtgctgggaatataaatgtgagtcactgtgcccagcctctgacttaaatcttaaagtctaagaagcagtttagcatatggggaagggtggggcatgccaaggcaaaggcagtgaacgtgcaaatcctgagtgactggaaggattgcaagaagctt

SEQ ID NO: 196900 - DNA, 1000 bp, Homo Sapiens
tgagtgtgaggaatctgtgggcatactgatggagttatttagtatttagttatgaaaaaaatatgaaggtcaggaggagatctggacttgagatggtacatttgagaatcattagtttatcattgtttttgaagccataggagtggatcaagatacctggtgttggaatataggtggaaagataaggaaaactaggacagagccccaagaaacatgaacatttgaggaatgggcataggaagggatgtccactgaagggattgaggagtagtccagtaagtatgagaaaaaccagaaaggtgaggcaacagcaaagacaaggaagataatgtttcatgaaaggagtggtagtgttgtcatatgcttctgagaggttaccacaagttctgagaagtatccattgaatatcacaacaaagaagttgtacaaaactttgacaagagcagttttagatggaaatgggttgaagggtctataaggggtaagaaagtggtaaagttcagtggatacaaaaagtctggtgatgcatagaaaaagataatttggtatttggaggagggtgtgaagtcaaggaattcatttcacttttaatgggaggattggtgaaacttagtttttctatttttctggtgttttgataatatacctatctaagaaataggaaggaaagaagataaagagaaacacttgaacccttagaattaattctgattgtctgttttcaaagtcggaaatagcaaatacatttttttatcggaactatcttactgcagtgcctaagcaaaaagggaacaatatgtatatcctggctttctcagctagtctaagttgtactaacaatatttacattttctaaggactgagcataattatttggagagtttttttttttctggagtgagacagaatcttgaatgaaaggaagtctgtaatttgttcagtctttaatttaaatgccatgtgattttactcttgtaaaaatcacagaatataagaattc

SEQ ID NO: 196901 - DNA, 1000 bp, Homo Sapiens
ttcccacctatgagtgagaacatgcggtgtttggttttttgtccttgcgatagtttactgagaatgatggtttcctgcttcatccatgtccctacaaaggacatgaactcatcattttttatgactgcatagtattccatggtgtataaactagttcaaccattgtggaagtcagtgtggtgattcctcagggatctagaactggaaataccacttgacccagccatcccagtactgggtatatacccaaaggattataaatcatgctgctataaagacacatgcacacgtatgtttactgcggcactattcacaatagcaaagacttggaaccaacccaaatgcccaacaatggtagactggattaagaaaatgtggcacgtatttgtctttctatgcttggcttatttcacttacattaatgtccaccaggttcatctacgttgcctcaaatgacagaatttccttcttttttaaggctgaagagcattccattgtgtataaaacattttctttttccattcatccattgatgaaaactaaggttgatttaattacttggctattttgactagtgctgcaatgaacatgagcatcgtgatttggcacagtcatttcaattttatttttggatatataaccagaaatgagattacccgattatatgtaattctatttttagaatttttgagaaatctgcatgccattttctgtagtggctatattaatatacattttcatcaatagtgtacaatagttttctccatatccttgccaatacttatatttcatctttttgataatggctactctataacagctatgaggtgatagaccactgtgtttttaatttgcatttccttgatgattagtgatgttgaacattttttcatgagcctgttggctatttgtacatcttcttttgattaatgtctgctcaggttcattgcccatctttaagtgggttgtttgttttctggctattgagttgtttgaattc

SEQ ID NO: 196902 - DNA, 1000 bp, Homo Sapiens
ataataagactcaaaccccagtcttctggtcataactgaggagccccaatacagattatagcatgtttctgaatgtcatccctttagagaaagtgctttctatttaagtctgcttagaaaaatcaatttgaagtctcgcttaggcaaaatgacacttctttgggaaggggaattgcataattctagagcatgactgagatgctttacctttttagggcctgttccctagggaacatttgtgaggaggagggctctccggaataacttgtaacaagtgacactcgaagcttccaaaagcatccagagttgggggcatcaaggcaggtgcatgatgggaagatggtagatccagcagcgagtctggttgggagatgtggcaacacagcattcaacagcctcagggcaggtgcaggtggtgccataaccccagacattgcagtagggattcaagagcattactcttattttgagacaagttttacaggtgtgatttgggatgtcatccctgaaaaaggactgaatagtatcaataagtgacatttaatcttcaggtaaaaggaataggagagccagaaccaaacctgagcatgtttaagggcctgaatttcaggatgaagcagaaagattcatttatcgcattagaagccaggacaactgatgctgaggcacaaagtgttgagtttaaagccttggctgctactcaaagtgtagttctcagagaagcagaactgccgtctccaggagcttgtgagaaagagggagaaaggagcggggaccagatgtccttggtggttccttccagtggtgaccttgctctgcatgaattgggttggagtttacattagaaaataaggataggtaagtagtgggttcaatttttttagaggatgaagaatggagatgttaaaagcaataaaagaaagcagagaatatttgatgatgtattccatacagcaggctaggcctaagagatgagggggagtaaaggtcactagaattc

SEQ ID NO: 196903 - DNA, 1000 bp, Homo Sapiens
aactcatctcttctaaggctttttatcccagctgctgccttgaggaggttcttgctatttcagagaagagcaatcatgacaccaaacagtcattatcctgcccacttacctcaggacccacattgcctgggtggcagtggctccaaaacaaagaaatactgagagatttgtcaattctgagaaactaatttgacttatgttagccaagaaccaggttttcattttattgaacggaccttttccttcactaatcggctttccgtcttgtgaatgtggctggccaaagagggccagacatgggccctgcttggcttgcgattcatctagaggctttccgaaaacatcaggcacccccagcttcctgttgaagccgacaggctttcaacagcctctttgtggatgcctttccatatgaattatgtctgagcttgctctaggaaacattccaggtccactcttatttatgagggcattttcagcatgtgaggtgcttggtacattagccttaatcctcaggattcttcattcttcaaaaaacacagagccaggagcagtggctcatgcctctatcccagctacttgggaggctgaggtgggaggactgcttgaggccaagcgttcaagaccatcttgggcaacatagcgagacactaactctaaaaaagaaatttaaaaaaatagatagatagatagatagatagatagatagatagatagatagatagatagacagacagacagacagatagagagaatgtgcatttatggtccaggggtcaaatttggtacaaagacatgagtttattttcctttgtttatccccaaacgtttttattattaaattatttatacagcaaagttgaaagaattttacagtgaaccctcctagcccccattcaaccactaacattttactatacttggcttatcacatatacttggcttatccatctacccctccctctagccatccatcaatctttattttttgatacatttt

SEQ ID NO: 196904 - DNA, 1000 bp, Homo Sapiens
tcttgaacaggagaatggatataagaattgtggtgtattctgaatctatagtatcatactaacatgaaaatgaaaaactgcagctacccacagaaatatgctggatttcacaaatctgaggctgaggacgaagaaggtatgtaagcaaaacattattaaatttaaaaacaggactgggcgtggtggctcaaacctataatctcaacatttttgaaggctgaagtgggaggatcacttgagcctccaggagttcaagaccagcctgggaaaaatggcaagaccctgtctctacaaaaaaaatgaaaaaaataaaaattagtttggtatggtggtgtgcacctgtccagctactcaggaggcagagatgggagaatcacttgagccagggagttccaggccacagtgagctatgatcataccagttcactgcagcctggacaacaaagccagattcttgaaagataaaaataaaaacaggttaaataaactctaatattggaagtaagagcattggtttctcttgagataagatagagcttttggcaagattggttgagataagggctattctgggtactagtaagatcctatttcttaatctgggtagtagttatataggaattcacttcctggtaattcattgagccaaacatttatgcacttttttgcatgtggattgtacttcaaatttcaaagtaacaggcgagttttttgacagttgtcacctctgaggaagaaaaaagtaatgaaaggtgaaataagtggaatttccaggatttgatctgtatatatctgttctgtttgaactttgtatgcttattagtgtaataagaagtgcattattagtgtaattttcaaaaaataaatttaaggcattaaaagtacagtaaagatgtaccttcatactatttgtacttatttacctctaagttattctctttttaagttgagtctaggatggcattcatcattattttaaattgagtctgtcctggaattc

SEQ ID NO: 196905 - DNA, 1000 bp, Homo Sapiens
tgagccactgtgcctggcctatttttagtttctcgaggaacgtccacactgttttccataatgactgctaatttatatggctacaaacagggcataagagttctcctttctcactgggcgcggtggctcacacctataatcgcagcactttgggaggccaaggtgggtggatcacgaggtcaggagatcgagaccatcctggctaacacggtgaaaacccgtctctactaaaaatacaaaaaaattagccgggcacggtggcgggcgcctgtagtcccagctactcgggaggctgaggcaggaggatggcgtgacctgggaggcggagcctgcagtgagccgagatcggaccactgcactccagcctgggcaacagagagagactccatctcaaaaaaaaaagagttctcctttctccacctccctacaagcatttgttgggtatttttttgtttttgttttttgtttttaataatagcctttccaactggggtaagagaacttattgtggttttgatttgtatttctctgatgattagtaatgttgaacatcttttcatatacctgtgggccatttgtatatcttcttgaatgagagatatcagttcagctcatttgcctatttttcatttatttatttttttctgttgagttgtttgcattccttgagttccttgtatactctggatattaatccctggctggataaatagcttgcaaatattttctaacattctgtaagtcgtctcttcactctgttgattgttttctttgctgtgcagaagctttttcatttgacagaattccatttgtctgtttttgcctttattgcctatacttatgaggtcttttccataaaaatctttgaccaggcaatgtcctgaagcatttctcctgtctttatagtttttggtcttacatttaaatctttttttgttttttgtttttttttcttttttttgagatggagtttcaaagagtttcactcttgttgcccagg

SEQ ID NO: 196906 - DNA, 1000 bp, Homo Sapiens
ttgctgttcttattgtaatcatcattttaataaacggcagtatagactgggtgaccaaaggtgaagagtcattgaggctaattaggaaattatattgggaactaaatgtgagaaatactgagaaaagaattgataggatttaggagttgattagatttgagtcagggtgaatggataattcctgtaggaaagttgtgggtttagggtagggattggtaattatacccggagtttgagctagtgattatttcagcaggcagttggaaatacagagttcgagtttgcaagaaaagtcagaatataattagtcacacaaaatcctggaagaaattagaaaaaaagcaatttcttcctctaatgttattgtggactttttttttttaggtgcttgtggcagaatattgtggattttttgaacccatttttggttatttttattcataggcatttatatgtattcatatattaggtatcaatagaggaattgttgaaggacttgccttagctctgcctcttaataactggatgaccttggacaagttttctaatttctttatgccttagtagttttataaaattgaggtgataatggcacctattttcatagggtaataataagaaatagaagacttatggctgggcgtggtggctcacgcctgtaatctcagtactttgggaggccaaggcaggcggatcagttggggtcaggagtttgagaccagcctgaccaacttggcaaaaccccatttctactaaaaatgtaaaaattagccaggtgtcctggtgggcacctgtaatcccagctactctggaggctggggcaggggtggctgaacctgggaggcagaggttgcagtgagtcgagatcacgccactgcactccagcctgggtgacagcgagatttcatctccaaaaaaaaaaaaagaagaaatagaagacttaatattgtatgtgctaacagttgagcgtagcatacagtaagtctcagtgaagatgatc

SEQ ID NO: 196907 - DNA, 1000 bp, Homo Sapiens
ggtgtgtagaatttgcatttgcattgctgtggatagaactgcgtccccccaaaatttatatgttgaagccctaactcccagtgtggctatatttggagaaaggaagtaattaaggttaaatgaggttataagggtggagccctgatcccacagaattagtatccttatatgaagagacaccagagagcttgtgatgtatagacagagcaagaaagtggccgtcttcaagccaggaagagagccctcaccaaaaactcagtcagctagtttgatcactttggtcttggatcattgagcctccagaatggcaagataatttctgttgtttaagccccgcagtctgtggtattctgttatggcagctcaagctgactaagacacacaagcaacgtaatggaagaacaagtttttttggaggggaattataatgaattcagtttggatgcacagaaactagggttactatggaatatccatgtaagctcagaaaggaggattaagttgaaaatataaatcttagaataatcagctatgtcatagaattgtccaggaaaacccttagatttagaggaaaatggacaaaaaaaattggtgggcatcaacattttaaaagattaaaagagaaaaaactaagttatagaagacagtgttgaagatccatacctttggtttaattaagtgaatgggaccctttttgatgacaattatgtactaaggaagcagcagcatcttgtgcttcaaattgggctgagcctgcccagccccacagatatgagcaacacagtataggatggtaaggggaattctctacttctgcttctcacatttactcctgaatatcccatccctaatattcacaccttccattgtaataagtgatctagccgttttctttcccaaacagacccatttcttcaataaaaacttcattcagtggcatttaagagaaaaacaagttgaaccaaatccccttacacatgagtgactaaatatgtttctt

SEQ ID NO: 196908 - DNA, 1000 bp, Homo Sapiens
ctgcttgcctcaaggcgagtggggatgccaagccagcatccccatttgcagagctggcatctattcccattgaagtaggtactttcccaagcaaaccctcaggagcagggcaaacatgttctcagagataccccacaaggtagctgtccctttgggatttccctgctttaccagagatgtctgcctgggatgggataatggaggtggtaatggtacatccttccagaaatgtcttatctggatacaaacagttaattctcaggatagaggaaagccctgggggatggtgttgccctagattcaagtgggaagctttgttcctaggccaaggcagagcaggacttgcagggccctgagacagcccagcaccacccatacaccatagtgggagaacataccttcattccaagtcaccaagcgtgcatgcaggaccttctatgtgcctggtcctgtgtgtacactaggtctatagagaagaatacctgtcctcagggaggtcccagaggcagcaacaataatagaaagtaacccccaaatggcaataaagcttgctaactatagggagagagaaaactacagggagagagaaaactgcaggatgcttcaatggtcatcttcaatgacccagaagatggtgggatggagagagaggagctggtcaagaaaacctcagaggaagaactctgttagtactgaatgggtaagaacgtatgattgagttatcagagttatcagttatctgagctagcaaatggaggatttcaggaagaggtaaatgattaggtagaaatggctgtgacatgtccaaagtgctgtgagtcgctggagcatataggtggagtggggaaggtggcaggaggcaagcctagagaaggaaacaggaagatgctcactgacagccctgcgggtccagctgtgaagtttctactttgctctgtaatcctcctgggatccccaggaggattctcagcagggagtggcatcaccaaatttggaattc

SEQ ID NO: 196909 - DNA, 1000 bp, Homo Sapiens
tctttcctcctccagagcctctagatcaatgcttagcgccagatttccacagctccactgcatcaataacttcaaaaacaaagatcataaaataaagaaattcaacactgctaatttaaagcagtaagactctgagaaatgtctatgaaaccctatacagtttgtgttagataaatacagggaggtaattttaaattatactaaatatattgatataaatgaactgaagagagatttttttttcagtcaatatgctagttcaagcagctataaatggtgtaactgggttttttttagatttatgttttgattagtgtgcctataaccttcattcagtaatgcctatggtaaatgaagttaagatctcagaaatccttcagtttgatatagcaaaataatctaaatatttatgacaatggtgtaaaattaaacaggttctttagacctgctcagttactatctaaatgcattccagaagaagacatagaacatggtttatttatccaaggtattttggaaaaaaaaatcttttgaagagagattcagcatatttgaaaaatgctatagtgtttttctctctgcaatttgagaatgacagtggaatatgctgcctttgaagtgaaattattgattttcttggtagtgttgacactctagtgtgacaaaagccaggtagcaacatgtcaactgcaaaggaaagttgtcattaagggtaaggtaagtaatgagagtgatgtgatcagcagggatgtttttgtcatgactaattgaaattgtgggttttaaaaaccaaaagcgatgaacaacccattaagtcctgttctgtctatatagcagaaaaacaaacaaacaagaaaatcaactataaaactggtgaatgaaggccagacatgagacacaatgagagtcatgctctttcacctaattctaagacttggtagcattagacacattgacactatgcctctatcggcatcatgtttaccttgtgtaagaattc

SEQ ID NO: 196910 - DNA, 1000 bp, Homo Sapiens
atggtggccctgtgcaatgatctgttcctcaccaagagtgtggttcaaaccaaggtgagattaggtggtcatggaaatttgggagttgtggtcttctaaaaaaattgatcaatccttctgataaaatctttgggagtctaggatttagatatccttacactgttcctggtgtgtttggggagggcctaacactaagctgactagtgttctcccccgaagcacgtcttctgaggaacctatctatagaaaagaacctgggttattcagtctatgagactgctggtacccatcttctgaggaggcgtttttagagggtagtggagacagggggcactatttgcaaggaactgaaatggttttctccaggctgagggtgaagcaggatatctggagaataaaaactatgcataggtgaaggaaagtaatgctgcatgaattttgcaagctgcagagaggtaggaatattttcatggggctttccaaaaggaaaggaacagggccgccgataacctttggttgagactctcagttactgaagtctctcagcttagacagcagatgtggctgcgatcagtggcctcatcttgagagtagaaagtagaaagagtagaaagttctactcatcttgagagtagaaagagacatgaccaagtcagatggtggaagcactgggtacaaagagagcaagcaggccctgggatgactgcatgtggtgaattagagcacttaccccaggagccgagagggagaactgggtgttgaatttcctgctaatgtgtatatgtgccagctaggctataatttgttcttttttggggggacagtgtcttactctgtcacccagactaaagtgcagtggcacaaagatggctcactgcagcctcaatctcttgggctcaagcgatcctcccatttcagcctcccgagtagctaggactacaggcacaaaccatcacgcttggctaatttttttaaaactttttgtagagatggggccttg

SEQ ID NO: 196911 - DNA, 1000 bp, Homo Sapiens
cctcccgcctcggcctcccaaagtgctgggattccaggcattagccaccgtgcccaggctggtctcaccttaaaagcaaccgcccagatgaagaaaagcattgctttcttcagttccttatagttgaaacagtatgacagtaggataaacaatggagatgttaaactacgttttccagagcagacctgatttcaaataccctgagccattgtcatacctcatgtcaggcagttgatttgcttattcagaaaacgtccaaactatcaatggagactaaatggaggagaagttacccaagcaccccaagaataagatgcgcctcgagaccatcttagtgctcactcgtgcccctcccaacacggttcctttaacgttggtccttgatgaatatttgttgactgaataaatgagtgggggatggccaggtgcggtggctcacgcctgtaattccagcactttgggaggccgaggcgggtggatcacctgaggtcagaagttcaagaccagcctggccaacatgatgaaaccccatctctactaaaaatacaaaaaattaactgggtgcggtggtgggctcctgtagtcccagctactcaggaggctgaggcaggagaatcgcttgaacccaggaggtggaggttgcagtgagctgagatcgtgccactgcactccagtttgggcaacaaaagtgaaactccatctcaaaaaaaaaaaagagtgggggatggacaggttttagagacataacagcccctggtaagcagagtgacccaaaaggggaagcaggggcaagttcggcaagttagagtgagagtaatttttgacctaacgcaggtggggaagaaaatgaaaacctgaataggtttgaatttgatcatatcgtgctggctgtgacaaccctaaatgatttacaaatggctcattaaaaaaaaaaaaaaaaaaaaaaagtgtatcatccgaatcctcaacaagaaaaaaaaggagcaagaaaaaagaattc

SEQ ID NO: 196912 - DNA, 1000 bp, Homo Sapiens
ctgtcgctgcaggcataaaccttgcaatcatccccacttcccaaatacaaaaatgtttgcagaggcacttgtttctcccccaaatcacatttcctgtgcataaactcatgtgacaatttaacctttcaactctcataagatgaccatttgtcactaagacagaaagttcttgctttcatttcataggagttattgcatctaggatagcaagcaaaagacagagccaaacaaagaagcagataccagcagccagctgggcacacgcccccccattaagtgatttcctcctgtacactggccacccagggcatgaatttaaaatgtatgcctccacaaaagtaccactgtaccacaccatgaacatggctgacgctgagattgttgactgctcaaatgccagggattccctggtcttggccttcccatgctgtgctctccgcccagggttgcctttcttctccttgattatggaactattgcctcataaaccctcaggacccaccttgggtcaccccattaggcccctttgtggtattctcattataccatgtgtctcctgtctgacatgtatatcatgtggcagtttttatttacttgttgctttcctttccattggatggcgatagcaagctcctggagcagggggactttgtgtttcatttcagattctccaacacctggaacaatgcctgtgacacataatatagcaactcaaccaatactttgaaggagtggaagaagagaaaaggagggaaaggaaagaatgaacagtctggttctccaaatgggtccattcctaggagattcataggaaataacagaaaaagctttttacctaaaatggtagcacatgacactacattaataacacagagaaggctgacattataaaacaaaacagagcaaaatgataacacatctgcaccagaaagaacaaaagttagtacctgtaatttactgaagtcatggatatgtgccatatgttaagactgcagaattc

SEQ ID NO: 196913 - DNA, 1000 bp, Homo Sapiens
gagttcatgtaaatgaaaccagacaatatgtacgtttttgtgtctggcttctttgagcattgtggttttgagatttatccaagttgttgagcgtatcagtagtttgcccctctttctcactgattagtattctattatatagacctactgcaatttgttgatccattcactagttgatggacacttgggctgtttccaggttggggctattatgaataaagcggctatgaacattcacgtgcgatgtttacatgaacatatatttttatttctttgggacagatatctatggctggaattgctagtctacatggcaattgtgtgctttgcttataagaatctgccagtctggtttccaaagtgattttacaagtttacatcctcaccatcaatgcatgagaattctagttgctcacattcttgtcaaaaattgatactgtcagccttttttatttttagccaatctaatagataggtagtactgtgtcctcctaggtttagtttgcatctccatgatggctaatgatgttgagcctcttttacatacttattgtctattgctataccatcttttgtgaaaagccgtattctgcatacagttcctttgttagatacatacattgcaaatattttttctctcaatttgtggcttgccttttcattttcttttgtccatcaaagatagaagttttaaatgtgatgaaatataatttatcaatttgtttttgtttttaatatcctattcaagaaaatttgcttagcccaagcttgcaaaaatttttaactatgttttcttttataagctttgttgttctatagttttcgtatgggttttctcctttattctgttaatgtgctgaactatattgattgattttcaaatgctaaacagtccttcggtgttgcattccagggataagctccgcttggtcaggaggtattttattaataggtactgctggattcaatatgacactcttttgttaaggaatttttaaaa

SEQ ID NO: 196914 - DNA, 1000 bp, Homo Sapiens
cctgcagggtggggtcctaaaagagacctgggcaggttatggagggtgcagagctggggtcaaatgagggcgtggactcgaaggctgagctgagccagagctgtctggggtgaagggcagcttctctctccgcctgtccctgcaggctgggattcacacccacatttttaagacccaggcatgtgcttgaagcttgttgccagttcctggcactaggaaccggtgtcaagggaccctcggaggggtggtgatagaaggatgaaagagcctgttgattgcgcatgactttattaagcccctgccacgtgctcagctctgtgttgccggggctcccacggagcagccagggtcctgtgaccctgtcatggaaggctgagttctggaaagtccatgggggaaccaggaagcagcaggcctgaccagcagcgggtctggggagcagagaggggtcaggagctgtgggattcctcccttgctttgcagagggacgtactaggaggcccatggtgggtcggaattttctgtgatagtggggatgccaagagggaaggccccagagcacccaaaccctccatcttccaggctgcgctgtagatgggtttggggcagcactgggaatccaagacccaacccaggcagctgctgcctctggaaagcgggctggaggaagtgctgagtgaggaggctgggcgagctggcacagaaagtgctgactctgcagggagaggaccaccgagtgaccactgccagctgggccccgtgcctacccctcccctgcagccacatctggcgcaacggtggggtgggggacccagtccccagggccgaggtagccgaggagggggcctgaggagggggccagagccatgggtttggaagtgtttcttcagggctggaactccactccggaagtgggggaggtgaggtcagagccttttcgagggactaatggggttgggggtggaaggaacccacccttctctaggacccaggagaattc

SEQ ID NO: 196915 - DNA, 1000 bp, Homo Sapiens
cccaaagaaaataaggaatactatagaaaatgttgtgtggttactcactaaaataattttattcttcttttaaaaatataattcagagattggataattctcaacactaaatttcattcaaatgtggttattaccaagttccctttttatccttataaaaatagtttttctcctttattttcatagtgttatgtaaaaatttttacaggcataagagatcatcttatttttgcactatagaatgcaagctgtccacacaaatttgtaatgtgatagagtttatgctaattttgctataagtttcatggatatattggaggcttgttaataattaaaaaattttacttcttcaagttacaaataagtattacagtaaatactttccaatctttatctgacatgacatcttaccaatacaggcatcacaaaataaataatttatgaaaaatatttatttaaagagctgtaatttaccttgcatttaccatatgccattcatccaagtagcaatataaaatattcattagagaaactcattaaaacaaacttctatacaatgaggtgatggtccaacaaaaaacatcaatcatagcaaggctttaagtttttattagtgcatatgggcacactaatatttcaaagtagaaaattatgaatattttgctctgcctctgaaatgaccaggctgatacaaagacaaattttataagagtgtaacaaagacaggaactggtttttcttcatttgttttcattttagtcaagaaatcagtgacagttcactgagatttattttattaatgatgaatcaacctgatgttataattaatgggaaatctatagctaatcttggaggaaaaataactatgcatataatgatgtttaaacctggcataacagaactctgagctgctgtctcttgactatgtgagtggtaggcagagcatttgctgtgaattccagcgacaccctaatgcactttgaggcccatgagagaattc

SEQ ID NO: 196916 - DNA, 1000 bp, Homo Sapiens
aaacctgcaccacaagaaaaggtatggaatttattcgtgaaaaaggaaaatgataccagatggaaataaatctacacaaagtaaggaagggtactggaaatggtaaatatgtgggcaaatagaaaatatatttattaataagaagtctttgccctgcagcctggccatgagtctgtttgcctccatgtggcagatgggacggattcactgctaaatttgtgggaagactgggtgctgggcaccatcaggaggagactcgccagcagccctccttgggttctgagagtttgtcttggattgaaaaggaacagtggccttggttgtagatgcaactagaacgctacaaactattcatgctggatgatctgctgtgtgctcccaacttctccaagaacattttaatctaaaaccactacctgaagtaatgggagtatcagtagccatgatgctgccatttggaggaacaggagtaggctctaggcaccatgtggaggtaggtcccactgtgcctggtccttgttgtgtgcccccttctatttaattttcgcacacagtgttctccctgtgtcacagatgacaaactcaaagattaaagaactactaaaaaaagcaagacgcagaagagtgtatgtaatatattacctctcatgtaagaaagaaagggaaatgagaaaaaacatgatattcacacacatacatatttgcttatttttgcaaatagaaacatggaagctaatgaaaatggttacctaggaggggtagacaggagtgtgttaaagagaatatgaatagcaagattcccaccccctttttaatagctttgagttttgatctgtataaatgtcttacatatttaaaaataacatttaaaataaaaagaaatagaaaaaaaaaggaaaaattgaaactgaacataaactaggccaggtgtggtggctcatgcttgtaatcccagtactgcgggaggccaaggtgggaggatctcttgaggctagaattc

SEQ ID NO: 196917 - DNA, 1000 bp, Homo Sapiens
ctaacaaagaaataaaatattttaagtaacttaactgtgtcccagaacaaagttcaaaaagacagaagctcgtgcgaaacttagttcccagcaaagtaaaatgtatcagtaaaaatgactagatatccacagaagcagaaaaaaaaaaattagaacccatagcaagagaaaagttcaaccaatagaaacataccccaaaattatacagatgataaaattagtggataaggagattgaaacagttattgtgaatatatgtcttttttttttttttttttttgagatggagtcttgctgtgtcacccaggctggagtgcagtggcctgatctgggcttaccgaaagctcctcctccccaggttcatgccattctcctgcctcagcctcccaagtaactgggactacaggcgcctgccactatgcccatctgattttttttttttttttgtattcttagtagagacggggtttcaccgtgttacccagaatggtctcgatctcctgacctcatgatctgcccgcctcagcctcccaaagtgctgggattacaggtgtgagccactgcacccggccaaatatatttcatatgtttaagaaagcagagaaaattatgaacatgttaaggagatacattaatgatataaaagattcaaatagaaattctacacatacataaaatatacagtgactaagatgaatgatatacaggatggaattaagtatttagacaccataaggagaagattaatgaatgtaaaaatacaacagtatagactatcaaaaatgaaacacaaagagaagtagagactgaaacacaaacaaaaatacaagccattagtgaaatgtgggacaactgcaagcaggctctcaaaaatgtaattgtagttcccaaagagactgtgaaggagaccagaaaatttgtttaaatacatagggggccacaatttctcaaaattcgatgaaaagtaaaaatccacagatccaagaaattcaatgaattc

SEQ ID NO: 196918 - DNA, 1000 bp, Homo Sapiens
agatacagttcaaacattgcagggggtggtggtgttccagataacaattagttcatttaattcttctaataatcctacacagtaagatctatctaatcctccttttcagttgaggaaattgagacagagaagtaaggtaactcgataaaaatctgatatctagaagtgcagggccaggattcatattatttatagagtccagactgttaagtgttatatacttctctgcctctacagcaagcaaccagtgaaggttagttcctgtccctgccctatttgattatggggtctatctgactgggattttcagttgcaaaagtaacaaattcaggtgttcccgtggtttgctatctattttgttttgttttaaactacagcctgctcctctgaaatccaattctggataagtttgttgatcaagaacttccctctcatcttgtcctcctgctatctatctcctctcccatgatctaccaggaaaagagtcacacgtagctgtgtaaaaacaaaaaatgaaaaagacaagcacagagaaagagagagccccagggactgagcacacatgcccttaggaaccaggtcaaaggacatctcgtaccccttctagtaatccataaaaacgactgcctacacataagggtgcccacagcagaagccacctatccacacacagcccaaacacataaagtctcagctccccaaagaccaagttagcagaaagcgaatgaagccacctcctccggtggccaaaaacctcatcatagagttgtccttttttctcctttataagactgcatttgccctactgccaaccacgaacaaaatttcattaccaaaataaatcacttgaccttgtttctccaatggctcaggattagtgacatcacaaagcactctacaaatgctctgaaatattggaataaccataaccctttcaagtaaaaaacactcggtatttcactaaaagactaaaccgtttttattttactgcatggaattc

SEQ ID NO: 196919 - DNA, 1000 bp, Homo Sapiens
gcatactcaagtcctgcagtcggccctgtggagaccacacatatgaaaagttagctcctcatatatgctggccattatgtgtttggttgaataaaagctaggtataagtaggcctgagcaattcaaacccactgttcgggagtcaactgcattaacatacacagctctcaaaacgctgcgtactgaaaacaagcaatttgcaaaaatatgaatatgctatttatactttaaaaaaaatcacacgttcaatgaagatatgttatagaactttatagcttcatctatcagggtctattcttttctcataaaggaggatctacatatgcattcttcaagtaattaaaaataattaaaattacaaaaaagtagacaattacttaaacaggccattcacaaaagaattacaactgaccaaaaagcatataaaaagatgtttacaaactagtatccaaataaatgcagacttaaaatgcaggccaggcatggtggctcacacctgtaatgccagcactttgggaggccaaggcaggtgaatcacctgaggtcaggaattcgagaccagcctggccaacaaggtgaaaccccgtctctactaaaaatacaaaaattagcctggcatggtggtgggcacctgtaatcccagctacttgggaggctgcggctgaggcacctgaggctggcacttgaatccaggtggcagaagttgcagtgagccaagatcgcgccactgcactccagcctgggtgagaacagtgaaactctgcctcagaaaaacaatagaaacaaaaaacaaacaaaaaaacaggctgagttatcccttaaccaaaatgcacgggaccagaagtgtttcagagttcaaatgttttcacgttttggaatattcacagaaatacactggttaagcacccctacatgaaatctgaaatctgaaatgctccaatggagcatttcctttaagcgtcatgacgcactcaaaaggatttcagagcattttgaattc

SEQ ID NO: 196920 - DNA, 1000 bp, Homo Sapiens
ctgtccacgaaccaggttcctccaaggcaccaaggcaggcttagggagggtgtttgaaccaaagggttaaggccacatatttaatttagagctgaatggatcctagaccttaccatatccacgcgtgcacaaaacccactaggaggagaaattagaaagcccacggaaaagtattacagactttttttccggtttttgtgaaacctggtgagcaatgccattcgtgtttttaagtaaggctgtccacagcattaaatattacaattaagattcgttcattcaagtaagctaaatggatttaatgttgtggtagttggttaaaaacaagtcaagataaattgctaccttcagtggttgagaagatgtcagatattttatcttgaagtagaacgtttacttttgtttgattccaaatgtatctttatcccaaggaacacagtaaatttaaaatgtctctgggagacgttcagtgtgtaattcacgttatttctgtcattactgtgttctctgtcctcatgcacagtgcatgctgccttatccgggcagacgttgcagaaacatttgttgaaatgaattcaacattatttattttgctaccggaagactgagtcccgccacatattcccacctggcccttcattccaaacagtggggatgggaaccccaatttcacattccaactgaacgttaagttggcacacacactactgcacatatcccaagttttgtgccaggatctgcccctgagaaacgtccataattctgctccgtgagccacaagggtgtacctgaagttgccaactcccgaagcaaactgaaaattcaggcccgtgtcggtcccaggagcggtttaaattccacaatcgtccggtccctacacccgggtgagtgcgcagccggccggcggcaccttcagccgcagagcagccccggcctgcacctccaccagcgccggcgcgacctcgcggtggggcgggggcgtccccgagtcccagcgccg

SEQ ID NO: 196921 - DNA, 1000 bp, Homo Sapiens
attgatttggtaagaatctatcacacttccagaactttaaacactacctatagccattctaggaaggctgaggaggaaataaaaaactagaaatgtgaatttaatatattccttattttgtttatatttagaaacacctgcactcaattctatgaacattgctggcaatatactgttatgcttgataaaaagatagtgaggggcaggttggtgcacacttttgtttttcaattgctgcaatttatacgagtcccaaaagagaagattatgtattctatacaataaagtgaggtttaagcatcaactcttaagtgttgccagaaaaaagagtcatgtttcaaaatcttctcatagcttgaaacctcaacatttttctgccagagataaaattatgttgcacctcactctactttcaatatttagattgagttcagtactgttttcataatgtatatatgcagttatggaatttgacactcttatccacttttctctagttttacaggtagtacatattaatatttataaccactgtaatctgaggtcagctttggatattttttaccataaaaggtaaattttggaaattatatcaaatatctttgcaaagacacagataattcatttcttaagtagttttataaagacagctaatattactgggcacttattacatgttggttgatgttcagagtgcttttcatggattatttcctttaagcttcatgaaaccctcatgataataataatactattattatccccatattgcagaaaaaggaaatttaggcacagaaagattaagtaactttcccatgactacatatttaaggaacagcctaattaggatttaaacccaggcaatctggctgaagagctaaggactaggccatctggcatcttgctgcctaatagcaaggaattttcttattttcgaaaggacagatgacaaaatacacaatatacatctgttttactgcctggaacatggtaagaattc

SEQ ID NO: 196922 - DNA, 1000 bp, Homo Sapiens
taaaaacataaactacagatagattttaaaaaatatttacttttaccccacatttatttcaaaaatgatttgaaacagcaaaaaattagtctaagacaacattacttatcaagtgggtttttattaggtggaaagttggtacctcaaagctttggaaacttgctctatcaacaatcagatgcttgctgcaggtgagtcagtatatttcaatgttttcctttaataattaaactaaataattatacatatcattttcaaaatctcaaaatgtggctctacttgaagtcaatcttccaaaattacttatgattaaaatcaggtttctttgaagcaatgtcaaatttctatttataagcattttaaagcatttaatctaccatgaaagataaacattttatccattttatccattcaagttttattctttcagaatcatacctataaatttatatacctactatttttgttatagtgggcttgggcaaggagaggaaaagccaaccactataccaactgggatgaaggaaaaaagaatacttgagatcttatatttgttcattcggcaagcaattattaagcactcactatttgccagggaatgtttaagtcatgagatatagccaggaacaaaacaaggtccctatcttcatagaagacatcatttcctatgtaatggggtctaaaaggatcagagatgtcgaataacaaagatgcaactatgcatcaagaaatgccaacacatatcatttgtttctttgaattttatctttatttctccataagggcaatcagagaaatatgctttcctttttaacaagctcatctttaatgtggtagcaaagatggaaggtgcgagaccaaatcttaccaaactagctatttttacaggccaataaagcaacatgcaatccccctcaacaaatttaaataatcaggcaatactaagaatgtatattccattaaactaaaataaacaaggttgaaatgtggtacagaattc

SEQ ID NO: 196923 - DNA, 1000 bp, Homo Sapiens
tttaacagtccaaagagaaatctctcactagaaaatggctttgaaaccagtatgggtcatattttattataatttaatgttacattgattagaaatgaaggcattttcagggaattctatttatgttggtaataggtagatcaatggatggacaaagttctttaaaaatccttatggattattctcaaaaaagactcccagtgaaactatactgggtttgggggttaattttctcttctcatttgtgattatcacttcttgagagttttgcaactttcagaaagcatctttccttttggagtcatcctggttctttctgaagttttgaaacctaccctccttccagcaagattcactctgaattttgcaaagccattccctccctgtaattctgcccgagctgcccctcccagggttccacacttctctcctgtgtcctcagccagtttatcctggtggaccaatatctggcccagcctggggagcagttcctgccaccccttctctcttctggagaacatagctatctagaggcaagtcaagaacttggatattcaggccaggtgaagtgcctcacgcctgtaattccaacactttggaaggaggccgagacctagagatcacttgaggtcaggagttctagaccaccctggccaacatgacgaaaccccgtattctactaaaaaaatacaaaaaattatctgggcatgatggcacacacctgtagtcccagctactcgggagtctgaagcaggagaatcgcttgaacccaggaggtggaggttgcagtgagctgagatcacaccactgcactccagcctgagcaacagagtgagactccatctcaagaaacaaaaacaaaaaaagaacttggataggcaagtaaggtatttgtgcagtgtctagagagctaaactcccctggtttcgtgcccattttgtgatttgcatctaaaattgaaccccagtgtagccactaccagctccaataacatgaattc

SEQ ID NO: 196924 - DNA, 1000 bp, Homo Sapiens
tgttcacctcagaccattttagaaaacaccacagattatttcaccttaggagcagtcacactgatgtggccctctttgatgtggctggcatataacagaagaaacgtatcatttttaagaaactggctccaaagacaatattgctattaaattgaagccaaaaaccactgcaggtaaaacatgatgaagatgaaggacgccctctcttagccatatagtagaagcccgatcatagactctcacccttacaccatgacttgagttcctgctcatttttatccctgagctctgcagacttctaagcagtggaagttttcattctctttcccacattgcactcaagagagctaacatgagagattctaaatcctgggattcctctgcatctggctttaagtacaggagcagaacacagggaatttaaggaacaaaaatagccagagcttcaggcttcttccactgatggtaagtcattgacatgcacttggatgaaatcctgtatctgttctttggactagcactatcgcctgagattatcagtttcagagagttacagagaggcagtagatttcatctttcctatttcaggaggagttattttggttgtttaaaaaaaaaaaaaacactttaatgtacttttcctaactccttcactcagatggtggcaagaagtttgacagaataaagtaattcagctaatatttatcaaatgcctactatgagtgagctgttagaatataaccctgaacaagacaagcatgagataggcaaacagactattaaaacctagactgataatgcattgattggggtgtacaggctccttaaggtagatatacaaaggacaactagtccacatttggccttagaggaagtgaagtgcaaggatgaatgggaattaagctggcaaaatgcaagggttataactggaagcaggggtgagcatggcatatccggtgacccagaagtagttcagaatgccagaagcttatggtacaaa

SEQ ID NO: 196925 - DNA, 1000 bp, Homo Sapiens
gcacgggttgccaggaagctcagagccaaattccaccttcacttctaacagctttggcagttgcatccttattactgctttactgcttctaatcctactggctcagccttgctttctctgccttttattaaagatgttcccctttttaatggtaagagataaatgctttaaataaatccacatttggaagagctgctgaagggacctggattccacaggcctcatgttaagccaggcacagttctgttctgatcttgtccattcacccaacagctgagggatccgtctcttggaaggaaggagggactggcttaagcccaaggaattgctcatccagctgctgacagtggctaagatcaaaatgccttgggtcagatcatcatcgccattttttgctctactgacaagcagcttgccttgctcctaccagctccctgggaggcccaaaccactatcccctacctgtgctccagaaaatctcccccattagtccctcctgttgaggcatggaaaggtggagaggtatgggaatagtggcgtgggagtgaggggcatccctagatcatgaggacagggaaggcatctctgaggaggtggcatttcagtgggggtcttgctagatacaaaggagccagctccaccaagagttgagtagcagaattcctgggaaggggacacagccagtgcaaaggccctgagcaggatggaattggcttgttctatgaagtggcagaaggctagtgtgcccagggtgcagtgtggcaagaaggacaagaagcagatgtggggagaagtgggtgggatctctgccagggttttccagtttggctttctttgaagtgcagtggaagccactggtaattttaagctggggagacccggaacttgatttgttttcatgagatcaccttggttgccatctggatgataaacatttactgagtcccagtgagtttgtaggcatgctcataaaccatctcattgaattatccctgaattc

SEQ ID NO: 196926 - DNA, 1000 bp, Homo Sapiens
catagatataatctaatttcatgagtgaagaaaccaaggcccagggagatttaagtcactcagtgttgaacactaatcagtgggttgagtaaaatctttaaaaacagaaatgaattaacatttatggtaggaattgtttgaatttcacaagtacttagtattatataactgctgtctaccactttgacatagagaactctttgaataccaaaacatttttcctaataattagtggcagccaataatattatcagacccccgagccaaccacatgctgacctaatacaagacctgaggatttttcactctgagtcttgttcccttgctgctacataacactacactgtgagttaaaatcagctaataaggattttaaaaatttaaccatgaagggaaatagtctagaagttatttaatcattcgttacaacccaagaagcaatatagctgagtagaaagggcacaggtctgggggagtggcagtgggaaataactttggttctcatttggtctctcatttgtatgacctggggcaaatctctcaatttctctctcttttcttactcatctgtaaaatgggcacaatttggattcttgtaaagtttgagtgagcttagatatacatagtgcctgccacataatacacatttgacaacaggtaactagaagtacttgatggaaagtatctgtaagtaaaccagtgtgtgccaagttgaggtaaatagatacgggatgagatgttttgcagtcattgccgggtcttagtttgtgactttgttataattctgtgctgtggcatagatgccatagccagatgtctcacttttcagtgtgacactgctaagaatctgaacacttctgcagggcagaaaccggtgcactaacaaactgtctccttgcccaacaaagtttgcctccagcagaggccttttcattttcctttttttttttcctctctcacaacagctgtttccctgtttttggaaccacatagtgaattc

SEQ ID NO: 196927 - DNA, 1000 bp, Homo Sapiens
cttagttcaggacactatgcccaaactatacccataccacagatgggtggcttataaacaacataaagttatttctcctagttttggaggttgataagtctaagagcaaggcactggcaaatcatgtgtctagtgaagccactcttcctggtttgcaaatggctgtcttctcacatcctcacatgatggagaacagagagaggaagcaagatctcatgcctctccctcttcagtaatggcattaatcccatgatgagggttagcctttacgagctaattacctccccaaggcccccacttcctaacacaatcacattgggagttaagatttcaacatattcattttggggtgatacaattattcaatccgtagcataacctttttcttaaggttatgccagatagtaaatattttaggccttttggtgcaagaagcaaaatagtagatattatgtaagtacttatataatcattttaatgtaatcatttttaaaagtgaaatacattttgtagctcacggggccataaataggcaggggactatacttggtctttagaaggtagtttgctgaaccctggtcaagatcagcagatggcaaactactgtccatggaccaaatccagccaagtgcttgtctttgtaaataaaattttattgacgcacaatcaaactccattgtttacacattgtctatggctgctttcctgctatgatgtagagttgagtagatgcaacagaaactatatgtcccacaagcctacgtgatttactatctggccttttggaagacaagtttgccaaccctggtctagataacagtgctggagcccccttctcctgtcctatggaaaggaccttactttctctaagttttctgcaatcttccaggggcttatattctcatggttctctccaaatccaagttcttctacttacaaatggattatttcaccacctcacatgtgttctccctgtcatgttacctcagaaggagaattc

SEQ ID NO: 196928 - DNA, 1000 bp, Homo Sapiens
atgccccctggtatcaaaggtagaatgctgcgtcaaatttaccatagatcagatgcgctacgacgcccccgccccccttaatccctttccatgtcgcagcaaaataatgggcgattgggggtaggggagcaacactagtttactagccgacactagtaaaaaaaggggaaaaaagacccgaataacaaggacctgcaaaggtcctacatcaccacgttcccacagcctttatccatccatctttcatccccaagaagacagtatgcaaggctaggatgggggtggggtagataaatgggtgttctcaggagaacctattcgtttaccccgtgcaactctccaccccagggatgaggcgatctgaatgcaacagggagagggaccaggtgacacgcacgcagtgccgggacattagtcaaaaagcgaggacctggggactgaggggtgggtggctgggcggggggagaaaggggagaaggaaagagaccagcacaccccccatacatacgcaaattgagagaatcagtccggctctggacacaaaccagtgaaggcaggccggagaacctgaagctctcagaggggagcaggtgtcaccgcaggcaagtccagccgaagtctgcgttccgcagcccacagaacgacaacttacccagagccgcctagagctggtttgcagcacgccaatctacgtaacctcaatctagcacgagcaacaggcagatttcgccatctttgttgtggtcaaggagtcttcttgggttcctgggttctttagtctcgaaatatataagacttttcgttcttcgctagtcttctgagctcgagatgaagcacagaaggctaaaacaatgagggacagcgttccagtagccctgccacagctctctcatcctctggtccgccctcactcaagatggctaccagcaagaatggtgcaatggcgtgacagctcggccctggttgccaaggagatgcgagtaccggaaatgcggaattc

SEQ ID NO: 196929 - DNA, 1000 bp, Homo Sapiens
tgtcaggaagttaccctataaggtctaaaaagaggaggaaccctcagttctgggaattgctctccccttgcctggaaaactcatgaatagtccacccattgtttagcaaataatcaagaaataaccataaaaatagccaaccagcagccctcagggctgttctgccaatggagtagccattctttattcctttactttccaaataaacttgctttcacttcatggactcgccctgaattcttttcttgcacgagatccaagaaccctctcttggggtctggattgggactcctttctggtaacagaatgacccattgagcactcattgagtgcctattgtgaacagcacactggtaatacaaacatcaataagactcctcccacccagtcctcaagaaacctgggtgagacagggaatcaacagccacagtactaatgacaacagctatatgatctgagttttaataaatagacttgctcttattcatcagtcactcataaaattcccatcatccttcatgccctctcccaccctccaggcccaagcccaactgattctttttttttttttctataagagtcattgacaagtatacccaagctaattctatgaaatttaaggttagggtccccaatttcagacaaggatctagtacagaaacagaaaggttaagtaacttgccctagatcacaaagccagtcggtggccaaaccagcttgtctgtctctagccctgtgttcctcctggccttgcctccatgaaatcttctacctaacccttcttcccactctcagagaccccagctcagcctgaccactgtcactcagcatctgagctactgtggctgccccagtcatgttactgaccccatcacttactcaaagttaacctttgggtcagtattatttcttctgtggtcaccagaaagatgttaccagaaagggggtccagatccagaccccaagagagggttcttggatcttgtgcaagaaagaattc

SEQ ID NO: 196930 - DNA, 1000 bp, Homo Sapiens
ggaggttgcagtgagctgagatcgcgccactgcactccagcccgggcgacagtgcgagaccccatatcaaaaaaaaaaaaaaaagaactattcccccaaaagctagagcactgttcagtttcacaggtgaaatctaccaccaaacctttaaggcacaagaaacaccaacaacatttaacttgttccacagcagattaaaaaaaaaaaaagtttaaaaattacttctaagataataaaaccaaacattagtaataaacaaccaacaaaagaaccatacaagccaggtatggtagttcacacctgtaatcccagcactttgagacactgagatgggaggataggttgaagacaggagttggagaccagcctgtgtaagcgagaccttgtctctacaaataatttaaagaaaaaatgagttgggaggctgaggcagaagaattgcttgagcccagatggtcaaggctgcagtgagctgagatcatgctactgcattccagcttgggcgacaaagtatgactgtatctcaatgaaaaacaaacaaaaaactatacagaccaattccacttatgagtactaatacataatacctaaagcatgttcattaaaatcagggagacaatatgagaatttctactatgatcactattatttagcattgctctgaaggcataagcagacatgagagaaaaattaagagacatagaaaagaagggctaaaataaaaaattttacatgtatttagctacaaattaatgcaataatcataaaatatcgataagattaaaaaagaactaaacatattgcttctaagttcacttagaaggaaaataagatgatcagaacaatgttttaaacagtgaaacctggactggtctttagagttaaagtaattaaaacattgtggctgtagcatatggagacacccacagaatgagacagaataaaagtccagaaatagacccaaatacatgaaagaatttagtgcataaaagcagaattc

SEQ ID NO: 196931 - DNA, 1000 bp, Homo Sapiens
cagctatttgagaggctgaagtaggaggattgcttgagcccaggaggttgaggctacagtgatagacagaagtttttttgtttgtttgtttgtttgttcttggtaggctggaatgcaatggcacgatctcagctcactgtagcctccacctcccgggttcaagcgattctcatgcctcagcctcccaagtagctgggactacaggcatgccccaacatgcctggctaattttgtatttttagtaaagacagggtttcaccatgttggccaggctagtctcgaactcccgaccccaagtgatccccctgccttggcctcccaaagtgctgggattataggcatgagccactgtgcccggcctacacagaagtcttgtgtagtactcctgggaagccttctgaaagagagatttacaatactggagagatgaaaaatgtaggtttccaggccccatcccaaacctgctgagaccacattatgcacagtatcccaatggcgaaggcagggtaagaccaagcccaggagaagggtcaggacaatgtgattccatttaatgcagcaaatattactgacagccctgactacatgccaggtgcctggacttccctcagctactcaggaggctaagtcttgaggatcacttgagcccagaagtttgaggctgcactgaaccatgatcacaccactgcaattcagcctgggtgacagagcaagatcttgtctttaaaataaaataaaataaaaatattattataatgaaagaatttaaataacacagtgttgtagaatatagaatacatggatatagatgacacaatgctgatggggatgacagttcatgaccatcaggcttgtactgggcaccctcctgtgttctctatacacagattctagtcgattaccttctcacaactgctccccccaccccgccttttctattttttagatgcagagattcagagagtctaagcaacttttctaaatcatctagctggaattc

SEQ ID NO: 196932 - DNA, 1000 bp, Homo Sapiens
agggcttcactgtgggacaagaacagaagggctgtcagggctcattctcaccaggccatgttgaactaagtggcccaggtccctgcatgctgtgggctaggccaggcttcctttaacgtgtagctgagaagagccagcactcactgctctaagtactttacctgcttatttaaaaaaattgttttttagaaatggggtcttactctgttgcctagtctggagtgcagtggtgcaatcatagctcactgcagccttgaattcttgggttccagctagcctcatgcctcagcctccccagtagctgggactacaggtgcatggcaccacacccaggtacgtaccatatatatatataaaatatatacacatatgtaatatgtatagtatatatatatgaaatgatatgtaatggatatcaatgtaaatacataaatataaatatataatttctatatagatgataatacatggtaataatacataatagcctacaatgcaattctccttctaagtctatgaggtaggtactattaacagcccctttttacagatgggtaaactgaggctcaaggcacagagccaggaggtgggagggctgggattcaaatccaacatagcctgactgttctcttttttgagatggagtctcactctgtcgcccaggctggagtgcagtgttgcgatctcggttcactgcaacctccgcctcctgggttcaagcaattctcctgtctcagcctcccgagtagttgggattacaggtgcacaccacaatgcccagctaatttttgtatttttaatagagacagggtttcaccatattggttaggctggtcttgaactcctgacctcaggtgatccatccacctcggcctcccaaaatgctgggattacagtcatgagccaccacgcccggcctggagtctgttcttaatcactgttagttttgctcaaaaaattttttattttacatgaaggagagggaaagtgtgctgaattc

SEQ ID NO: 196933 - DNA, 1000 bp, Homo Sapiens
cacccatcccaagagaccttccttctcccagggttgcctccttagcatccttcccaccattttccttttttcaaacagaaccctaatgttatttacaaaagccccactgcaaccccattcatggtgcccaagtgtctcaggaagccagccctatcctcaactgaagccaatcctagtaactctaatctccttgcaagtgattggtttcagaatttaggcttcagtgaatcagtgcatggcatgactcctagagactgctgttggatcagagatgggcaagtgatacagacgagcctaatcagactacttttgttcaaaggtaggaggaaagatttttcttttttttttttctttttttttgagacggagtctcactctgttgtccacgctggtgtgcaatggcgcgatctcggctcaccccaaactctgcctcccaggttcaagcgattctcctgcctcagcctcccaagtagctgggattacagacatgcaccaccacatctggctaatatttttgttttttttttttttttaaagtagagacacggtttcaccatgttggccaggctggtcttaaactcctgactttaggtggtccgcccacctcagtctcccaaagtgctaggattataggcgtgaaccaccacacctggcctataaagaattttctaatgaggaagcatgttgttccaagagctgatggcagtcaccagaaggaatcaacctgaagaaaacgcctctatctggaggatgagggagcacaaagaacagcaaagcaataaatccccagctccaattataatacttgctctacctttggcttttgttgttgttatttaaaataatactaatttttttttattgtttaagctggttatgtcaatgtccctgtcatttccagctaaaataatttctgccaataaaatacttaaatattttttctatgagttagtagaaattgcctcatggggctgggcatggtggctcacgcctggaattc

SEQ ID NO: 196934 - DNA, 1000 bp, Homo Sapiens
taaatattacctagatccttctccttcctttttatcccactactgctagcttgcatgacttctcactcaatcattgaaacagcctgttaaatatgcacctgcctagagactggtccccatccacaatctttttccccacattgtaatcaaatcgatccatgtcagtcaaaagactgaagtcacctacttcgttaaaaccattgacttccatgaaaataaaagccaagtttcctctcatacaagatgttccattatcctgccttgattaactctccaaagtcattcctggcctcgaattcctagactccaactttatagtctagaaataccaatctgcttgtatttcccagaatattgcatgctatttctcacctcttattgtggatatattatttattgaaaaggccttccagttactcctaaatcctattcatttaataagtctcggctcaagcagtctccccctctaaaaaatatttccaaatgagcaccacctctcatcccccgtaataatcaagacactaagcttactacagtaaaatgccctatttaatgtctgtctgtcccactagagtatgagttcctggaggaaaaggactctatactctttattcacctttggattcaccttacaatacctggcacatatgaggtatcccacaaatatttattgaattgatcaactagaattgaacagcaaaatgtcaaatgcttataattaataattgcatttaagcctacttcaaatttagaacatctaaactactacccccgaagtgcacaatcaacaattaaaccaacaattttattaggtatcatcaagtgagaatttatggtactaccagaagcatcaaatgaggttagattttagatgaggactctctaagaattgattctctgtaggaataggttactctattaagggaatttttttcttttgttatttgtaatgactggtatatctggaacaccaataatatgcagtgatttgctttacata

SEQ ID NO: 196935 - DNA, 1000 bp, Homo Sapiens
gtctctcaagctgcttgcttacttattatctacaattaatacatcttatgagtttctctcatgtctcataagctgtttgctcaataactgtctattcttaacacatttattttcccatttgttttgctagctttctaaaccagagctgaacattcccaaacaatatgggaaacatacattacattggcatttggcaatgatatggaagataaagaatcttaaaattatatttctttaataacccaagttaagaatgtacccaaatttttggaaagttacttagcttactgttacttttttatccttcttcctgaacttagtagtttatcagtgtttaatttactaaaaataatatgtgtttaatttattaagacaatggcatttgctcctaaataattaacttaatctaattatatcttgtattcctttcaagatttattgctagcatttgcatttgactttgtttctgcaggcatgacacacatttaaacctaatattataaatgttaacttattttaattacctgagcaaaaggacatcctctcttctcactaccattggatgctgagagcaattacttatgtgttgtcagtttggactaataatatttgagatagtgaacaactttttgaaagtgaattattcttaaaggggagcttctgtattttcagatgatagaattatctttcaggaaagttaaaaagtcaattaaaaaactaaatcataaattgatttaataatgtgccttttcagaataaatacactgacatctaatataagcagaaaatgaaatttcatttcatttagcaatagcatcaaatttagaaaatatttggaataaacagtaaataaacaagagattcaaattttcattcatgtataagacagcagaaacaattcagagatatggcaaggtctcaaaaaaatgtctatcagcctgaaaaagttacttagaaacataatttggccaaaataaagatagacaaaaactcagaattc

SEQ ID NO: 196936 - DNA, 1000 bp, Homo Sapiens
ctcctgtcttgggctcccaaagcactgggattacaggcatgaaccaccgtgcctggccagctttattattatttttagagtagttttagctccagagcagtttttagctttagattacgcccaaagtgagagttggctgaaatgcaggctatgtcagtttggagagatgatagggacctgggcaaggctgggggcacctctgtagatctggaattgtgctagacttggaacctaggggtcttggctgtggaaagctatttggcaagcagttccagggaggccaccctacttgtagtctgtttacaaaacaaagactgggatggagattatgagtaaagaggaatggaaaagtaacaggatcactaaacgcattgccagattcagaattttgtctagggatttcactgtttacaaatgcagacaacattacatgtctaccacgtggttggttagaggtcacagaatggtcttgtggactaaatttggtaagaattcagttatgtgttcccagtgatttaagaaagggaatatttaaacattaaaaaagtcaacatttaaaaattgagatctttcaaattaacatttgtgtttgtagtttgtcttgacaaggtgtaacacctggcagaacttgaccttcatccccatgtgacagtgactagcagagctgagtagcctctgacctcttcagacagggcatgaatgctcctcatttatgctatctggcttgtatcagggttgggatttaccaacctcaatgctaaatgctttacatatattaactaatttaattctcactcacaacccaacactgataacagtgttgtccttattttatacatgagcaaaatgacactcaaagatgttaaatgcctcaactaaagagttagaaagtagcagagttgtgatttgaattcgggcatgtcaaattctcaaatgccggtggttttttttttttttttttttttttttttgtatggtatactgcctttactatgaattc

SEQ ID NO: 196937 - DNA, 1000 bp, Homo Sapiens
gtggccaccctgtgctggtcatcccctcactgcccctgcactgcctgaggagcacgcagactggatccttccagaaacaaggagagtgttcaactccatgggatggagatacttaggccatgtcccagtgtgggctcgaggggaggctgggggcaagaggcttttcaaggtgaaatgtttcacctcatctgtgagtgggaaggggacccttaccttgagtgtcattcagaagggggtcaggtaggagtcagggccctgagttggccatggctatgctgctgacacatggcagccatagcaacttctttctatgcttgggccttcaggatccttgtcagcaaatgggataagagggtacatgctggcgatgcccacagcccctttcagctgctgtgtcctgtagccccacaaacagcaagcgcttgggaaagtaggggctacaggacaaattaacaagggaaagttgccaccagagccactctgttaagggggctgcgctgtttttgcctcctaaagtttcttctagaaataaagatccttttagaaacagcatcacaaaaggaaacaaaggggatgatgtgtctgtgcatagaaaaaagactggaagaaaacacagcgccatggaggccacaggagattccctcctggcagtgaagctaacgcctgcctgactttcctgatggaaacaccagggactgcgagactaagtgatgccaacagcaaggaacagctgtgtgaggctttggagaccaagaaagacatagaaggtgaggatcccacatagaaaggaaatgaactgagctgcgcctgcatccgagcgtttcctcctcagggcacttgtcagtttggggagcactgacacccaacagggtgggggcccagtgggctagtgataaaaatgtggagtccagggccacaggacagccaggacacgagggaaaaagattctggtcctctagccacctttcacacaacttcctctggaaacacttgtgaattc

SEQ ID NO: 196938 - DNA, 1000 bp, Homo Sapiens
gcagtaaacctatatttatcccattaattcttatcacaatttttaatccttttattctttttttattattatggtaaaaactatataacgtgagatctaccgtcttagcaaaattgtaaattaatagaaaattgaaaaacaaaacagcactttttctactctcacataaccactgaacacagcacttctgacaccagattctccagtggactccagctgtgtgtcctatcattcaattcttatactatctacctgagacagcacgaactccctcaggttaagggcttagtcccacgaaacttccccccacccctgccctatttcaccacttcagataccagtctcaaggcccaggttgtgacctgtacatctaactggctatcaattggggttcccatgtccccttccttgagtaagtttaatttgctagagtggctcacagaactcagggaaacactttacttatgttaaccaatttattataacagatattacacagggtttaaatgaagaaccagaaggaagagatgcatagggcgagatttggaagatgggacgagaagcttccatgactcctctgggcagacaacctttgaggttgtttagatgcctggaaactcttgaaccctgtccttctgaatttctatggcgacttcattacataggcatcactgattaaataattggccatagtgatcaactcaaccctcagctcctcaaccttcctaggtagtcaaggggtgaggctgaaaattccaaacctctaatcatggttgattcccctgccaaaaagtcctcccatcctgaagctatcttgcagtccccagccatcagttataccttagcgtccaaaaatacacttattatttgagagatttcaaagattttaggagctgtgtataagaaaccagggacaaagaccaaagatatatttcttattgtatcacaatatcccaagatatacactatgttattaactacaggtacaatgttgtacaag

SEQ ID NO: 196939 - DNA, 1000 bp, Homo Sapiens
gaagaaaatccttacaaatccccaaattgtcattttctatgtctaataatttaaagatcctgattgcatagaacataaaacaggcaattatagaagaagaaaggaagaaaagtcagaggtaaagaaccaactatattggtagtaggctggtggggtggacaaaaggaatattatgaattttcaatatcaatttgaagtgaaagcactgggggacaaggagcaagggtaataggtattttcttttttaaaaaataaactttagacaactatatttaacagagtttatttgagcacagaacaatttatgaattgggcagcactcagagcccaaagagattcagagagctgtaccccagctacatgagcagccagcttttataggctgaatgaggaagtaagtaaagaaattacttgattggctatagctaggcatttgcctttctttggtatattctggtggaaagtccctagtgagagggagagacttgttatttcatttgtccttaatgagctgccccgtgggatcacccagcattgctgggtgtctctttgcaatggcagccaggagtctctgcacatgggagatagccctgggagtgcttcttggtttctgttctagccttgctccaggtgcatagccctgctgcagctccttgaagaaaccatattctgcttcctggttaaagtgtagagccctgaaggccacactcataaagtgacatatcaaagggaccttaaaacatttttagtctacttctctgcccgatgtgtgaggcccttcagaaaatggcattttgcttcacagtgacataatatttactaccccagaggcagtccatttcattttggttctttttgatgaatagaatgttcaggttcattgagctgaaatccccatatcttctttagcagcatttctgccaagattctgtaatcagtttaacaagatcagtggccaccaattatgtgccataagatatctctctggtgaccagaattc

SEQ ID NO: 196940 - DNA, 1000 bp, Homo Sapiens
ttaatgaaaaatatgtaattcataatagcaacaaaactgtatcttcaaataaatctaacaaaatatctgtaatactttatggagaaaatagaacactactgaatgatgctaaagaagttctaaataaatggaaatatgtaccattttcatgaaaaggaagattcaatatgataaagatgtcaatttctccaaattgatttataattttgaggcttttgtggatcttgtcagactgattctaaaattcattagaaagaacaaaagctatgccagttttgaagaagagtctgggctactttgtactaccagataccaatgcttattataaacctaagattaaaataatgccatgttggtgtgaggatatacataaacctatatggaacagaatagaaatcctggaaaagaactgcatgcagatatgaaggtataatataggacattacaaattagtgagaacaggacaaactatttaagacattgtcatgaatcagctggttattcacatcaaaaagaaaattcttgtatcatacactaaagttttaattccagggatattaaagacataaatatgaaaaacaaagcttttaacatagtaggacattttaagagaaaacataggagatatatttttaatcttggtatggggtgaatttgttaagtaaagcactaaaaggcatatactatgaaaacaaagatcaataaaataaaaaccctctgtttatcaaagacactgtaatcaaagttgaaagaaaaattacagaatgggagaaagcatttacattacatgtaattaatatgatatttgttttctaaatatatgaagtagtcctctaaatataaaagaaaaagacaatccaatagcaaaatgagtaaagacatgaacaagctatttacagacagggctagtagctactgtattgggcagtgcagctctagaggaaatctatgtgcacaagaagttccatcatagaactacgtttggaaacacctaaatgtc

SEQ ID NO: 196941 - DNA, 1000 bp, Homo Sapiens
taccattataaaaacaaggcctggcatggcgctcatgtctgtaatcccatcactctggaagcctgaagtgaaaggatcacttgagccaggagttcgagaccagcctgggcaacaaagtgagaccgtgtctcaaaataataataataaaaattataaataaaaacaaaagaaaactaagtgcacctctagtctatggaaagcactgctctgcagcaaaggaaataaatctcatgtcctggttgagggaggaccctctaatactctagttggctgcttgggaacaaaggaagaaactggagttcatattggaaaataaggagagaaaagaaatcttaaatagcactaaatttagaaaaacagtcttttcaaaggcgaactgagggaactttcctaaagcaaactgggtcaattaggaaatatttcttggagaaatgccttaagatgcacacaacaacttaaactcaaaactacagaaagactaaagcaatgtcaattaacaaaacatttacttattttatacaatgcataaaagtgggacaaatagtatatcagagtttataagacagttcttatccatatagagacaatggtaatatcaaaaacagtacaactgtggcttagtagaccatcttgtatatcctttcatgccaggtaaccatttcactcgtgtgtcaggtccttttctcgctggaaattcactcttgaaattctagagaatgtgatgaagagttcaaaaatgggaatgaaacactggttgaggcctccttgctaatttgaaaactacttttggaatctgcaattatttcttaaaatagagatttaaaaatctctgtattcaaactagattttaatttgcctagtttaaacttgttttgaaacttctataaaaagccgcaagggaatgctctaaaaattatcaaaaggatacatttgccatagagcaatgctaggaggattaaacataaaattcacaatgatttgagtttatgaattggaattc

SEQ ID NO: 196942 - DNA, 1000 bp, Homo Sapiens
ataagccattttaaaacacttcaaatagacacagtgctctgtgacagccaaaatgacaaatcatacgaagacactacagggataataaattgaggcattaaatgaggtcaggaagagacaggaaaggagaataaatagttttgtagggcgaaaagtcagtgttttaaataatttttaataaaaattataaaaaatcctgcaggtaagaatgtttgttttgttttcttatacctcaagtagtaatttttaaaagagaattgcagacccctccggaaaacccgtaactccagtctaaccatgagaaaaaaaaaatcagacaaaccaagactgggggacattctacacagtaactgaccagtactagtcaaaatcgtaaagttcatcaaaatcaaggaaagtctgagaaactgtcacaacaaaaagaagcctatggagaaatgatgattcaaggtaatggcatcccagatgaaatcctggaatagaagaaaaaagtatgaagaaactaaagaaattcaaatgaagtatagacttcagttaacaataatatatccatattggttctttacgtaagatgaacgtaccacactaatgtaagatgttaacagtaggggaaattggatatgaggtcaacgagaagtctctgttctatatctgcaacttttccataaatctaaaattattctaaaataaaaatgttttttaattgctattttaagtgacagaaaacataactagaactggcttgaatgaaaataaatttattgattcatataatggaaactatctaaggggtggtctcactttcagcacagagagattgaggggattcaaagggcttccaggaaggtgtctctcctttgttgccttcactctgctctccagaggtggactacagtcttaagttccatgtagagacaatattgccacaacatttgctttgaagatgcaaatttgtttcaaattgatacatgagggaacaatgtgaacacagcatgaattc

SEQ ID NO: 196943 - DNA, 1000 bp, Homo Sapiens
agtagtacttaccaatactaatttcatcatctgtttcagcatcaccaatacattcaaactggaaatcttgcaatgactgggaaaatttctgcactgccatagacagatctgcaagtaaaagttaagcaaaaaatccataaggtgaggttccactgaatccgaatgagtttccaaatgtaaaattatataactttgattttgtattatatgaaccagaatcctttaataccagtttgactaatttaaccagaatcctttaaaataccagtttgactaatttaaccaaaatttaaagacactataaatactgaaaatggatctggtctgatctacacagtggagatttactgctttaagagagttttggtggcagatgtgtattatctggaagtcagtttaccaaagcctttatcaaggaactaccactcactcaccataaatggagcatttttattttattttatttcaagttccaggatacacagccaggatgtgcagttttgttacataggtaaacgtgtgttatagtggtttgctgcacctatcaacccatcacctaggtattaacctcagcatgcattgagctatttttcccgatgctctccatccccctacacctccccctggccaaacaggccccagtgtatgttgttcccctccctgtggccatatgttctcattgttcagctactggagcattttttcttaaaaaaaaaaaaaaaaaaaaaaaaaaaaaaagaaggaatgctactgagcttgctggtgacgggaaaaaagccaacagttgattagaaaaagtcaccaataatattctgcataaactgtggaaaaagtagaaaatgtgtttttaccaataaactactgattttcttcaagaaggtaaaagatgacctgaaaggctgtttacaaataactttgagactcaagttaaacatactctgcaatcctgacttcagtctgaacaaggcccagagtctgactaaacccagaaaaagaattc

SEQ ID NO: 196944 - DNA, 1000 bp, Homo Sapiens
gctctttgaggaagatcacagatctttcagactgactattaagtcttgttaaataaaatagtagccaaaaagtaaaattttttaaaaatgaaaataaatcaatggcatttagctattattattgtgactttgaatgcccaatttgaaatttctgtactattattaacaagaatatgtcagtactttttattatgaatgcctataatgttaaaatacatttccattttaaaaattttacccattcatctcattatatatatatatatttctcattatctatctatctgtcatctatctatctatctatctatctatctatttcttttgtaaatcagatacacaggctatagacttatttgaaaggaaatttacaagtgaatttctttctctattatgtgagatggaataattgtaatttctgatatactaaatttaattatttaagataagtaaatatttatataacattttaatttttgcaccctactttaaaatttcagtcttgaaaaacagttcctaagctcaagcaatatttcctgagttgactgattttatactataaacatttcttaaaaatcaatatcagttacatcttagtaacaagtcacagatcaccagatgtaacaagtcaccagctccatgagatcagattattgaatattgaaattcactataagcattattttaccacaaaatatagaagaaaaggaactcagaaaaaatgaaactgtcaattcaaggaagaattgtgtatacagacttgatcgcattaagtctgaagtatatttttaacaaagaaacaaagagataaaatgttgagcactttgctatgtcaagtcagcaatgcaaaatgaagcattcactctattcattcttctgatagaagatgttttcagatatcatagaaatagacttgcgagaacttttttaaactaaattaggaggattattgcacaatatttcaggagattctgaaatatcaaaacccataaaagaattc

SEQ ID NO: 196945 - DNA, 1000 bp, Homo Sapiens
ctaaccttgcatgatcttgctcaaaagtattgaaatcctcaagagaccactttgcgactgagggtcaccaaagctctgtgatttaagaactataactcatgttatgtttactgattatcagaagatggtatgtggagctatctcataaattgctgaatcagggagagaaactaaattgctaaactgatcaaagatttggtaatcttaaagtgcaggagaaaaaaagggaatacctcctcccctctagttgcaattagagatttgggcaagaaagaaagaaagagttgctactgaattaacgtgtcacgggttttgattaaggactaagtgcaattttcaggaatgttatgatgtatgccatttaggctgtgtcaacctgtttgttcttattctcaactcatatgattaaaaaaaattctaatagacacagagtcactagggaccgaaataactcactgagattctgtaggtgccctacttccttttacttatttagtgacagggtcttgctctgtcactcagactggagtgctgtcacccagactggagtgcatagctcactgcagcttcaaactcctgggctcaagcaatcctcctgtctcagcctcatgagtagctgggactacaggtgcgtgccaccatgccccactaattttttattttcttttttgtagagaaacaagggttgtccaggctggtctcaaactcctggcctcaagcaatcctccctcctcgacctcccaaagtgctgggattacaggtgtgaaccaccacggccggcccacacttccttttaaaaagtagtttacacagaggagaaagtggacttctatgtacagctgaacatataacatctaatcaaggccttgcggagggtatagctagagtacttggaggctcaaaacccttggggacgtcagtgtttccagtgtaggcaatgccccaggtgagggtcaattggagggagaagggaagagaggtttggttctaaagtgaattc

SEQ ID NO: 196946 - DNA, 1000 bp, Homo Sapiens
aaccactgccttccttggcctctttctaaaagtctgtcctcactgggagtcaaatcctcccaggccttccagggccatgcaggcaaagtaaaaaagtgaagggggcagagtataggaccatggcgagggacatagactgagggcaatcaagctcatctgcaatctctgggattttacacccaagtcacccctagaacagctgatgtccagaagtgccctggttagagaaaccagaaaggatggtcagtaaaatgcccaaaaaggaaatctgcagctaatggcactccaggtcactactccaaacatgaatttatctggaaggcaggagtatagaaggaagaagagtacaaagggcttctcatagcctacatagtttgaataatgaaagaaaagttacaagaatcagctttttataagatctcccatgtgacagcacaggcccttctgttggacattttccccttaagaaatttccccttctcaggccaagcccagaaagtgtaagagcagccttttcttttacatcaaagcaagtttattgaaaagaccagaatgaagctagagatctcatgcttggtgagttcactaagccaaattgccatttgcatcaagtaagccaccaatttaaaagctagccactaaaatggctgagccactgtggtagacacaccctaaggtgattgctccctcttccaattagtcccaatgaactgcctttccctttagtgcaagtagaacctgtgacgtgagtctagccaatagactatggcaaagaggatagaatattcattcctatgattatgtgatgttttatgactccatctttgcagattggagcaaaagattctcctgctggctttgaagaagctgccatgttgtgagagggccccatggcaaggaactgcaggtggcctctaggaagggaactcagagaagcccttgggtgacattcagaagaaaagaggaaccacagtcctacagccacaaaaaaactgaattc

SEQ ID NO: 196947 - DNA, 1000 bp, Homo Sapiens
aagaacattagttaagtgtgcttttaataatggaaggagttccaattaaggtaggatttggacaacttcagggaagtttggtttatgttgggaaagggaaccctgacctcggatttgctgtcttgggtcttttccatcccaggccttcaccttgccgggttcatttcctctccctgtaccctaaacactttcaattatggacactctcttgtctctgaactcggataaatgctaccttgttaactaatagtaccactgagtatattaatgattaatagctaattagtcataatactgtaatacaatggaggcttcctttaccgcagctgctgtaggtctcaaacacacacatccccttccctattcctggccacaggacaggcgaggctctaaatctgtttttctgagcaccctggcaatctcgaaactgttcagtttttagcggtcccattcatacggcgaatgaccactactgcttgcatgctgccgagctgatttctgccccccgtcactcccactgccctccaaggagaacaaggaggtcagcagtcgttaagtttttattcaaagtctctttttacttccaaatctcacgtcgacccacttttctgctttggcccgtttcttcactttaccttccccatcctaacccgcgcctattttgtggaatcccacagcagcgcctgctacaaccccctgcactcttcactttggcttcctttcggcaaccacgccccccgactcacggagagcgccgcgcatgcgcagctctcgtctttacctgggctcccggcagtgggcggagtgggagaaggcgggggcggcgcggggagccggcggttatctgggcggcggagcgctcacaatgtggcaggagacagaaaaggtgcgcccgggccggcccgagggctgcgcatgcgcgccgccgctcccagcggccgggatgctgagggggcgggcggagggaggtgtcgggatccccgttgggcgggggggccag

SEQ ID NO: 196948 - DNA, 1000 bp, Homo Sapiens
tttccagggttggactgttatgaacaattgtgctatgaacattcttacacatctcctcgtgtgcaagggcaggcatttaggttagatgcttacctaggagtgggagagagtatgcatatacatctgttcgactttagcagataagccaaactggtttccaaagtatctgtacaatttggattctttttttttttaaggttttcatgaccacatcataccttctttactgcttttcttatccctgatcttgccctatatcaaaccttccctggatattgttacagcttacaaggtggctatcatacttgcatcttggccaacatagcctcctgtactttggccactcatacctcttcatcccatcacaatgaagatacatgcagtgtgtgtctattgtatacagggtcccaggctgattactggggatataaaaaggcagatagcaggtccttgacatcaggtgttacaaccgagtttggaaaaaggaaatatagttaagatcttaccagaagcagcatatactaaacagctaataaatggtgtagataatgagcactatggaagttcagtagaggaaggagtggggtgatgtgagtgttatggaggttcagtaggggaaggagtggggtgatgtgagcactatggaggttcagtagaggaaggagtggggtgatgtgagcactatgcaggttcagtagaggaaggagtggggtgacatgttatggaggttcagtaggggaaggaatggggtgatgtgagcactatggaggttcagtagaggaaggagtggggtgatgtgttatggagattcagtaggggaaggagtggggtgatgtgttatggaggttcagtaggggaaggagtagggtgatgtgagtgttatggaggttcagtaggggaaggagtaggatgatgtgagggttatggaggtttagtaggggaaggagtggggtgatgtgagtgttatggaggttcagtagaggaaggagtggggtgatgt

SEQ ID NO: 196949 - DNA, 1000 bp, Homo Sapiens
cctgtttgttttatgtgtttatttgcatgtttcaaactaaataaactgtaagatttgaagagcaagggaaatagctgatttttaaaaaagctttcttaacactttgcagagaactctcaattttagacagccttgctcaatgaattatttatctgaacatatcttgaaaggtggattttcctcagaaagttacatttttgactctcctttatggcacctacttactccctaaagctgtttaatagtaacactctgtaaaatattccactttcaaaggccctttttaggtaattgctgaactcaaactcacaatcaccacataaggcatctactgtaatacctattttgtagatgaaaaaactgaagcctaaggtctaaatggattgctcagggttaaacagagagttactgagaaagtcagaattggaaggaagtttcctgatacccacacaattcagcatgcttccaccatgatgcctttctacctcctgttgccctgcacccaactggagctctatccattggcacctttacatcatggcgtttgtgaggatgacaagagtatgcacattagcataataaaaagtgatgtgcaatggcttgacagatcccacagatttcctaatgaaaaagggatattgaatttgaaattcataattttgacgagggaaaccattctacccttttgtgcaagcaaggctacaagaaatatttcctgataagcatggtgaggcatgggaacctgacagggctcatatgtcatctaccagttatgactttttgaccttaaaccatttcttttgtgtcctggctcttattctgctcctttttaaaggcgcaactcatctgtgggatgcatttttattcctttaagcccatctatcaacttactgaaatacagtcaaagccctttcactcttacactcagtacatttgtaggccatcagtggaactgcttgaaaattacagggctccataaaacccacacttctctgaattc

SEQ ID NO: 196950 - DNA, 1000 bp, Homo Sapiens
ggctgagagtggggagggtgaagaaattcttctggaaatatagaggtgatagttgcacaatcttgtgaacatactaacaaatactgaattgtatactttaaaagggtgaattttatggtatgtgaattatctctcaaaaaaagttaacatccaggaaataaatgattgattaaaaaaacagttaatggcacacaaatctgatgaattgcagcagtacaatggacaaataaaatgtagtatattcatatgatgaaatactactcagcaataaaaagcaatgaacaacccagattatctcagaaacactacgctgagtgagagaggccaggtataagaacagaacacacattgtatgattctatgtatataaaatagaagagataaatattaatctaggtgaaagaaatcagaatggcatgtgcctgtgtggggtaggcacgggaggctcaagtagcagggaccaattaggaaggagcccaagcagctttctgggtgatggaaatgtggtatgtgtttgccgaaagtcatggaactgtaacatttagattattcattttgctacacttaaatcataatttaaccaaaaataattttaagaaaaccatcagagatcaatagataactacacattgttgtgatgattcttacaagaagtaatttataattctggctctggtactaacacgctgtgtgatgcaaggtaacattttattattttgccgtgtttcattctcccatctgtatagctaggaaattgaaggcattctccctatattgtaaagatagttttgaagtcaaaaagtgtcacgttatcatcatgaaagaaaagtgcaacatccattaatttacctgcatctgtgtccatgtactcctatcctgtcactattcatctgtgctcctatctaaaaccaactccttaacttctgcactggacctcaactcctcttgattattcagctgtcactatagcaataagccctctctctcacaaaacatgaat

SEQ ID NO: 196951 - DNA, 1000 bp, Homo Sapiens
ctgtacagaaattacagagttcctttatatcccctcttccccccaacactttgctctattattatgtacacttttttcttagaaacagggtcttgctttgtcacccaaggtagactgtacactgctgtcctaaactcctgggctcaagggatcctcccgtctcagcctcctgagcagctgggactacaggcgcatgccaccatgccctaatttttaaattttttgtagagatggagtcttgccacattgctcaggatagtcttgaactaggctcaagccatcttcccacatcagcctccaaagtgttgggattacaggcgtgagccactgctcctgggctattattaatattttgtattagtgtggttcattgttgcaactgatgaaccaatattaatacattattattaactaaagtcacattagggttcactctgtgtcttacagctctactgattttgatacagaatgtcacctacccaccattacagtatcacagaatataattccaccaccttaaaaatgccccatgctccacctattcatcctttcccccaagtctgcatttttaacagacatgcaagtaattctcttgcaggtagtcaggccaaaactgtgagaaatgttgccttaaatcatgagacctgggcggaagaactgtgtgctagattggattcagtttccctaagaattagttgactataatgtggctacactgtaacagtaatttaaacttcagatcctcttagtaactactcttggccccctctgtgttaggggacaatatccacattaacctaggttgaagctgatccccaatgtttcctccatctcaaatcaaggcttgataaaagttgttactactttaagtttcttctaaaatatcaagtgactcatggtctcatagttaaatgcctaccggcctcaggacagtccgactgttggaaactcagatggctggcaagtggcaagagggagcagtattaggcatgctgaattc

SEQ ID NO: 196952 - DNA, 1000 bp, Homo Sapiens
ttctgaccataataatgttttaaaattaagaaatactggcagggcgcagaggctcatgtctgtaatcccagcactttgggaggccaaggcgggtggattacctgaggtcaggagtttgagatcagtccggccaacatggtgaaaccctgtctctactaaaaatacaaaaatattagccgggcatggtggcaggcgcctgtaatcccagctacttgggaggttgaggcaggagaatagcttgaatcggggaggcagaggttgcagtgagctgagaccgagccccattgcactccagcctgggcaacaagaacgaaactccatctcaataaaaaaaaaaaaaaagaaatacaattccagcaacacaatgatttaatcaatgccttcactttcctaacagtttttaataaaaatgatctttatcatattgggcataacaacctataatatacaaattaacctacaattaggaaataaaactattcaaaaagttatttcaaggctgggcgcaatggcttaatctcagcgctttgggtggccgaggtgaaagaatggctgaggccatgagtttgaggctgcagtgagctatgatcgcacttctgcaggcattccagcctgggcaacagaacaagacccggtcttgtataaaaaaaaaaaaaaaaaaaaaaaaagccaggcgtggtggctcatgcctgtaatctcagcactttgggaggctgaagtgggtggatcacctgatgtcaggagtttaagaccaacctggccaacatggtgaaaccccatctctactaaaaatacaaaaacttagccgggcatggtggcaggtgcctgtaatcccagctactagggagactgaggcaggagaattgcttgaacccgggagacggaggttgtagtgagctgaggtcgcaccattgcactccagcctgggcaacaagagcgagactccatctcaaaaaaaaaaaaaaaaagttatttcaagaggttaggtctcttggaattc

SEQ ID NO: 196953 - DNA, 1000 bp, Homo Sapiens
acttgcccggctctcgggccccaggcgggagggaggcgaggctgaggtggggggcgcacgggctgggtgtgcactcgccggtcccctccgacccgacccggggagcacggggccccgacccggggacgactgaggtggattgtccctagagtttaagactgtccctagagtcgagggtggagggatgagcgccggcgccagcacagagcaagactcccagcaaggaagagaaccagagaaggaggcgcagccgtccgcacggaccaggcgcgcgctggctccccgagcccggagcggcgcagcccgcggcgccccggacacacccactgggtagcccgcgccagcccgccccgccggccagagagcgggagccggagcctgggcagcggaagccgggtcgggcccgcgcgggcggcgcgcaggggacgcggggcgcgcggctctgctcacctggcggtccgcgtcccggagcgaccggcggccgcctcgcctcgcctcgcccccgcgtggttcccggcgccgggcagccccgagcgccgccgcatggacggccgccaccgccgcccagccgccccgcgcccgccctgcacgggctcccgctgtgccccgattccgcgtcgggctgcgcgggcggccagcggttcaggcgcgcgcggagagctctggctcagagtttgcgatccgagagcgggatccgcgctccctcggtccttcctccctcccctcttgcggcctcccgctgtcatctggagccgctcctgccgccccctggcggcgaccgcgggaagggccggcccccatccgcacccctgaccccggaggtcaacaacgggatggtccctgggtcccaggggaagagacatcacccagtaggagggagtacggtctagacagaggccacgagggcgggagggggcgagagtggagagtggcccagctggccagggtcgtctaagtgagaggaaaagggagagggcggttgagaccaggccctgaattc

SEQ ID NO: 196954 - DNA, 1000 bp, Homo Sapiens
ctttcctgtctgatgcgggtggagggcctgggtgatgggtgcaatggccctgagcacccaccatctggagaggaattatcaccgcagatcaccccggggctgggtgaccctccctcctctgcacacccccaacctccacatctttcccaaagacgtcaagggttggatttcaccgtaatatgacccagagatgtaaacggctgctgatgctgaaacgctagagtgatatctggtgaaaaaagaagcatccttccagtggaaggctggcaaagctagggcaacagagggcgagcccccaaagtgccaggagggtgtcacctcccgggaaggccagccccgtttccctggtgctttggccacatggggactcagtggcacaggaaggtcgttaaacaactatgaccaggtcagtagcatcctgaagtttacttttgtttgttctgcaatgagctgtgggctggtagatcattttcactttttgctgctctattgacggaggcaaatgcaataaaataaagtcatggatatgcaaatcaaacggcagtgtcttttctaagatttacagaggatgtcacacacttcagattgaccaaaaacatttgccttttattctaagtgttttccttggtggggagaagagaaatacacacacacacacgtgcacacgcatgcgcgcacacacacatgaggccaacatttagaacttacataattaaagccatttttttcatttcattttctctattttcctagatttgtagggaaaaaaaacagtacaaagagaattttattccaatgattgggacaggagtgatgacttaacaattattgctctggaacaaaatgtaagactgtctccttggaacataaggacagacagaaccagggatggacagactggggcggtgtctttcaaggtgtacctgcagaacagtgagctgcctgccgtcagagacacggttgtcacagccagcattactctgtcatattcatggaattc

SEQ ID NO: 196955 - DNA, 1000 bp, Homo Sapiens
aaaacaaaaataaaccttctctagtttttcttttcttttcttttcttttctttttttttttttttttgagactgggtcttgctctgtcacccaggttggagtgcagtggcacaatcacagctcactgtagcctcgaactgcagggtagctgggactataagtgtgcaccaccactcctggccaattttttattttttgtagagatgtggtcttaccatgttgctcatatggtcttgaatttctggcgtcaaacaatcctcccaaagtgctgagacaggacccatgagccaccgtgcaaacctcctcaagtatttcttatagtgcagatgtgcactagtaacaaagcacattctttccgcttttgtctgtctgacaacatgtttcttttactttattttttgaagtgggcatataattgtagcttggcaggttttttttttagcattttattttattttatttttggaagagagtctggctctgttgcccaggtttgagtgcagtggcacaatctcggctcactgcagcctcgcctcctggattcaagcgattcttatgcctcggcctcctgagtagctgagattacaggcatgcaccagtatgcccagctaatttttgtagttttagtagagatggggttttgccatgttggccaggctggtcttgaactcctaacctcaagtgatctgcctgcctcggcctcccaaagtgttgggatcacaggtgtgaaccactgtccccaactctttttagcattttaaagatgtcatttcattattgtctggcttccatagtctgccatcagttgtattgctggtatctctgtctctctctctcttttaaaatgtggtttcttttaagactttctactttgtctttgattttcagtaatttaactgtgatgaggctaagtgtagtttactttatgcttactctgcttggagctcattgatattcttgaatctatggcttgatgcctttcatcatatttgtggaattc

SEQ ID NO: 196956 - DNA, 1000 bp, Homo Sapiens
ctttgtttctttctttctctctttctttctttctctctctttcttttcttttctttcttttttttttttttaagatggattctcactccgtcacccaggctggagtgcagtagcgtgatctcggctcactgcaacctccacctccctggttcaagcaattctgcctcagcctcctgagtagccgggattagaggtggctgccatcacaactggctaatttttgtatttctagtaaagatggggtttcaccatgttggccaggttggtcttgaacccctgacctcaggtgacctgcctgccttggcctcccaaagtgctacgattacaggtgtgagccactgcgcccagcctctagttatttcattcctaaaatggacttaatcatgcctgtctgtcccaagggagtatcgtaaggaacatgcaggagtaaatatgtgtgagagtgtttttgtacatacacacccatgtacacacactcaaatacacacacatgcacacatatatatacaatttagaaatgtattgtcattacagttcattcagatattggtttaatgttttgattatactatctagagattccctatcccctactcaattattggtctcaatgtttgttttcttttctttttgagacagagtcttactctgttgtccaggctggagggcagtcgcacaatcttggctcactgcaacccgcctcccaggttccagcgattctccccgcctcagccccccaagcagctgagattataagtgtgcaccacatacccagctatttatttatttatttttttgtatttttagtagagatggggtttcaccatgttggccaggctggtcttgaactcctgacctcaagtgatctacccaccttggtcccaaagtgttgggattacaggcatgagccactgcgcctggcctcaatgtttcttactggctcattggccagggcatgaaaatgctttattaggtgcccactatttgtatgaatgaattc

SEQ ID NO: 196957 - DNA, 1000 bp, Homo Sapiens
agaaccagcccctccttgtacttaagtttctagaggcagggccgaggagcaggcacagggagaggatgagcgtcggcaagttacaggaaactcaggaaaatgtttatgtgtgtccagggattttcagagactatccagccattctttatctccaagtgcctctgctctcatgaacttcttcatgtggacaaaagcaggaagcctttagggccacgcatctcttgttttcctgtgacttacacagccctcacctttgtgcttagatggactgtggccagcgggacctccaggcctggctgggtcaggagagttttgcttaaccagatctgtttgatccttgaaccaaaagcggggagccagagagatcctttgagaactgatgactgctgctgggtcctgcccagccatttgcattttataaaggtctttggcagcggccaaggccttctcattatgtggtgtttttccacttcgggatgaaccggagtggtttgtgcagccacctgatagctctttgcaccagcttctgcatgggagactttgagcaggccaggagccaaggggaccctcctaggccttccgagcacctagcactggcccttttcttccttggggcttccttctggaggaggtttccctgggtttggagtcctccctcctgctgggggtgggggcgtggttgctggtggcctggagtgagctgcctgctgtggcctccagcactccccagctgaacagcgagtcctttgtgaaattcctgaggcaggagggggcagctgtgcagagccagctctcagagtggccgacagggagggtgttgtggtgtatcatcaagtgataaggccttcggaaaggctgtggagaggaaggaaaacacattcctgactgtggtgtgtttgcccttgagggccctgtgtttggggaagtagagaagcttggctgcattgttgtggggtgggagttagccctgtgctggggggagctagtgagagatgaattc

SEQ ID NO: 196958 - DNA, 1000 bp, Homo Sapiens
gcccatgtgctgctttgaattcaactgaaccgaatggagaaactggttgcaagtaaagggtgttatgtggtaaaggcaactggaccctggaccgctagggtttcacttccagcttatctagacaagtgaatcatcagatttcacagccctcttggggcttgaatcacacatgtgcgggaggagctgcattgctggtgcatgtgaagtgtttcaagctgtaattatatccttcacctcctcagagtgtctagactagattacgaaggctggggaaaaaaaaaaatgactgcagctttctgtggtcctcaaacaagtgggaattcctggctggggcccttttcccagagtacacaggagcaaatccccagaagcagcagcagcagcagcagcagcagcagtagccttggcttgaaggatgaagattaaaagggaaaagaggtaccactgcctttaaaagtctccataggaaagagactccagtcaagcactagcggtagaaatatgaagcaaccctgctgttcctctgcaggaaaagtttttaaataacttcttattagtaatattaatattaatgataatactgaatcttcatagcacatttattatatactgaacactatggtagcattttacgtactttgcttcatttaatttccacaatcgccctgagaagtaacattaaccctatttttaaaaacagaaaaatgatgcttagaaaggcaaacagaatatggtcttagctgcagttgattgaacatttattatgtgcttgccatagggctgggtatcccagcagttctcaaagtgcagttcgtggacctctctgagttcccagcacccttacaggagatctacaaggtcaaaacaatattcataaaaacaataaaacagcgtttgccttttccactgtatttacatttgcactgctgatgggaaaactgccagcaccatagcacaaatcaaggcagtgcaccaaactgcactagtagtcattgaattc

SEQ ID NO: 196959 - DNA, 1000 bp, Homo Sapiens
cagggaccatgtgaatattgtttgtctttttgtcctgtggtctctgcaattcctggaatatagtgaaggtacatggatatttagtaaatgaatgaacaagtaggaaaaacctgaacattgtcattctgcctaatacacattgaacattgaaggagtacaggactcctccttaatgagtaggaggtacagaggatgataaagtaagctctttaggattatcccagtttgagacttttaaacagcacatacatgcatgaggcttaaaatctggtccttgatgctagggatttcacttttgtagggacttgtctagaggtaatccatgtacccaatggaccctgtgcataatatactctgccctcattaattgtggattctgtctttgtgaatttgcttactcactaaattttatttgtaaccccaaaatcaatcttaacatttttgtggtcattcgtgaacatgcacagagcagcaaaaagtaagagtcatggatgcacacattcccagctgacttcagagttttcagctcttacactgtaaacaagttcattttcagtctgggaatgccacatggttttcgccttctgttgattttaaatggcccctatgagtagtactgatgtgtctggtgttcctaatctcaggaatacctggggtaccttacaggggttaggtagctttcttcaggtgaattagagagttgctggcagtgagttcaatgttaatgatatcaacagtgtatattaaataaggcatttttaaacagaaacataaaataagtttatgtattgatggttgaccaatatgtgaccagaggcttgcaggaacctaaccctccctgtatttcccgtaggagtagtggttcaatattcactaattcaggttctcagtgactttataaaacataactgctgtgaataacaagactctactgtgtgttattctatatttgatgtccactgtcataggacagggtatattgtaatcaaaattggaattc

SEQ ID NO: 196960 - DNA, 1000 bp, Homo Sapiens
tagtaaaccaggaatagaatggaatttccttaatctgacaaattgaatctaccaaaaaaattatagcaaaataatatttactggtgaaatgttgaaaattttccctttgaaattgtgtacaacaaaaatatttactgtcaagacgtctgcttaaaatgggggttctaactagtggaaaaataaataaataaaagttgtaagatttgagagaaaaagtgaaatagtcattgttagcaaatgatatgttatatatagaaaatttaaaataatttacagataaatagcacaaataagttagattaacaagggtactagacaatgggcagtatataaaaatcaattatatttatatattatcaaaatattaaatatctaggagtaaatctataatgtttatggattggaaaactcactatagtatatttttcttttctacccagtttatttgtagattcagtgaaatctcatttaaaagtccaacactttgttctttggaaattctaaaacactatttagaatttctaaagaacaatatgtaggcgcagattctaaaatatggaatttcaaagatccaatgaaacagtatgcaaaaccctgttgaaaaagaacaatatgaccagcactttgcgaggctgaggtgggtggatcacttgatgacaggaattcaagaccagcctggccaacatggcgaaaccccgtctctactaaaaataaaaaaaattagccaggtgtggtggtgggcacctgtaatcacagctacttgggagtctgagacaggagaatcactcgaactcaggagtcagaagttgcagtgagccaagatcgcgccactgcactccagcctgggcgacacagagagacttgtggcgcagggagagggaacgatatgggaagatttgctctaccaagtataaacactttttataaagccacagtaattaggatagtgttctattggagacaagacggagaaaaagaagaatggaacataattgaattc

SEQ ID NO: 196961 - DNA, 1000 bp, Homo Sapiens
cacatgttgttgaaatgatggataatatggtagttcaaaaactaaaagagctttcaatccaaggatttagctttgggacatagggaaggttttatttattattattattgtggtaaatacacgtaacataaaatttaccatctgtattagtccattctcacactgctataaagaaatacctgagactgagtaatttgtaaagaaaagaggcttaattagttcacagttccacaggctgtaccggaagcacggctggggaagtctcaggaaacgtacaatcatggcggaaggtgaaggggaagcaggcacatcattacgtggccagaggaggaggaagagagggaaggaggaggtgctacacacttaaacaaccagatctagtgagatctcactcactgtcaccagaacagcaaggggaaatctgccctcaggatccagtcacctcccagcaggccccgtcgccaacactagagattacagtttgacatgagatttgggcggggacacaaatccaaaccgtatcgccatctaaaattttagagtatagtttagtaatgtgaagtacattctcactgttgcacaagcagtctccagaactcttcatgttttgtaactgtaactctgtactcgttaaatccctcctattctctccttcctgagcccctggcaaccatcattctgctgtctgtctctatgaacttgactactctaggcacttcatacaaatggaatcatacagtatttgtccttttatgactggcttttttcacttttcgtcatgttttcaaggttcttccatgatgcagcatatttcagaattttcttcctttttaaggctgatatgccacatttcgtttatccgttcatctattgatggaagatacttaggttgcttgtaccctttggctattgtgaataatgctgtgtgaatgtgggtatataaatatctcctggagaccctgctttcatttctttggatgtagacctagaagtggaattc

SEQ ID NO: 196962 - DNA, 1000 bp, Homo Sapiens
aggtgtgggggtgggacagagtgtgcaggtctctggccacaagagaagcaggaagggataaagattcctcccaatgtatctcctggcctgggtgtttctgctgcccacaagtatgttgctgtgattctcaggtcaaagaggctctcagttgcctcaaaagctgcaccctcggctgggcttggtggctcacgcttgtaattccggcgctttgggaggccaaggcaggtagatcacttgaggtcaggagttcgagactagcctgaccaatatggtgaaaccctgtctccactaaaaatacaaaaaaattagtcgggcatggtggtgggtgcctgtagtcctagcttctcggaaggctgagacaggagaattgcttgaacccagcaggcagaggttgcagtgaaccgagatcgtgccactgcactccagcctgggtgacatagtgagactctgtctcaaaaaaaaaaaatactgcaccccgacctccttcactttgccttccctgggacatgtacgccatccctttgatcctccttcctcgcccctcctcctcctcctggagttagccttcatgcacttgtttatttgctcatcatagatttactgggtaccctgaacaccctctgggtcgggccaaggccaggtgctggggaggtgccctttagaggccccgctgagccttctggtcacgcatggcaattccatcagccctggcccggcacccctcttgtttgtgtcactcagctgtgaagacctgttgcccatgcttgtctttgatctcccccagcggggcttctgctggcttagcctttcctccctccagctctgcctgtgaggtccagtgatccttccgggcagtggaccctgctctgtgggcacctcacaggctccgcaggaagcttctggcttccagcaccccctcaccttgctcacactttgcctccacccctcaagcaggcatgattcctcagtgatgccccagactctataaggacctgaattc

SEQ ID NO: 196963 - DNA, 1000 bp, Homo Sapiens
gcaagctggcgagctgcagccgagtttccaggcggtgatgcagcagcactgtattgcccagcctgagagtctgcgttgtgagatcagagagggtgtcaggggtgagggcgtgggggctgtccctggtgtgcagttcccctgcaaccccggtcctcctgccttcccccaccgccatccagacaggactcagtttctggtctccccacccagcttagtgctctatttacttgtgtataactgttttcaggtgtaatttcatcttacctccctcatctcagtgtaagttctagaaagctaattcccattcttaattatatatttgtattcttgtcttgtcttaagtctatagaaaacactcaaaaactattcaatcagttgacctcagtcttagcacagcttctctgttgaatggcttccgtagctcatgattgacagaattttccagctaggggcaccaacatttcttttacttccagccatttccggaggttctccctcccctcccccaagcatgtgaggccccctggccatttgtgctttgctggtaaaaccttctgtcctcaggtgggcagtgagctgattgccgggttatcagggctcagccacatgatggtcaactgctctgagaaagtccttacactggcaccagccggaattactgaccattcacatcctcaaatccagtccaaactggaaactcgggcttaggaagaagctggaagaggagtccagctccaacaggaggccccattttctgcctctcctggttttactgtttgagccaatttagtaacattttaagtcaggtcagaaagttaaagttcctcaccctaaaagtgcctgagtgtgactgtgtgggtcttgggttttgtgttggtttgcatgttttttggttccaagaccagcttctcatgagagggatgtcctccctctgatgtaactgccctgaagcctggccagaaaggaccgagagtcggcgcaggtgctgggcagagaattc

SEQ ID NO: 196964 - DNA, 1000 bp, Homo Sapiens
agctttctgaatccctaaattaggttatcttgtcccactgttccttttatcatgcttacaacaatgtgtaattttctatttgtgaaatcattttaaagataatgtctcttctactatatgataaactataaagacaggaaccatatgtgtgtatatatatggtttttggtttttggtttttgttttgtttttttggtttttttgagatggagtcttgctctgtcgccaggctggagtgcagtggcgcagtctcggctcactgcaacctccacctcccgggctcaagtgattcttctgccttagcctccagagtagctgggactacaggtgtgcatcaccacgcccgtctaacttttgtatttttttgagtggagatggggtttcaccatattggccaggctggtctcgaactcctgacctcgtgatccgccccgcctcggcctcccaaagtgctgggattataggcgtgagccaccatgcccagccggaaccatgtttttttatataatactcagtattcacagtgcctggcacagaataggaacccattaaatattttctaaataaggagaggataggtggggatattgacatgtttgggggggtggagcaaatggtaggcagattgcatgggaaaacaacgagtttgagcccttatttaccgtgctttcctttttttgcagcactttacacctggtgaaccatgtatcttacttacacatcaagtttattattgatcctttttctctactaagatgtgagctccacagggccagggatctctcttttgttccttgatacagccccagcctagaggaggctgagctgtagaaaacctctgtatttattgaatgagtgagtactgtctctataaactagaaatccaggccatagattgagagaagctggatggcatcaggattccagagtgcaggaaaagttttaagcagttacaagaggggggttttggcagtccatgttaggttagtaagaggaattc

SEQ ID NO: 196965 - DNA, 1000 bp, Homo Sapiens
acttcaggtgatctgcctgcctcggcctcccaaagtgctaggattacaggcgtgagccactgcgcctggcctatttttattttttatttttatttttactttgagacagagtcttgccctgtcacccaggtgggagtgcagtggcgtgatctcagctcactgcaacctctgccacctgggttcaagaaattatcctgcctcagcctcctgagtagctgggattacaggcgcacgccaccacacccggctaatttttgtatttttaatagagacggggtttcaccatgtttgtcaggctggtctcgaactcatgacctcaggtgatccaacctgccttggcctcccaaagtgctgggattgcaggcgtgagccactgtgtctggttacctatttttatttttaatgttttttttaattgacaagtaaatattgtatgtatttatggtgtgcaccatgatgttctgacatatgtatacattggggaaggagccctagtcttgaaaagaagtgtcgtaaagcagctcgtgcctggcacttttcagtaatgtttagtttcgtcccagcaaagtcccaattcatttcatggtacctttggttgtttgtcactacagtgtaaagttctggaaagagcgatccatattgtaatcccctttgtgttcacactgcccagcgcaacgttttgggcacaggtgctcaaccattaagttttgaacgaatgtagttgaactctcatggagaagcagcaccatcttctggctgaagtgggtaatgctgcacagggccagagagcggctcaattagaggctggcaatcagaggctggcaatggatgcgcgcgtgtgtgcgtgtgagcgtgtgtacatgtgtattcaagtggagatgaatgcactctttcctcaactttgccatcctctactatcagagttttagcctgaggatggttgaggcatcctggcctctagagcgagaagtttgctttagggaaaacctaatctgaattc

SEQ ID NO: 196966 - DNA, 1000 bp, Homo Sapiens
gcggtcctcttatgccacaggttcccatgctgcttttgttatggtagagaagaggttgagctctggaggccgaaatttcagtgactcctgatattttgctaagagcaatggagaagatatggcctgaggacccagcaacggcccccctacctcaggttaatcctgccgggggcgggaatgtgtcctgccacgatgcttctgcccacctgtcggtgcctatgcaggtgtgaccaggctgctgacactgcgtcctgaggtcagctcgaggcggccaagtggaacggcagcttcagactcaggctcctaatgggggcttgtctgagcaactcacagtgtcttgctatggactcttgggaatcctgtgcttcggtcccaagggcacctggtatgtgtagcctttacgcggcacccatcaaggcttccattcaccaaatgagaggcgacaacagacaggtgaggagaactcactaataaagatgctctgtgctgggcacggtggctcacccctgtaatcccagcactttgggaggccgaggcgggtggatcacatgaggtcaggagttcgagaccagcctggccaagatggagaaaccccgtctctactaaaaatacaaaaattagctgggcgtggtggcaagcacctgtagtcccagctactcgggaggctgaggcaggagaatcactagaacccaggaggtggaggttgcagtgaactaagatcatgccactgtactccagcctgggcaacagagtgagactccatctcaaaaaaaaaaaaaaaaaagctctggaagcgaggggcacagtcacggtgtttcagagtgcccactctcgtaattcgactttaaagggatcctgtctgaggaaaacaggaggagtgctgcaagacaagggcagcagccttctctttctctgctgcagcgctgcggtcccaccaacctgccttcactgtttgttacctgatgtcacttaccctgcccggtgttgactccaccctgtt

SEQ ID NO: 196967 - DNA, 1000 bp, Homo Sapiens
gataaaaggaaaaaaattttttttcagacaactttacacttgggaagtaagcctttcaggaataacaatgaacagggttgatgagtttctttggaagaaaagaagttccaattcatcaattttttaaaaatgctactgaatagaaatgacaagacctatcagtgataaaagtttcttttttattttacataatttggaaccaccagagacagatttaatttgccgttttagaacaaaaattcaatgtctgcttgttagatgctacaatatttttatctatctacctgctgtgggatgaagagaggaaacagaggtgacgctcctaagacagtgacgagaggttcctcccttaacaggcaacgccctgattactggccactggagtatgagtgatagctgcatccctgatgagtagcaagggaactcagtaataaagtctgagctttgtaagtttccaatgattgtggtgaactgaatgcaactttatccaaatcaacagtcactggaaaatgctaattacagattaactcggtaagtattccataatcgccaataataattattggattttcttattttgaaggaggtaagttaatttcatataaagcaaagattcaacagtggtgctttgagaaagagactatagaatgtctgggttttaccagtggaggtattttcaataacgggctttaaggttagattgtcttcaataggacgctgtgtagaaaaggttaacacatcataaaggcaggcaatttccaaacctttaaagacacatgatgttgaaaagttcgcaaaagaaggaaaccttagagaatgctaaaaagtccgcacatttgtaggcacatgttttcaatactactcctagatcacctttaacaatggaggtgtcctgctgtattggtagctctctgaaaaccaagtactcacctttctcttagataaatcttgtgaagaagcccatcataagcactcaaattattggctgtgtgctgaattc

SEQ ID NO: 196968 - DNA, 1000 bp, Homo Sapiens
cccgggagtgaaggtactatctatgaacctatgtccccagccctctgaaggtgacgattcaatacaaagccattggggtttttctacatcattgtctctatgagcttggatgatatgaggctgatccattctttgattctttttttttttttttgagacaggatcttgctctgttgcccaggctggagtgcagtggcatgatcttggcttaccgcagcctcgttctcctgggccaggtgatcctcccacttcagcctcctaagtagctgggaccacaggtgcatgccaccacacctgcttaagctgatccattcttgctgtgctgggtcacccccaggtgacactcaatgtcagttagttgtgttttattccaacaactacactttgtttttctggatcgctgctacagcaaatggcagattccatttcttcaggatataaatgcacaataagaacaagtagcgaccaggctcagtggctcacacttgtaatcccagcactttgggaggccaaggtaggcagatcacctgaggtcaggagtttgagaccagcctgaccacatggaaaaaccctgtctctactaaaaatacaaaattaactgggcatggtggtgcactttgggaggctgaggggggtggatcactggagtccaggaactcaagaccagactgggcaacatagcaagactccatctctaaaaaaaaaaattaagattaaccagggtgtggtggcatatgcctgtagtcccagctacgtggaggctggggtgaaaggattgcctgaacccaggaggtcaaggcggcagtgagctgtgagagcacagcctgggcaacagaatgtcaccttgtctctaaaaaaacacaaaaaccaaaacaaaacaactcactgcattattttaaaaaaaacatatgtatcttatgggccgggtgcggtggctcatgcctgtaatcccagcactttgggaggccgaggtgggaggactgcttgagctcaggaattc

SEQ ID NO: 196969 - DNA, 1000 bp, Homo Sapiens
tattttgaaattacaaataaatgttagtgagtaaacaaattcaaaagtatggaatctgagaataataaggattaactttacaaaaggcaatgctttcctacatataccagcaatgaacagctggaatttgaaactcaaataaaacaaaacaatactattgaaaaaaatcatccccctccttcagtgaaatacttaggtataaatctaacaaaatatgtacaggatctgaatgcagaaaactacaaaacaccaatgaaagaaatcaaaggaaaaataactcaagagatatttcaggtttattgactggaagactcaatattgttaaggtatcagttctcaatttgatctataaatatgtgcagttccaatgaaaatcccattacgttattttatagataccaaaaattttattctaaaggtaatatagaaagatagaagacctggaataaccaatgcaatactgaataagatggacaaattgggataatctcactactcaagtcaatgcttgctaaagtaaccaagaaagctcaataatcaaaagagcataaaagaatagtcacacagatcaacagagcagaataaagagtgcaaaatagactcaaatacagacaactgttctttgacaaagacacaaagtcaattcaatggagaaagaacgctttttaacaaatggaactagagtaattgaacatctatgtgtaaaaaataatgaatctaaaaacagacctttcacaaaagttatctcaaaatggatcatagactgaaatgtaaagtacaaaactctaaaacttctagaagaaaatatttttaaaaatctagataaacatgcatttgatgaagaggttaggtagaaaactaaaaggataatacatgaaagaaaatctttgttagttggactttagtaaaattaaaatcgtctgttctgcaaaaaacactgctaatagaagggaaagacaagccaaagactgagagaaaattgttgcaaaacatatctgat

SEQ ID NO: 196970 - DNA, 1000 bp, Homo Sapiens
acaattctgccccaagacctccttaagagtcgtctttcacacttaacactctctactaaagcacctcaaccccatttccccaagaacaagctggagctcttaaaggcctggatctcacacccagctgaaacaccagaatatccacctccacccaaatccctttatttacctctaattcaatagaccagtgggcctagtccagtgcccagggccttcccaccacacagacagcaaaatgagcccctggaaaagggccacctcatctgcccccatcctctagctagctgtagggagctgggatctgtccagacactccaggtctccatggccacaagcccaaagttgcatagggaggtcatgagaaaagaccttagaagcagtctgctctttgaaccctgggattattcactgaccagccaaaaaggtgacaactgttctgatggcccaggtcagaccagtaactctagggcagaggtctcaatggaggtcctggttccaagggggtatattaaccgtctggtgttgaatacaggtgtctccctacacacatgcattttggaaggagaggagttagagctttcaccagattctcaaaggggcccatgactccaacctctggccctagttggcctggcccaggagctggggatacagccctagtcatatcaacatccctgggccatcctcgctgtccagggtctctcttctattcaaggatgtgcccaggtcggtagcagtatcctgtttcccttgtcctggcccttccagctgcagaaagtggacagcgggtttcacacccagccctgctgcacacgctccagcttcctggagacccgagccaggtttctcccagcagcacctctccatcccagagatggcaccatattcaaactgaggtaccagtggcactgacccccaacaacagagaggacccagcttcacacttgatccagcaggggcccaaccacatggtgagatgacttcctccgtgagagaattc

SEQ ID NO: 196971 - DNA, 1000 bp, Homo Sapiens
tctgttcctaatgaatgactgtactgtgatttttatcagaagactagagagagggttccataacattagtatgtgtgattcgatttttatacattttagttattaggtttgagtttgaagatttacggattgcagaatgatgagattctgctaaatgtatgatgaatggcaagggaagccagatataaggaggcttcctggtctgactgggatagaattcttgacaagatatcatagtttttaattttttaaaacacattttgaccttctgggaaacaggacggaatcttatagttgtgagagtttgataatgagaatgtaatgtaatattgtttcactgtgtgctgatgatatcatctgaggcataagacactgagatttatcccaaagcatagaataaaaaaagatggtcaaatatagttacccttcgttcaagatatgatttcttttctttttccttccttgctttctctctctctctcgacagagtctttctttgttgcccagactggagtgcagtggcgtgatcatggctcactgcagtctcgacctcccaggctcacattatcctcctgcctcaggctcccaaagtgtgggattacaggtgtgagccactgagcccagccaatataagatttcttatggttcatttgtatccttccataaatttggcattttgaatctggggcctcaactcttagaaggtgtcgatgtgatcttccttcttttatctttctactttagctaaggtcacacatcctctgacagcaacaagggtgaagcaggtactcatattagagagtgggaatgggggaatttacatctggggccctgctgtggtatttattagcaagttcaaaaccactatgactgctgaaaagaatgctttttaccatttaagcaaccaaatgatagttaggtgctagctggaagagtgtttccatttttgaaatattccaaaggatggggagagccgcaacaaaacaatgaaacagaattc

SEQ ID NO: 196972 - DNA, 1000 bp, Homo Sapiens
tcttgttttggtaccagtaccatgctgttttggttactgtagccttgtagtatagtttgaagtcaggtagtgtgatgcctccagctttgttcttttggctcaggattgacttggcgatgtgggctcttttttggttccatatgaactttaaagtagttttttccaattctgtgaagaaagtcattggtagcttgatggggatggcattgaatctgtaaattaccttgggcagtatggccattttcacgatattgattcttcctactcatgagaatggaatgttctcccatttgtttgtatcctcttttatttcactgagcagtggttcgtagttctccttgaagaggaccttcacatcccttgtaagttggattcctaggtattttattctctttgaagcaattgtgaatgggagttcactcatgatttggctctctgtttgtctgttgttggtgtataagaatgctcgtgatttttgtacattgattttgtatcctgagactttgctgaagttgcttatcagcttaaggagattttgggctgagataatggggttttctagatatacaatcatgtcgtctgcaaacagggacaatttgacttcctcttctcctaactgaataccctttatttccttctcctgcctaattgccctggccagaacttccaacactatgttgaataggagtggtgagagagggcatccctgtcttgtgccagttttcaaagggaatgcttccagtttttgcccattcagtatgatattggctgtgggtttgtcatagatagcgcttatgattttgagatacgtcccatcaatacctaatttattgagagtttttagcatgaagagttgttgaattttgtcaaaggccttttctgcatctattgagataatcatgtggtttttgtctttggttctgtttatgtgctggattacatttattgatttgcgtatattgaaccagccttgcatcccagggatgaagcccacttgatc

SEQ ID NO: 196973 - DNA, 1000 bp, Homo Sapiens
ccacaggccaaatctggccctccacctgtttttgtaaataacatgttatcaggacacagccacactcattcatttacatttgtctttggctgctttcatactacacagcagagttatgttctaacagagaccctaaggcctgcaaagcctaaattatttactctctggtcttttgtaggaaaaatgtgctaatctgcattctataacctcattctcccctggttttcttcctctttttttggctctgctgaacccctttgctgagagaacatgtaagagccagttctaaggtaagattgtaaaagctctggtcaaaaaatacttgaaatattggagaaactatacccctttccctgctacctggttcaagaaatagtgcctgagatttctttttaaaaaaatagaaaggtatcctaataaatacaattgttgtgaacagatatgttgcattatctaatacagttttcatgaccagctccattttacggatgagaaaacaaatggaagcacagagattgcagtagctttcctatgatcacacagctaagaaatagcctgagggcccatgcccctaatcaccacatcagactgcctccagagggcactgctgtttcagagccagcaccaaatgaaaagacggaagatgtttttgagcaaataaatgcagtatgtggggttgggtgagttttccaaaggttagctttgtagttttggaatgcaagatcacattggaaaggtagcgaagcctggagaaaaacactcaacaaaccatgactctgcagaacaatcttatgacatctagagagctctgtgcccactaacacagaatgtgaagcaagtgcacacaggattaaaatcagagcaggttggctcttgcacattgcactgtcagtggacgctattaatgagtctttggcgatttgaaaacagagcaatgccagaggcatatgcagaactgtgcacggactaaggtttttcttctgtctcccctattgaattc

SEQ ID NO: 196974 - DNA, 1000 bp, Homo Sapiens
gtacaggtttcttttggagggtgataaaaacgttctaaaattaatcgtgatcatggttgtgcaactctgtaattatactaaaaaccactgcattgtacattttaagtgggtgagttttatgtgaattatagctcaatagagctttttttttattttaacagaccattgaatcaactgggggatgaagtaggggtgtgtgacaggctgacaggtacaacacatacaaagggggtggcagggacagagcattttgtgcccctaacattgggcttcctggctgtccaggtactgaagtggggtgagaaggagttgcatttgcaaaggaggaagctggctttaaaagttttacaacctttgaaaattgtctttttaaatgtttgtgacaaggctttggttgtcatgccctggctatagcacagaggaaagtgtagggaagattataggaaaacacacattgttccttaggaaccaagttgatcctgggcttgcccttaccatctaacttgtccattgaacaagatgttcatatcctaaagacagttaatacagactgcaaatagctagtcatttcagaagagcaaaactctcagactcgttgactccagtgacttgagtaccctgctcatgttaaaggatgtttcctagaggtgtttcctagatgctgagaacttccagagccttctccagaatgcccagtcacttccccacttggccaagtagtgatctattagtgctaaatgaaagctttttaaaatttgtttttggtttaaaagaaagtctctcagcttgtatccagtaaagcacagctccaaatcaatgatgagataccccaacacagacaattatttaggataaacaggcattagaaacctcaggcttcctaacctaaagtgggttcttcacctcttcatttgggaattttaagtaaagcaaaagcactgtgatgttgctgctgcctttcagcaaaataatatctaggattttttttcccacagaattc

SEQ ID NO: 196975 - DNA, 1000 bp, Homo Sapiens
tgttttttttgaaaccatccacccacttcaacactctgttaggataatggccaagggtctatggatgcggaacgcctgagagacaaaagtcttcacaggatctgaatcatgcaggtaccctttacaagttaggaattaattaaaggaggccggacacagtggctcacgactataatcccagcactttgggaggccgaggcagacagataacctgaggtcaggagttcaagacgagcctggacaacatggcgaaaccccatctctactaaaaatacaaaaattagccggcggcaagcacctgtaatcccggttactagggaggctgaggcaggagaatcgctggagcccaggaggcagaggttgcagtgagcagagatcacgccactgcactccagcctggacaacagagtgagactctgtctcaaaaaaaaaaaaagaaaaaaaagaaaaagttacaggcttttggaggtaaaaactgggaggagaaggacaatcaagagagacaggcacagtgtactgaacatccactaaacccaggaccacagtaaaaacagcagcagtgctgaacactcaggcacatggctttccttcggactagatgccctcttgtccagtttgctgacttaaagaagttggaaactctaccatccgccctcgcaagtcattattcaacaacaaacaggagctatatttagaactttttccatgaaggcaccataggcaaaggccaccaacctctgagacacagaaaggttaaataaggctatctgaccaaaaaaaaaaaacaaaaacaaaaacaaaaaactttaataggcaagttccatttcagattcatctgttcaacatagcttctaattttataaatggaccttaatattaacaggcggacaggcagtttttcccaggagcctctgtgtccgttctgcaaaattacgtaactcggaaaacaggggttctgatttgattatactttaaacagcctgctggctgagatgaattc

SEQ ID NO: 196976 - DNA, 1000 bp, Homo Sapiens
aaaccgaagctcagataggtcagatgactggcccaaggtcacacagctgctgagtggcaaagcttggaacccgggcagtctggtctcagacactaccctctcttgctactaagtcagtcgtgctacagcgcacattactttttttttttttttttttgagatgaagtctcactctgtcgcccaggctggagtgcaaaggtgcaaccttagctcactgcaacctccacctcccgggttcaagtaattctcctgcctcagcctcccaaatagctgggattacaggtgtgcgccaccacgccgggctaatttttatatttttaatagagacagggtctcaccatgttggccaggctggtctcgaactcctgacctcatgtgatctgcctgcctcggcctcccaaagtgctgggattacaggcgtgagccaccgcgcccgacctcagtgcacacagttctaacatgcctagggggctggtccctcaggccacaggccatgagaagcagcaactacaagggaagagccgctgctggaacacgcccagcggaacagggggaagccaacaatcccggcagatgaaggaaaggaaccggcaggcacaccgctctcacgccaatgcgtgcggacagcctggtgggatcagcaggaccatgacctgagcctgcctgccaggcacagaacctcaggcgcacccaggcagacccacgatggggtgcactcagccccgtatcattcatgctgcaggtcagcctaggaagggatcgtgcagtttggtaggtcaccttctagaatggattgaaaaggattatctcgcctaataagggcaggtattactttatgaggctcatttcaagcgtgcatgggtatatgtgtgtgtgcagatgtacgtatgtgtgtcgcgttgcagcatgaaatgattttccactatggattctcttccaacaggtggaaggagcgtgaccacccctgagtaagccgccatttattcctgcaatggaattc

SEQ ID NO: 196977 - DNA, 1000 bp, Homo Sapiens
tccacacaagagcttctgagtacattgtacaaacttccaaaccccaactgggtgaggtttctgtcttctccggacttctatattggggttggggggcctgtggggaggggttttcaagacccaatcttgagtttggaaatctaagtcccaaagcttgctcctgacagaggccttctaagaagggttaggagacagacttcttcaccctgcaccatcccaaagtgcaaaactggggaggggtaagtttcctgggcaactgggcaaagatgcaggtggcatttggaaagtgtgaggtctgggttcacttccggctctagctcacaacctagatcttccctcttccttagcaccagcctcaggatcagtcctgcggttcctggcccctcccgatcccaatatccagggttcccaggcggcttccccacaccccatcccccacgctgtactctaagctcttttgcacatggtaacgcgttaatatcccacaaaacccacacacacccctgcagtggagtggtaggagggctccctttgccagcccttccaggccaggggggagagagtgggagattaggaaaaggaggaagaggatggaggggaagagggcgggggaggaggcagaggccgcagaaaggcctgagatgcaggaagcagctgggagtggggggaggctttgtgcctgagttgttctctgggtcctagggcccattgtgttcaccagtttctgggatgtgtggactgaaccagctcacctggacctgtccagagggcggactctcacacccagggcccaggcagcgccagcaccctagctgtgtatgcggggggtgcagagggcatcaaacagctttctgggttgccaggacaggggatgtgtaagtcactgtcaccctccccacccccccaccccaaccggaacacagtggccaggatcctttaaatcagagacccaagttagagctctcactggcgaaactttggccccaggcctctcgaattc

SEQ ID NO: 196978 - DNA, 1000 bp, Homo Sapiens
ggctcgaggcatccatgatgggtggcacctccatgccttcccaggcccaggagctgggaggggcagcaatggccctgatctggctctctctattttcagggctcagcggagtcctacaccagccgtccatcagactctgatgtatctctggaggaggaccgggaagccttaaggaaggaagcagagcgccaggcattagcgcagctcgagaaggccaaggtgagaaagatgtggggaggggctgtgctggcatgatttcccccagtcctgggctgtagagagagcccagacagaaccagggccaagtcttgacccagccacttcctagtacccctgaaccttgctcctctgtccttcacctgcacaatgtgggctataatacctgcctgcttatacagtataataagtataataagtgcgtgttattatactgtttccacacataataagggcttgataagtgctaaaaatttctttttttttgttttttgagttgcagtcttgctctgtcacccaggctggagtgcagtggcatgatctcggctcactgcaagctccgcctcccgggttcacgccattctcctgcctccgcctcccaagtagccgggactataggcgctggctgccacgcccggctaattttttgtatttttagtagagacggggtttcaccatgttagccaggatggtctcgatctcctgaccttgtgatccgcccccctcagcctcccaaagtgctgggattacaggcatgagccaccgtgcctgacctggtcctgactcttaatagctgtgtgatcttaggaaagtcacattaaaaggaagataataataccacttaacttcagaggattttttatttttgtgatgaatataaatgagagaatatgtgttaagtgtgtaacatggtacctggaacactaaatggtcattactgtcattattgttttttttaatttaattttaggccaggtgctgtggcttcacgccctgtaatacc

SEQ ID NO: 196979 - DNA, 1000 bp, Homo Sapiens
tctggaaattgggatggaagagttaaggttgaggttgagatccacgttcttttgtttcaacaccagtttgattctcgtgtctgaacggatgtctcagtcttttgccttgtttttaactataaactggcattatttgggaatactcttgggctaaatctggattgttggaagtaagaaagccacatttttttttaaatccaaaaatatagttagatacaatgaataagatctagtatttgatagcacaaaagggtgactgcggtcaacaataatttactgtacatttaaaaataactaaaagaatgtaattgaattgtttataatacaaagaaaggataaatgcttgaggtgatggatatcccatttacactaatgtaattattatgcattgtctgcctgttatcaaaatatctcatgtacctatacgcacctactaaatacccacaaaactaaaaattaaaaaaattccatgcataagtcatggttgcctctctagatgtttgttgtgaaagaatattgtcctactaattttgaattttttttttctgaaagagattctttttattgaaagtttcatgtcatagatcggcaaaattgttttttcttttgaccttacactgcttcagaatatatgttttggagtgattccagcttgaggcaaggaagttaccagattttcctgaatggaaagtaattgcagatatatttataaaaaggtccagctttagctcttgaaagctttgaggagttactgtggataaaatcacaaagccataataggttcatacttttacccagttgcatttggcctttagatttttgccccattagcttgaggagttacattcttagtttttcttgaaccatcaacggtggtgataaaggaagatgatactcatttttagaaattcttaaatataagtgttcctaaaattaattggatgttcttaaaattaattggatgccttgttggatatctataacctgaatgaaggaattc

SEQ ID NO: 196980 - DNA, 1000 bp, Homo Sapiens
gcccagggactattgcagaagaggtgggcatgtgagattgtaagggctgattttgagagataaaataagttcagtttctctataaattaatcattaatgtcaaaggcacactgatgcaagaccagcatatgggcccctgtgtcaaattaacaaggttttcttgaagcattaaccaactccttattaaaggttataaaggtttatggaagttatatcttatggtcaagataaaaattttatagattgcttataaaattttggaaaaaaatttaattgtcttcatgccgtttttattagggcttatcatttggaaaattaagtctcctgtctcaaagaatgaaggtttttgcctttttaaaaaatctttgaattattactttggttaaatgaatgacttattttacaatggcctgggatcctattttgtaatatcaagtgttttaaacttttggtatttgacaaagtttccaaaattaaatgataaattatctctttctgacctaagtaactctttaagatattaataggttccctaaagtccaaaaatgacatatttggcttacttggtataaaaattatacaggaagcattgacaaatatgaaatggtgtttggttttctttgggctgtatttgtataaatatgttagtcatatatgttccaaaattatgggaaactcctataatactgatatgacttaatgtatgttatcagtaataattgttacattaaagtattacgtgccacagaagtgacagatttcctgtcaattgtgtctttgactatggctgcactaaaactttttgtcatccacagacaatttttgtcttgttttggtcctctttagaaggtggttttataatcagctataaaactctaataggtgctcttgaatgcaggtttctgataactttggagattgtgacatcagaattaaggaaaaactttcagtactcatggagagcttaaatgttcatgaatatcacgcagaacaggaattc

SEQ ID NO: 196981 - DNA, 1000 bp, Homo Sapiens
agaacagccccaagggctgctggttgctcatttttatggttatatgttgatgatatgctaaacaaggggtggattattcatgcctcccctttttagaccatatagggtgacttcctgacagtgccatgggatttgtaaactgtcatggcgctgatgggagtgtagcagtgaggacaaccagaggtcactctcatggccatcgcagttttggtgagttttagccagctcctttactgtaacctgttttattagaaggtctttatgacctgtattttgtgctgacctcctatctcatcctgtggcttagaatgccttaaccgtctgggaatgcagcccagtaggtctcagcctcattttacccagctcctactcaaggtggagttgctttggttcacacatctctaacacagggaacttccagatagctgaacccatagaggttctgtactggaaaggggtccctatccagaccccaagagagggttcttggatcttgcgcaagaaagaattcagggcgagtccacagagtaaagtgaaagtgagtttattaagaaagtaaaggaataaagaatgtctgctccataggcagagcagcagcaagggctgctccactaaggatagttatagttatttcttgattatatactaaacaaggggtgaattattcatgagttttctgggagaggggtgggcaattcccgaaactgagggttcctcccccttttagaccatatagggtaactttctgacattgctagggcatttgtaaactatcatggcactgttgggagtgtgttttagcatactaatgcattataattagtgtataatgagcagtatggactaccagaggccactttcgtggccatcttggttttggtgggtttgggccagcttctttactgcaaccagttttatcagcgtggtctttacgacctgtgtcttgtgccgacctcctgtctcatcctgtgatttagaatgcctaacctcctgggaattc

SEQ ID NO: 196982 - DNA, 1000 bp, Homo Sapiens
cagcctgtgcttttactgtgtgtggggcactcttacaaacacctttacctgcatcttctcacttaatgctcacaacaatccaatgacagaggccctacgatgatatcacttttagatgaggaaactgcagttgtattgctagcagatggtgggtccaggattgaaaaaaatcaatctaacatgagaattgagctcttaacctcttcataattctgcttcccgaagaataatatcacctcatatttgtttacagcaccttgacttgcgtcgtattttcaaatttgctatattatttgtccccacagcagcttgctagacagagctatagaccctgagtcgttattgttgtttaaaagataggaaagcagacacagtggtggagggtgtggaaaagcacaaagctcacatgcagcaggatctgcactggaacctggtcagggccctgcccagcacagaataaaccagttcccagatggaacacactgggctcaggaaattgtccgaatgtgtgtggtgcctggctggagtgtgggcagccaatacaggatgtccagggcaggctatcaggatggcaggatttcaggactcttgaaatagtatacctggttttaaatcctggctctagccagtgaccttgggcaagaattactcagctactctgtgcctcagtttccttgtctataaaatggagataataacaattttaccttttttgtattgttttgagaatcgagttaatatttgtaaagcacttataataatctcagtgtatggtaacggttagataagtgttgttaagtcaatcaaatagatacataaaataagacaggaggagatgtcctaaccagaattgggggtctggtcaactgagctcttgagtgaatcagaactctggacagctcccaaagcttcagatgcaccatattgattccttctgctaggtaaagttctttggcagtgaaatggatctcaaccctttattcttaattatcataagctt

SEQ ID NO: 196983 - DNA, 1000 bp, Homo Sapiens
tatcaactggaaaaatttaaaatttacctatagcctggaagcccctgctttgagctgtcctgcctttctgaaccaaaccaatgtacatcttaaatgtattgattgatgtctcgtgtctcccaaaaatgtataaaaccaaactgtgccctgatcaccttgggcacgtgttctcagggtctcctgagggctgtgtcacaggccatggtcgctcatagagtctgactcttttcgttgacaccttgatgctctctcccttctccaaacccctgtggcaagcaagatgtttgcttacctggctcagcatttacaccaacttgtatgcgatctagtcattttgagacagggtcccactctgttgcccaagctggagtgcagtggtgtgatctccgtcttctgggcccaagcgattcccctgcctcagtctcctgagtagctgggattacaggtgtgcgccaccatgcctggctaatttttgtatttttttagtagagacaaggtttcaccatgttgcccaggctggtctcgaactcctgacctcaagtgatcctcctgcctcagcctcccaaagtgctgggattacgggtgtgaaccactgtgcccagccctctgggcatattcttgtctctgagctgactgcttgtctcatcctgtctcttagatgactactgcatccctcagccccaactccaattcctactgaccgattaatgattaataacctgaagatgcaatatggagctatccatcaatgcattctgttagtattcaataagttcctacaatgcgtcaggcactgaaaatacaatgatgaattaaacagatatagtagttataataattatattaataataataattgctaccattattgagcagttactatgtgccagccattctgctaagcacttcacaaattttggcttttttagtccttataacaatgttctagggagttagatactattattataccctctttccagaaataaatatgaagctt

SEQ ID NO: 196984 - DNA, 1000 bp, Homo Sapiens
ccgagtagctgggattacagtgtctgggtcttaggttcctcatctgtcaaatggagacagtaatagttgattacataattttcatgaagattaaatgagttattgcacgtttagtatagtgctttccccttataaacactcactacttatttttattttttattttttacttttgagacagagtcttgctcttttgtccaggctggagttcgagtccaggctggagtgcagaggcacgatttcagctcacttcaatctccacctcccaggttcacgtgattcttctgcctcagcctcttgagtagctgggactacaggcgtgcgccgccacgcctggctaatttttgtatttttagtaaagatgaggtttcactatgttgcccaagctggtctcaaactcctgacctcaagtgatccgcccatctcagtcccccgaagtgctgggattacaggtgttagccgccgctacttatttttgtaagatgtccttttatctttgatagattatgtacttatttatttatttgagacagagtctcgctctgttgccccagctggagtgcagtggtgtgatctcagctcactgcaacctctgtctcccgggttcaagcaattctcctgcttcagcctcccgagtagctgggattacaggcacgtgccaccacgcccggctaatttttgtatttttagtagagactgggtttcaccatgttggtctggttggtctcgaactcctgaccttgtgatccctccgcctcggcctcccgaagtgctgggattataggcgtgagccactgcccccatccagactgtgcatttatttaagagaataaatattgtgttcatttttacagacccccacagagcctgatgcataatagctccttgataatatttgttgattgaatgaatggtagctattttaatggtcagagccacctggactcatttaagttgcaatctatgcatacgagattggaccatatccaggcaagaattc

SEQ ID NO: 196985 - DNA, 1000 bp, Homo Sapiens
ggcgtgcatcaccacacccagctaatttttgtatttttagtagagaccatgttggctagtctggtctcgaattcctggcctcaggtgattcacccacctcagcctccaaaagcgctgagattccaggcgtgagccaccacgcctggcctcatcattctattttaagtagttagtccatggtatgaatgtgaaataatttaggcagccagttcactatgaatagggatttggttgtttccagtgttttgctatttcaaataatattgccgtgaatgacctcattctacgtcattccacgtgtgtggaaagatgcacatctgacagatccccagaggtggctcactgggtcaaggaggatagcatggataatggagacagctactgccaaactgtactgcccatgggatggtaccaattgaaccccaatgaaatcagcatgaaggtgagggtccacgtgctcacccaacacgccgtgctggcacccccgtggctggcaccaactccaaagcagcttttgtctatggtgtttgctggccctaccgctgttgcctctccctcctctgtaatgaagctccccacctctgctttagggaactgcccctctcccgctggacaggactcttgtaacacaacaccactctgaccagagtgcgcccctgactctccctgggccaatcatggctccccgctcccacccctgcacatagggactgagatggacacacaatccaggccaatcagaactcctccctggaatgtatctaaccagagctgttggaaaggagctttccttcctctctgggggaaattcagccattaaaatgtttagcccttggctgggcgcagtggctcatgcctgtaatcccagcactgtgggaggccgaggtgggtggatcacctgaggtcaggagttcaagaccagcctggccaacatggtgaaacctcgtctctattaaaaatacaaaaattagccaggtgtggcggcgcatgcctggaattc

SEQ ID NO: 196986 - DNA, 1000 bp, Homo Sapiens
attactactttcagtacttccaagtactaatgcagaaagaagttcaagaattcttctgtgagtggctatattagatactgctaccacaccaggtccttttcatctggtttgactggtattttttaaaccttgctaaatctactttttctttcctatttacttacctcgtctcaaaatatcatttgaggatgacattaatatattatctgtcgtgcactctataacgaaagaaatccgataccaggttatgatacgaaaaaactatctttggcaattacatttgttttgaacttttcttatttgttgatcttgagtaaaattttacacattatgaaaggcctagtagatgaattagtgggggcttctcaaataacagacagggacctaattgcgaatccctccatcttaagtcttagattatcaacggctgcctctgtctcctcttcctgaaagtatgccaggatttctggtggaataaagtagaaacagtagaggcacttcctttctggtttctagattacagacttaactgtcagtaacctcttccctattccactttcatttcctattttaaaataaattaaaaatagttacttctgaaaacaaacaagggtggggccaggcgcggtggctcatgcttgaaatcccagcactttgggatgccgaggcaggttgatcacttgagcccaggagttcaagaccagcctgggcaacgtggtgaaaccccgtctctgcaaaaaatacaaaaattggctgggtgtggtggcgcgcgcctgtggtcccagctacttaggagactgaggcaggagaactgcttgaacccaggaggccgaggtagcagttagccatgatcatgtcactgcactccagcctgggcaacagagcaagatcctgtctgaaaaataaataatatatttttttaaaaggtgggaatatctgaaatatattttgaagttgctctgtaggaccagatgaacagcttctcacttgcaggaattta

SEQ ID NO: 196987 - DNA, 1000 bp, Homo Sapiens
ccctgctgtcttctcatctacactctaagatcctttttttttttttgagatggagtctcgctctgtcgcccaggctggagtgcagtggtgcgatctcagctcactccaagctccgcctcccaggttcacaccattctcctgtctcagcctcccgagtagctgggactacaggcgcccaccatgatgcccagctaattttttttgtatttttagtagagacagggtttaaccgtgttagccaggatggtcgcgatcttctgacctcatgatccgcccacctcggcctcccaaagtgctgggattacaggtatgagccaccacacccggcctttttttttttttttttgagacggagtttcattcttgttgcccaggctggagtgcaatggtacgatcttggctcattgcaacctctgcctcctgggttcaagtgattctcctgcctcagcctcccaagtagctgggattacaggcatgcaccaccatgcctggctaatttttgtatttttagtagagatggggtttctccatgttggtcatgccgctctcgaactcctgacctcaggtgatccacctgcctcggcctcccaaagtgctgggattataggcatgagccactgcacccagccttttttttgagatggagttttgctcactcttgtcgcccaggctggagtgcaatggtgcaatctctgctcactgcaacttccacctcctgggttcaagcgattctctggcctcagcctcccaagcggctgagattacaggtgcccgccacaacaccgggctagtttttatatttttagtagagatggggtttcaccatgttggccaggctggtctcgaactcctgacctcaggtaatccacccacctcggcctcccaaagtgctgggattacaggcgtgagccactgcacccggcctctaagatcctttaaaaaaaatgtttttatccctaaatacaaagctccaatcgtgctactaaggcaaagagaattc

SEQ ID NO: 196988 - DNA, 1000 bp, Homo Sapiens
gattttaccctcctgattgtgggtcccatttgcctgcttctttgcctgtctagtaagctttttattgtgttctggatattgtggatgctatataaactgattttgttgtttttctttaaagagttttgacttttgttctgataagcagttaatttattggcagatcagctttatgctatcgagagttcttttcagaatttgttagtgagggactcgagtagcttttattctagagctggaataattctgctcttaaggagtaccatttctgagatctcagctgaatgcctgggatattcattgaagcctccccactctgtctggtgagaaatccaaccttgcccaatactatatgacctaaggactctatgtttagctgatagcccccagtagctaatctctgctaggctttgtgaaatcttaccttcaagtgaagactaaaatttttccagatacttaagataatccctatgaaggtttctagagttcctttctacatagctcccctttctcaggtatcctaacctgcaaattccatttccctcaggagccccaaactctgatcttggttttgtcttcccagtgaagtcacagctatctgggcttttcttccctatgcccagatttagaaagtacccccaggcagaaaactagggctactctggaacctcgtgagtttcccttctctagaatctcagcctgtgttgtctattgtctagtgcctgaaaacaattatttcatatattttgtttagttagttttatatttatctccatggaaaggttacgtctactacctattactctatcatggctgaaatcaagtcagtgattattttgagttatgcagaattatttactactcaaagaggtatatggtagggccctctgtcgtgtatgagctgttaccaccttcagtaaaagaagtgctctagtatcatccacggcccctaaatagcaaataagaatgaattttatgggaataacatccaggtgaattc

SEQ ID NO: 196989 - DNA, 1000 bp, Homo Sapiens
ccggccccgccccggtgcccgcccctctccagcccgcgcgcgcgtgctaggcccctccgggggcaggcgctggcggggacccggctcgctgacctgcgcctagtctctggccgcgtcactcgcccggcgcccgctccccaagtggggcccgcggccgggcggcgctgggagaggcgcccgccccccacccccgccggccccggcacctcagccctcgcctcggcgggagagggcggacacacctgcgggtggaggagtttattggacactgtcctccctgacaggagggggcctggcagcgcgcgggcacagggtgccggcctggggagagagacgagtgcgaggggccgggagggaggcgccgccgagaaacttctccaccgccggcccggccgcccccctcgccaccgcaggtgcccggctgtcggaggaggcccagaggctgagccctcgcgggccctccgcccccactcccggcctctgcccgccccgccaggctccgggtgggccctgggcgtcacctcgccccgggcgccgtcggcacctctcttctccacgccctgcgccgtggactaagcacgcaccagctgatatgtccataacaagtcacaagaccatcagtgcaaatcaggccacagccctccgtgcagaagcgcttcccacgcgttcactcctgtgcccagatggcatgcagaaccttgcggctcccaggcccaaccgcgcaggtcccagatgggcacaggtcatgttcccaaaatgaggtcagaagtcacctttggggaactctgaatgcatctcttcatacagacaacattttacatcagcatttcccaaactggccctaataggtgctcctcgagaaagggcttgtgtggtcaggaggtttagagccaggcccactgggccagtgcagcatatcaacaaataacgtcccctccctcaccgagttgtagtaaatgaacctttatagctttgtttaatctagtatttccttgaattc

SEQ ID NO: 196990 - DNA, 1000 bp, Homo Sapiens
ttccccagtcctttctattaggttggtgcaaaagtaactgtggtttttttccttttttttgccacctaaatagtactcaaatccacccattaacctctaccccagctgtcaccactatagccagatgctaatcatcttccgcctggtctctctgctgtctaatcatgtcccttcctgatctttcctttacacagccatcagagtgaccattctaagatataaaacaggtagttttacctctacgcttaaaggacttcaacatcttttatgatacaaccaagagttcttctttagcctggcaaggcccttcctgatctgtctgtctgtccagccctacctgtcactattccctcaatgctgcagctcattacttaacttctttcaatttcattaatatgccaaatgcttctcttattttccctccagatctttgaagctgctactctttctgcccaaacaatttccctttctctgaagtcctcctctccccaacacttggctagctcttccttttccttcgggtctcagattagacgcctcgaaacttggaagccttgtctggcctctgcacaccagttctggcttagctgttgctgctgaggactcccacggcatcctgtacttctcccaccacagcactcagcactctggaatggaactgcctatttcattaacattccctgcagtgggccatatctccatcagggctgagaaccctgactgtctcacgcaaaatctaccctctgcccctgaacagtgatggagccatggtagaagcttaatacctgatacataatgctctaaaaaattttgcttgagacatttcaaacctccagaagggtaaaaaaaatcttataatagtataacagacattcatacccaccagctatattcagcaattgttaacatttagccatattttctttatctaaccatctacctctctatatttatttgacacattattttaaggtaaaacacagagaaaacaagtgaattc

SEQ ID NO: 196991 - DNA, 1000 bp, Homo Sapiens
tatcaattcttcctatccatgagcatggaatgttcttccatttgtttgtgtcctctgttatttccttgagcagtggtttgtagttctccttgaagaggtcctttacatcccttgtaagttgtattcctaggtgtttcattcactttgtagactttttgaatgggagttcactcatgatttgactctccgtttgtctgttattggtgtataggaatgcttgtgacatttgcacattgattttgtatcctgagactttgctgaagttgcttatcagcttaaggagattttgggctgagactatggggttttctaaatatacaatcatgtcatctgctaacagagacaatttgacttcctctcttcctatttgaataccctttatttctttctcttgcccgattgccctggccagatcttccaacactatgttgaatcagagtggtgagagagggcatccttgtctttgctggttttcaaagggaaatcttccagcttttgtccattcagtaagatactggctgtgagtttgtcacaaatagctcttgttattttgagatgtgttccttcaatacctagtttattgagggtttttagcatgaaggctgttgaattttatcaaaagccttttctgcatctattgagataattatgtggtttttgtcattggttctgtttatgtgatggattatgttaattgatttgcgtatattgaaccagccttgcatctcagggataaagccaacctgatcgtgttggataagctttttgatgtgctgctggattcagtttgccggtattttttttgaggattttcgaattgatgttcatcaggaacattggcctaaaattttcgttttttttgtgtgtctctgccaggttttggtatcaggatgatgctggcctcatgaaatgagttaaggaggattccctctttttctattgattggaatagtttcagaaggaatagtaccagctcctctttgtacctctggtagaattc

SEQ ID NO: 196992 - DNA, 1000 bp, Homo Sapiens
tcatgtagacatcaggctttataaacaaaactggatggaatttgctttatttttacccttttcttcccacctttatataatcaatagtaatttttaactttttataaaattataaaattttataaatttataaaagtaaatttataaaagtaattataacttttttatcattttaatggcatatgtaatttattgcttatttcagcctcacagattcttggcacttcctctgtcattctactaatattaataaatattttattttcccatttcagtgttaagagaaatgaagtgttctctgcaactagcaaactcccttactcctttagaaaaatcacagtgctatgaatgtcagacaggcatttctctggtcactcttgttttcccttagatgtgaaagcttcctagggtctggattccaccagaagtaaacctgtagtgactcctggtttagccaggaggaaggaagtctgtgtgccggttttagggaacagcttgtatatgacagctctcagaacttcaagtctcatgaaattccaaaacaggtttagatggttgccaactctttgacatgttaaagacattgagggtggggcaatgatcttttgatactaccgtgatttcttataaagaagattgtagtaggcatacaatctcagactacagaaggtttttctctagtaaggaaccacctcacattgacacacatacacatattcactgtatctgtcctagtttctctcatttttctgaggaccaatgataagctggctccatactgaacagatactgtccataggctggtgtgtggggagctctgctcgggtcctgaagccttctctttcctagtgtggcctttacaaggtctggagctctttctcccatttgtgattttcctgggtgtcacagttactccaagctggcttcctttcctaaaagtcaagagtggcttcaggccactctccagattggtcatgtggtgtgcatgctcattgaattc

SEQ ID NO: 196993 - DNA, 1000 bp, Homo Sapiens
actttcttttcctgaaacacagtctccccgccccgcccagcatcaggccgcagggcggaatgtaacatcttgtaatgcggcaatcactgccaaacccgtccccgcgaggggaactcccgcggggggggaagggagatcgaagggatgtggggcctcagcatccgccttcactggtgtgtgtgggggcgggggtggtgtgggctggcggcggcgtgcctggcagatcctgggtggggagggaagggaaaggtcggccgggggaggcttccctggggctgctttgggtgttaggatcctgctagaggccgccagtccccgcaggacctagtgccctagcgccaaggctggaagtaacgcggcccccaggatagcgccccatcctacagcttctaggattcctggaccccaaagttgaattcgaagggaaaggacctatctgtatttttggaggaggagaggatctgtagcttaattctcaaaggagtctccgaccctaaacaggttaaagccactggtggtcgctgttccatggagggaaaggagcgggcttttgacttttgagcgagttcgggggacgccaggagtgggggagttgcactcgagttttactgcccgtaagaacgactttttgagaggggacggggcttcttgctcccggacattgttctcttgggcggaggggaccacttcagagcttctctttgcacccgcctcttctgcccctcgtcttctaccactgaactgtttgtaaacaaagttccagtcttcccccgctctctccgcctccaccaaaccggtatttctcccaaattcgctccatcagtctgggatcgttacacagggcggatattcacaattttcacaagtgatcctgaaagaaggcctaggggaagcctcctaaacggtcccacattgcagcagggctggtgaggcctgggatccattctctctcttttctgcccttcccatcccggagtctcggggccggcggcgggaattc

SEQ ID NO: 196994 - DNA, 1000 bp, Homo Sapiens
aaccctgtctctactaaaaatacaaaaattagccaggcgtggtggccggcgcctgtaatcccagctactggggaggctgagacaggagaattgcttgaacccgggaggcagatgttgccgtgaggcgagatcacaccactgcactccagcctgggtgacagcgcgagactccgtctcaaaaaaaaaaaaaaaaaaagacttgaggtctatacacactgaaattgttatcccttttgatgaagaggtaaatttggaaatgatgcttaaaattttggggtttggtttcaataatgatttattgaatatgttgaatgtaggcagtatgttgttttcacatttatcatttaaaaattaattttaactttaattttaagttctggggtacatgtgcaggatgtgcaggtttgttacacaggtgaacgtgtgccatggtggcttgctgtgcctatcaatccatcacctagttattaagcccagcatgcattagctatttttcctaatgctctcccttcccccaccccacaccctgacaggccccagtgtgtgttgtttgcctcctttgtccatgtgttctcattgttcagctctcacttataagtgagaacatgcagtgtttggttttctgttcctggttagtttgctgaagataatggcttccagctccatccatgtccctgcaaaggacatgatcttgttcctttttgtaactgcattgtattccatggtgtatatgtaccacattttctttatctagtcgattattgatgggcatttgggttgattccgtgtctcaagatctagaaccagaaataccatttgactcagcaataccattgctgggtatatacccaaaggaatataaatcattctattacaaagatacatgcacatgtatgttcattgcagcactcttcacatttatcattttatttaattgtagagcatggccatgcagacttggcctaatataaattcatgagcaatgtgcaactgggaattc

SEQ ID NO: 196995 - DNA, 1000 bp, Homo Sapiens
cctgggaaattaagcctttataaaacgctgtttggatgaatataactgattaactatcatttaaagaattactttaaatattacaagacatcataacattaaaaaaatcttgtggagatgaaactcctccacaattaaacatttaatcaatttataacaaagagcatgtttaatctgcatgatttaccaattaaacattgtaccctgatgtgtcttcagcaacatgagagctaaaatgagatagtttccaagggattcaaggtgggcagtgcccaataaatgcacaatggtttagagagttaggtaggtttagtgtctatcttgaaaaataagatgcgcttcagtcaactctcaactgcctccacatttcaacattcttggaccttagaaaatgacaagagaagtgctgttgtggtcattactacagatgtcagttttgacttctgaaaaatcacccctttccagcccagagagccaaagctctgaagaaatgtaccaggatctctgctgacacatggacacctgtggcttgtgctacatgttctgaaacctgagagagtgagcagccactctgcctgggaagaaacatcacagtaggcattaaaaatggaattgaagaattagaaaatctttgtcatactttttatattgggatcaggttgaagatggttttgatttgataaaaattttaaaaagactgctcacaatgatgccttatgtgttaaaaaaaaaaaaaaaaaaggacattggtgtaagagagagaacctcaaagcagaaaaactttcttttggtatattcatgatctttcctactacaggataacttctttcagtttttcttacccaacaagtcacttttttaaaattggaaaagtaaatgtaatatctagattataaacttagcatgtgcctcagtggtcacgtgagaggcagagatatcctctgtttaaaacatcctggtcagctggaaacactgagtctgaatacagaatatacatatt

SEQ ID NO: 196996 - DNA, 1000 bp, Homo Sapiens
gggaaagccattctctgcaactatacttttggtttttgtttttgttgctattttgagacagaatctcactctgtcgcgcaggctgcagtgcaatggcgtgatcatggctcactgtagccttgacctcccaggctcaagcgatcctcccacatccgcctcccaagttgctgggactataggttcactaccacatccagctaattttttattttttgtagagatggggtctagctatgttgtccaggctggtcttgaactcctgggttcaagcgatcctccagcctcagtctcccaaagtgctgggattataagcataagccaccatacctggtcaactacagttttctaatacttctcactgtttcctttaagtcccctccggcatgcaactacaccaggctggcatctgaaaccatttacctcttcccactccatctgtatatctgattacagtgtgtgtctattcagaagggccttgggctcaattaactttagactttagataaggcatgatatactctctgactcactccagataaagggccaaggattcctgccttagtgctataattagttgagaatgcaacgtggggggctctgatcctttgtttctgatgtccttcactcattaaaagtagaacactttgcctggtgctgtatcacttcaactaaacatgtgtttgttttaggttctgtttacttgtcccagggatggaatgcttctcccacttggaatggcccttgcagcctgccggccaactgcgaactatggcctgggcaaaaattcagaggcaaacactcgaatgctctctccatgttcttaacagcacttggcatggagctggcactaatattctgaacagtcatttacaatggtctcatttccttcccatcagaatgaaaagccacagagctggagggctgtgtcataagtcttgcgaacaaaacaatcttcgtgcattcacttttttttttctttttgtaatttaaggaagaattc

SEQ ID NO: 196997 - DNA, 1000 bp, Homo Sapiens
ctttagggcaggagccatatctgtgtgtcttttctctgagacttttgaactctatgctgagagaagttcttgagtactgtgctatttactaacttgttttaagaattgagtttgaaatgctgtgcacacgtggtcttcacattacatgcaggtgccctgcttgaccctccagctcttttagaaaaaaaggacctatgaaaatgtccccacaaaaaggtttttataattatttttcaacatttgaattttggagacacatggtagaaaactgtggacttgagactgatgaaatccgagttttatttctgtctctgccactagttactattgagccattgccaaataatgttactttctcagctttgagttttgtctttcgtgaaatatgagaggttatatctctggggtgatggaaaaatcaaatgagatagaaaatagtggccaggtgcagtggctcacacctgtagtcccagcactttgggaggcctaggcaggtgggtcacttgaagtcaggagttcgagaccagcctggccaacatggtgaaaccctgtctctgctaaaaatacaaaaattacctgggcatggtggtgcatgcctgtaatcccagctactcaggaggctaaggtgggagaattgcttgaacctgggaggcggaggttgctgtgagccaaatgccactgcattccagcctgggcaacagagcaagactctgtcaaaaaagaaaataaaaaagaagaaggaagaaaggtctgtggtgtctgtggaatctacaaagtaccttacaaatgaaaagaaaacagtcatatgttactgctttttctctaattagaagaggattgcatagtgaaaaatgttatatggatgaagcatgaaacagctgttggcacattaaaccatcttttttatagtatacttattacaaaattctgtaaggaagaagcttgaggatagttatcacatcatacagagttgagacctgactcagccctttaagaattc

SEQ ID NO: 196998 - DNA, 1000 bp, Homo Sapiens
accttagcctggaaacttcttaagcacagaggatcactataccagaaacagatgcaacacagacaacttctccctccctctggggaggctgacttttcagaactgcctcccaggagggacggggtcagatctagtcatcaggatcaccttgccctcctcacaggatctgttttggcactggtgacaacgcactgtcctgtgagattgcttgattggggtctgcctcccccagggtcacactctctccaagggcaggtgccgggtcaccactgtgctcctcacagggccaagtgtggccaggacagcaggaatgtgccaggggctgcggtgaaagccagggcaggcttacgctactttcagagatgtcagaggttgcaccccgactgtcccccggtaaagcctccatcagaaggtgctggctattccagttagaagagcgtccagcaaaatccctccttgtctcagtttatacccagctactcaactcaaagcacctgctctgaatttccccccagctgtcttctcactgagacactggcagacctagcatgggaaagaaatccaacaggcacatgcacttgattctaaacagacaaggtttgctccacttcacgtgctctgcagtcctctgctgtgtcaagaggggcggatccgaggatgacagtgattgacggagggcagccctgaccgcgtgcccgcagcacaaagtgcttcccatgggtagctcatttaatcgcacaaatgctctaggtcacggggctgcgctgcttttataaatgacaagaccgaagcctaaggaagttgggtcatttgcataaggagaagtcgggattcccaccagggtccacacggagtcatgctgtgccttcctgggtgcttctcccagaacccaagagttcccagccagtagcctctgtcagggtggctactgtcaggaagaaggtcttgatcaagctcctgcctgcctggatgcaacctgagaagtgcagaccaggaattc

SEQ ID NO: 196999 - DNA, 1000 bp, Homo Sapiens
cccagccacagcactcaaggaaacgacttgcctaatctcggagcgtgtctgttttgttcaggaaaatgtgaaccagctgtaacattctgtctctccagaggtgcagccacaccgcaacatggctaaagatagcccggtgattgtatgcttgcagggaggcacagaattaagcacagccaagtgggcgaaggcagtccatgcaccaagtgaccgtggctgtccagccagctgtagagtttcctctcacccaacaaatcaaagcccagggtgctccagaaggtaaatggagcccagccccaccaagaacagctctgtgggttgggagggaggcttatccagtcctctgcctggtaccacctcctgtcagacatgcctcacctcctccacttagcggagtggtgtggctttaacagccaagctttctagaaacagctgtgaaggtctgtgcagatccatgggcatgaagtggcaatgatcatatgtaaaatctaaggagagtggctttcagacgctcagagacctcaccgagtctgaagacagtcgccagcagatccctgatgaaaagggagcttcctgtaggggactgctgtagggccactgcggaagccctctgagggagcctggcctcacactaggcttccagagtgtctgaacagctatagatgacaagcacctagagatgcccgtgacgctgctgggcagcaccaggtgagccaggcccgcagttcaaccagggcagtcccagagggctccagcttgatgggtgctgccctaagagacttgggccaggcctgctctgccgaattcccagctgcacgaccgtcctctctacagcacagcagacccagcaaggtccaaggtgaaagcagatctcattgagtagcttctgccctcaggcccttcagaacacaggcgatgctgaactcacacaacacagccactgctacagaactacagttcacctctatgatggacacatgctgacagcaggaagaattcc

SEQ ID NO: 197000 - DNA, 1000 bp, Homo Sapiens
tggtactgaaggtgggttcatgagatgtttgtggattgcaactgaaggtagttcttttatctggcagctcaatctctctgacaaagtagacagctttatggggtggatacatatggaggcatgaggaaggaagagatgcccacttaggcatcaaaataaataaataaacaagatgatgaatgaaagagcaaatatttcccctatgtgctcagccaagatgtggtgacaggtttggacagcgtgccagtatcagagttgggaaatggaaaaagcacgctccatttgtggggcaatatcattatgaatggagccatatccccctcagcatccttttcctatgtgcccctaaccctcagcccaagattgtaaagttttatgtctgggaggataaacacttctgcaaaataattacaaaactgaacaatggagacttccttagtgcagcggagatggaggaagggctggaatcgggatggctttgtggtgctggcagggattttcagggtgatttagtgtggattgatctgcagtttattctgcagccattgtttgtaatgtgctttaccagctcatgtaccctgagccttaattgttctaaattaaactatagggaccagacagcacacatttcaatcagaacgacaaaatattgcaccaaatcccacagggatacatcagcccctgctaggatgggcttgtactcaagggaagagggaaaaaagtgctcaggagagcattggataaaattgaataggttctgttctatttgtatacaagataaaacccaattgtgctacctcaatctgtgtgtatgtgtatttgaataatcaaagacaatacaattgtttgcaatgtgatatttatctaaatattaaggaaatgtaaccctgagttgaattgctctgtattttgttcattagccttgagttttacaaataagttgaaatgatacctgacttgggcaatgttctgatttggctggaaaagctgcagggaattc

SEQ ID NO: 197001 - DNA, 1000 bp, Homo Sapiens
caaactattaccaatctgacaggattcttcccagagggctcctggcggtaatgaactcaacacttctcatttttgagcctatatgttatcaaaaaggacaagacagatacacaaacaagtggagacagatattggacaaacacaagaacatgagaaggagttcagtcaggcagaacagagtcaaaaccaactcaaaacctgatcttaaccaaatgcaaagtgggtgtatgaatgagccctattgcttccctggtggacaaatggcttaacaagcccagataggacaaaaataagtcccttattaagggtgaagttaactcattcttcgcgcgagtccactcctgatctccgttcttccccagtagtgggagggatatacgattttgttcatggaacagctcaggagggatcctctgcaaaatctcacctagcagctgcagggatcctcctgaagactgtctcgtcacaagctgctggctgctgaacacatcatcgtcccagcggctcctggctggctcaccaagtttgttcccagaccgaactgagggccaggctgtttattcttgcagcccaataatgagatgcagatgaactggtaaagaagagagtttattctgtaaccaggtacagggagaaggccaggaaaatgtagccagaccaactcaaaattacaaagttttccagcgctgatataccttctaagctatatgtctgtgtggaagtgtgcgtgtatctaaagacataagtgattaacctcttcgaatccaatccagaggcaggtctgagttttgaagacatttatctggaccctcaataaatttacttaatctagatgggtctaggtgccagcagtgattacccttatcttgtatcctgctaaaccatggaggtttggggagttccttcagtcccccagtaaacttgtttgtggaggtctggggagtttcttcagacccccagtaaaacttgtttaatcctatatgggtcctattaagaattc

SEQ ID NO: 197002 - DNA, 1000 bp, Homo Sapiens
gtcttgctctgtcacccaggctgaagcgcagtggcgcgatctcgactcacggaaacctccgcctcttgggttcaagcaattctcctgcctcagcctcccgagtagctgggattacaggcacatgctaccacacccggctaatttttgtagttttagtagaggtgggcttttgccatgttggccaggctggttttgaactcttgacctcaggtgacccacctacctcagcttcccaagtgctggattacaggggtgagccactacatctgaccaattattattttttatttttatttttagacagagtctggctctattgcctcagctggaatatagtggcgcgatcttggctcactgcacttctgcctcccaggttcaagcaattttcctgcctcagcctctggggtagctgggattacaggtgcctaccaccatgcccgactaatttttttgtattttcagtagaggtggggtttcagcatgttggccaggctggtcttgaactcctgacctcaagtggcctgctcacctcagcctcccaaagtgttaggattataggcatgagccactatgcccagcttaatagtgattattcttatttttatttttatttttttttttagacagagtcttgctgtgtcacccaggctgaaacgtagtggcgtgatctgggctcactgcaacctccgcctcctgggttcaagtgattctcctgcctcagcctcctgagtagttgggactatagacgcatgccaccacagccaactattttttgtatttttagtagagacggggtttcaccatgttggtcaggatggtctcgatctcttgacctcttgatccgcccgccttggcctcccaaagtgttgggattacaggcgtgagccacggcgcccggccaatagtgaatatttttaaagccactgatgtttctagcttatttgtctctcttcttagttccagacctctagatcaaaatgttcattattatagagaattc

SEQ ID NO: 197003 - DNA, 1000 bp, Homo Sapiens
gcttttaggaatggaatatgtctgagatatgtgcatggcctgacctttttgggaaaacattcacttaaaagtacaaattctgatgcaatgaaaggcaatctgtaacattaccatattgttacaccttatacacagtgcttcagtatcatatgtaacagctgatatgttaatatatacataatcttatacaattcaaagaagaaaatgttgaaatattcatgtattttcaactacactcaagttaaaggcctaccctaaaaccatctgtcttaaactgaacatgtaaccttgaaatggatttagctactgtgagtttatttcaaattactatttctaataattttgaatcccaaaattattttgttagtagggtaacaatttgactattttaactcactatgttttaatcatatagcaaaaatgccaatttattacaaaataaaatatcacatttaaatccctacttgtaaatatcttatcaaaaaaatttgcacaggttcctggcacataacgcacagaaataataacagtatatattaaaatgcaaattatgtgtatatctcattaaatatcatgatttcatattgaagttcataaaatttattaagccaagtgtaaggtctatcttgctgataaattccaacatgtagaaataagaatttctagtaagaataagaatagaattttccttattaaataaggaaaatgtaaagcaaacacactccaaaatatcctattttagagcttttttgtatcctattttatagcttttagatatgctcttactgtataaggttaacaactaaaaaactggacattaagtgtatcatttacactttgtacaacaaatttggatattgtgaaaactaaaatttttatatagataaattccagcacttgaaactttaaaatttactcaaggggacaataaggaaagatttgggaagacttatacatccagaggccaactttagttatgaagaagaggagtgaggagagt

SEQ ID NO: 197004 - DNA, 1000 bp, Homo Sapiens
ttaaatccacagagaatatgaatatgtcattccagaattcagagtcattttgaacttgaagtattgctttggattcttcatatatgaaaaaaatctattatttggtacgtgagatatttttttcttttgcttgagatcacaggctaaagagcatatcatttctcagcaatttaaatttaaatgagttagtgtgctaactttgatttgcctctgttccttcacagccacatatagtagtttgcattaatcaaattaataataaagggattagaaattgctagcttctaagggaggaacatgtcagtggtattaaaagttgcatttggaatgattatccttgcatattaattataagctggctgggatgcagaggaatttcaaggaaatgatagtctaatcatgtgttattttaatttcagaaaagatcctttaagaaacaaattgcattgcgacgtactttgtaatcagcccatgcattaatttagatagatgacctcaaatcctttaaatccactatcactggcaataattaaaaggactctataaggccgtttactaagttttgtaccaggacacaatggaagatggatttgtttacaaaatagtaattgaatacaatagaaagctgatagaaagctcatctcattagttgtaatggcgattggataatttgtgccgtccactacttggtttgtgtgtaagacttgcataagagaagaaaaacaggaggaaaggtaagaaagaaattaccactaacagttcttctccacaattgcctaatttcttttggcattctaacggatgttacttatggctccatatagcaggtgatttttcctttgttaagcgtaggcataaaagtaataatgtggcaaaaattagcaattgttaaatttgttgctgtattgttcactcaatgactttcaatctaaagaagcagatccctaagcaaaaagggccttatttttaagttccctgcccctggatgggaactggggca

SEQ ID NO: 197005 - DNA, 1000 bp, Homo Sapiens
ctgaccgtaatggtatgggtgtcctggagaagccaggttcctttgtcgtgtagctaaacacacatacatgcctaggagtcagaaaaactaaagaaggatccagggaaaggtgctgcaattgcagatccagctgctgcctctcaccacgaggtgagctggcaggtaaatgacaacgcacgtgaactacaaaatggctgctgcttcattttcagcctccaaatcccccaagactctctcttgtggtgcacatgaacagaaacataggaaagggaagtctaggcactgtatttcagcctagccgatttgacatatatcgaagccacggcagtctacctcttgtcaacttggcacccatatgtatggtagatgcatatattagttcattttcacactgctaaaaagaactacttgaaactgggtaatttacaaagaaaagagatttaattgactcacagttccacatggctgggaggcctcaggaaacttacaatcacggtggaaggcaaaggagaagcaagccctttcttcacaaggcgggaagcgccacacttttaaaccatcagatctcatgagaactctatcgtgagaacagcaagggggaaggccactcccataatccaatcacttcccataaggaccgtccttcaacatatggggattacaattcgacatgagatttgggtggggacacagagccaaaccttttcagtgcacttgacagcatagaccctgagaatgaccctgtatgataggtgcatctgaatatttgttcagaattctgagctaaggaattcaggaatggccaaccaggagcttcattcttatctataagaaacacctgagcccctggatggtcctgtggaacacctgctgtatgggagaatcaaggccttttcttttgggttaacagtaaggttgccaggtggagattgttggggggagtgctaagtgaaaatgctatataagctacatgctttctacaagcggctgcagttctctt

SEQ ID NO: 197006 - DNA, 1000 bp, Homo Sapiens
attaatgaataaattttcccttgtaaagaatcatgttagatggtacccatttatcctatgaatatttattatccattataaacaaagtatttcaagtagaattccaaatgccatgatatctaagacaacaatcctttaacttctatgaatttttcataagctaagttaggaaatagaaagttgggtgtttttgtgtatgtgaatataaatgataatttcatcagtaaagcgggcaagtattattacttaaaaaaattcctgacactttatatttacaggctactaataaatagtttaactataaagtaacgagcttcatctttagctaaacacactcatattttgaaataaatatgtttcttctttaaaatggagtcgtttttgaaagtgatatgcttatgcatttattccaatattattgaattttgttggaatttcccacataatttgttttatacatacatatatgtatgcatgtatgtataaataaaatgtaaatatgtgttttatctcatgtgtggcctatatgaatatacatgcacacacatacacatacattcatgcacaaagttttatcctctgcatgacctatatatgtaaaactacaaaatatactgctgtggttgtatttatttttgtgtgcagatataagagtaaaataaataaagggaaataacataaacatggatatgggacatcctcaatattgttacaatgttgtaatttgtaattgtaaggtgtaatttctccatattaatctataattaaatgtaattccaagtcttgtttttggaatattttactttagaatttgaaaacttaaaaaggcattttatagtgcatttagaaaaaatgtataagaaatattaagaaaatgtttcaaaaaaaaaccaagaaatttatcctatcattgaaatatattttaatatgtaagacttcagcaatgaacatgttccatattaacatatattatgtaatcaattcagtattgtaccagtgt

SEQ ID NO: 197007 - DNA, 1000 bp, Homo Sapiens
ggcgtgcacctgtaatcccagctactcaggaggctgaggcagaggatcgcttgaacctgaaagggggagggtagtggtggcgggcacctgtaatgccagctactcgggaggctgaggcaggagaactgcttgaacccgggaggcagaggttgcagtgagccaagatcacgccactgcactccagcctgggcaacagagcaagaccctgtctcagaaagtaaaataaaaaattcatagtcttaataatggaaaacaaaaacatttactgaatgtcaaaacgtctccctaaaaaccccaatcagttgggttctacgtaaagaacaattatgctctgctttctaaccatgatttttaaaagaacaaaggacaaaaaaagtcatcaaatgtggtccaggcacagtggctcacacctgtaatcccagcactttgggaggccaaggagggtggatcatgaggtcaggagttcaagaccagcctggccaatatggtgaaactctgtctctactaaaaacacaaaaattagctggccgtggtggagggcacctgtaatcctagctactctggaggctaaggcagagaactgcttgaacccaggaggcggaggttgcagtgagccaagatcatgccactgcactccagcctgagagacagagcaagactccctctcaagaggaaaaaacaaaaacaaaaattcatgaaatgtaataaataaaatatacactttggatttttccatgtacttagcttttctagagcatcttttagaattattgtttcacaaaaaacactttgggaaacgttttaatttattaacaaatactggagggctaggaagaagaggttaaaacttttcaaaatatagagaatgaattactgatacgtgtaaaaaaaaaaaaaaaaaggttgctgactccagtcatggaaggcactgtcatatggacactcctagcctcagcatctggaggtccggaaagggaaaatttcaagtcagagagaattc

SEQ ID NO: 197008 - DNA, 1000 bp, Homo Sapiens
ttacttaaaagtactttttgtcattaaaattatagcaaaggtagaatgcacttgtttaatatactctcatgattcttttgcagggtgttcatttagaagaaagcaacactaatgattcaaacagcttcctgaattttaattttgtgttgtctcacagaaagccttatcataaattccataattctaattaatttaccaagataatgtaattacatttggttttgtaaggtatacagcagtaatctcctattttggtgtcagtttttcaataaagttttgattatgggcaaatcccctctttttctttttttaaaatatatttgagtatgccatacatttatatatatggtgtatatgaatttggtttaaacattttaaaatttattctgattagtttgtgtctttttttttttttttgagagagagagtcctgctctgtcactcaagctggagtgcagtggtgcgatctcggctcactgcaacctccgcctcccaggtccaagcaattctcttgccttgtcctcccaagtagctgggattataggcacacaccaccatgcctggctaatttgtgtctcattttcaagagtagaaaccctaaatattttattttcattccttttccaaattgctatgaatgggattaaaggattacagatgtaaagtctattatttgtgaattctaaatgtagttctgctgttgtacctgtggaaacatcttaaagaagtacatattttgcacgtcctgcacgtgtaccccagaacttaaactataattaaaaagaatagtttcaaaaaaatacatattgatcacagtgtaatgccttggatttatgtggccttgctatactactatataatttaggacagtaactgctagctggagtgtgagttatttattggaagctcctttttagggtagaaaatttgaggagaaatctgaagtggcatgatttacccgcagaagtcctggttggggatagtagatggtgttgaattc

SEQ ID NO: 197009 - DNA, 1000 bp, Homo Sapiens
tgctactcaggaggatttcactgtcctgccaaacaagcagccacttctgtcatctggaccaggcaccctcacgactgccattgcccacagaagcaatggaggcttccaggagccagtccatggagtggtgtattaggttcttcagagtaacaacctttaaatacatacacgcatacatatacacatatatacatataaaataagtaaggtatggctcacatgattatggaggctgagaagtcccacgatctgccatctacaagccggagacccagaaaagccagttgtataaccggaaggcctgaaagccagagccaacggtatagagtccatctgagcctgaaggcctgaggaccatgagtgtcccgggcagaggaagatcagtgttcccagctcaagcagagagcaaatccaactttcctctggctttttgttctattcaggccctcacagattggacgatgcccacccacactggggaggaccatctgctttcctcagtcagccaattcaaatgcaaatctcttccatgaacagcctcacagacacaccagaaacaatgtttaaccagataatgctggcatccagtgacccagtcaagttggcatgtaaaattaaccatcatgggtagtttgtggccaaatggagaagaatgactctctccccgctgcatgttactttctgttaagaaaatactaaagcagtgatgcatgggccccagtgtcagagttctcagtgagaatggctgttactatttaattaaaggtctatctctaggaaacagtcctaatgggttcatgagccttggccagggtgaacctgagtgaaagacactacagaattcctcaagcctctgggaactaaggctttgtaactgaggcaaacttactgtgtctgctctggatgagtctctcctaagagcctccttagtacttaatgcaaatagacttattgctagccatgccacgaatgttacaatttgccaaatatacctgaattc

SEQ ID NO: 197010 - DNA, 1000 bp, Homo Sapiens
actgacttgggctgtattgataggaaatctcacagtgaagtgagcaccacaaagaaataagaggagacagctttgcaccttcattttagaaaattcaatacatgtaacctccagtccagcaaaccttctcaaggaagaaggctggattatcacaaaacaagggtgcaatgtgtccaagaattaggaattgggttagagccctaggtttctcttgtaatgaacagaaatccatggaggatgctccaggagacaaagtcaaaccaaacaaatcaaaataaagcaaagtaaaacttcaacattctctaagtgccgtgctttaaaatcatttttctatcttaatacactgttaggtaatgctcttcttagcaactggtacccatcagccacagctgctaaaggcaggtagcaatgtaacatttctgctcagtggttaaacaattccttcctgctcctcctcccatagatcagtgtttccaacactgccctagataggatccacctggatttttaatggccacttttttcaagtagcctttctacagaagctcctgtggcacagtgacatgagccccaacctggtatttggaaagcctgggtttgcatcctgctttgctgagcctggccctttgagatggacttcatggccaggggccttgtgcctgctgctcttcagacaggatcagcttacagagagttactgtgaattattatcaagaggccactgcaactgcctaatgtttcattttcagatgctccaattaagtttggcactttgttcagttgtgttttaacttaatgtttatatttgtgttcttaattttcctttgtgaaagaaccaaagtcaagaggaaacagcagggaaataagattcagacgggaaggctttgaaattacaaggtaatacagcaacaccacttttccatacttcttgccttggtgggacacatttgatctgcatgaacaaactcctgtggtttccattatgaataatggagaattc

SEQ ID NO: 197011 - DNA, 1000 bp, Homo Sapiens
cagacccaggttttatttctatgtgttgtttcagagtctattccagtgcatgaaaaaaaaaaatcatgtggaactagtgggagaaacttaacatacaatgtgcctgagtgattggtttccctctgctttttttttttttttaatgatttctgcctgatggtggggaatagaagcaattagtttggctatgtaggatcactgataaatctggggattctaagattaactcatacaattctagtcgtaattagaaatatcaaatacattttcacctgtgcagtaatcacgtaatgttcatttatttgtcatgagggggtgatgattcagcactcacaggtatatctttaaatattttcagacgaaatgagcatggatttaaggaggaactaagaggaaaaccggatcctagtctgtccttcatcttgaaagaggactattggtcatgttcatatattttatcatgttgaatctgttcatcgaaacatagccaatagtccaggcaagcctagagagaagatatatgtatatatatatatatatatatatatatatatatatatatatatacacacactatttgaagtttcacatcagttacagataatactttacaaattaaatgttgttggtcttttatttgggggatgccttattagctttttaaaaattagtttttaatagcagcatttgtttaagaaggaagaaaaaatgcttggtggtaccttctggaaggtacattaatcttgttaatgacaccacagttcatggttggcaaaacaggacttttgaatcaacctgtattgtgtgtgtgaatgtgtatgtgcttgagaaagaaggccagggcactaaagatacatgagaagtgcatgaagacaggatgcaggatttcctatgattttatgttgttcttaattaggaagcatattggcagcaaatgctaacatgtgttaggatgtttagctgaagccaaataaatgttttctattacaactctgaattc

SEQ ID NO: 197012 - DNA, 1000 bp, Homo Sapiens
atagattactttggaaagtgtgatgattttaacaatatgaagttttttaatccaacacatagtaggcatttctgtttaatttatttaatgtctttcagcaatactttatagttctcattgtacaagttgcacctccttggctaaatttgttctaatgtattttgttctttttgatgctagtgtaaatgaactgttttcttaatttctattcagatttgtcactgctaggttatagaaataagattggtttgggtgtgttgattttgtatcatacaatgtttttgtgtattctctagaagatcctggattttcatgtgatcatgttatctgcaaacactgacagtttactattccctttccaagtgtggttaccatttatttctttttcttgcccagttgctccagctagaatttcaagtacaatgtggtgaaagcaggcatccttgtcataatcctgatcttagaagaaaagctttcagtcattcaccattaagtatgatgttatctgagggtttttcatagttgtcccgtataatgttaaggaagtcccccgcttctagtactagtttattgagtgtttttatcatgaaaggatgttggattttgtcaaatacttttacttcatcaactgagataatcgtgcgggttttttccttgattctcttaacattaggtattacctcaattgagttttgtatgttgaaccacctctacattccagggcaggggcaggaggggacaaatttcacttggtcatggtgtataacttttgtaatatgctactggaattggtgtgctaatattttgttgaggatttttgcatctatattcataagagatattgatcaatagttttgttatgatgtcatttatgggctttcatagcagggtaatattggcctcataaaatgagttagagagtattctctctcctcttctattttttggaagaaattgaaaaaattggtattaattattctgtaaacatttggtagaattc

SEQ ID NO: 197013 - DNA, 1000 bp, Homo Sapiens
accaacctatccatcaaggtgacctccttgagtgtctcggtgagggaagggctgcaatgtgatgacaattgaatgatcagcaaccgaatcaactttattgtatggagaatgtgtgaactgaaggatgagggaagagcctggagagtagaaaagaggaaggaaaaagaaataggataaagccatgaggccagaagttggcacttattacccaccactgtccaagaaagagcagtgtgaaatttgttttcacatagacgtgccctgctgtaaggtggagatgattcagtagaccgcaccctgatttggctgaaatagccctcaaaaggtcagctttccttaactcttgggatacactcaccaaccagcctgttgatgactaacttgactctctgagactgctgatattgggaaaagggtgccctagttgggagaggaacattccagttactgaaagactaacactgttaatgaatacattggtatgtatgtggttatatagtttggcctcttatgagttggattgctgggagtcaggctttttcagggagatgaaccctgacaggacactgatatgactatgacccaggttcagctctgtggcaaattcgccaaggaaaagctactctgggtggccactttgggagccagtcaaacgactctggcacaaagcaagacattctgactcaatcgttttgatcacagagtgcaaggggtataattacgtgggcaagacacgattattctgttcctgaccctagctccattcttgatcttacttcatgatccaacagctacatgtgagattgtctggcattttctgcttctgactcagagcctccgtattcctggttactaggtcactaggtcaatggtattgtcatcctctttaggctgacaaaaagcagagagagggtcagagtgcagggagtgcagggaaaccttctgcgtgctgggtggaaggcaaatcctatactttctctcggggaccttgctttttact

SEQ ID NO: 197014 - DNA, 1000 bp, Homo Sapiens
ccaatggatgcagtagcatttaaactgctccattcttttgccaaatgcttgaatcttcaaccctgcctataatgattaattgtaaagaagtagattgaatcttaagaaattttgctacgtaatttgttatggaaatttaaaagtactttaaattagcctctgtaacagggtgaaatttggtgttgctgtatttatccagacgtattctggggtaaaaaaaaaaaaatcccaaaacatgtataccatcaaataaaaatattgcaatattagcctacacaaatagtgaaagctccagctgataattttgatgtcatttaattttttttcagagctagtatgaaagaagtagcaagattatatacagtagtagccattgatttaggagagaggaaagcagtgctttgcttgtatcattcaatgattaagagagtagggcttcgatgtcagaaagacctaagctcaagtttccattctacctcttctttgttgcatgaccacaggcaagtcgcttagcctctgtagctttggtttcttcatctatacagcatggataataccacctgacttgtagggtggttgtggaaattaagtgacactatttgtgcaaagcatctggcccatggtaggtgctcataaaatgatcattacaatcaacatagcattttgtgtgttcagtgatatttgctgaagcccagattctagacctagttatagcctagatggaggtgggtggaatgagctgtaaacttggctctgttcccctgtggctccctccgtgtgctcttgggtgggttggtcagcagctgtgagtccttagagagaaatctgagaacttgaactcacgtgggcctcgcagtgaaaatgggaggctctcgactcaaggcaaacgtaaatataacagagaagaaaatgcaggacacctcccaaaggcaatcaagctcatggatagattttaactttttttattccaggtctcctaaactagaaagcaagttgaatt

SEQ ID NO: 197015 - DNA, 1000 bp, Homo Sapiens
gttggaaagctctttgcccaggattcctcattttcgtaagtctttgtcgggtcagtggaataacagcatcagcctcactcggtgccttgaagaaatgcagagtcccaggccctgcccagatccactgaggcaaggatctgcattttgacaagatcctgggggattcatgtgcccattggagactgagaagccctgcattgcatgggtgtcacctggacataatgaggcatattcttctctaattgttgtccttggttttgcatgcaagtgggataatccgcttctgtgatcttgctttcctgacatagttgatattttcatacttcactaatcaagcacttaaaagaagacacagagaggttatcttttacaaaaaaatgtacttttgaaaagctctaaataaaataaaatgaaacggtgttctcctatagatataattttagggatgctttatttccattgcttattgattgatccacaggggaggagcttataactggccagctctcatctgcaaagtagttaattattaacagcacttatttgcactgatcctgtgcttcctggagtgaatcattttacagcaggtgctgcagaatcagtgtcttgctgtgtcctggtcttcattaatctgcagcctgtgttcctccagcttttccaaataatgacagaggacagacattcacagaaacaatctttaatccgggcaccctgtggcccactcaagttgacacatgaaattaacactcatgtgcgtggaagcctctcagaggcatccttctgggagcccagtactggaagggatgctggagagccaacttcaccaggaggaagtgagtctggatgcagggggaggagcctggccatctgctgtcgtttgggatgagtcggactcactggttgctgatattcaagaccaacagatgagcggatgttaaattagtgatctagaattaaaaggatgcccagtcccagtgaaaataatttatttcaagaattc

SEQ ID NO: 197016 - DNA, 1000 bp, Homo Sapiens
tgggaaggactcaggctcagggataacgctgggaggaactcaggctcagcgataacgctggggagaactcaggctcagggataacgctgggaggaactcaggctcagggataacgctggggagaactcaggctcagggataacgctgggaggaactcaggctcagggataacgctgggaggaactcaggctcagggttaacgctgggagggactcaggctcaggcaataacgctgggagggactcaggctcagggataacgctgggaggactcaggctcagggataacgctggggagaactcaggctcagggataacgctgggaggaactcaggctcagggttaacgctggggagaactcaggctcagggataacgctggggaggaactcgggctcagggataacgctgggaggaactcgggctcagggataacgctgggaggaactcgggctcagggataacgctgggaggaactcgggctcagggataatgctgggaggaactcgggctcagggataacgctgggaggaactcgggttcagggataatgctgggaggaactccggctcagggataacgctggggaggactcaggctcagggataacgctgggaggaactcaggctcagggataacgctgggaggaactcaggctcagggataacgctgggaggaactcaggctcagggataacgctgggaggaactcaggctcagggataacgctgggaggaactcaggctcagggataacgctggggaggactcaggctcagggataacgctgggaggaactcaggctcagggataacgctggggaggaactcaggctcagggataacgctgggaggaactcaggctcagggataacgctgggaggaactcaggctcagggataacgctgggaggaactcaggctcagggataacgctgggaggaactcaggctcagggataacgctgggaggaactcaggctcagggataacgctgggaggaactc

SEQ ID NO: 197017 - DNA, 1000 bp, Homo Sapiens
gagtgctaggattacaggcatgagccaccatgcccggcccagatgatctttatattagatacttgagtctgcactgaatcttgtctacatctaaaaccaatatctgcataagatgcaagagaatctcaagagttcaagctcccataaacagcactgtttttaatctgttgcctacaacataccaatgagaaaaatcacggtatcgtatcataaactgctatgcaaatgatgctatttgtaagtattaacataatttagtgcttacagtcatattctcctttctaataattctcccagaatggagtctttctctggactcttagcctgcaggatagtctttcatcaagaagctgaaatttttaataacctgccagcatatgttttgtatgtgccaggctaggcttgatgacacaacatcttcattatcaaaagaaacaggtctacaaactgtaataggacattaaaacatgcctgtgctcgtaaagtaatgctttgatgtctaaatgtgcaccattacgatggtcttctggaacaaaggagaattctaatcctaaattctcaatagctacactcaatggagactgcagctcacctccactccgaatatgatttcactttgaaggcaaaagaatgtcaataggctcctacaaaaaaagaggcaccttttcagaactactttatttttatttttggcttcagatcatggctaagcactggcctcagactgtaaggagatttctgaataattatattttccttgttaagttttaaaaaatgatttagttagattattaattattcaagagctttgcatttaataacattaacaacagtgccaaatgtatttggtgccaattaaaaatgctacggtttaaaataactgaaatttaaataatgcacaatgaggcttctaaatacaattcagccaaatgtcagtattttaaatattttttaaagtcaaacatttcaaatttatcatagtgtaatgtcaagagaattc

SEQ ID NO: 197018 - DNA, 1000 bp, Homo Sapiens
ttaccttcagtttcttttatgtgtgtatgtatatgtgttattgccttaatggaacctccagtatagtttcaagtagaagtgacgataacattttccttatcttgttcctgacttcaaaaggaatgcttctaacttttcaccatttcatataatagtttagattttgggacatgtagtttcagattttaaaaaagctagtttgcttttttaaaaagtcatgaatgggtgttaattttagccaatgatttagtttttaaaataattaatagaataagaatagcctatgattttaatttagtctccattttgctgctaatattatttgtgtctttccattttaaacaaaattcttagtcatgcaagaggtttgtctgttcactagtctctgcaaaaaacagctcataattttgttaatcctattatgtccttgttgaaattttcatttatttctactccttatcattttctcaattatcatttctttgagtttccttgctttccctttactactttatttatttaaaaattaattcattgattttcaatctttgtttctaacatatgtatttaaggctataaattaccctctatttattgctttaattttatcccataattctaatatatattggctttgtttttattcagcctcatttcagttatgtactgaagtataacaaaccaacccaaaacttaatggcttaaaacataatatgttatttctcaaaattctacaggtaatttgggctgttttgctggttttccctgagatcactcatgcagctgaggtcatatgacaatttggctaggactgaaggatccaagaaaaccttactcaaatagcagttaatgttggctgttggctggagtggttcagttctcttccatgtggactactatagccttctataggctaaactgggcttcttcacagcacagtggtcccagagtttcaagagtggtagctgaaggcttctaaaagcctaacctctgagaattc

SEQ ID NO: 197019 - DNA, 1000 bp, Homo Sapiens
acatcacttgttgccttcagtagaaataactagttatcatagcctaccctgtctctgctgccaaattcttagtaagtacctattatgtgctaaacactgtgatagacaatggggatacaacattctgcaaaacacagactctaccttcaaggagcttacctaaaaatactttcaatccaattttgtacttaagaataaagaattattaaaagatgcacagatttactttatacttaaatgtttggttaacacaagagttttgtttaatttctgtgtgtttttaaaagatttcatcttggcgaaacctcctctctattaaaaaaactacaaataagcagggtgtggtggcttgcacctgtagacccagccactgggggtagggctgaggtgggaggatcacttgagcccgagaagtcaaggctgcaatgagtggagatcgcaccactgcactccagcctgggtgacagagtgatactctgtctcaaaaaaataaaaaagttttcatcttttaaaatcagctaattaagttggattgttaccatagtgggtagtatccataatgaggtataatcagaatctatatagtcaagtgaactattttccatagttttgcaacaaatccaaacttttctacttggttaacagttttattaccttttctgaaactaatgtaaatcccatagtcgtgggttgattcagcaatgttcactgagcacctactctgcaccatgcacaacagggatgcagcaatgaacaagacaccgcccagtctgagcccccaggttgctcctgactggtgcattctgtgtgggtccatggcagaggatacagagacacttcactatcccagcagccaaggtcctgaaatgcccaaagtgggcagcataaagccagtggccttacaaagtagaatgtaaggccaatgtgaaattcttgttagaaagggaatgaatggcatgactattcacggctcacaaaagaggattgtcataaagaattc

SEQ ID NO: 197020 - DNA, 1000 bp, Homo Sapiens
ctttacacacaaccagtggggtatgtattatatctattatggagatttagatcttctgactgttgaagctagaaaacaacaaagcatttttagtctggtcagcgtaattttttagggaatatttactgcattgcgtcatattaagttttatggtaaatatggcagttctcacttgtttgcttttattctcctctcttcagattggcctgttacccttctgggagccaggagattaatgcaggccccttctcttacattcccttctttgtttccttttatttgtttactttgtttgaattaggctgcctcatctacttttagattttaagtcccctagaggcagggattgtgtctaggttggttttatggagaacactcagcatattgtgggggtgttataaacatgccatctgtggcaatttaaaattcagtttcagacctttcagtacttttctttgtgtctcgttgtttatagaaatctgaactagaatagaggtgcttagcaatgtaaggctatataaatccattaaatatacatttttgtggctttattgtaagtgcttttatagttctagtcatgatataaaggcactatcctttaatttactgatcattaatatcttatatttttattttaaaatttagatacttctagctagtttttttatttgaatattaatcacattagaatagaaaattgcttcattggcacagactacttttttgtggaacatactttcaccagtttgatgatatttattgcttgatctgtttaggtatagggttgacttgttctaagcttatttttgtctcaaaggggaagaaggaaatagaatcaacaatgcatttcaattttagattaaaagtcactggaaatgaaaccgaaatacacaaaatatatgtatactcacacagtgtgcttctataatgaattcttttcatatacagatttattactagtcttattatttgatagccatcttttccattatatgaattc

SEQ ID NO: 197021 - DNA, 1000 bp, Homo Sapiens
agtgatataaatgccctccccctccatggcccattttatgacatcattgcatgtggagctgagaagagatgcaccatagtgtttgcaccacatggatgcaatggatgtcagtaacctccagagcttaagacatagtacgtgaagtcatagtacattaagttaggaaatgatatattttgaatactttttaacctttgtttttactataacttatttatcagtagatttttgcgatttaatgttttttttttgtttttttgttttgttttgttttgttttgcttttttgggtcttgctctgtggcccaggctggagagcagtgttgcgatcatggcttactgcagcctctacctaccgggctccagtgagcctcccacctcgacctctatttgggaccataggtgtatgccaccatgcctagctaatttttgctattttttaattttcagtagaaacggggtttccctatcttccccatgctggtctcgatttcctgggctcaagcaatcttcttgcctcggcctcccaaagtgttggggttacaggtgtgagtcacaccacccagcctgattcaatttctaataatgtaagtgttcaatcagaatagtgctggaccccacccttgagtttctaaccctataggtctggggaaagtaggaccatttgcatttctaaccatttttctgatgctgagagccctggggaatacactttgagaaccactagtctagggacactaaaggaaggtggccagaggatgacaccttttacatgagctcactcagcaccttggtttccttacctagaaaatgaggacaataatagtatctgcttcatgaggctgtcgtgaggattaaatgatttgatatctggccccatggcctttgagagcctgtgttttgccaagattctgtgctttagacgcatgcaggtcacaagaaccagtacctgtttctggcacctcagacagtgccctcaactatgagggtcctgggaattc

SEQ ID NO: 197022 - DNA, 1000 bp, Homo Sapiens
ttcacgtctttgctggtcccagtgcctcctccgtatagaaagcccgagtgcagagtctcctgggaggggaaggaagtgggtttgaagacagggagattagggtttgcatgattaggctcagccactaattgcctgaatgatgttgggccaatccctcactctctttaagcctcagttttcttatctgtaaaatgggagtaaccacaaggcatgtgccaggttcttgttgtgaaggctcataaaggtagctcatgggagatgctcacaaacatttttattccaccaccccttccagccccagcttttgatatggccattcacccattgcaccctccagtgtgcctggcaccaggctgagtgatttgtaacactaccccctgaaaattctcatacaatcacttctgttaggtgattgagaggtgtaggtggaagacatgggagattggcgagaaccacgtgaaaatctgccttttccaaatcagcccaggtgtgacctctcacaattttccctcctcaatcatttccctccatggcaactggcagggtaggcaggggcttgtgggccccacatattccattttttccattccagtttcctgctgaaacttcttgtgcaggaattgccccaagagacaacaggagccaaactaccttatggagtagtggcaggaattcacagggtgtcacactcacctgacgagatttcagagggcgccctggccacgcctcttggcactctgtcaaatcaactttctccttatttctattcattgcagaaatgtgaaaattcaaagctagagtaaaataaacaatgataatacagccaagattgttaagaataatatctgtatatttctacatgtagatggagatttaaaacatggtgttggattatactcacttgtgaaagttgctttatttctatataatgtatgactatcacctttcttttggtccataaatattcatttgaaagttatttaacagctgagtggaattc

SEQ ID NO: 197023 - DNA, 1000 bp, Homo Sapiens
cctcttgccttatcacctgccaggtgtcctcccattaccactgggagtccacatgtatatcttacgtatattctatgccactggttcctaaacccattatgattagaatgctctgggaagatttaaaaattatatttctgggccttacctttagagaattttgattcagttggtctagagtagagcccaggagcctgtatttttaagaaaacttctcaggggatgtaatgaccatctaggtctggaacctggatggtcattagtattgttacattaagttactcaactaagcacaagagtttctggttgatggccaccatttcctggttgatgaaatggtggacactgccactgctttgctagcaggcaccctaagacactgctttgctagcaagcaccctaagaccccaagattctacagttgcagggtattctttccattaggttaggcttttagttttaaaagtgatggtgcttgagctctaatatgttattgggtctggttctcaacttcaacttacagtcttctctctgttcaggaagcaggcatacatctagaagtctgggcctgaggaaaagtcaaataatcttgtctcaacttggattccccgtgaagtagatcctgagatattagtgtatggaatgggcagttagtgcatgagatgagttagttaatgtatgagtgtagagttagtgtatgggatgtttattaagaatgtcattgagatccatgttatattagtttgccagtgctactgccatacaaaatatcacagactagatgggttaaacatcataaatgtattttctcacaattctggagactggaagtccaagatcaaggttgtggtagggctgctttcctctgaggcctctctccttggccttcaaatggccatcttctccctgcaccttcacatggcttttcctttgtgcatatgcatgtctgtgtttgaatctccacttcttacaagaacaccagtgaggctggattgaattc

SEQ ID NO: 197024 - DNA, 1000 bp, Homo Sapiens
caacatggtgaaacccgtgactactaaaaatgcaaaaattagctggcatggcagcgtgtgaatgtaatcccagctactcaggaggctgaggcaggagaattgcttgaactcgggaggcagaggttgcagtgagccgagatcagccactgcactccagcctggtgacagagctagactccatctctaaatcaatgagtgaatgaatgaatcaatcaatcaactaatatcactctattttcaattcatgaaaatacctctaattagggaatagccccaggaacaaagctataaggtatacatgatccaagtgtgcttttctcataactacagatacttatccttcacatacagtactttcactgttgggtttgtaccctgaggcagttttgtgaggaatacaatgcttaaaagtatacaagcacaacatccaaaaagtaaggaggatccaaataggaaggaatcctacaacataaactctggcattggtagccagaaaaaaatatagtgttatcctataaatacctgctggctgggaaactgacagaggactgatgtgatgttgctagcatactgagccatttccttcttgatagacttctccacattggggggaatgcggccagacacactggtcataatatcttgcaattctaggagaggcagggagggatctctgagggttttcatcaatcgctctacccagtcttttacctagaaagaaagcattggtaaaataggacccaagttaacacaatcccccaaataaaaagatatatagttgtcattctgtatacgtgggaaattggttccagaaccaccactcatatatgaaaatctgcacatacttgagccctacggaacccatgtatagaaatagttgtgggttccatatctcatcaatactgtaattttgatccatgtttggctgaaaaaatccacatataagtggacccacacagttcaaacctgtattgttcaagagtcaactatatctgaattc

SEQ ID NO: 197025 - DNA, 1000 bp, Homo Sapiens
tctaaagcaatctgaagacaaaatgtgaaaaactcaaatacggatggaacacttactccatgcacacttgcagttcttgtttttttggtaacagagcaatcatcaccaaagttgaattggaggtagcatccattttttcatggggatactttttcaccatcttgcacgctgaagtaggaaatgcctccccaggggcagggttggcagtgccctctggcctcactggctctgggcctcacaggatgggtggggactgatcctcaagtgctcttctcttcctcccataggagacttggcacagaggcctccttttctttggttctttctcagccatttcctgtcacggctactctcggcccagctagtcttggtatactgggtggcaggggatgcggtgaggaccagggtttctgcctccctaagaaacaccctggaagtctgaattccaggcaaatagaaagtagaaggtggactgggcgcagtggctcacgcctgtcatcccagaactttgggagaccaaggccggtggatcacttgtggccaggagttcgagaccagcctggccaacatggtgaaactccgtctctactaaaaatacaaaaattagctgggcgtggtggtgcatgcctccaatcccagctacttggaagcctgaggcatgagaatcacttggacccaggaggcgattgttgcagtgaaccaagatcgtgctattgcactccagcctgagtgacagagcaagacttagtctcaaaaaacaaaaaatagcaacaaaaaagtagaagatggaccattgagtgagtagattccgtgatggggaggtgggcctctggctcaacaggtagggctggtgcccagagcaagactcagcacccatccagagccacagtaatcaggtgggatgtgccttaagtcacctcccaagacagagggcaggcaaaagctggtactggagaggaaaaccagctctcctgttggaggagttgcaggaggtgaattc

SEQ ID NO: 197026 - DNA, 1000 bp, Homo Sapiens
agttgtgtctctttcaggttgaatgaccagatatataaattgtgatgctgatttaagttattcagcatgtgaatcacataaggcagtaacagagttagaggaaatagaaccaagacatattcagtaatttgctctaagtctgttcattgatagctgaatgtttactgattggtatgatttctcatctagcctttttcttttctttcatttccttgatgtacagcaacttaatcctggtgtttttcagctcttaaacgtagcataaaccatagagataatcaaacccaaccctctcttttacaaatgactaaacatgcttaagagaggtaaagggacttacctaaaacaacagaactcctaactaatagtattagaattataatcaaggtcttttgaccctacattgagtattctgtcaattgttccatgatgtctcgtcatttttatagcaactcaaaaaatttcaactttcacgaaatgtagtaatggttaaataacataaggtttaaaagaaataacagattagagcagaactaaatgaaattgagagcaaaaaaaaaaacatataaaaagggtcggtgaaacagttgactctgaaaggataaacaaaattgatagaccacttgctagattaataaggaaaaaaaagaagattcaaataagcacactcagaaatcacaaaggtgacgttacagctgataccacagaaatacatatgatcctcagagactactatgaacatctctatacatacaaactagaaagcctagaggaaatggataaattcctggaaacccacaccctcccaagattgaaccaataagaagttgaaatcctaaacagaccaaataacgagttatgaaattgaatcagtaataaaaaatctatcaaagaaaaccctgtactagatgggttcacagctacattctaccagatgttcaaagcagagctggtacgaatcttactgaaactatttttaaaaatcaaggaggaggaattc

SEQ ID NO: 197027 - DNA, 1000 bp, Homo Sapiens
ctggattccatagagaggcaagttgacctctaatggatgtatacttacattttgaagtttatgtatttttctctcccttctttgattgaaataattaagccccgaggtgatggagtgaagtttatgaaacatcgtgtaccttttagtctctactctggaaaacttcaagtgctactaagtgatatggcgaggtgtaatctgattggatttgtgctgcacagtccacttaagcaacagataacagcatgtcgttgcagaatggaccataaaaacctcagtcttgacatgcattggcggcagcacacaaaaggcaacacaaaacatagagatatgctggaaaacataagtgtggggagaggaactgtcttatcatccaaacaattgagaaacgtgtgagagtaaaagcaggaaacaggggtcagaatcacagggcctgcactaaagatgctggcaggaggttccaggaagccctggggggtagccggaagcaacagtaattcaggagagactctgatcttccttaagaaggggctgggcagcggcagcagggcgtcctctttgataaatacgaggacagggtataatttcataagatctctgtgtttggtgctttgaaagagccagagccggcctcgttacctgcatgggtctcttgacatttcttctgagcttgtcaatgcctgctagttagattcttgatgggcaaaatcttagtctgtgcaatgcagccccaccctgggattgtagcggttcccctggttcaatggaggtgcatgtcctagagaaaatgaaagagatctcgttgtcggttatacttaaatcaataaaatgtttcttccctcatcagagacacaattctggaatggaaagtagcttatcatctctgaagccttgggtcccccggtggcaaccatgcctctgattacccaggggttccaagaaaacaggtcgtgttcttatgcagaagccacaagtgaaataactgatgagttcagaattc

SEQ ID NO: 197028 - DNA, 1000 bp, Homo Sapiens
aagctacagttccttcttgttttccttcatgcctcccccatttgtctgaattagtaaggctttacttttagttcaagtcttttcctcagacttgaaagttgcttgtacggtaatttaattacctctgaatctaccgaaggcaaataccaagcaatgtacgaggttagattatggagttccaagttatgtattaagtcagcctcatgtagtcctcgaggcggtagatggtgactccttacccccattcccgtgtgtcagtgctggaagggaagcccagttagaaaatttgcatccttgagttaaccaacagaagggcggcagagtccttacatgcaagcaaagcaaaccaagacagagggctgtctgctccttccaaagctctagggttctccctggagaggcacggattaatcaccataaaaccagaaggcagttgccaccatcactgaacagattgtgggggaaaacgtaggtctggagctggactgacttggtttctatgccagctctgcctctttcaaggtggaaatgctacaggacctcccactgcctcagtttcttaatcagtaagatgggatgataatggtatctccacttcaggggctgctgtgaggatcagatgagtgaacatgtaaagtgcttagaacagtgcctggcacataacacgtgctcaggtgcaaaagaagctccccaagaaactctctcctgcagcccaactgattcacagacaaaggacatcttcattgctgacacttgtcccctgggtgtttcctcaccttgtcccatatgcccaggggctactgtgactgaaacaatggggaatcattgtgtaaagtgctgcaaaatgggcaggttttcttctagcccaaagactgacaataattttttggaagtggggcttggggtttaaggaagacggtggccaggggcaatggctcatggctgtaatcccagcactttgggaggccaaggtgggtggattccttgagttcaggaattc

SEQ ID NO: 197029 - DNA, 1000 bp, Homo Sapiens
gactctgtctcaaaaaaaaaaaaaaaagaaaatgagaagggaactaatattcacactgcctagctgcagccctcactgaatctactgagcccctactctgtgcagtcaccgtgatcacaaaaaactccatgaattgtatattctcatcccagttttacagatgagaaaaataatgatccaaagagcttaagtagtttccctaaggcacataactaagaaatcattcaaagaggttaagtattatgtgctgagctgagtcaaattgaggtcttctgactcatgcttttcttgtctcactctaccacgccctgtcactgaaaattgcttccttgagtttgtgcagttgcacattcgcagttatgcgaaccccgtttacttcactgcattgaccttcaatgggctgatttatcacaggtgagctgttggcttctcatttgtaagtgggccatctggcaagcagcatatggaagcagaccctttaacaaggtcataagaaggttaattaactctagattttaaactatttttctaaaacctgaaagaaagaaatactgtttgatattgagtaccagctgttagtaaggtgttgtgttgggtgctgtatagatattacattataacttcttgtttaatcctcacaatatccccgtgagaaaaatactacactagcctccatttttccaatgaaaaacaaatgtgacattgagaagtaacttgccaaagatctcctgagcccaggaatttgaggccagcctaggtaacatggtgagacctcgtttctacaaaaagttattttcaaaaaaattagtcaggtgtggtggtagctcccctctagtctcagctacttgggaggctgaagtggaaggattgcttgagcccaagagattctcggctgcagtgacctgagaatcacaccactgcactctagcctagatgacagaacaagaccctgtctcaaaaaaaaaaaaaaaaaaaaaaaagtttgtagctcagtgaattc

SEQ ID NO: 197030 - DNA, 1000 bp, Homo Sapiens
gacattggcatgtgccggcctgcccatgccagccatccacatgcctctgcccgtccactctctccttttgagcctcttttcagtataagagctgttcaggcttgaaggatatgcagcgagcgagttaaacatggcccctctttgcacaccatggcatgcatcattctggcagctgggtaagaccccctccagtatcagatgttcaggctgccttgcctcaccctcgcttcagaactcagggacggtatggaactggctttacagatttgcctcttgttgcttgctattaaagttagtttcttatatgtctctgactcttactgctctgaccttctaggcaggaggaaggagcaccttcattcagttctagtgtctctacattttcacaacctcagtgcctcagtaattttttcataacaccctgatccaactttcacatttttatgtcaaatgtaaaaaacatgcctattaaggtcaaatgactatttatttgcttgcgaataataagctgttttaaggattgcaatgagtctaattactcagatcagccaagaagggtccaggatcatgatgagccgtgctcaggttcacgtggtggttttgaagctgggctagacttggaagtctgtcggacactgagaatccatggaatttatgaagaccagatttcttttatcggctatatatccttaaaatgatttgggagaggataaaaatacagcttattttaaatgaacaagaaattcaattacacaatttgtttttcaaggagataattttgtgtctgaaacaagactctgctgtgaacatcattccattgagaaatgctatcttgtggccaggtgcggtggcacacacctgtcatcacagctgctcaagaggctgaggtgggaggatcgcttgaggccagcattttaaaaccagcctgggtatcatagcaagacccagtctctttaaaaaatgccatctgttttgtggacgaagtttgctttggaagctt

SEQ ID NO: 197031 - DNA, 1000 bp, Homo Sapiens
ttaaaagaaaatagctactaatgtaggattccatggcttttaatagaaagactttaaaaagaaaaactaaggagatttgtggtcaggatgaagggcaataatcatagatgaagacatggaaatggacaaggaagacattataaatatttaagcaaatggacaaaaaacaattattgaatgcctgtgttattttaaaattcagcatatttaaagttcacaataacaatggaaaaggaaaggataaatgaggttaaaacaatatgtttttagcagtatcatgaaagtgtgaatgtaatttgtattgtaataaaagaataatgtacactgtaatctctaagataatccataaaagaatctataacaagtaaataaaagaaggaaatggaataatattaatttaaaagatgaaaacaaaccagatgggactgaaatcaaaagtagtggaaatgaatgcaactatatcagaaattagattaaacataaacagaaaagacgtagaatatcaacaagaaatcttgcagttagaagcagtatggaaactccacaaggtggcagttatgcattgcaaaggacaccagcgagcttccaccttggtgggtttggggaattcccgcactgactcagagtctccaaaagcagcatctgcccctttgcgggcatcagtcacagcccctctgctccctcaagcacctgatcttgtacctacttattctaaagaagaaaaggactttctccaggtagagggaggacaagtgatggaggaaggatgcattcggttactagatgggagagtagctgtgccacagctgctaggagctgcaattgtactggctgtgcatgaaaccacccatctaggtcaggagtcacttggaaagttgttaggccagtatttctacatctcgcatttgtcagcctttgccaaaactgacacagcggtgtgttacctgccgacagcataatgcaaggcaaggtccagccgttccacccggcatgcaagctt

SEQ ID NO: 197032 - DNA, 1000 bp, Homo Sapiens
aatttttgtttgtttgtttgtttttttatagatatggggtttcgccatgttgcccaggctggtctcgaactcctgagctcaagtgatccaacagcttcccagactgctgggattacaggcatgagccaccacacccagcaggaagcttttaattggaatgatgaactggaagcatagcattaggtcctcattccccacaaacctcttacctttgagtgagaatgattactagcaggcaggaagtgctttctgtgaaagtgctttgaagagtctggtataattgaagtgtaatttgtgcacatttggctgtccatctctttttttttttttttttttctgagacacagactcttgctctgttgcccaggctggagtgcagtggcacgatctcagctcaccacagcctctgcttcctgggttcaagtgattctcctgcctcagcctcctgagtagctgggactataggcgcacaccaccacgacaggctaatttttgtgtttttagtggagacagggtttcaccatgttggccaggatggtctccatctcctgaccttgtgatccgcccagctcagcctcacaaagtgctgggattacaggtgtgagccaccatgcccagccctatccatcttttttcaaaaaaaaattattagaatttttttaaacttcaaattttagtagtcaaactttcaacgttggacattatgttgcaagcacaataatttttcaacactcccagctgctagactacacctgtgtttaccatactgcttgcttgaggtgtaaataaatattccttttcaccaggccaacttaataagttcattagccttcttgggcacagcagcagaatgtaatttagaaaaaagttttttagacacgtgtttgctagaaggaattttgtgtctaggattaatagtttggggaaaaagaatctcaaaaatcctttgacttcagctactcaatgtggttactagcctatcaatcattttgacaagctt

SEQ ID NO: 197033 - DNA, 1000 bp, Homo Sapiens
ttctgttcctgtgttagtttcctgagaataatggtttccaccttcatccatgtccctgcggaggacatgaactcatctttttttacggccgcatagtattccgtggtgtatatctgccatattttatttatccagtctatcattgatgggcatttgggttggttccaagtctttgctattgtgaacagtgctgcagtaaacatacatgtgcatgtctctttatagtagaatgacttataaacctttgggaatatatccagtaatgggattgctgagtcaaatggtatttctggttctagatccttaaggaatcacaacactgtcttccacaatgattgaatttacactcccaccaacattgtaaaagcgatcctatttctccacatcctctccagcatctgttgtttcctgacattttaacaattgccattctaactggcatgaaatggtatctcatagtggttttgatttgcagttctctaatgacaagtgatgatgagctgcttttcacgtttgttggccacataaatatcttcttttgagaagtgtctgtacatatctttaacccaattttgatggggtttttttgtttgttttttttttcttgtacatttgtttaagttctttgtagattctggatattggccctttgtcagatggatagattgaaaacattttctcccattctgtaggttgcctgttcactcagatcatagtttcttttgctgtgcagaagctctttagttaaattagatcccatttgtctattttggcttttgttgccacagcttttggtactttagtcatgaagtcattgcccatgcctatgtcctgaatggtattgcctagtttttcttctagggattttatggttttaagtcttatgtttaagatgttaattcaccttgagttaatttttgtttaaggtgtaaggaaggggagcagttccagttttcagcatatggctagccagttttctcaacatgagttattaaatagg

SEQ ID NO: 197034 - DNA, 1000 bp, Homo Sapiens
tgctaccccttcatcctcatcccaaaggagatgggactggctgagtgtgggattagatggccccaagggaagacagtttctacctcttgtccttcctgaacttgctgcatgttagatttttctcctggacaaagatacacctatacaggaagttccccttctagtggggagaatgtcgtttttgaaaattctctttgataattcctaattaaagttcttctgattttgcctgcaacttagtagttccataacttgtctaggaagaaatattttgtagctgaaagcagatgggatcccagtagtaggagggggaaatgtgtctcttccatgaactggaaaagtctgagttgaaggactggttgtatcttgggtacctcttaccgctgggtgggacttctctctgggcttattataacaaacataacatagctctctgggctcagcataacaaacatggggtaaatcccagatccactgcttatactacaggaccctgagagagttacttagatatgtcgaaaaataaatctcctataactctgtgtttttccaaagttggtgatcattaataggacataaattaaatttatgggatcaacaaacattttttaaaaagaaatagaacagaatagaaaataataaagtggctcacataatatacatatgcaagttatatatatgtagccctgcttatgtgaatgcatgtatgcgtatgtgtatatatacatatgcatgcattgtttatcatgggtaatcatcaaagaaatttggaaaatactgataacttagttcctagcttccattcccactcagaagtcagagaaaaagttaaaattgtacattcaacactgctcagcatcttttagattccagtggtctattttgggagttggtatgtctgttcctctcctccctttttacttccttctccttcctgttgggccacattcctcctccttccttggggcagtctgccttggtctcagcggtattaaagctt

SEQ ID NO: 197035 - DNA, 1000 bp, Homo Sapiens
gcgggggcggaggctgcagtgagccgagatcatgccactttactccagcctgggcgaaagagtgaaactcggttaaaaaaaaaaaaaaaacaactaatcagcaccaagatgtttattacaaaaccaataaaaatgttaaagggaaacccaagtcttgagcggaatggacagtacgaaactctaagggacatgtggttgatggttaggggagagggtggaaaaaggctctggagagcggaagatctggaggggaggcctctgacccaactggatctggtcttccatttatcccctgtagtattctacctgagacgcaaggggtatggtctgaaagcagaaaagaacctttgcccagtattcccataggacttggcagtgcaaggcagcacctctatgggatcactgggccaggctgtgtgtttgtttgggtgacagagagaggactcacccagcaaagaaacacctagtttggtagttagtcttggaaccacactccctactttcaaatcaaagtgaccttaggacaagttacttatgttctctgtgtttctgttttcaaattctagcatggggataataacagtaactacctcactgcatgtctaaagattatatggatatagtctctttggcatagcagttaaaaatttaatgaattctatctaaaacaagcacaaagatccttcttcaaccattgtttttacagttttatttctactctaagaactctgccatgttttccacttttgcttctgtgttggtagagctgcagttggagcccgggtaattgcatgctattaacctcaacagcacacagcctccaccatgcaagccaaacttgctagcatccatgagtaaaagctactggtttctgaataagaccaaagtgaagcacatttatgattcctgaatttcatataaatcataattgtgcagatgatttgccttcgagctgcaaacaccaaaatgtgattgatgtctgagaatgtctgtgaagctt

SEQ ID NO: 197036 - DNA, 1000 bp, Homo Sapiens
ttattccaaatctgaatactaaatttactttgtttttattatcatttcctagtctccccaaaatatcaaccttacatgtaatatactatggttttttaataacagtcaattttcaactagtaaaaacctggtaattaaaacaacaatttgatgtaatatacaacctggctgtgaagagaaaagcaaagttatatgaaagatacattttgaaagaatgtgagacatccaaaaagtactttgcatgagccatttttgactgtttggatcatgaaattagactaaattagctttaaatattataaatagagttttataagttaagttttactaaagcttttgggggataatgtaaatttaaaaaatgtaaaggatagtttaagaagaaaagcataaaaatgtagaaaccaaattaaatctacttagaaaaattttgaaacccaagtaatttggataccgataaccatcagtgactcatatcctgtcccaaatgtacagccttcctttcagccagttgttgctataatgttcaactgagctcagtttcagaccagcacgtgtatttttgccacaacctaaataggtttagcttgaaatcatagttcaaaagtttcagataaaagttatgtggggaaaaatacataaacaacttcaaaggacagctcttgctttgtagcacaatgataaaaacttgtctaggatgaaatcctgtactgcccttgactagctctgtgaccttaggaaaattaattaggtcttctgtgcctcaggtttctcttctgtaaaatggcaataacagtaatcagtcagggttgttgagaaaattaaatgtcataattgacagaaatcatttagaactgtttcaggtacagagtaaatgcaatgttagttttagatatgactatcatatggatgactttccatcctgctccatctccaatctactgccgtgtaacaatgatatccaacagggcaggaaaaggaatatggatgtccaaagctt

SEQ ID NO: 197037 - DNA, 1000 bp, Homo Sapiens
ttctttttctttgttgttattatatagtagaattatgaggataatattatagctgcccccagtagtgccactacagtaaagggtctgtgagactttccattagaaaccctgttttgggggtcagggtggaaggagcctcgtttcagctgtttcccagcccattcgtctcacacttggcacacagacaactgttcaccatgcagcagactgaagaactcagcagtttctccctaactacccaaaaaggaatccatagggttagatctccagacatatcccactccccaaaacagcctcactaaaaatacaagagcctgtcactcttcagaccaatcttgtgttgaccaactataggagagaggcaacttttaaaataaaactctttgcactattttaaatgagatggtaaactgtagctcctcctttcctcaaattcaataagatcacctcttacgctcaaattacttagtaggctggttgagctcttagttaacagctttcctttttcatatgggggctggatatgttttggctattgagaaaacactctctttagtgttgtttgtgtatccatgtagattattgcagtattatctgctgctttgagataaaagatattgtttgagcataagaaatctatttcttattcacattaacactgaatttttctgttcagttgaattcatttaaaacattattatatgcttcctctgtagtaacattttctagaatgaaacattgatataatttcatagccacattttgccactttaaaaaaaaagccaatagatttgagtcctatagaccacttctattaatttgatatcgtttaaggaatgaaaaaattgtgataaaataaaaattaatatttttgtataacgaggatagtctaaaatatttttagagccctttgtactagacacaaagaaagtaaaactcatggttcttgttgactaatttagacttaaatggtagatatctcatgtgtatgtggaagctt

SEQ ID NO: 197038 - DNA, 1000 bp, Homo Sapiens
aaggcaatttccaggtgagcctcaggcatgcctgctgtcaggccgtcctctgctcacctctgacccgggggatcttcccatgactcctgccccgcacgcatcccagcctccgcctacaggcttcccactgcacttcctcccgcacgcctccacctctctgcctctcagccacccaccggctggccctaagatggtggcactgctataaatcattctccatgctcactctgcctttgaccccaggtcttatctcctaactctcctgacctaaccagagttccccgagcccccaacaagcaaagacaacttcctccccaaaaaggaattttgccgctgagatcatgaattatttacactgacctagaagagtacgatcatcattctgtaaaggccaatggtagataaattcaagaaacatagaccttaaaaattactactgtaagcaacttacagtcttaccatgcaaaataacctgaccatgaagaacaaagagtagaatcctgttataaaatgacttattacgcatttctgatatgaaaagatacctaaaccctgacacaactacttacactcaaagcctgacctgacacagaaaataaggttatctcattcttcagtagtattgctagaaaggagtcacaccataggtcaaatagtctcttctgctcataagcttaaacggaaggggaacccacaagctggttggagatgaatgacctcaatttgagagctcttcacccgcctcttccccttggctctgagcacagatgctcagattgctgctcacctaatttgtctactgccattaccgcatttgcctataaaatttcttctgcctgcgtggctagctgttcgcctgcttaggttcactgggaacagctgcttgtgttcattgccacaatccgtctccagcagcattcatccatcacacatgagtttcagcaaacaagaatccacgcaagccagaagacccgttccaggagttcagggtggcaagctt

SEQ ID NO: 197039 - DNA, 1000 bp, Homo Sapiens
cacttatctaggcactggagatacagcaatgaacaaaacaagaaatcccctgccctcatggcccttctaaaggaagcacacaatctgttaggtctgtgttgggtgctacggccacctgcctgagcctcctgtggcctgctcttctctctactctaaagaactgtattcccactgtaataatttgaaatgccaactagactggattaaggaatatctagaaacctgtaaggcattgttttggaatgtgtctgggatgatgtttccagaggagattggcatgtgagtctgagcggactaggtggggaagatccaccctcaatgtgggcaggcaccatccagtctggtggatggtggtgaagacagtaaagaaacaggaaaaaggtgaatgtgtcattctatctccaggatctggaatacactcatcccctgccttggacaacagaactccagggtcccaggcctttggactccaaggtttacatcagtggctccccgggttgcctggccttcagccttggactgaaagttacaacattggctttcctggttctgaggccttggggacttgaactgagccacactaccagcatcccatggtctccagcttgcagatggcctgttgtggaacttctcagactctataatcacataagctaattcccctaataaatcccctcttatagatctaaacagttgtacagttgtccctcagtatccaaggggaattggttccaggacctccttcaggtatcaaaatccacagattctcaaatctagatataaaatggtatcgtatttgcatataacctatgcacatcctcctacatactttaaatcatctctagataacttagagtatctgatacaatacaaatgctatgtaaatagttacattgtttgggaaatactgtttagggaatgacaaggaaaaatatctatacatgttgggtacgaatgcaaatttgttttcaaatattttcaatggtggttagttgaattc

SEQ ID NO: 197040 - DNA, 1000 bp, Homo Sapiens
gggggtgctctctggaacccgtgggcattctgcatcagtcacccatcagagtagctggcagagcacccagcttgaggtgtctgtgggaatctctgcggggaccaggtggctcaggcttggggagggggcctgaggagccgtgcacctccctgtagcgatgggagacttgcaagtcgttgtggaaccagggcactggcctcggtcctgtgggagcgggtgggggtgaaataaccttaaaggagatatggcgccaactttggaagagctcagtcgggaagttgtgtcagttggtaagcctttggctgcaaacagtagtaacagcatcagcagcaacaactgcagcagcaagtaggcaatgtatgtagcgtctgctgcatgcaagacactgtgccgggcccttcacatgaagccactcctttaagcctcccgacaaccctggaagatattattctccctttgcagatgaggtaactaaatttgaataacttgttcaaggtcaggcagctaaaaaaaggtggtggcatgatttttttttttttagattcagagggtacatgtgaaggtttgttacatgagtatattgtgtgatgctgaggtttggggtacagatcctgtcactcaaatagtgaacagagtacccaataggtagattttcttttccttttttttttttttttgagatggagtctcgctctgtcacccagggtggagtgtagtggcgcaatttcagctcagtgcaacctccgcctcccgggtttaagcaattctccctacctcagcctcccgagtagctgggattacaggtgcctccaccaaccatgcccggctaaacttttttgtattttttagtagagattggattttgccttgttggacaggctggtcttgaactcctgacctcaggtgatccacccaccttggtctcccaaagtgctgggattacaggcgtgagccactgcgcctagcccccagtaggtagattttcaacccttgccccatt

SEQ ID NO: 197041 - DNA, 1000 bp, Homo Sapiens
ataataaattccatttgccatagtttcaatacataaagtaataataaataaaacaatttctaacatagagtaggcattcaaaggctattccaattaatcaaagagcagaaggaggcatttttttcttcattgaaagctcctccatctgtaacgttagggctagaatttgggcatttccttaaagtactttatttgctagtcaacaaaaatgcactgagtaatagtactagacaagggataggtgggagtaggaacagagagatctttgtcttattcaatacttttgttgatgacttgcataatcatttttagcttgaaataggctgttttctcaaggtgggttaaagtgctctgatttgtaataaggttttaagattgcatgatagacattgtcatgtatcacttagtcttcaggaatacaggacttactctcccagccactgggagcgctgcaggcaatgccccagggtcagcctcctgcaataagttacactgctgtaactgattacagcagccttgtccaaggttacacctccttcatcagatagtccataatcagtgactgatcagcttaaagttataaaggccagcccctttccctcaattcagaacaactctgaaaagtcattccagttttagaattagctaagtcctccattcagagtatatcacagctaacttcttcctctacccaatcttatttccattcttttcacaaatgttgatctcaaggtgcattccctaagacattttctgcacagcaatttccattccagagtatgcttcctagggagcccaaattgtgacagttggtaccaggagtggtttgagaaagcaaacactgagatgggattttggaaccaaatcatctaacaaacacacctggcaaagaggacctcattgctagcggtaggtcagcaacagaaagccctggcactaggtagcaatgcaattgttcaaattttcaaccaatgattgatacagtggtggaagggaattc

SEQ ID NO: 197042 - DNA, 1000 bp, Homo Sapiens
tgggatttggattggacccctttcctgtaacaccttggggtcaggaaaggctttctctcccagtgccttggggtcaggcacagggccacagcttccccatagagagcccaggaatgtttgcattatcagggataagagatggccttgcttccggtttgaaggctcaccagcatcttggggatggtgttggtggccagacagaaatcaatcagggacaggttggccaggaagaagtacatgggggtgtggaagtgggagtctatgctgatggccaggatgatgagcaggttccccaggactgtaccaggtacatgcagaggaacagagaaaagagaagtgtttcctgctccggcttttctgacagtcccaggaggatgaattgagatgcactggtttggtttcctggttccatgggtgtgattcctctggaagtatggaaaggggaggttataggaatgccagggagatggttttggaaggttagatgaactctaacctttaattttaacctttaactttagagaccctgtctctaaaatataaatattatatatgctataatatatatattatttttcagagacaagatcttgctctgtcacccaggatggagtgcagtggtgcaatcatagctcattgcaaccttgaactcctggactcaagccatcctcctgccacagcctctctagtagcagggtctacagtcacacatcaccatgcctggcctatttatcttcttttttgggggtggagagagggttttgctatcttgtccaggctggccttgaactcctgggctcaagcgatcctcccatctaggacttccgaagctctgcgattgcaggtgtgagccaccacacttggcctgacaacagcttatatataggttgcaccttgaaccatggatgaaatgtttacagcaactcatcttcttctttttttattaattaaaaaattttaggttggacgtggtggctcacggctgtaatcccagcacttt

SEQ ID NO: 197043 - DNA, 1000 bp, Homo Sapiens
ctattcaaccaacactgctgctgcaatgagcccgacgatgctcacatgggcccaagccctgccctccagaagcccttgatcttgggggagacaggtggacacagatcctctggccccaagagtcaagcctggatcagaggaggtacctgggcctggggaagccccgtggaggtgggggccctggggcacgtggaagggcttcctggaggaggctaagcagtttcttgaagggtgagagggaagatcagacagaaggggtaaacaaaggcctgggtgctgggaagagcccatgagtttaggagaaaatgcaagtgttttgggggctgcagcaggagcaggaggggctgaagttggagaggtgattcagggctggggcaggaagggcttcagcttccagcacaaggtattcagaactctacactgcctggcaatggggagccacagcaggttatggaagaggagaaggaggagaaattcacgccttggctttttttttttttttttttttttttttttgagatggagtctggctctgttgcccaggctggagtacaatggcatgatcctggctgactgcaacctctgcctcccgggttcaagcgattctcccacctcggccttccaagtagctgcgattacaggtgcctgccaccacacctggctacgcttgcaaatatgaaagactacatttcccagcaacccttgcagccaggtgtgatcaggtgaccgtgttctggccaatgaggtgagtggaatgctggttgtgacaagggacacatctttttgttttgtttttagacggagcctcactctgtcgcccaggctggagtgcagtggtgcaatctcggctcactgcctccacctcccaggttcaagcaattctcctgcctcagcctcccgagtagctgggactacagatgtgtgccaccacaactggctaatttttgtatttttagtagagacagggattcaccatattggccaggctggtctggaattc

SEQ ID NO: 197044 - DNA, 1000 bp, Homo Sapiens
gttccccggtgcccacctgatttcaggaatgtcctcttccaagtccttgtccaggactctctccaactcagaaagtgcctctttgggatccagggtctccgggaactcctccccggccacctcctcggggggaagctcctcttctgggtcttctggtcccagctctgcattgtccaggtcctggcgttcggggtctgtgacccgccggctctcgtacacagagctctggaggccacgggggtcgccgtcctgctccctttccgacctgcccgcagcctcagagctgggctggttcccgagtgaccttcgcctgctgtcccccatacaccggtcccttcccagcccccgcggcctcactctcccggcacccaaatgtgtctgtggtggccgcggcaacaggagagcgtccgtcacattccccacggtccacattctaacccgtgcgccgtctccaatgctggtcacctgggcttgcgctgggatcaggactcagtcctggtggtcacggctcactcaggacctcccaggattggtttaggaaggagacctgacgggaacctgcaggggcatctagctatggattccctctctcaaaaggagacacaaggaagagaccgcgtctcctgttcctgtccctgtggggcccgtcggtaatgtccagagcccaggcagccttcttgtgaccatgaggcctgccatctgagggcagatgaactgaaaggtgggcctttgatgtggctgtcgagcctctgaacttagcagccttggaatccactctgtgtccaggcttcttgttacttgaaacagtaagtttccttagtactaagtcgttttggcttggtttccaattcctagcagctaaaactgcaccctaggtgatacagacgcttccagccccaacctctcatgagaaataacttcaaaataggctgttccaaccctcacaacaaaataatggttataactggagtattccccaggctgctgccttcaggaattc

SEQ ID NO: 197045 - DNA, 1000 bp, Homo Sapiens
aagaaccacttgaacctgggaggcgaaggttgtgacgagccgagattgcaccattgcactccagcctaggcaacaagagcgaaactccgtctcaacaaaaaataaagccaggtgcaatcgctcatgcctgtaatcccagcactttgggaggctgaggcaggtggatcacctgaggtcaggagttcaagactatcctgaccaacatggagaaaccctgtctctactaaaaatagaaaattagcagggtgtggtggcacacgcctgtgatcccagctactcaggagtctgaggcaggagaattgcttgaagccgggaggtggaggttgcagcgagccgagattgcgccactgcactccagcctgggcaacagagtgaaactccgtctcaaaaaacatataataataataataaaataaaacaaaaagactaacactaacttcaaaaacaaagttaaacctccacaaggaatttaaaaatattaaaggtcacacaattcaaacattgtgatactggtgcaaacacaaatacacagatcagaaaagatagctctaaaaacacaagcaaatataaacatgagtataatgtgtcaccaagaaagtagaacaaaacaatgaatgaaagaattatagaacagctggcatcggtatatgactgggggagagagggaatgtcactttagactccgaatttataacctggaatgaaatacatttggatacaaaatttaaatacaaagttttaaaaaaaactacggaagagggtaactattagacatgatttttggtttaaaatatgaggaaggtgacaggggctttaatttttattatttattagtatgaattccctgatgacgaatgagatccgagccactactaaaagccttcccacattccttacagttatagggcttttcaccagtgtgaattctcagatgtcgagtaaggtttgagcatttattaaaggcctttccacattcattacattcatatggtttttcatc

SEQ ID NO: 197046 - DNA, 1000 bp, Homo Sapiens
cactccttgagaaccatgagttaaagatcaccttttaattgctttccttctgggagagatgagaatgaatgaggttgtcaccattttccggtcaatcttgtatgttcccttttcataattgctgtaggaaggttccaggttgaattcaggaggctgcttccttgtcccttcgttaggaggagcccgtcattctcttgtccttctgcctgagtttgcaatccctgtgaccaacgccttcttaccccggccttgtcacactctctgtgtcttacccgcatctggaaatttacctacaggagagccagtcagtcaaaatcaacagtgaccccatgccttcttctgtagttttctcctttggtcttgtctgtgttcattccagttttagagtagcatttgtgatagcaagggatggggcccacccagcactggtatcgtggtgaagtctcatgcacacggattgctttatgtgagcagttgatttgaataaaatttgtctaattctcaaagtctgtgtactagtctagtggtcagcaaactgtagcccacaggttacacttggcctactacttgcttttttaaggccctggagctaataatcacttgtataaattttttaatggttgaacaacaacaaaaaaaaacaaatatattttttgccatgtaaaaattctagagaattcagttttcagtgtccatgaataaagttttattaaactcaacaatgcacattggcttaggtattatctgaggctgtgttgcagcagaaatgcagagctgagtagctgccacagagacagaaggggctcggatgcctgaaatgtttactgcatgatcctctgcagaagacacttgccaactcctggttcagtagagctgggatcatgaatttaaacatttgcaaaggccagtggagtccagtacagcatggtgagcccacagtggcgcggagagcccacccagctcagcctgcttcagccgatggcaatcccgtgggaagctt

SEQ ID NO: 197047 - DNA, 1000 bp, Homo Sapiens
tcatgcaacattggatacacagagatgttatagcaccagaaaggttttaatttatctgtgaaaaagaaagaaaaaaaagtgtaagtgcagagcacggcagagtggggggaatactagactaagagttatggccaaacacttatagaagatattccatttctctacagtttccacctctggaaaataaacaggttaggttgaatggtctctaatatctattgcttttctcagattttctaactaattcttatttttaaatttagctttttagctttttattttttggaggcagggaatccccaggtctgttctgaccaaatactattgcagcagagagatccataggatcgctgaacacgctgcctaattaagttctagaacaacatatcatcaccctgtggatctcaaacactgtgacttctatctcctctacttgcctgcatccctgcctgtgtattattcttaatatggatgtttgaagcattaagaaatgattgtggtgacaggattaaaagggtaaagcctcattagggaggctgaggcaggaggatcacttgagcccaggagtttgaggttacagtgagctatgatcgtgccactgcactccatccttggcaatcaagcaagaccctgtctctagaaaataaaaatttaaacaaaattaaaaataaagagtaaagcctcactcgcatatcttacgtagggcagggactttcctgaaaagaaggctattcctataacaatcacctgggaagggggcctaactcttaaacaggcaatcagaactgaagaaaatatcctaggtaggccagctgggatccacattctggagttatccatgggatgacccagctatccgggaaggactctctgatggtgggtgttaagatggtgttttccacctggagatcgatcagatacctggtctgcttgacacccacagctttctgtgccagccttgccttggaaataccaagaagcgtgtcacttcattaagctt

SEQ ID NO: 197048 - DNA, 1000 bp, Homo Sapiens
ctccactgtgaaaactaggagagccactggtttccctctttgccctgggggctggggagctcaagctacactctgagttcaactgtagtggctctcctaggaaaccatttcaggaatcattttctcttcttgcccttttgttgttgttttgacttttactatatattaatggcttgggatcttaccatgtctgtgaggccatagattagaataacacaaatcagttactgtgtgacagacagcttacatttcttacatcatttaatcttcccagcaagcctgcaaggtgggcataattattcccattttatgcaagaggaaactgagggtcagagaggtcctaactgcctaaggtctcaaagccagaaagtggcagaacagggttcattcaaatccagtctgcctcattccagatcttcttgtaacttgcttggtagcacactggcctctccaacaaggcagcctaccttaaaggcattctgacagctacttgggataagcagtctcgccagtcccattttattattgttttttaaatatttatttatttattttgaaacagggtcttgctctgtcacccaggctggagtacagtggcatagtcatagctcattgcaaccttgacttcccgggcccagtcagtcctcctgcctcagcctcctgagtaggtgagactacaggcatgcaccaccatgcccagctacttttgtattttttgcagatacagggtctcactatgttgcccaggctggcctctaactcctgagctcaaacgatctgcccaccttggcctcccaaagtgctgggattacaggcctgagccaccatgtctaactgagtcccattttaaagatgagcaaacaaaggcacagagagactaagtggcttccccatggtatcctgactccacgtgctctgctgtttcattcattcaactgcccaatcattttccgtgtctatgctaggctgggttgggaatttttctattacacacaagctt

SEQ ID NO: 197049 - DNA, 1000 bp, Homo Sapiens
ccacttcccttcccagagccctgcggtggtttctcatcatgaaaataaatagctctcctgacccaggccttgcttagctttctgacttccttttctactgctggagacagttagaggtgagcaccctgtagagaggtgggccctctattaggtggaggggaggggaggaaagggaggaagggagggaagaaagcgagaaaacaccaacaactcaaagaagaatcaccacataaacaactgtgcccaccaggaacatgcatcttgcctgctattatctaatagttgagatgtgaagtggactggcaaatttgtgggttctggttatggagaactgacctaggttgatattcattctgccagagccactggaatttgtagtttctgaaaagacttgtgttatttggcaaaaccagaattgggcatcatttatcttcatgtacttagccaaagccctagaaaaacttttttgattcttaagaaaatgatctaaacccaataatccttgcttcgtttatttttaacgacaggcccattctgtagagtttttctgtatgaacttacccgacctcctgtaaaaagaaagatctaccttggatatagaaatttatttattatctgtttcattctgttcttttctgagaacagcaagttttccacgtagttctgtatacataatcctttttttaaaggattgcaggcacattttattgtgaatttggccatggtttaatgatgtataatgttggatttcttcatatcttaaatattaaaaaagcttatacagaagtaaagggaaaggggaagaaggagaaaagtagaagaagagaatgactaatgctttggtttaacaaataacattgtgaaataaaccattgatattttgtaaggtaaaaatctttcaaatctactcattattataataataagtaataaaatactcatctcacaggcagttcaaaggaaccccattgactaaacttggtaattaattggtaagctt

SEQ ID NO: 197050 - DNA, 1000 bp, Homo Sapiens
agcaccccagagctagcaacatcaggaagccaattctgcccttaggcccacaggttttatgagaatgaagagtaactatggatttgcctgtagaaagggctgtgtactcatagctgtggctctcagtggaggaacattgaccctgccatctttcagacccaatgttttattcccattcctggatatttgtgcctcctgttagtagcccccagtggctgaacccaactaagatacagagtgcaaaggaggcaggctaaggccatccatcaaagctagcttcctagggcccagagcagagtgcaggagggcagacaaggaatctagagggatagatagagactatggggctcaagaatggtagctacctcacagtgttgttgtgaagattaatattacaacataaagctcaaagatcaatgcagacacatacttagtaagcactgtagtagagtctgttacattactgtatccctcatatctctctgtgcctgttagcatccaggttgctgcaggattggttgagccactccttatgcgctcagcaccagtccagctcctgtcaccaggagaatctctctctgtcaaggccaaatgtctgcttctcatccctggggtattgctcttgtatgacagtgtctacctctataatcgggtcctgcatcatctctgaggaaaggagcttcagagttgggcccaggaaatgagcctctggaatgctggtccctctggacaacctttccttctcatcttagaaagtaaaactcctccagccagttaaacaccatcccagacagaagttgaccacatccaggctgagcagataggaagtctgctcttgcttcctctctccctatcagttaggatctaaggacacctgagagtgagtccaactcacttccagaattgagtcttgccacctacctcctccagaatttaataatagatattgctactatctattgggcatataattatgggccaaatagtatctaagaagctt

SEQ ID NO: 197051 - DNA, 1000 bp, Homo Sapiens
attaatgtctcaagccaagtgaaaaggtcagcaggatcttaagaggaaaatcacctggctttcaaaggtaaatcctagcagtttatgggatttgtttagctggttgggtctaggaccttagggggcatggttgagtttactgttacgttattggtgtcatcctattgtttggagtcttcattatctttcttatcaaagtgttacttttaagatatctgataagaatctgattcagattctttgttcctttatatgtaacagatatttctgtaagcttttagaattacttgtttacatttcatgtaattaaaaatttttatttgattgaattcagtctttctataatatgactaggaatggggtttttcttttttatcttgtgcttttaaaaatttgtgcattttcaatctgaattccttttattttttgaaactgggcctccctccgtttcccagaaggagtgtagtggcatgaacatggctcactgcagtctctacttcctgggctccagtgatcgtccagcctcagcttcccaagtagctgggactacaggtgcatgccaccatgcccagctaattttttctttttttggtagagagagagtctcaccaggttgctgagcctgctctttaactcctgggctcaagcaatcctcctacctcagcctcccaaagtgctggattgcaggtgtaagccactgcacctggccctgatttctcatttttaattttagaaaattctgtcatttttcttccaatacttgaaattgttcaaatacatctaagtgtcagtaatcacataattgagaaaggtttaattcatctcttaccttgggtctttaaatatccaaatatatcttgtttataagtgatacatgtttaaaacagcacaagaagattgaaaattaaaagatgtcaaaagatatacctggtaaatgttgaataaaaaagttttatattaatgttagtagtacaccaaatagagttcaaatatgaagctt

SEQ ID NO: 197052 - DNA, 1000 bp, Homo Sapiens
atacaaaaataagccgggtgtgttggtgcttgcctgtagtcacagccacttgggaggctgaggcagaagaatcgcttaaacccgggaggtggaggttgcagtgagcacagattgtgccactgcactccagccagggtgacagagtgagactccatctcaaaaacaaaaaaaagaaaggattgccttgtgaattagtgtatgatatgtattatccttttgtttcttctccatattcttcataggcttgttttcttcttaagtgttaagtcttcttttcttaatctacttttcccattctgcacactttcttcttgagtaatctctgaggctgttaattaggtccttgttggtcaagaatagttggtaccagaaaaagacaacttacagtgaatctacttaaaacatgaaattaaattccatagttaataattaaaacaaaaggtttgttgggtctttatattgagtaatgaaatgaaccattatggaaataagtttatcttatatttaacaacatttagactgtaagtataactatatgtaaattctttaaaaactaggattcaggccgggcacggtggctcaggcctataatcccagcactttgggaagctgaggcaggcggatcacaaggtcaggagatcgagaccatcctggccaacatggtgaaaccccatctctactaaaaatacaaaaattagccaggcgtcgtggcacgcgcctgtagtcccagctactcgggaggctgaggcaggagaattgcttgaaccctgaatgcagcggttgcagtgagcgaagatcacaccgagagcgaaactccttctcaaaaaaaaaaaaaaaaaaaagaaagaaagaaaaaaactaggattcaaatattcagttgtttattataatgtaattattctatcatttttccataatatgccagccttcactctatgattgtaaagaagatcaccttttgcaaaaatatttaaagattttatcatattctgaaaagctt

SEQ ID NO: 197053 - DNA, 1000 bp, Homo Sapiens
tactgaaactgtaggctttttaatgacttagccatgcctgcaaaaggcattccctaaggtggcacagaagatggagcccccatatccaaagatagccaaggagaaagaaagacccctgttgccagagccagtgggcaaaggcaacagaaaaggagacaagggtcctaatgggatgagatcctttcggatttaggcttttatacaaactcctgagaactggcaggttgacagccataaatggggtaccaaactttctactcattggattacaagttctcaggcatccagaatgattaacaaaatgacaatttctagggcttctgtgggagagtatggaaaggtctttttgaaccttttaatgctgtcaatggaagaatgatgaggttcataaatttggaaaggagacatttcttcatttttatgcttatttttatttttttttgagacagagtttcactcttgttgcccaggctggagtgcaatggcgtgatcttggctcactgcaacctccgcctcctgggttcaagcgattctcctgcctcagcctcctgattagctgggattacagatgcccaccaccacacctggctaattttttgcagttttggtagagacagggtttcatcatgttggccaggctggtctgaaactcctgacctcaggtgatccacccacctcggcctcccaaagtgctgggattacaggcatgagccacccacccagtgagagatttattttctataaagggttgtagcctgcagggttgtccttctgacaggctgggaagcatagcctccagccagaagccagaaacagatgcttcaaggaggaggtaaaggaaatagcaacttatgctgagtggaatggccaaatagatttatttaataagctctaggaggagtcatgaatatttatggaaggagaaatgcatgcacgcacaattgagtttcttgcttcttcatgggtcccatgtacaaaaaatggcagtgttagcatgatc

SEQ ID NO: 197054 - DNA, 1000 bp, Homo Sapiens
tggtaaatcccaacggcaacttgcctggtcccagccattgcttctaccacctccctggctccaccagggcctggggctgggcctccctccagcctctctctaagctgcagcctcagaggactttctggagtatacaggggatcctgccattgccccttcacacctcacacggctcccatgtcttctctgtcccatcagaagggctcaagtcttcactgctgctatttgccttgccagggaccacccctcagcctccgctgctatctgccttaaaccaggaagcatttctgcaggtatatgcttagtgcctgctcctgtgtgtactcatttagtacttgaaatgcccccacaaccattgtgcatggatcatgggacctgtattccacacctggcacaacccaaacccactaggatggggccgggtttgtggacacaaggacttgagtatgactgccaaagagggggagcctggatgaaaggctggccgggaagtgatggagggtggagggaggttgggatcctgactgagatggaatcaggcacagccgagaggttctggaagactccttggtgggagctgtctgttctctgacccatgctgtcagaggggccctgccttagccagctgaggaggcccagtcaccctggagctcaatttcttctgctcctttcacatctgtggtcactgtgctctcacagactcttccctcaatggccaccatttcccatctcaggccttgggcttagcctggagttgtttttttgttttttttttttgagacggagtctcactctgtcgcccaggctggagtgcagtggcgcaatctcggctcactgcaagctccacctcccaggttcacgccattctcctgcctcagcctcctgagtagctgggactacaggcgcctgccaccacgcccagctaattttttgtatttttagtagagatggggtttcaccgtgttagccaggatggtctcgatctcctgacctcgtgatc

SEQ ID NO: 197055 - DNA, 1000 bp, Homo Sapiens
ggattttttttcttctttctttggatctgtgcctgaaatggcaaattatgtgcaatttggggcacagtgtcacttatgatttcaaggagcctaagaatcagcagagggatacagtcttttgataaaactctgcctggtcttttcattttggatagtatattactggaaacttcagaagaaaatgagggagtttcagaaaggaactgaagaggttgatgactgaaaaggatgattgaacaccaaaatctgcagttgattaggatgcagacgtggaaaggaagcatgtatataaataaaagggtatgttactaaaatccgcaaaaagtagaatgaggcaaaatatctccattgtcatgatgttccattttatactgagttggataagtctcataagggatctgatagttgaggtcactaatccttaatacatgaaccaaggaataagaattctgtttatcataggaaataacttgggcccataaggaaggagtagagactcttcaggagagggacattttagtccataatttctctgatttagtgccaaaagcttttttgagagactattcaaagctgtcttaagtttcattgttggaaattgatagctgctgtatttctttttaataactgttttaagttctttctgttttgtcttctcggttgctaaattcctgaagattacaaaaaaagtgtgcttaaagtaaaagtgttatgagacaaaagctttattctgtggataggataatacttcttttgtaacattttctgtttgcaccaaaagtgagaagtcaatgccttgcctttgtgcatcccattactaatggaggataagaagttattttcttcaaaggctgacttccagaatttttggctgaacactttttgtcaagtgtatattccctttgtaggcctttctgtatagagcccacaaacatcgtgaatgtgaatcatgtcattcagagggttagtgaccatgcctctgccatgaacaagagaattc

SEQ ID NO: 197056 - DNA, 1000 bp, Homo Sapiens
cctactgaaggacctgcctgaggcagttttacagttaactttttttttaattggtagaggagtatattctaaagtaacaataaagaagtatagtgtagcatatacataagccagtaacgtagttgcttattttcattattaagtattatatactactgaacataattgtatgtactatacttttgttttataaagagacagggtcttgctgtgtcacccaggctggagtacagtggcgtgatcatagcttactgcagccttgaattcctgggctcaagttatcctcccacctcaacttcccaattacctgggattacaagtgcatgttaccaggccttcctaattctttgatttttttgtagagtgggatctctctatgttgcccaggctgctctcaaactttgagcctcaagcaattctccctttgtggcctcccaaagtactgggattataggtgtgagcaactgcaccaggccatgtctgtgctgtacttttatactactggctgtgcagtagatttctttacaccagcctcaccgcaaatgcataggtaatgtgatgtgttttgacagccatgacatcactatgtgatgggaattttcaactcagttataatcttatgagactacgtttgtaaatgtgatctgttgttgactaatacattattatgtgatgcataattgtattgaattttctaaaatggaaagttactaggtggagtttaatgaagtactttcagtggtatggagaagactgtagcatagcctgtatttactgtgggaagtacagctgggatctgggcagaggtattacaggtgctttgaaactcttctgtctttccactcttgtgcgttttatgggtctttcagttttgtcaatttttcttttgtacactctctaatttttttttctatttacctatcctttgtatctcaaaaacactgctacagatcttgatctctcaactagtctgtgttttgaacgatcccagaatgaattc

SEQ ID NO: 197057 - DNA, 1000 bp, Homo Sapiens
cttttggcatctattggtagaaaccagggacactagtaacatcctacaatgcacaaaacagcccctacagcaaagacttgtccagtctaaaatgtcaatagtgctgaagttttgaagccctcacctaagtaaagataaaatagggaaacaatttacaattaacaaatacacttcaagtggaagtatgagtgatttggaggttaacatttgttttggattctctatttcaaagcttccctcatgaacaagggtaatggacattgaatatacatttattatttcctgtgcatgcctttccatggttatttaggtttgtaacctttgaattagggtggtaaaaatgccttcttttcaaatgggttttttttttttttttttttttaggagacagggtctcattcaggctggagtgcagtggcaccatcatagctcactatagcctcgaactcttggactcaagcaatcttcctgcctcagcctcccaaagtgatgagattacaggtatgagccaccatgcctgactccaaatgagaaagtttaatgctgatcatttgtacaatggctggggcacatttatgggcagttgaaattcatttaaagaacttcttataggggcttaacaaggagagtggaagatattctcagtgtcaaatattttggactctatgagggtcaagaatgtgggaggtggtttgtttgtttgtttgtttgtttctgcgtctttatccaatttttatatgttctttatatgtctcaaaggcctatttcattatcctcctttgattctgattgagtcacttgcatgctcagacttcagttctgcatgactgaacaaattcttggcatgaactttactttttcatcctcgtactaaaagcatgggtaatattgataattttaatagtttttcatatttctttcagtagtgagtttgcatagctcccaaatttccatttgtgttgacagctctcaaaatagcttcctcattttaaatgaattc

SEQ ID NO: 197058 - DNA, 1000 bp, Homo Sapiens
attaagggttttttttcctaaaactttaaatggtaagtaatagtgtagcataaccaacatgcaatacaaaatatacacactcaaataagatacaagccctttccccacaaagttttatacgaacagattcaaatgaatttcaacccaattgttaagaaaaaaaaattcactatatttcataaggttagggaatcaacattttactataaatgaaatctttacgtatgacatttgggataaaccaacagcattctgactcgtaaaaataatttctttaaaaaagattatccttacaagaccattattttcttatactgtgcaattataatctacaccttaagcaaaggggaaaaaacctcggttacaaaacgcaaatactaagcatggattacttagtccctaaattctatctgcctccaccttagtcctcttattttgtgtcaagagacaacattaaacaatttcagtacattatttttacagtggatgctcttctactatattcacagctcattaagagtactagaatgctgacgtttgctaaattatttattgtatccaaaaagttaggtctcaatagatacaatttcttaaatttggggttaaaaatttttatctggaattcatttaaagtagaagttgccttcaaagaattattccagttaagttttaatacaatctgcacagaaatgggaaaactatagaggtacataactcttgtaagaataaattacatgtacaagtgcacacaaaactgtatcagtcacaaatctcctttggtctcagtagtgccatggtacagtgcgaagcatattttttagttcttggggagaggaaggggacttccaaatactaaatggatcgtgattttaagcaaataatcaaatgcacaaaaaatgccagatcactttagataatgaatccaaaccaaggactcctactgtcaaattcgtctcacaaaatgacacgctttcttctcataataaaggtcagggaattc

SEQ ID NO: 197059 - DNA, 1000 bp, Homo Sapiens
tcaccaagccttccacaggcatccctctccagggatgaggcgggaaagctgggccagggactgcagaattctccttggcaggctggtggaagggggacccctatgaaccttctgatatccacaattttatctcagttgtatttggggaaatgagatttgatgctggaggtcatcagaactgtcattatgacactgttttgcaagatgtctcattacggtgttttcttctgtatcattttttagttgtaattcagttattagcccaggaaggataattttttttaaattttccttttaaagagtcttaatttacttgctatagcaatattaatttgaagatttccttggttccctaattcagaagcaggacagccaagtggtaaaggaggcaacttctggcatcatgtttttgttcattttctgttgttataacagaataccacagactgggtgatttataaggaaaacaagtttattcctgcagttctggggactggggagtccaagagcacagcaggcaccagatctggtgagggccttcttgctgcattgtaatgtggtggagggcgtcacgtggtgagagggtattagcatgcaggtcagccaccagtcctgtcatgggggccccatgctgatggccttatctaatcctaattatttcccaaaggccccacctccaatcatcatatgaattttgtgattaagtttccaacacataaaactaacatgtaggacacattggggacacattcataccatagtatatcacattgctcctgtttttgaattctggctcttctacttactggccgagtcccattgggcaattatttaatgttttccccctcaaagttttctctgcaaaataagggttactagagtaataacaataaaaacaataattcgtgtttattgggtacttatggtgtgtgtcaggtatggtgccaggtgctttcccaacatttactttcagtctcacagcagccctgagaggtggatc

SEQ ID NO: 197060 - DNA, 1000 bp, Homo Sapiens
atctgcaatcatcattcctgttacaatctgtttaaggtgctttcagtgagttcctggacagttccttgtgggtcttcagcgttcctttgagttcatctaactggacttttcagctgacctgatgggagcctctgtgtggaaatacttgctaactagaccaagatttattctgctctctcctcccttccatgagctcactgaatacatttatttttcccatgaggatttgtatttgtatttgatgaaatgagacggggactattaggtaggggtgagtgagagggaaaaaagcccctatgttacctgatgtacagctccaagagaaggtgtataggtgtgcgtgtgtgtgcacatgtgtgtacatgtgcgtctatgagacgaaaggtcttgttggacatgtgaggaagctgaattttattctctgaccaagagaaagtcgccaaagaaatttaagcaagagagtatggtaacatttatgttttaggtgaaacgaaaaagggcaagaagtgaggtcaggtgatcaggtgataagagtaacggtagaaatgaaaagagaacatacttgaaatatattattgagataaagttaacaaaactgagtgggcagcctcaaaaaattaaaagtagaactaccatatgtcttagtccattcctgctgctataataaaataccttaaactggataacttataaagcacagaaatttattgctgacagttttcgaggctgggaagtctgagatccaggcgctggcagagttagtatttaaagagggcctgctcctcaaagacggtgccttctgtgccctcacatggcggaaggacaaaagggctccctgggcctcttttgtaagggtagtaatcccattctcaagggctctgccctcatgatctaattaccacccaacagtccacctcttaataccatcacactggcggttagatttcaacatacggattttggaaggacgcaaacattcagacaacagtaccatatgatc

SEQ ID NO: 197061 - DNA, 1000 bp, Homo Sapiens
cctctccctggccagccctttccctacagggaaaccccaacacccttgtgcatcctgtgaactccctgtttctatctccctcagcaccgaacagtctgctttcccctggccatcagcttcttactgcctaggagctcactctggtctacgccaagggcaaatgtgtctgctaaagttaagggcgatttccaagcttcttcggcagagaccccagaattctagtaatgagggagacaggttatgccaagcctgcttctcccaggatgcactgggagcctgggaaccaggagggagggaggaggctcagctgaggagctcaggatttaattctatgcatcattaagtagtcctctgaaagtggtgtccccctatacatcatccatgcttagtaaacagcacgctgacattacattagtggctggaaatgaattttcttttttatagggaaattgagaatccgccaagaagaaagaaagaaagaagaaaaaaaacctcaaaaccaattatctaggcatttatgagttccaccctggtccctctttctctcctctctcactcagatgcaaagaagcatttaatatttaatatattaagaaaagaaagaaactttgatagattatgtggaatctggcgttaattctctctgcccctccttacttcctcattctcccctcccgaaaacccttcgcctcgttctagctgacatttaaatggattaaggtgttcagatttccttaatagtgttgacattttggaaatatttctggctttttttttcctctctctcctctaaataataataataataaataaatattggaatggatattctccctcccactggaaggcgggctccagccctgtcctactctctagcactgaggcgatttacatttttccttcttatttacaagatgaaggacaaagagaagtcaaagtcctccttgggagatagtgggctgagtgtgggatcgggggtgcaactggtcagatggaattc

SEQ ID NO: 197062 - DNA, 1000 bp, Homo Sapiens
agagttttggcaggttttctgtatgtgatcagcctatgtgattgctagttcttttttttaaattggctaatgccaagtaagatagcttacagaggagaaagacctctgtgaagtttggttgggagcatggaatcgtagagaaactgagaaaggagaaatgaagtttccaaaaatacttggaaactttttactttaccttggagacctaaattttgtctaaagctatttctgtttttcaaattagcttttcttgtcagaatttactatctaatgttttgcattatttctaagtatacgtatgctttaaaatgtttgtatcactggttttgctttgcaaggcctattaaatctcttatgcggcattcgtaattaagattgcagaatgaaagatggaggggttaagtgcatataaactgactgaattattgtccatcagtctgtcagagatgtttgaaccagagagactccatcttgaataggggctgggtaaaataaggctgagacctgctcggctggattcccaggagtttaggcattcttactcacaggatgagataggaggtcgccacaagatacaggtcacaaagaccttgctgataaaacaagttgtggtaaagaagccaactaaaacccaccaaaaccaagatggtgacaagagtgacctctggtattcctccctgctcattatatgctaattataaagcaatagcatgttaaaagacactcccaccagtgccatgacaatttacaaatgccatggtaatgtcaggaagttaccctatatggtctaaaaaggggaggaaccctcagttctgagaattgctcacctctttcccagaaaactcatgaataatccacctcttgtttagcatatcatcaagaagtaaccataagtatctttggtggagcaaccccattgctctgcctatggagtagccattctttatgcctttactttcctaataaacttgctttcactttatggagtcatctggaattc

SEQ ID NO: 197063 - DNA, 1000 bp, Homo Sapiens
aaaagatcaataaaataaaaagttgctttgtgaaaagataaacaaaatggacaaacctttggccagattaagaaaaaagagaagactcaaataaataaaattgtagatgaaaaaggagacttataactgatactgcaaaaatcaaaggatcattaaggattagtatgagcaactatatgccaataaattggaaaacattgaagaaatggatgaattcctagacacatgcagcctaccaggactgaaccaagaaggaatccaaaacctgaatagaccaataacaagtaacaagatcgaagctgtaataaaaagtctcccagcaaagaaaagcccaggacctgatggcttcactgctgaattttaccaaatatttaaagaagaactaatacctatcctactcaaactattccaaaaaatagaggaggaaagaatatttccaaattcattttatgagatcagtattaccctgataacaaaaccagacaaagatacctcaaaaaaggaaaactgtagaccagtatctctgatgaatactgatgcaaaaatcttcaataaaatactagcaaactgaattcaacaacatattaaaaagataagtcatcacgtccaagtgggatttatcccaggatgtaataaggatgggttagcacatgtaaatcaatcaagggtgatacattatatcagcagaatgaaggacaaaaaccatatgatcatttcaattgatgctgaaaaaacatttgataaagttcaatatccctttgtgattaagaaaaaaaaactaaaaaaactgggtatagatggaacatacctcagcacactaaaagccatgttatgacagacccacagctagtatcatgcctgaaagcctcctttaagatctggaaaaaggcaaggatgcccactttcactgctgttattcagtgtagtactggaagacctagctagagcaatcagacaagagaatgaaataaagggcatctaaattggaaaggaagaattc

SEQ ID NO: 197064 - DNA, 1000 bp, Homo Sapiens
tattattatttaagtagtctacatttagtgctaaaatgcattcactatggtaacagagaatgcattgccttaaccattaaccaaatggagcaaaactttatgaaacaagaaagaaaaatattcactcataaacaaagtagacttgaagaagtagcatgtatttaataataagaaattgttccttgaaaattacaaataactggattttagaaaagtatcttccataatgaaaagctagtatgtaatatgaaaactttacattacctattgaaacagaaacaactacctcacccttaacatcctgtagaatgttctttgttgagttaccagtactaattattcaagaatttggtgtctcggccgggcacggtggctcatgcctgtaatcccagcactttgggagaatgaggcaggtggatcacctgaggtcaggagttcaagaccagcctgggcaacacggtgaaaccccatttctattaaaaatacaaaattagctgggcgtggtgctgcacgcctgtactcccagttactcgggaggctgaggcaggagaatcgcttgaacctgggaggcggaggttgcagtgagccgagatcatgtcactgcactccagcccgagcgacagagtgggactccatcttaaaaaaaaaaaaaaaatttgaggtctcacgagaagaccagtgttttgggtagggatgggtccgtctaggagagatgtttgagacacaggtgtgacgtgccactaaaatccttgtttctgggtccttgactttgtaatgttgacggaattcgtttcttcccaagaattcatagtttttcactatgattaatatttctatttcagagtgtctcataaggaaactggtgatagcaccgtacaaattagcacacaataagtgaatatcaccataaagaaaaacactatttcaaaagcatatcagaaacacagcaatcaaagagttttggaaatgaacagccagtggtcgccaaggcgtggaattc

SEQ ID NO: 197065 - DNA, 1000 bp, Homo Sapiens
tagactggggcaaggctgtggcagcctggccaggatgaaaacgctcatccttgggctgcccctagatgccaaactttttccgtacaagttttcaaggcacattattaaaagcagttacgtaagtggggaactaactgcaccttataaaaggcttaacaggagagacagagtcctccatttggagctgttttgttaaatgttgagaatagagaagtccagaagtggttggtgtttctgctctacactgaaaacgaattgggctggagcccatctcacagcctgcctttctttcttctatctcacccagcttgggcacaggcttttgctatactgttggactgggcagttccccattgatagagatgttgtttaatatttaagtatgttgtgtagctcttaacatcgaaagagaagaaaaaaggtccagtttatctttagggtgagctgacctttccagatggagcagggaaatctcctgaggacaggaccctgggaggaatccacttccctgcttaaaaagcatggtgaggaaggttcccttgggcttgttggatccagtactctccagtgggcagtgctctgtatgttctaggttagagtcttagataatatgggattttaaaaccagtattgtattacattagagtattactgcccttgggaattttttagatagttccttttggggagagaactgttttgtcctatccattgcagatgggagcaagaacatacaaaagagcataaagaaaaattctgccgatgtgggcatttccttgaggctgagggactaggagaggcaccaaagggtgtccttcattcatggtaaaagccctaatagcctcagtgttagaatatcctgtaggcaggcgaaggatgacatgactcactttggtggtgacctcctagtagttcaactgagaatccaggcgggataagatcagtgcagggtaattgtatggtagctagtcaacctttccattgcttagccggagaattc

SEQ ID NO: 197066 - DNA, 1000 bp, Homo Sapiens
aataatatggcagcagacaactttctcatctcttcactataatatcagactttctctctgcagaacctccaatatatttcttcattttaaaaattgattttatatttaacttgttcaaattttattaagtctacacagaagtacatgaaaatactgtatccattttggtattgcacattgggcttgtatattaaaaaaacatttttctcctttcctccaataccctgataaaacccatttttactcccctcctctccctatatttctttccccttcccaacactaaaagattctgccagtcctagcaagcgcacatcagtcagcagtttccagtccacagtggacagtgactcagccgcttctatcagcctgaacgtggagctggacaacgtgaacttccatatcaagaagccctccaagtacccacatgtgccccctcaccctgctgaccaaaaaggtaggaggtagtcaccatctggaatccaaacacaggctggacagctgggccataggatctcatgccagcctgtccttctggcttcctctgtcccacgtggctgagggtatttggtgtgggttttgttctaccctttctcatttctcccacacctcctccccataccttttttggttgattccttttatttcttgttttctccctcagcaccaccatgcccagtgtaaagcttgtagtctttaaaaggaactacatctgactgctcttcccataatgtgcaacttccaaggtggcatttctttgcatttataacatggatgttctgctctattcttttctctttcttcatttaacattttaaagcctatttgcctttgccgttacccagtaacataatatttcactaaacccattaagatgcttgaactagattgggggaaaatcattcacacattccaaaatatctccataataattcataatgcttattatgtatattctatatttattaaaacaatttcttctctaatgtaaaatgaattc

SEQ ID NO: 197067 - DNA, 1000 bp, Homo Sapiens
aggtcatggggaaagtctgacaggcctctggaggccctttcggcagggagtattttgtaactttggcctccttccagttatctgaaatatccagttttgcaaaataggattctcacaggaatggaagtgcctcagctgccttccacatcctctgtagatgctgcctctgcttccgtttcctccacgagggcgaaggtatacccagaacaaattatgccacgaagatgcatgtctgacatctttgtttttaaattgaattcagttggtactctggcttttttcctttgactatccagtttttttagacttttagtctaaaaatagccaggtaaaaatatatctacttttgatatattaatatttacatgatcatctgacccatcgcctagcaaatctgcttttggacagtgtagtgaaagtatagtgtttcacactgttccaaagatagagctcctttatgtgtctcctgagaactgagggaagccccaaattcactcagattacgttctttcatttgatcagcatagacaccactgacttagctgtgctttatgtttttgcaggtctctctgctgttcaggcctctggtggcctactggggatatataatggagagactctggtatttgaggagagcaactggttcataattaacgtgattaaattagtttggcgctatggatttcaattcctccgtatgcacatgtgggtagaggacgtgttagacaagttcatgaggtaattttttttccttccatttaacctaagatcttttaatttaggttaaattaaacttgatgaactttaggaattatgatttcttgtaagcattttctacctcacagcaaggcctgtttataacattgttaggcaaaatgttttgtagaaactatgcagactatttgcttggatattgaaaggttggtttatttttgcttctgaagtgtattttgcaaatgcttctttagtgttgccagatactgttagatgccttgaattc

SEQ ID NO: 197068 - DNA, 1000 bp, Homo Sapiens
ccagaggaggaggagagagctctgccccacagaagggagtactcatgctccaaggcagaaggaaggagctgcaggtgaggccaagtgcgaggctgtgggtgcatcagaagtggagggattaattctcgtggcttccattgtcttgattaggtaggaaatggggctgtgtgccgcaggtgggaagaggtttgctattgtgcctgagagcgaagtttagggtggccctgggttgaattcacaggaaggaggctaaccgaagacagagatgtaaaaactttagaccccatttgagattgtggaccaccaatgtgaggtggcatcaatgtgtataagtgcaatttccctccagcaatacccaacggtgtggatacagggaatggaggcttttctcagactcagggttgaggattagggcaggtgccatggaaggacaggagtcgaggtggttaaggtctcaatgagagggtggttgaagaggccaagctgtgggtccaatggcagagggagtgaagggaggccggcaggccggaggagtgagaagagaatggaggaggccggggacgggaagtagcaatgcggtcaaagaatagttctgattttgtgggagtttgagagggctggaaaagtaggaagttgtggtcaaatagtgagaagccaccaccatgggagaggctggccgaggtccagtagaggaggccgaggtcagtcctgggagcagaggcatggggagacagatgggtgggtgtgcatcaccccctgcagaggctgtcttgggggtggtctgggggcaggggctggctggctgtgtgggtgggcagtggtgatgatgatgcagagcctagaaggtggcagagacggatggcacgagtttcagaggaggaggcctttctgccaaggaggcaaaaaggagtgaagtcgcagagccagcctttcttcctgggctcagccaagaaagcagcctccactgggaatgcttggcttgacctcactcttggaattc

SEQ ID NO: 197069 - DNA, 1000 bp, Homo Sapiens
aaaaaatggttccatctagacattaaaatagttgcagaaggcatattctgtattaccacaacaggaatatggatagagatagaaagtctcctatagatggtagatgggcagctcaaatactagaatgaggatattgtcagagaagtaaaagagaaaaactgatctaggagacagaataaaagtcttacccaagatccttgcaaaaaaatcttccagcggaagtctaagaacctgttcactgacatttaacacaatttttccttaagagaacagattgaagtaacagatattcaatgcaaagaatctcctttatcaaatatctgctaaatattggcgctaagtctgagtaacatctataactcttcttaaaaagtggctttgttagggagtctcttcgattactctctgtatctgtatgtctgatagatgagaaagaatctttctattctcaaataaggcacaaggaagttgtaattagattttaccaaactcacatattctacctagaggaaactagttaaaaaaaaaaaaaaaggccaaaattctctgtgctggaatgattttaggtcaccttgtgttggagattggatggagcttctaagtagaggcagatttatcctaaagctaatgatgagagagctttagggccacctcacttgtatgacctcaaaacagaagttaatactttgggtatgatctggtttttttgctcttatttgaatgttctttttgatgttagaataatctttatcattcttcatcctttttgcttcttataccagtatttttatctgaactttcttagttctttaataaattatgtaagacaaataaggtaccatttatacagtataagtcagtgtgtatactttcttattatttttactgaaacatttaagaaatggttacagaatagggtacctgaacatccacaacaggccatttctttctgtcttttaacaggttatatgtgtggactttattgagttctaaagaattc

SEQ ID NO: 197070 - DNA, 1000 bp, Homo Sapiens
atattctaagacaactgcctgcatggggtatgggtttgaatgcaactaaccatatgtagacctttttctctagatgattcattaattgagaaatcactgtatctcactatattagttgcgctaattgaacagataagaaatactttatcagggaattcatttttcttccctgatattgttctcttaccaccagggtaatgaagaaggaagagttattattgcaaagaagataaacaaacaacactggaaaaaacctttcttcaggggaagaacttctgaactgatttgttgtttgtgcacttgtttgtttcacacaacatcgcatgaataaaattagcagtggaaaagcagcttgtaatatgtcctgatgttacaagggtcatgccagggttcccaactccatcctttcttcaccaagcaggatatctgcacatcatctgagatcaagaggaagttgttcatcctacatttgagaatgtctacagaaggaagttccaatcttccttcattacctatttccacagtacactggctacagcttcactacctggcagtgcatcttaatgaaaccactagccttactgaatttggtggacacatgacattattttaggggaaaagtggccatttatatactaagacacagtctcaaagactcaacatatgcattactattactaatagtaaataataataaatattaatttgcatgcattaggaaatcaaaacatttattcaacacctaccacaagccgtaagaaggcattttaaggaaataaatatcctaaaagttcaatagctttaacaacaaccttatacttaaaactcttagcagcccaagactggctgttgtaatgggctgcatgtctatcttattcattaaacaaaacacggtattttgggaagaaaggaaattccgaatatgccaaatacttctatcatagtgtccacagtcacagtttttctaagtctccactaatatttctctaggttggaattc

SEQ ID NO: 197071 - DNA, 1000 bp, Homo Sapiens
actaccatagtgaaagcatttttgttgttcaatttttatacctgtgccatttaatgaaacaagtgcattaaaaaaaaaaacacagtaaaaaattccaaaatgaaaagttttgtttacaatcaggcaaatgataatagtgtttactatcattgttatccaatattatgttttgtgctaccataaaaatgtagctagctttggttttcttaatgtttctcaaaggagacaacttgattgcatgttttctaatactatacaattgcatggaacacttgtctaaaaatgaagtttccctggaatagtccattgttttttaagttttcaaagaggctatcaccagactatgtagcaaaaaatgagagacttggaattattgagctggaaggaacttagaggtcacctaacccaagcctttcgttttagagacgaagaaactgatagcaatgagtttgcatgacatgctcaaggtcgttctcctatttgaaaggaagatggatgtctttcataatatttttgtagttatccttgagtgcaaacacctagctgacatgttagagtgagaaaaacatacagcatacattcctaaaaactaaactgtcagtgaaaaggatgttctggtacaaaagctaaatgtatttagttctttgctgtggaagttagaaaactgagtgtattcacatgaaccatatttaagaacaactgtacttttgcagttgtcaagaattaataaacccagaatgttttcaaacaaatgtaatgtgcttcaaagtctgttcatcagctgacttctttttcaaaccaagaaacaaagatataacaagcacatgtaagaaatacctgccttttaagatattgttaagagctaatggccaccgtcctaattgttggtcctaaattggaaaaaagattacagaatattgattctgaaatccactagaaacatacagatgttctctttgttctgcctcttgaatactgtgagttgctgacgttgctgtgg

SEQ ID NO: 197072 - DNA, 1000 bp, Homo Sapiens
gctctgctaagggacagactgcttcctcaagtgggtccctggccctggtgcctcctgactgggagacacctcccaacaggggtcgacagacatttcataaagaagagctccgtctggcctcaggccagtgcccctctaggaagaaactacttccagaggaaggagcagtcagcaatctttgctgttctgcagcctccactggtgatacccacgtgaatagggtctggaatagacctccagcaaactgtagcagacctgcagaacaggggcctgactattagaagaaaaactaacagacagaaagcacaacaccaacatcaacaaaaaagaccctcacaaaaaatccccatccaaaggtcatcagcctcaaaaatcaaaggtagataaatccacgaagatgaggaaaaaccagccccaaaacactgaaaattccaaaaaccagaatgcctcttctccaaatgattgcaactcctttcctctctagcaagggcacaaaactggaccgagaatgagattgacaaattgacagaagtaggcttcagaaggtgggtaataacaaactcctctgagctaaaggagcatgttctaacccaatgcaaggaagctaagaaccttgatgaaaggttataggaactgctaactagaataaccagtttagagaagaacataaatgacctgatggagctgaaaaacacagcatgagaacttcataaagcatacacaaatatcaatagccaaatcgatcaagcggaagaaaggatatcagagattgaagatcacctcactgaaataaggtgtgaagacaagattagagaaaaaagaatgaaaaagaacgaacaaagcctccaagcaatatgggactatgtgaaaaaaccaaacctacgattgactagggtacctgaaactgacggggagaatggagccaagctgaaaaacacacttcaggatattatccaggagaacttccccaacctaacaagacaggccaacattcgaattc

SEQ ID NO: 197073 - DNA, 1000 bp, Homo Sapiens
tacaaagggaaccccaacaggctaacagtggacctttcagcagaaaccctaaaagccagaagagactgggggcttatattcaggatccttaaaaaaaagaaattccaagaaagaatttcatatccagctaaactaagcttgataaatacaggagtaaaaagacccttttcagacaagtgaatgctaagggaattcactaccacctcatctgccttacaagaggtccttaaaggagtgctaaatatggaaaggtaaggctgttactggctatcacaaaaacacactcaagtacatagaccattgacactataaagcaactacacaatcaaatctgcataataaccagctaacaatataacaatataacaggatccaattctcacacatcaatactgaccttgaaaacaaatgggttaaatcccccaattaaaaggcacagagcagcaagttgaataaagcatcaagacccagaagtatgctgtcttcaagagacccatctcacaagcaatgatacccataggctcaaagtaaagggatggaaaaaaatctaccaagatattagaaaacagaaaaaagcagaggttgctactctagtatcatactaaacagactttaaaccaacaatgatcaaaaaagacaaagaagagcattacatagtggtaagcggttccattaaacaagaagaccaaattatcctaaaaatatatgcacccaataaaggagcacccagattcataaaacaagttcttggagacctacagagagatgtagagtcccacgctataatagtgggagacttcaacatcccactaacagtactaggcagatcaccaaggaggaaactaaaaaagatatctgggacctgaactggacacttgacaaaatggacttaatggaaatctacagaactctccactgaaaacaacagaatatacattcttctcatatgcacatggcacaaactctaaaactgactgcacatttggctgtaagagaattc

SEQ ID NO: 197074 - DNA, 1000 bp, Homo Sapiens
tttagaatggcttgtggtaggggttcatggaaaacaatggtgagtggcatctattccccctaattatacacacacaggtaagtaacacagcttcaccttctcatctttgattgagattcatgtgtgagcaccagcccgtgaccactacaaacatcccaatgcatggacttggtagaaactgatcctatgagagtataaaatagtggggtgactctgtagaccttgacctatagatctgtatctcacaagaatccatgcagtagagaatgaattgtgttttaaactgttgcagagcaattgtacacgtaagaaaggctaaattcccataaaataaaatcatctcactctcttggccataattttaagagtatatcatcgtaaatggataaaggagtgtccccagtggactgggctctctatagcttttagttaggcaattataattctgttttacttacaatgggatatttcttgatgcattttaaatagaaagaatggtttctctattcatggagactccgtaagtgttaaatagatagaaatggaatttgtgtgggtatttataaaaccacagaaagagaattttgaattatatatgcatacacgctctttggtagtttgaaagcattttcagtccgcctggggaagcagaactgtaggaaagtgatatcactgtcagcgtcattcctcccaaactattttgaatgtcactagcagttaaggcaacatgttgtttttcagaggagaaaggcaagaaaataattaaacacatttttccttaaggaaaaaaaaaagagaaagcaagtctgctgtgagcctgcttttgtgagaaagtgatagtaataggactatgaacaaatacaatttctcctaggatatctttgaaaatttagctgagtaaactttgtctcagggtaagtaggaaaaattcatacgctctccgtgagtaaaataagtgcagatatatcaggatctcttgtcaagattttgtgttgaattc

SEQ ID NO: 197075 - DNA, 1000 bp, Homo Sapiens
tggacaacatatctagacacacactgggccagaagggaacctgctgccttgaaaggaaggacctagtcctggcaggattcatcacctgctgaccaaagaaaccttgggccctgaaaccagcaatgataccctagttgtacagcatgggccttgggtgagaccgagatgtaccggcttcaggtgagacccagcacattcccagctgcattaactatggtgagagactccttctgcttgagaaaagcagaaggaaaactgaggggaactttgtcttgcactttagctactagctcagccacagggacgtacagcaccaacagggctcttagagttcccagttccaggacttgtctcttggatggcatttctggatctgctgtggagcagaggggagcccactgctccgaagggtgagtcacaggcctggtagcattcaccacaagctgactgaagagtccttgagccttaaggaaatattggtggtagtctggtagtactccccatgggcctatggtggtggtggtcatggagtggggctcctcttcctttggaaaggggtaggaagagtgggaaggactgcatcttttggtttgagtaccagctcagctgcaaacaatggaacaccgacagacttctaaggtttttgtctctagtccctgacacctctatggtacctatggatttccctggggcaactcaccaccttgaagggaaggacacaggcctggctggttttgccatctgctgattgtagagccccaaggccttgagtgaatataggcggtagggaggcagtggttacagagggcctcggacaagattcaatactatgctggcttctagtctgaccaagcacagtctcagcagtggtggccacagtggtgcttgtatcactgcaccatcagctccaggtggcttaccacagagagagaccctccctttgtttgagagaaagtaaaggaagagaacaagagtcgctgcctggttatccagagaattc

SEQ ID NO: 197076 - DNA, 1000 bp, Homo Sapiens
tttttctacatttcctttaagtcttgactttgagcaggtttgacttttaacatctttgtcatgagccttaaagtccagaataggacttgcatgatagtccatgtcccgtgaatcttgtctggaatagcccttcatattctgaacaatgcctagctgcagaagacagatcatcccaaaagcacatggtggacaggtgtaaggccgccataaatggggatgtcatctgtgcaatgcacaaaagggctgggccaaggaagtgagcagagtatggcctgaaacccagcccgtgctccactggccaaaccttccaccctcgttagaggctgtgtccgcctgaaggaaagaacagctttttcttgcttgtccacccagagtcaggcatctttttctaactcaataaagataccatatgtattaacagcagcaccaggggaaggtgagaagacaaaaatatagtaacctactccataggacaagtaatagaaatcaaccctgacaaatcacaataatatgacaaaattcacaataatgaataaaacattacaactacagtcaaatccctgccccaagcccttctctctcccactcacacagatatgagtgccatcctaaagtcggtggcatcatttctaagagtgattttggttttgaccttttgtttggccctaaatttcaagaaaaggttgaacaattgagcctcaggaaaggatgtaagcatctggagtcaatgcatctcctcaccagaacattcccattaaagcaaccacattcccacagctccctgtctctgccccagttcagaattccagaatcttgagacagataatctgattggcccagctttgaccctctataccaatcagctatggctagggccaacaggagtcatagaatatagcatctataccatagacaactgctcagcccccttgccatgcgtgtcaggttggtgcccagagaaaaagccctaattgtgagacttccagccctccaagaattc

SEQ ID NO: 197077 - DNA, 1000 bp, Homo Sapiens
taacgtgggcaaggggagagggccagtctccccccagagaacagggcagtgctaccaaaagaagagggaaagagacacagaggcactaaaatctcttatgtctgcaagatgtgtatatgtttgtggcagtggggtgccagacttgggtggggaataaatcaattatttgtctgtaatgtcaggcagaggccagcagagggagatgttggaatgtgttgggatttgtgggccctctacccacagacaggacttgggaagccaagtttattctcggctgagacatttgtgttggtggtgaccccagtagttcagtgtacactaactttgtcttatgtacaaaaccatttaaaacagtgtataaaattaccttcagactacatgtaaaagatgtatatgaaaaaaatgaatttcatgtttagacttgggccccgtcttcaagagatctcattctgtatatacagatattccgaaatctgaaaaaaaaaaaaaaatccaaaatctgaaacacttctggtcccaagcattttggataaaggacactcaatctgcattgaattaacagcaccgcccagctcagcgagcctgccaggggcgtgagagccctgaatccacacagtctgctccagtccccacttagattttccccagagggaggcatttcctggtgctcttctcaccatctaggcagctgggcattctgaaatgtctccaggaaatgccgttgggagatttctgagactcttcaatcaaacccaggccttcagggagcacccaggttgcaagtggtgagtccagagtgcaagtgttgtgctgagagtgctgatggtgcagaaagccctggatttgaaaccccagatgcaaacgagcttgggtcagctgcctgacttccttgtgcttctgttgcctctccctaaaatggagatatagtagttcctgcctaaaaagtttgatgcgggccgggtgcggtggctcacgcctgtaatcccaacactttgggagg

SEQ ID NO: 197078 - DNA, 1000 bp, Homo Sapiens
aagaggagggcaggggagaggagggaaggagagggaaggggaaggaaggggagtggaggggaggggagttaagttcctgaaagcagatgagggagttatccaaaggggttaccttcaagcttcaccaacatgcagatactcagcatgcttacaccttaaggtttggaacattccaactggaacaaaactcaccagtggctatggcccagtaaacgtctgatccattcagtaactcaccacatgctatgggagaataaacctgggagccgggaacttgaagcagaattcgaaatggagcgacccgtgcattggaatccaacactgcatccagagcgccgaccaggcgaccttcaaaagaaaagagaagaaagtgcacctgtgagcatggggctggccagctcctcatgcgtgtgaggcatgtggtcgctgtctggactccatgctggggtagcagagacagttttacatccagttcttcaactcacctcacaaagcctgagctccatggagccaagggctctgtctgcatctgcagcaggacctgcccctgacaggcactcagtactcatttgctcaatcaatgaagaggtgaacaaagggtgctgaaccagtcgcccagcctagctaaggcactaagtcccagtacataaataagcaggggctctggactcaagactgcctgatgcaaaccctggctccaccactttcaatctgtggggccttaggcaaatcacttaacttgtctgtgccctggattccttgttggtgaaataaaataagcacagtctacctacttcatagggtaattgggataattaaatgagttaaagtatccaatattcaaagtgcttaaactattgcaagcccataaaaagtactctatgtcacccattattattattttgtcatcattatcctcctctccaatatggtagaataatccctgcctgctccagggtactgtgagatgtaaataagaaaaccggccaggagtggtggc

SEQ ID NO: 197079 - DNA, 1000 bp, Homo Sapiens
tctcagagaaaagggtggtagattaaggaaatgacccagcatgttggtattttgttgttgttgttgtttaggtgtacatttaaatgcttatcaaaaaggaaacattgtcatgtcaaagaccactgcaggggaagcccagaggtggctgtaagcaagcagatcacaagtcctttaacaagttctttcaaatagcagtagagctcagaggggggctgttgtttcaaacaagattcaattagcatcaagttattaaagggcagccggggaaacaagaataatattgacagacctgctttttaagcagtatcttttccctctaatcagctgagtttgttggagctgatcattttatttcttcaactccattcaactataggtgcaaagaatgagaacttcagtgtaactccaattttctaagagaactaatcatattgctgctttataaaaaaggtaatctttcacagttgcttagatttatgaataattagatttaaagcattatactggaatctagaaatctagctaaaagagctgaggttcttatctgaattatttgggccgttagcccttctgttgaactatagaaagaacttaaagatatagttgtaaaataaggacgtactccccaaaactgtcccaagtatccacttgattctgtatctttatattgcatctttttctcatatttctgcaagtttacataaactctggtcaactatgaatgcctcccgggatgagaaatgggagtttgggtgaaatagattagagaataggttttggggttttttttaaccacatactctcttgtcaactttcaagttttgtgcttgtacctcttccaaagtattcatttgaaaatatttcatttttgaaatcagaaaggcactgtctgtgctctctctccgccagatactcagtctgggttacaggaagtagaaatttgtgactactagcctttcccagcctcctttgtaactcttgactttggaaatgggaattc

SEQ ID NO: 197080 - DNA, 1000 bp, Homo Sapiens
ctcaatatggaggaaaattggtcctagattaaaggctgctctgtttggctctaagcttcctgttgcccgccccccaaaagcatttaaaaacaaaaggctgctgtcgtcctgcctgaaaaatcataaaagcaaaacccaaaagaattaaattatttccagacaagttaactatggtccagaacaaagctcaaaaatactgttacaaattacaagagtatccaacacccaacaaggttaaattcacaatttagtcttgactccaatcagaaattacctgtctccaatcaaaaattactgagaatgcagagaatcaggaaactaaggctaataatgaggagaaaaatcactgagttgaaactgactgtgaaacaatgccagtataaaaatcagagagggaaaatgattaacaaagcatcattgctcttaaggggctaattcatgtgtaacaggcatcctcaaaagagagaaaagggaaaaaaaatatttgagtaagtgatggttgaagtttttcaaaatttgatgaaaattataaacccacagatccaacaagctcagcaaatccaagcaaaagaaatgtgaagaaaacatcttaaaaagttatagagaaaatcttaaaagcagccagagggggaaaagagccattgcatacagaggaacacagttaagaatgtcagccgacttagaagcaatacaagccagaagacagtggagcaacatctttatttgaagaagtgaaagaaagaaaacttgcattctatacctgtaaaaatatttttcagaaacagagatttcaaacacacaaaagctgaattaattgccagccacctcgcactgtgagaactgttaaaggaagtttttcagacagaaggaaaatgataccaatggaaattggtggtacacaaaagaatacaaataaaaggtaagcaatatacaggcttaaaaaacaaatatatttttgtccttctgacaagggctcgtgtgtataataaatcaagaattc

SEQ ID NO: 197081 - DNA, 1000 bp, Homo Sapiens
gagccttaaagggtaaaaacttcaggagcagcaaagtttcaaaaaaagatcagcaagaaagctcttttccagattttatcctgaaggcactagctactttaagctattttttattatattttgcccttgcagttggcgtttgatttctcactgaacattcgttgtcataattatagacactatgtgactatcaagggcataatattctttcatgctgcatttttattagatggcacctcaaagttttcccaagtaggtgggttttaaattatgaatatataccgtggcatagtatcttacttagtattttaataagatccttatttatataacaaatattttttttattcctctgtagtgctactttagtctctgagctaattttcatgaagccaatctaaaaatcgtgttacttctaaggatgtggagcgagtgagatgaacagttgtgctgtcatattgcccctccccagtgcagacagtgaatgaggacccactgatttaaaggcaacactgcagccccttcttgcctcattgaagtcccaagttttattacagtaaaagcacttaatgttgacatttctgaaagaatgaagaggccgggcgcggtggctcacgcctgtaatcccagcactttgggaggctgaggcaagcggatcatgaggtcaggacatcgagaccatcctggctaacacggtgaaaccccgtctctactaaaaatacaaaaaaattagccgggcgtagtggcgggcgcctgtggtcccagctactcgggaggctgaggcgggagaatggcgtgaacccgggaggcggagcttgcagtggtccgagattgtgtcactgcactccagcctgggcgacagagcgacaacgtctcaaaaaaaaaaaaaaaaaaaaaaaggaaaaaaagaatgaagagccagagccaggcatagtggcacgcctgtagtcccacctactcaggaggctgaggcgggaggatcacttgagcccaggaattc

SEQ ID NO: 197082 - DNA, 1000 bp, Homo Sapiens
gggaaagaagcaatgtagtgcagaacaacttatccacaaaaaagaaaataacattcttctaagttgatgcagtcatggaataggatattgtcaatttaaaaacatgaataccagaagacctagtctacctataccttaagaaaatttaagattggtacttcacatccagtatctcagaataagggctcatatgaattgaagctacagaaaacaaaagaaattgacacactgtatctggcttctgcattgtaaagtaataataacaacaactggaatcataatagcaactaacatgattcagcccttaccctgtgtcaagggcaatgtaaagcactttatttggattgtttcatttaatcttcctaacaaccctacaagggggaattataattactaccctgatttcatagaagaggaaactgaggcagagaatcgcagagctgggaagtggggagcaccaagatgaaaggcccggcagtcagagtccacaacgcctaaccactgcactatactacaatgccctcagtcagaaccagattgtaaaagacacagaactagagggccaacgatctgttaagtgagcgaagtcatcgtgatcaattgcttatccacttcttaggggaaagaaactagtcaatcaatttgttcttcaccatctacgtttcactatattcaaaattaaaaggaaattattttaaaaactaatataaaatgtgaaattttttcacattttattagtttattagttttattttaaaaactaatgtaaaatgtgaatttattttcaaatcttaacgtggtttgcttctacatccaaacatttttgaacaattcgatttgtttgatttggtttagtaaattttaactcttattaaataaacactttcagtcaatgttttgttacacgtaatagaaaatgtacccaaaaagaaagcattacataaagcatctaatacaagtcttagttatatagaataatgccccctgtgtgtgagaattc

SEQ ID NO: 197083 - DNA, 1000 bp, Homo Sapiens
aatggtagtactcgtcctctacgatagatgttttcagactcagactgtgtgtgcacatgtgtgcaaagcaaacgtatttgctttctatcctgaagttaaactctcattaagctcttttaaacattcctcaccttcagagctctgctattttgtgtgtatattctagtctgaagaaatagtttaatcacatttttttaaaaaagtacttgctctaagattgttaagtcttcaaaattacaaagcagtaggtcacaaaagattagggagaataggcaactgctttaaccaactttccagggtctctgtccaaagacaatggtaaagtgactgtcagccatactcaaaagagtaggcctgaaagaggtaaaaagagctgcaaaaggtaggaattcatttcctttatattggcttgttaaatcttttaattcctttaactgtattagcttaattaagcccttagtttttttcctattttactatacagcacccttctttgaatcctcttccaccagttcactacagcttacacactgtaatacccacagttcaaatgttaaaattcttagcccagaacctgcagcagtacctaatatgaacaatgtacttgtacagtatgtaacttgtaagctgtggggacagaaaccagtatgtcttgttcactgctgtgtccctagtacctaccacagtgcttggcacagaggtagacatttaaacatctgttgcattaaaaaaaaattttttttttctaaaaatacaaccaaagcagcataaacatctgttgcattttaaagaatgaaattcttactactcctcttcacctaccttttttttaatacttagccttcctcaaacataaccaatatttctttgcctcagtgcttattgtcatttatctaaatgttttcccccttacctttgcaaatccacattcttcaaagtgcaaacctgttctcttattttttattatcattaactgaaaaaacatcctacctgtgaattc

SEQ ID NO: 197084 - DNA, 1000 bp, Homo Sapiens
ttgctttctttttctttttgtagagacagggtttttctctgtggcccaggctggagtgcagtggcatgatcagaccatagcttactgcagccttcaactcttcagctcaagagattctcctgcctcagcctcatcagcatctgttgttttttgactttttaataatcaccattctgactggtgtgagatgattgtggtcttgatttgcatttccctgatgattagcgatgttgcacatttttttaatacacgctggctgcttgtatgtctttgtttgagaagtgtctattaatgtcctttgcccacttttaaatgggattgttttttgcttgttgaattaagttccttgtagattctgaatagtaggcctttgtcagatgcatagtttgtgaatattttcccccattctgtaggttatttactctgtcgatattttcttttgctgtgcaaatgctctctagtttaattagattccactcatcagttttctttgttgcaattgcctttgataacttaaacataaattctttccctaaagccaatgtacatagtggtgtttcctaggttttcttctgaaatccttctagtttaaggtcttacatttaaatctttaattcattttgagttaatttttgtgtgtggtaaaatgtaggagtccagttttattcttttgtatatagctagccagtcatcccagcatcatttattgaatacagtccattccccagttcttatttttgtccgttttgtcaaagatcagatagctgtaggtgtcaggctttatttctgggttccctattctgttccattggtctatgtgtctgtttttttgtgtgtttgtttaccattaccatgctgttttggttactgtagccttatagtatagtttgaagtcaaatagtgtggtgcttctggctttattctttttgtttaggattgttttggacattcaggctcttctttggttccaaatgaattttagaatagttttatggaattc

SEQ ID NO: 197085 - DNA, 1000 bp, Homo Sapiens
tcttaatccgtggaactgttacctacatggcaaaagaaatttaggtttcagatggcattaagattgctaattctctgactttaaaatagagaaggtatgttggcttatcagggtaggtcgaatgaaatcacaagtttccaaataattagaagaggatatctgggtgctgagatgtaagagcctgacctgcttttgctggttttgaagaaagagaaagggaccacaagtagaggaatgcaagttgcaggaatccaaaggctggaaaatgtaaagaaacagattatcccttacaatctccagaaaggaacacacctggtccagtccacacactgatttccagtgcagtgagacctacgctgggcttctgatttattaactataaggtaataagttcatgttgttttaatccactaaattgtgatttaatagcaatactggaaaattaataacagaaaactaattataataatagcaaaactaatacagcccttactaatcaacacatatctagtggatatttgtcatgtgaccagtcctatactgaatgccgtggggaaataccagggaatagaatatgcagaacctgtccacagggagcatactaagattaatgcatgccgaacatttagaaagcaatcagtgagagtgctaattgagtgctaagtatactgggcagaagaatatgagaaaagagattttagggggctgtatttgaacaagtgggtaacgggtgagaatgatgaatagatggaaaacttcaggagtttttaattgataatgatctcagacttccaaggaactttcaacttatttatttttatcttttattattttagtgatgggatcttgctatgttgctcaggctggtcttaaactcctagcctcacacaatcctctggcctcggccctccaggttgctgggattacaagcatgagccaccatgcatggttctaaagaaactttttagtcaatggcctttgttgctacgcagtggaattc

SEQ ID NO: 197086 - DNA, 1000 bp, Homo Sapiens
ggcttaaagccatatttcaaggcactgaggttaggctgatatgctggaaaacaagtgccttggaacttccgtactggagggggaggatgtcttgtggaattcagacgtaagcctaaccctgcattagaaaaaatgttcaccgggttagagcagtggtattcctggggatctttatgctaaggatctgagttacatactcctgggaggtaggagagaaggcctcatttcattccctctggcgtgctgtcaatcaggcaattattgctaatattgactttccctttgtaggtatgttcagaactgttaagtcacaactggagagtaagttcccacttgtttataattcccttttagtctgagcagaggacagtctgttcacggctaggaatcaagttgaaagttggaattctgtagccctggccgaggcaggttttgctgtaagaaatcttttcagtttagcaccaacatcttcctaggtttcctgtctagacagtgcaaagcagtggaacatgcgagaaacgaaaaagccatggaaagggagggagacatgcttgcaaataggcctcaaaaatggaggtctcccactttattggtatcagaattacttggagagttttttagaagggtagatccccaggccccgcccccacctccaaagtcctgagcagctggaggtacacagtcatttggagggggaggaaaactgatggattctacctgaggcaaaaagatgagggaaaggaacaaagaaaaagggctgaaaaaaggtctataaacacatgggtggaaatgagcaaaagcacagaagaaacataaaataacaaacgtggctcatggagctgagtggaacagcagcagccaggcatatgacctcggtgagaaagcaccatgttgcacgaggcttcataaattctggttctccctggagtctctgcttctagaacacattagccacacaaaatcctcaaaaaaaaaaaaaaaaaaaaaaaaaaaagaattc

SEQ ID NO: 197087 - DNA, 1000 bp, Homo Sapiens
ttgagtcctttgatccccctagagccaggaacagaggccagcagaggctgggcagggtggtggttgctgcggggataccagttagcagtgggggtggcaggccataaatccctgggggaacaaaggcagctgcagcctgtagactgtccaggccccttgtgggcaatctgcccaggagactcagagaatctccgtttggtttggaaataaatcccttggggttatatggtaaataaaaatacaattaagagtcttccaaaagcactcaggttcagtgaaacaaccatatctggccatttagagcagtttgcagaggcctctgtgctcgctagggaggactttgccttttatcccatcagcacttggcgttaggcagccaggctagcaggcagaggagagcccctcccttctgctcagggagcttctcagaggctgggcattgggttcaggatccattcagctctctgctcccacccccagggtcatggtttgaagagtgggagggatggggagcaactcttcgggcttccacagttttggcctcacaaggcttcattcatcactgtgaaagaagggctggggtcaggggactatgccgccctgcccatatcattcgcaatggagacatgtgaccttcctggtggagcctcctgaccgccccacctttagccctacctagcccgatgaccagaagacaggcagccagcctggaaaggccaggtaacccagggcagggatgcagggaagacagaggtgcgtggaggcagagctgggggcactctggggctgagccagacagctgcacccctccaactaaaagtgaaaagactgtggggcatgacacgattaggtttgcattacgtgagttcactcctgcagcctgaaggagggtgtgtgtgtgacacgcacaggaagaaagggagccagcaagaagcaaacgctataagggagctgaccgccaggaggcctttgggatgtaagattctttaatgcagaattc

SEQ ID NO: 197088 - DNA, 1000 bp, Homo Sapiens
aacagtgttattgattcttctgcatctgttgtagtttcttgatttttctgtttgtgtcttaataggacttggctttggaatactatgtattaggagaatcttttgagacttctgctccttgggacaggtaaaatatactaaagtgcctgatattattcaaatatgcgatatgaattgcttgaagtaatgtttctttttgtgtgaatatgtaagtttaaaacattttatgaagaaacattgagacaaggcagctactttatttaaattaatatattcatcagaatgccgtattttcaagtgttttattgggtggagggagttgaagaaaatttgtctgtgatccaaagaacgaaggtattgttgaagtttacattttgaagaatgttattgaatgctcagtgttactatgtggttatacttcgctttgacttaaattcttaagtgattaatattgcttaaatgttctctaaaaagtcctcccaaagtataaaaccagttaactgtcctttataatattatttagtttttgatatttgtatgtgtaaaaatgggaatttaggtggtttataaaggaaatttagtttaggaaattatgtacaatttctgtttttaaatttaagcaaaatgttgatactggagcatattttaggaaatggcccaaataagatagatggaaatagattttagaagggtttctttactggaaatacatacatacagtattggttagtgacttaataaaaactgattaggaaatgcgaaatggtttattaatagacctgtgagttgtattataactcatccagtaataaaaaaaatcctcaaagagattgtctatacaatcccttattcaaaatgctcaggaccagaagtgtttgagattttagaatatttgtattatatatttaccagttgagcatcccaaatctggaaatttcactggaaatcactgcagcatttcttttgatcatcatgttggtactcaaaaactctcagattt

SEQ ID NO: 197089 - DNA, 1000 bp, Homo Sapiens
cacaatgcaatcataaatattaatagaagaacaggccaagcagaggaaagaatcttagagctggaagactggctttctgaattaagacaagcagacaatactagagaaaaaagaaggaaatggaatgaacaaaacttctgagaaatatgggattatgtaaacagactgaatctacgactgactgaggtacctgaaagtgatggggagttggaaccaagttgaaaaacatacttcaggatatcatttaggagaacttccccaacttaccaagacaggccaacattcaaattcaggaaatacagagaaccccagtaagatactccatgagaagaatcatccccaaaacacataatcatcagattctccaagatcaagatgaaagaaaaaatgctcagagcagccagagagaagggccaggtcacctacaaggggaagcccatcagactaacaacagacctctcagtggaaatcctacaaaccagaagagactgcgggtcaatattcaacattcttaaagaaaagaatttccaccccagaatgtcatattgggccaaactaagcttcataagcaaaggaaaaataagatccttttcagacaagcaaatgctgagggaattcatcaccatcaggcctgccttgcaagagctcctgaaggaagcactaaatatggaaaggaaaaacagttaccagttgctacaaaaacacactgaagtacacagatcagtccctatgaagcaagcacataaacaagtctgcaaaataaccagctagcatgatgagagaatcaaatccgcacataagaattctatccttaaatgtaaatgggctaactgccccaattaaaagacacagaatggcaagctggataaagaatcaagacccattgctacgctaccttcaagggacccatctcacatgcaaagacacacaaagactcaaaataaagagactgaagacaatttactaagcaaatgggaaacagaacgaagcaggggttgca

SEQ ID NO: 197090 - DNA, 1000 bp, Homo Sapiens
tggtatcctcacaaacacagacacacctgcagacttctctcaccaaatcgagattacaaagcacagcttccactgcttcttagcttttcactctgtgttatgccaggagcattttctcatgtcatttgaaaatgggatttctgagggtagctcccaagggtgacttagtaaatgaactgaagccaggggatgaagtgggttagagaccagtcgtggatggcacagagactggcatctgtaacctgtctctttcatttctaccccttcctcagcccatccctagccttccctcactcaagaggctaccgtggctccccatttttatcacatcaagtctaaactccagctttcaaaccactcataacctggcaggctcttctcctctctgtcagtgaatgcccccgaccctcaccacggtacccattcctctcttctgtctcttgaggtgcccccaccccacatagtgctcaatcctgtgtccttgccctgctgagcaattccctccctccctcctcctctccccagtccccctcatccctgtcatccatcccctactccttgcaagtggcctctgtagtcctctctagggccctctctcatctccctctctgcggcgggtcctggcacctctgtggcaggcgggatttgttgccatcccagggggaatactgggcttctcagtgggcagggcttgaggcttcatccctcctcttctggagcccgctgcatggtgcagcagggctgggagggctgggccagtgaacctgcacttctcaggaggaagggctttgcccaccactggcctccaggtgcccggctctggtcgggactgttttgctgctcagtgccagccagcagccaggcccaggcacaacctgccccagggttctgggatggcagaatgcaaagcgcagactccacctctaacttctcccctgaaaggagaatctgccaaatccccaggagttcagaggacaggccaaggagagcagaggaattc

SEQ ID NO: 197091 - DNA, 1000 bp, Homo Sapiens
ttttttttttttttttcagttaaaagagtttgttcatgtttcttcttgatagtcggtaatcacttgctacaactgttacctgtctgtagtactgcagtctcttcactgctgtaacatttacctttgatctcagcaactcaaaatgtcattccaaagtataccaccatttctttcagccctctatgtcatgggagaccgaaaccaatatctgcaaaggcacatagaagccagaaataaagatgtatatgtttgttattatttttcttgtctttaaaaaaaaaaacactaagagttggcaatttacttctaaaggcactatgttatattggggaacagaaagagctttgttgggtaaataaaacagacttgtctctttcttctatgtggctctttgcattgtgctcacctagggcactgcacacactgaactcatttataaattttccacaaatgtattttggtgtttatgtttttgttacatttatatgtctatgaagaaattagagcctgtggtattttgctatgcaatctggcttatgtagtttgtataattttatagattagattttaaagtacatttatctgagtctagcaagtggagtaatttattatttttatttctttcagtaatgtcttttcattttgcccaagacctttggccagagcagaacataaaagattctttccagaaagtgacactgagaagatacggaaaatgtgaatatgagaatttacagttaagaaaaggctgtaaacatgtggatgagtgtacggggcacaaaggaggtcataatacagttaaccaatgtttgacagctaccccaagcaaaatattccagtgtaataaatatgtgaaagtctttgataaattttcaaattcaaatagatataagagaagacatacaggaaacaaacacttcaaatgtaaagaatgtagcaaatcattttgcgtgctttcacaactaactcagcatagaagaattcatactagagtgaattc

SEQ ID NO: 197092 - DNA, 1000 bp, Homo Sapiens
gttgtgaatgaaggggcccccttccagctctcaagcctaagcccgtctcagccttaaaatcatcccagctgataccccagacgtcttggggacagagtcaaatcatcttcactgtgcccttaccaaattcctgacccacagattttacaagcataataaaatcattggtgtttttagctactaagttttatgataatttgtaatgcagaaatagtaactggaacattatatatccaaatttaattcaaatgcaccttattattaaacctggaatatcttacacagctttatatgagatttctcatccttctaaattctcctaacattttatctttatttcttccatggcacttatcattttctaccttatagtcctattattcatgtatatttgtcatttttcttttcttttttttttttgagacagagtcttgctctgtcacccaggctagagtgcagtggtgtgatctcagctcactgcaacctccgcctcccaggttcaagcgattctcctgcctcagcctcccgagtagctgggattacaggtgccagccatcacgcccagctaatttttgtatttttagtagagactgagtttcaccatcttggccaggatggtcttgaactcctgacctcgtgatccacctgcctcagcctcccaaagtgctgggattacaggtgtgagccaccgcacccagcctatttttcatttttcattagaaaacaaagttcctttaggacaatgtgtttctgccttgaataccataatgcctaccatagtattttacatattataaatactcaatacatatttcatgaatgagtgagtgagctaatcaagattaggtgagaaagagacattaatgctatagaggaaaagaaatatatagcagataaaaggaagaaataaaatagttattgaaaggataaaaacatattgaaaggataaaaacaaacaacatgcatgtgtttttcttttggaaatgtgctgaaagaattc

SEQ ID NO: 197093 - DNA, 1000 bp, Homo Sapiens
ttagcaaacaactcaaatttaggagccttctttacaatccattgagtgaaacagattcacaaaataatttgttcaactgaagatttaatttattattagaaaatggttttaaactctgatcattacattgaagagtcaatgactgaggttttcttacctactgctcatctcttagacaataacttcttgaataatttctacatgagtgtctgtacaagcttttaaaaaacagaataaattaaagccccattcaccaaacaaaccacctcccaatctattatgttttgtcaccttgttcacagtttagacagtttgaagagatttaaacgtgttgctaggcaactagctcctgaagcataacgtatttccttcaacatcccagcccattcttttttatcatcttcatacctgatggaggaaaaaaaaagtaatcaataagcagctttagttccataggtttccctgtgttcagaatacaaatgtggatctttgaaaaaaccctagtggctcttactcagaagaagatgcacctgcctggtagaacagaacttaaatatctcccaaatatgcattgtctggatgagcatgtgcctgaactactgccacagtatttaatctggatgcctaggcagttcagcattctctgggaatcaaagactgcagagaagaggaataaatagctaagcagttaaacattcattcacctttgaattgatgaagatggctggtctctgagtcaaagtaagcagactcttgcttaagagaaagaactgaggaagagcagggactatcggtagacttaattatgccttcaattgttcctatacactagtgcctagcatggcacctgatacacagctgtcactttatgaaaatttgttccccttcccctttattgttctgtttgaggactactcttagactttgcacttgacttaggtaagaactggtcttcatctctgaatattcaaggttataaagatacagataacttgaattc

SEQ ID NO: 197094 - DNA, 1000 bp, Homo Sapiens
attagccaggtgtggtggcgggtgcttgtagtcctggctactcgggaggctgaggcaggagaatggcgtgaacccaggaagcggagctggcagtgagccgagatcacgccattgcactccagcctgggagacagagcaagactctgtctcaaaaaaaaaaaaaaaaattagctgggcatggtggcgcatgcctgtaatcccaattactcaggaggctgaggcagaagaatcgcttgaacccgggaggtggagcttgcagtgagccgagatcgcaccactgcactccagcctgggtgacagagcgagactctgtatcaaaaaaaaaaaaaaaaaaaaaaaaaagtgagtgcttagctggagtgaggaggaaacactgaattcctaaatcaggaattcgtttcattttcaccaggcgcagatatcctagctcctgaaaaaggccaagaccgagggtctggccctgggcaggtgtaagaaaggactgttttaagaagcttattacacaaagctcatatttctggatccaccactgcttacatttgcacccagacaccacttttaggtgcaagaagaaaggtcaggacatagagaaaaatgcacacagaacgatgagggagaatgacgagggagaatgacgagggagcaagcctgcatcagagcacggctgatgtcacggaagccaccaaaggcacccaccagagccttccccacctgcaaagcccctgcagcacccggagggcaagctggcttttggaggccatgcggagtccagggcagaggggacagtgggatgggctgcctgttgcagtggctgttcacgtcaacagtgctcagccaaggcagtgaggacgaggatgagagccggggcagctgactgggcccgcgatgccgctcacaggagaggcgtctgcacacacctggcaactgcaagacttgttctcaagggtaagtacacttggacaaacgaacaccaggctacttacacagggtgagagaattc

SEQ ID NO: 197095 - DNA, 1000 bp, Homo Sapiens
ggccaaggccggtggatcacctgaggtcaggagtttgagaccagcctgaccaacattgagaaaccccatctctactaaaaatataaaatgagccgggtgtggtggcgcatgcctataatcccagctacttgggaggctgaggcaggagaatcgcttgaacccgggaggcagaggttgtggtgacccgagatcgcaccactgcacgccagcctgggcaacaagagcaaaactccgtctgaaaaaaaaaaaaaagacaacattagctgggcgtggtggctcacatttctaatcctagcactgtgggaggtcaaggcaggtagattgcttgaggccaggagttcaagaccagcctgagcaacatggtgaaatcctgtttctacaaaaaaaaaaaaaaatggctggatgtggtggcacgggcctgtagtctcagctatgtgggaggctgagatagatggtaggattgcttgagcccaggacagacctctagcaagactgaccaaaaaaacagagaagttataacatcaggaatgaaacaaggagtaccactccaggccctgcagccatcaaaaggataatgagggaatgccacaaacagctctacacataggaagttgacaacttagatgaaactgaccacttcctcaaaaaacacaaactaccacaactcacttgatataaaatagatcatttgaatagctctataaccattaggaaattgaacttacagctttaaaactccccaaagagaagtcttcaggcccggtggtttcattagagaattctatcgaagaattctttgtttaaagaagaattaacatttctatacagtctcttccagaaaataaagaggaaggacaacttcccagttcattttatgaagctagtattatcctgacactaaaaccagataaagacagtacaaaaaaaatcctttacagaccaacatcctcatgaattttgatgcaaaaaatatttaacaaaatgtttacaaatagaattc

SEQ ID NO: 197096 - DNA, 1000 bp, Homo Sapiens
atctgtgttctggatccagcctcctttttctgctgaaatatgtaccccctagttgggatccaattttcaggtgcctgaagtcctccaccctttccttaccatccccaccttgaaagagaagtgttcccttgtcgaagaatttcatttcaggcatcggcaagcagagaaatttgggggagtcactggggagggcctagaccataccaggtcttagctggccacaaacatatacctgacttaggttctcaactgtttttcagcaacttagtggaggtgggattgctgggataagtccccgggggctctcccctaaatggtaggcccctcaagtcatggtaggtcaaggccacttccaggttttgagcatatctccaaaagaagggtttataataaatgtttacattaagcaatcacacatttaaccccccaaataaatatactgggaatgtacagttgacccttgaacaacaaatggggttggggcaccgaccccttcagattgaaactcctggtcaggcatggtggctcacgcctgtaatcccagcacttcgggaggctaaggcaggagggttgcttgggccaggagttcaagaccagcctgggcaacatagtgagacctcatctctattttttaattataaattaaaaaatgaaaagactcctgtgaattcagtgtgtcccgccatgtgatggcatggcagtctgtcatctgagggttgtgggaggaaagtcttccctgccttttgggtagctggagacccatctgcagaggacacccacaatccaaagctgagcaccccctatctggcccagtggccacccctcccatctgtgacaggactcgctggaggggcctagctctggggaccctggctgaggctccagcgtcagttgggcttcatctctggtttctcccagagcccagactggcctgcccagcaccgtctaccaaccagaggcctctctcagccttctcgcttcctaagctccagctgaattc

SEQ ID NO: 197097 - DNA, 1000 bp, Homo Sapiens
ctcctgatgtttctttctagacttctgcttccagttgtaagggaagccctataattgagacagacttaccattctcctgtaaacagaaaacttgacaaaacatatgaaataacagttttcagacaatggactgtgatccttgagagaatggaaacaaatgaggtgagccctgtgatcacctggctttctgctggagatttctggtctgtgatgcagggatggggaacccaaagagagcctggtggtcttgctgagttgaggatacaaagaagagaattcaggaggttgaggcagctagggtttgcacgtagtggaaagatttttacagagaaagtttcagaaacatgcatagagctcccttgagttcccatgaagctaactaaaaaaaaaatccagggaaaggacaattacttgggagaagtaagataaaaagattcttagagttcacacaggttggggaatcatttgaggttctactaaccaggatggagacgcattgctataatatgtgaggcatttatatatttgatgaaagattctagaagggtcatatttcaatggtggggctaacctagctctagagtgaaggttactgtagtcccattttttaagagcttaaaaacaagctttaaaaagattatagttgtcttttaatggcctccaggacaaaatgcaacccctctttaatggaatacaataaaatcaagcactcaatgatgtaaatttgcattacccagcatctaatcaagaatgactagaaatacacagaattagaaatatgttacccataattagatgtggatgctaaagcaactccatcttggatgctaatctgccatgttgacttctgattaaccctgttctgggaaggcctgtaagatttctactttatctactgttatcatacatgttgcccagaggtcaaaacaaccttgataataaattcttctctcaggcagactaacacagcattcttgcctttccctgaggagttgaattc

SEQ ID NO: 197098 - DNA, 1000 bp, Homo Sapiens
ccactcctccaaagatcaatacaactccttttgtttccttacttcttcaaagctgttttgatttcatccacaaaaaaatatgaggcagacagagtgggcggtctggcttttttactgtggggtgttctcggaaacttgtcctcatgatttcttctcatgtcctgctctccctagacagatgcttgctctggcctgcagggcttcctgattttccacagttttggtgggggcactggctccggcttcacttctctgctgatggaacgcctctccctggattatggcaagaaatccaagctggagtttgccatctacccagccccccaggtctctactgcagtggtggagccctacaactccatcctgaccacccacaccacactggaacattcagattgtgctttcatggtggacaacgaagccatctatgacatctgccgcaggaaccttgacattgagcgccctacctataccaacctcaaccgcctcatcagtcagattgtgtcctcaatcactgcttctctccgctttgacggggccctcaatgtggacctcactgagttccagaccaacctggtgccctacccccgcatccacttcccgctggtcacctacgcgcccatcatctctgccgagaaagcctatcacgaacagctctctgtggccgagataaccagctcctgctttgagcccaacagccagatggtgaagtgcgacccgagacatggcaagtacatggcctgctgcatgctctaccggggcgacgtggtgcccaaggatgtgaatgtcgctattgctgccatcaagaccaagaggaccatccagtttgtagactggtgtcccacaggcttcaaggtgagagctgatgacttaggaaggggagagaggactagagaagcagagggagatgaccaaggatatgcaattccatgggcgcttcaggctttatgtgatgataaggggagggggacttcaaccaaatgtaacatgaatggaattc

SEQ ID NO: 197099 - DNA, 1000 bp, Homo Sapiens
actggagccaaacaacttaaatttatttatcttcctatctgcattagtcagggttctccagagaaacagaaccaagagggagagagggagaggaagaggaagagggagagggcgattgagagggagattgagattgagagagagagagactgagattgagattgagagagagagtggtgggggtgggggtagatactgatatttaccttaaggaactggctcatgcaattacagggactgacaaatccacaatcttcagggcatgctggtgaccaagggaagagttgatgttgcagtctttttttttttttttttgagacagagtctcactctgtcgcccaggctagagtgcagttacatgatctcagctcactgcaacctctgcctcctgggttcaagtgattctcatgccgcagcctcccaagtagctgggactacaggcgcctgccaccatgcccaactaatttttgtgtttttaaatagagacaggtttttgccatgttggccaggctggtcttgaactcctgatctcaagcgatccacccatctcagcctcccaaagtgctgggattacaggcgtgagccaccgtgccaggccgatgttgcagtcttgagtctgaagggagactggagacagagttccttcttctttagggacttcaatctttttctcttaaggccttcaactgatgatatatgaggcctacatacattacaaaggataatctgcttcactccttctactgatataaatgttaaacctcatctaaaaaactacctgcacagcgacatctagactggtgcttgaccaagtatctgggtactgtggcctcgccaagctgatacatacaattagccattacaccatcctttcagaaggggtgatgcccacaccgaaggaaaaaacctctagactccacagccatttaatcttctattggagaccataatcgaggcaaggaattcagatgaggctactcttttcttcacaggtgaattc

SEQ ID NO: 197100 - DNA, 1000 bp, Homo Sapiens
tatcttctattgattatatacctttctgctatttatcatatgccatctatttattatatacatgattgtaatatataatgaatgtataaatgggacaaagacttttcttcttttgttcattggtaaattgtaggttttaaaataatgtttgccacatggtaagttttcagcaaatatatgttgaataaatgagttaatctttaaaacaaatgtaactctctcaacgttgtgatgaggtaatcctcatgaattaacgaagcaacctcaatgaagtaacatatatatagcaattagcacaatgtctagaatatggttaagatacgttgactctaattattatgtatatttacaattacatggaggcactaaggctttactaaaaatataaacaaacttattagatttatttgaagaagcagctattttatataaacagagatggtctgtggccttgaagaaacagtccctcagatttcctacagccaaataatccccatacctttggtaatttcaaatttgaaaagtatgtaattcaataaaaaccattcataaaataatcctggcatgtagatgactgataataatgcatatacaagtaaatttaatttcatagactaatttgttaattttcagattatttattgttaatatatgagtacaattgaattttttttaacttttaaatccggggtacaagtgcaggttgttacataggtaaacttgtgttacaggggtttgttgcacagattatctcattacccaggtattaagcttagtactcattagttatttttcctgtttttctccctcctcccaccctccaccctccaaaaggctccagtgtgtcttgttcccctctctgtgtccatgtgttctcatcatttaactcccacttataagtgagaacaggtggtatttaaatttctgttcctgtgttagtttgctaaggataatggcctccagctctatccatgtccctgcaaaggacatgattgaattc

SEQ ID NO: 197101 - DNA, 1000 bp, Homo Sapiens
tcattatctggaactcagttgaaggtttcaggtttccctagagatgttcagaccaacatagttgcactaaagtactaatactaatgtttttggaacttgcgattagctttctatgttgttactcaactgatttgtgaattatacagtataatgaggataaacattttcttaataaacttagaaatctctaggtagactgaaagtactctatgtactacagtgagaagaaaaacatgtccttatttttaagtacttattcaaactctgctaatacagtacattcagtcttggtgtagaaagtacacgtcgtgagactctgtctcaaaaaaaaaaaaaaaaagtacacatctaggaatccactgctgcattaagaccttctcattttcctttttcatcttttaccaacaagtggtttaaagcattagtccaggacacagaattttatgtggttactggcaaaggtacttaagtaaaacttctgtgaaagaaaaggaaggaacatgttcattttcccagttaatgactaatgtaaaagagaaaatggtttcaaatgtgtaaatcacttatacaacagtgttttgagcaatgggaatgaccaacaaaacattgaagtatcatgaaagaacatacaacggtgcttatttttaaggttactgctgtttgtttaatcacctttcaggtctctatcaggagtgattcacagtcatctctcctactgaatcagtgctaaccattctcttcaattaaatctgagaaaaggcagcaaaattcaagttcataaacccatttggaaaatgttgtgatttacaaagtctcatacacataaatgttaagaaaaaaaaaaaaaaggattgtcaatgacagattccaaatggaattttcccactatttctagaagcagatgctttaagaaattcatttttacttagtgaaaattttatacaagaagaaaatattcaatcagtgactctaaaatctgtaaacttcagtagcagaattc

SEQ ID NO: 197102 - DNA, 1000 bp, Homo Sapiens
agaataaagattagagtagaaatcaataagatagaaaacaatagagaaaatcaataaaacaaaaaggttgaatttttgggaagatcaataaaattaataaacctctagtcaaacaaggaaaaaaggaacactcaaattaccaatatcaaggtaagatcagacatcatttcaatattgaatcaaaaaaacgagtgagaatacatcactccaaattttaaggatattaaaggatagtaggcaaacattatgaagactttctgctgataaattctacaacttcagtgaaatgggcaaattccttaaaagacacaaattgccaaatctcaaaatgatgagttaaataacttggacaaaaagtacatgctgtatgtccagtaacatacatttctggaagcacaaactaatgaatagtaacaaaaagtagataagtggttacctggggtcagtgtggaatggggagtgtgagattacaaagtggataaggacatatttgggaataatatatgtgctcattatcctgattgtggtggtgttttcacatgttagacatatgtcaaaatttaaattgtatactttgaatatgtgcagtttgttttatggaattatatctcaaaaaagctcttagaaatacataggagcacctctcagttaataattttaaggcagcttttaaaaaatataatagttgaatttgtctgggtgcagtggctcacgcctgtaatcccagcactttgggaggctgaggcaggcagattgcctgagctcgggagtttgaaattagcctgggcaacatggcaaaaccctgtttctactaaaactacaaaaaaaaaaaaaataagtcgggcttggtggcagccacctttaatcccagccacccgggaggctgaggcaggcgaatcacttgaaccgggaggcagaggttgcagtgagccaagatcatgctactgcactccagcctgggtgacagagtaagactggtctcaaaaaaaaaaaaaaaaaa

SEQ ID NO: 197103 - DNA, 1000 bp, Homo Sapiens
aacacggtacaaggcattgagtgaataaaaccgaaactgtctccatttactatccaatgtgaattcatataacttgcttatatattttataatgtataagtaaatataaatttgccctagaaaaataacttatacactcaatattgttcataatcattttcagtaggagaaaaccaattttttgcttcatgatataaaattcagcatttggcattatatttactgcaactgttaacattaaccttatatagagcaaaagttacagggatttttggcataaccttttatgactaacaattcattcaccaaattacaagtacttctccagactataaagagcagaaatgtatgctataacaagactgttgcatatatttttcaaggactgattaacatttggttattacatttattttttaactctataaagaaattagcagtttaatggcaagattttaaaaaatcaagtcatcaggtttttttaaccagtagaaaatcatttgaggcaaaaggagtttttttattttttttcagcttcatttattctgcttccaaagttggtaatgatttggtcttagtggaaaattcttacttttcacaccagtgattttatatatatcctactcacagaagtgtaccagggatatatatatatatatagatagatagatatttgttgactgaaatttattctgtacccctgcagaatgggcactacatatgggctctttggaataatattcagtagttagtttgttgggacatttgattcgtatctttttttttttttggatacagggtcttgctctgttgcccaggctggagtgcagtggcataatcactgctcactgtgatcttgatctcctgggtttaggtggtcttcctacctcagcctcctgagtagctagcaccacaggtgtgtgttgccatgcctggctaattaaaaaaatttttttgtagagacacgatctcactatgttgccaggctggtctagaattc

SEQ ID NO: 197104 - DNA, 1000 bp, Homo Sapiens
ccaacacttaatagtgtttccaaagataaggctagccctccagagactcattctttatgcccttggtggcagtggggaatcctccataagacccccttctccttgcctccatctggccaccaagtcttgcctgtctaacatctctaggactctatccctgttctccacctcactgatgctgtcgctacaggtgaagtgcaaacaaagtaagtcaggattctaagctagcttaggcctcatcagtgctccttggagctaaagcagtggcctacgaacccgccttgacacctcttgtcattcacttccaatcacaaccccatacagtgtccagaatgattttaataaaacctaactttgatcaagtcccctgctttaatctccatgaagagttcctgcactgccagactacatattcttcaaaatctattacagtaagccatggtaaacagtcttttttatcttccccagatgcattttgtctgccttctcctttaaaagactctggttgccccaacaggggtgggcagacgatccggcctagattagaactctccactcccttgcaacagtgacgggtccaaaggcaggcacatcaccaacctgggccaatcagagcctttcccttaaactgatacctagatgtagagaaaggctctcccccttcgctgggattgtaaaactgaggctgctggtggctgtgccccctcaggcagggcagcctgtctgcagtagagaggtctgatgccaacacacaaagaacagaaggcaaggagccaactggaccgctggcagcatcaactcgcattccagaacttcttccttttgtgcactcctacagcatccttcccagtcatggaaccagtaactacccacttatgcctcagctagctggagtcccaacaggcccatcacgccgttttctgtatctgtgccttttcccacgttgtttcctctgcccagaatgcacactccctggatttttacccagcagccagaattc

SEQ ID NO: 197105 - DNA, 1000 bp, Homo Sapiens
tgggcagggctggcagagagccacctattgttagtttggtaaataaactgctctccccaaaaaaggctctgggtgtacttcatattgttgttaaatcaccagggagaggaaagagtaaaacaaaacacattctcagatgaacaaagaacgtagttaagacaaactctgcctaacactggtgcttaatgattctcagcttggattgcacttcttcagagaaggtggaagagatgacatacttctctgttctctcattgctgtaaaactcatgtccaatactgttggtacacactcccattttaatttctgtttgttactaatgaaaaagatcctaatttaattgtttctcactgtccaagttaaggttgagaatggaaaaaaaaaatcccaggtcaaatagccttctgatgaggttgttttgtttttgttttgttttgttttgttttgtttttgagatggagtctctctctgtcacccaggttggagtgcagtggcgtgatctcggctcactgcaacctctgcctcccaggttcaagcgattctcttgcctcagcctcccaagtagctgggattacaggtgcccaccaccctacccagctaatttttgtatttttagtagagacagggttttaccatgttgcccaggctggtctcgaactcctaacctcaggtgatccacccatcttggcctcccaaagtgctgggattacaggcgtgaaccaccgcgcccagcctctaatgaagttgttaaggtaagaatttattagcaaagtgaactttaaatcatgtgtaaactttaataatagttcattccactgtgtgtttccttgcttcctggttgtcaaatattaattcatacccaggatatattattttaaaaatacgatatagcccctaaagcttgctgcaaatatctatccacctcctatttcttacagttccttgattcaatgtcctcttagtttcttgatctgactgttcagtttcgtattctgaattc

SEQ ID NO: 197106 - DNA, 1000 bp, Homo Sapiens
aaaaatggaatgtagtgacattttcctgtaatcctagcactttgagtggccaaggtgggcagatggcttgaattcaggcgttcaagaccagcctggataacatggcaaaaccccatctctacaaaaaaaagacaaaaattagctgggcataatatcccgtacctacagtcttagctactcaggaagctgaggtgggcagacagcttgagccccaggaggtcaaggctgcagtgaaccaggagcatgccactgcactccagcctgggtgacagagtgagaccctgtctcataaatacgtaaacaaacaaagctggacacagtggtgtgtgtctctagttccaactattcaggaggctgaggtgagaggactgtttgagctcaagagttctaggccagcctgggcaacacagcaagaccccatctttaaaatttttaaatgctaaatggttattttaatatatttaaatatatacagataatatataacacctggatttacttcaagctaatccagtgggtgggagagagacaatggataaggtaaggtgaaaaaaaaaactacccatgagttggtaaatgttgactgggtgatgggtacataagtgttcactgcccataaactttcccatttctgcacatgactctagatatctaaaactttctacaatgaccagagaaccaaaaaccaagaccacataccacatagccagaaacaagggtgaaaataagagaacaataaaacagaagattaagatattagttacaataggtaatacattcaagatattagataagctgaagaattccagcaaagttatgaagaatattaaaaaaagaatcagggagactgactaaagacacctagcattcatcctacacacaagaaaggacaaaggttaacaaataaacagctaagatctgacaggtgtgtcagagagaccatctgagtgcagttggggaatggagacacacctgttggtgacaaagtccaggaaggcag

SEQ ID NO: 197107 - DNA, 1000 bp, Homo Sapiens
caaaacactgtctcaaaaaagaaaaaagaaaactccatcgtttcagtcccaaaactccttaagttggtaagcaaaataggcattattatacccagtttgaaaatggatgaaaatgcctcaggttaagtaacttgcctgagatcacacagcaagtaagagctggagctaggactacagtgagttttaattcaccccaaagcctatgttcttttcatgacaacgttcatatggagggtgacaaaagagggggaatgctggaaaattattgaattaattttatttattgtttttgtgcaatgtagtctgaacactggctataacttatccatattatatacatagcttaagattaaacttatgtaaagaaagcaaaaggccaaaattcttcagaaaatttgatggcaatttaggagactatctttagcttcctctacccaaggaaacgagattttgactctccggggacgtgctcatagacacgtcaaagacaggctttatcttcacctgtctgcctaaacacacaaaacatagggagctggttaaaggttccagcatgttgttctttggttcaagggaacccactcgactttttcttgttatgctttttcttgtccaataaatcaccaaagggggtgtaaaactgtccacttcagaacagtgtggcagcttcttaaaatgctgaatatacacctccttcgtgaccaagcagtttcacttttaggtattaaaataaaaatatatattcataacaagagttgtacaagaatattgatagcaaagctatttataatagcaaataactggacaaatcccaaatgttaacagaaggattcataaacatgatagagtcacataatgattagccattttaaaaaaagaattattgattcaatcaatcaatcaccggtcctagagagtccccctccaaaatagacctgcttccctccttatcaccacccttgtctaagcttctgtaatcatcctatgttctgaggaattc

SEQ ID NO: 197108 - DNA, 1000 bp, Homo Sapiens
agcagcacctgaactccagtgatatccaccacattaatgaaatcaaaaggcagaaccagtcccttgtgtatggcaaagtggatagcttctggaaggtgagtcagtctgtgcgtgtctctctctctgaaaagaagcttgttgggtaatttaatttaactttgatccagggaataatcaagccaagtgcccagggcttaatgggatctacttagacataaacaagaatgtgcaaagattcagttgctcagcatttgggtttctaaccaaggctgtatgtacctgctcttctgatagtggctgtacaacagccaccttcactctctgcatgtcagaagggacacattctagctgctttttcacaccttgtacttgcttctgagagccagggccctccaggggttgaatatctttctggagcaagatactgcacagggagaaactttaccaagggagtctttccctctgcttctgggaggtagtctgtggaggtaggcagttccctttcctgggaaatgcagtgggcttcacatcctcttggctatagtcactactcacctgacgtagaaagtaaattcttgctggggctgactgtaggcactttgttcagggaggtcttggctgaaacagcactcttggccacagaccaaaccaagtcctccaaaagcattgggccccttggccctcctgagttgatttcctgagtacatttggggaaagtataacaggagaggaaccagattggatgtgacctgttgacaggtaatgcagatctttttatgtgggaagtctgcctcattggccaaatgtcataatttttttttgaggaaatgtttttagaagatagaagtcttcaggatctcacaacatgcctcttcctaaatgtaagaattcattgctttcttgaatgatcacagactgtggtctcatgtttcttgctagccaaggaagttaggaatcctacagctgagggagtacaggtgatgtacaggataaagaattc

SEQ ID NO: 197109 - DNA, 1000 bp, Homo Sapiens
attgatggagtttaattgtgtcccttttattcaaacaaacatttctcccctatcaagtatatttttaaattctgacaagaaaacatggaaaatatagaaaagattaaataaggaaacaaataaaactataattaaataatccacagatagggactgttaatatttatggttttttctttcacatatttttccattatatattataaatgtatacatatgcatatcatattattctacatgggtgtatatattatacacacgtgtattatataattagtttatgtagttctgaatcccacttttctcttcacaagattcttatatattcccagccattaaaattcttggaaaacatcactctaatgggtataattgcccatcataaagatatatcataatttatttaactgcttcccaattgttggacattattctgtcttcaattttttattattataagtggcaatgtcatgaacatctgtgtacatctttgttcagatccttgaatctgtcctcaggaagatggaattgctgggttaaagagcaccagcatttaaagttttatccataaaaggaactacaatccaaacatctcgggaagaatatctaaaggaagacaatgtttatctctactcctgatgtttaagccaggaacaggtctgcttttgttttactggtactaggtcgggaaagaaatgctcagtgaaacagaagtccaggcattcagttctggacgccagggaaccctagcccagggcccctctctaccgaattgctcagaccctccgtgaccactcttgaggtgtgttctcctggctggagagaggagatgcaggctggagaagacatggcggagtccagggaccattcttgtcctggctcccggaacacgctcctcttaggggtttcatttccctctaggctgggaatgctgccagggggctgaggaactgatgttcccaaggctggtacatttgattttcactcttggctagaattc

SEQ ID NO: 197110 - DNA, 1000 bp, Homo Sapiens
tcctaatttgattaggtacaataataacaaaaagactagaaatatatatgctgaaatgccaattccagccatttctgattagtgtaattacaattattttcttatgatttttccaattttctgtaatgtgactatttactacttttataatcagaaaactgctagtacaaagttacataatgacatagaatggaatttttctaaaaacttcaagcccctttaccaaagaatagtttttgtctcaaatcctagcttagtgatgttgctaggtgacccacagttggatgtaaaacaatcaagagaaagataaatgccagatactttaagacagggatgtctggtgttacctgtcagcaaactgtcatagaatctaaagattagaaggaaacaattatgaatttctattcagaataccactggcacgttgccttaatttcttttacattgtcttaagataggagaggataaaagtaagaagaacaaggtaagaacttaaagccaattagaaagggaaagaaaatagcccgttcctctcactggcaaggagacaaagccaaacttggacatatccgtggccatgtcaggggagccctcaaaggtggcatgaagccactgaagagcactttggatgatgacctttccccaggcttcaaagcttgtggcactgggcacatgtgggaagggcctctggatctaagtctgaagacccagggaaagttctacttaagaggaggcaggggcgcagaaaggttagattacaaggtggttaagatcagcttcatccatctctgaaaggacatgaattcattcttttttatggctgcatagtattctatggtgtatatgtgccacattttctttatccagtttatcattgatgggcatttgggttggttccaagtctttactattgtaaatagtgctgtagtaaacatacatgtgcatgtgtctttatagtagcatgatttataatcctttgggtatatatccagtaatgaga

SEQ ID NO: 197111 - DNA, 1000 bp, Homo Sapiens
actgcagctgaaataggggagtttgccgatcagcaggtatgcggtatatcaactcatgtcatttcaacccctaataaataaatctgttgctaaggcaacaggaagatcagctatatcagtattcttccctccctgtaaccagctccccaccgcctcttttggaggaaactgcctttcacaccaagcttaagaaaaaagaaggaaattaactacatgtaaccataattagaagtaacatcaattctcatctcagaaacatatctaaattaataaaaaaggacagcaaaaagagaaatgcttttgactaagatcacaataaattatttccttcaacaggacacagggactatgagtatacatctgagtaagaacaaaccttaaacattttgtttctctgtttctgaattttcccttcttttgtttaaccaacaaatgatgctaggccaaataatgctgaaatagctaatgagttgcatagccaataaagacgacagaaggggggggaaagcttacataatttgtagtagttactgctgtgctaccttggaattttttggtatgactgaccgagtaaaaaaaaaaaaaataaatgaaaaccttcctgggtaatctagaaaagctattggatctcattcacttaggatttcacataagagtttaaaaagtgatttcaatggattgtttcaaaacgacttaacacctggattatggtggaggggtaggttaaaaaataatctacagggatcttcacttctggatttatttttccataataacttagaaattactttggttttaaccagtttgagcttttcttcctaaccattaccactcttctgttaaaatgcattattctattttaacaaaatcttgaaggctttgtatttacaacgcctataaatgcatttcataaaagaaaacaaaccaagaaaccataggctttgtaaaagcaatgctgatcacatgaccgtgtctatctgtcattcgataaactgaattc

SEQ ID NO: 197112 - DNA, 1000 bp, Homo Sapiens
agcataggatgtatttagagaacattaagatgcattccctgtctccaacttgattataaattccagaaaggaaggaattgtatatgatgatccttggtgtttcctcggagtgcctaggacagggtcatgaatgtggaaggggcttgcaaaatactgtttttgggtgaacttctcaagtcaggacatttccccagggcaaagaggcaggtgtgttgaaaggaaactgacttgctagtaagtacacactatgccagtttcccatgtattgcctctctgcagcacatcctcacttaatttccctgcttgtgataactgaagctgaacctattaacatgtcccttgttagctagcacagtattaagctttgtcagtagatagcactggagagacgtcactggaggaaggggcttctcttcctggttcttgagtgccttccttttttcctactctggcaaagctctaatgcttggcccacatgtagaacacttagtgactgtcacccccagaaaacttcagtagcaccttggggaagctccccaaaaagtttcccagctaaggttctcttcagtaacttcctggcaggttcaatggcaggaagcttaccaatgagttttgttcacatccagcacttaccagggttgacctgtttgaccttgacctcagcaaacttttatgccattcagtgcttcagccataccatctccaaagaggggcacctcttctaagtttattctagtctagatatattagagttctcttttaccctctaagtagtaaccagtcccctgttcctagttaataattctttatattctaccttccctgttggaattattgtgtggtttctgtctcctgactaggccctgactgatacaacactcatacacgtgcattcacccacttgcctgtatactcccttctccctcctcagtctgatttctccaatgaatccttggagcaccctgagtcaagtctttctcttggatagtacttatgtcag

SEQ ID NO: 197113 - DNA, 1000 bp, Homo Sapiens
ccgaagaaacaatagaacaggagaagcaggcagacaaatcttacggaggcatgcgccgccaatatgcactgtacattcaacgagaattgccttcttattttacttattttagctgttaattttgtaagatgcaaagaggttggatcaacttttaaaggactttgctgcccttttcacatcaaacaatagaaaactgctgacgatgaaggccacacctacctctcccatctgcttgtctggctgtcaaggaaggaaaataacttgcatgttggtgaaggaagaagaagagtaggaagacaggtaaatctagagtaaaaccaagctgccccaaggtgtcctgcaggttctcaaatgcagtttaaatgaagtttaattagagtgccatttttcttgttcaaatgattttaattattagaatgcacaaactttattttaaaataaacagttttaggctggacgtggtggttcatgcctgtaatcctaacactttgggaggctgaaacgggtggatcacttgaggtcaggagtttgagaccagcctggccatcatggtgaaaccccgcctccactaaaaatacaaaaattagctgggtgtggtggctcgcacctgtaatcccagctactcaggaggctgaggcaggagaatcactgttcacattaaattattgtattttcatcattgctatagcagttaatcttattaaataaaacatagcaatttaaatgcactaaagtcttaagacttttccagttaaagtttgttgagcatgtagaaattacttagtatcttagagttctaggtgcaaaatatactttttaatatcattattttgggaggttagtctttctactccctactctcctctctaccagcctcatccagagaaataactctctcaaggtactgataagagatgccacagtcaggctagtcaatggagtgaaagatgtcactgccagatcccctgtatagtggcacagactcctggaattgaaacgg

SEQ ID NO: 197114 - DNA, 1000 bp, Homo Sapiens
atgactccactgcgtaaccaagattgagaactgttactttagagcaaaattttaaagggtaagactagtttagacatcatcacaaatagttcccttactaaagtagatgaaaggacctcattaacatgtggttggaccaatcaggcatgtcctagtatagtattatagtgaggttcaaatgaacttttaatattctctaaagccagtacttaaaacatgagaaactgctattctcattcccatattggaagtttgttttccttgtttttttctaataagttctttctttttccaagcaagtggtgataaatatttactggtagctttagttagtaaagttctttcaaataacaccttgggtgtttgagcattggtgatttgttttccttgaagatgtcttatgtatctttattacttgaataaatatcatcatgtagttatttacctgaattgataatgctgtgcaaaggagctaaagtatcctctctaaaaatatttttttttcataattttggcctttcattcctttaaccatttcctctcaccaaaaattaaatcttaaaatttatggacagttactctaaacagataaatattctccagggatgattaatgtatgatttttttattttattatagatgcctatattgatggcacagttctcagggaacactctccacccacccaaaaaaaaaaatagcacctcaaagcttttgagagtcagggtagatagaacaatttttaatgatgtattatatagtaaaaactagtccatttataaaaacctgcctagcaaataataaaactgtcttctttcacatctcaacgtctcagtgagagttcaggctgtcgaactatggaaagcatccagcttctttgaagaaatagagtgaggtattactcacagagagccatctggtatcttggtcattaacccacttttgctacccatgcccacatgcttgtcaggagatgctggagaatgaaggaagggaacag

SEQ ID NO: 197115 - DNA, 1000 bp, Homo Sapiens
gctcttggccagggctcagcatggaagagacaaaataataataatagagactgattgcagagggatatgtcagtgagtatgacatccatgaggaatatgcttgggggagatgaactgcaaaaactgaatattgaaactagcagttgccagaattattttccccaagccctgcatgttcctgtttagttttataataaatatcaattacccagtaggagaaaagagagtcgacatccatcaccagacatctggctttgaaaacagctttgaacacaacctgtgaaactaaatctgtgctgccttcattctccagtggtctcaggaagtcttgcatccagaaaaaggaatcactttgctatttcattttatttttgcatttatattattgcatcacaatttttggctgcatagcttacttgactttattcttttatggtcaatggccttctgaaatgtgaaatgtacttaaaattagcaaagacaatgtatcatcttttctcttagatttcatttggtcttagagaagcaagactacattgtacaaagtacaatgcaatgcagccgagagacctgggctctactccccgttctatgtctacaagattgctcatttttgaccgtaggtaatttgtaacgtccatctcagtcttggattggttgtcttttaagtgatagggtagaattagattatctccaagggccctgggaattctaacactctgatacggaatttaggttgatgcctgagatacaggctcatggacctcatcttcaagttttcattcctgtaatgatatgtggatcactagaagaaaaagctttgggaagatttcttggaaatttccccatacagacttcagaggagagagttaacagagaactttgtaacatttctgtgtagtattcctgagtactttctcagttctctgggcaataaacaaaggttttgagaatattttccaaaacagtagggagcccttcctctcctctacctctggag

SEQ ID NO: 197116 - DNA, 1000 bp, Homo Sapiens
gaagagtgccactaggcatcccctgggaaatgggccccctcaggaaccaaatggcccaagttgggagggcacctctgggaatgtcacatttacatcttcggctactacctggatggaaggcacagggattcttagtagtctggtttactcagataatggtagtgtaatgtctttgtacaatatctgttactatgctctgttggcctccctctcagtcatgtctccaaatgagccctctgacgatgaggaggagtaggaaggctcctcagattacaagtgtagactctgtgaacagttcagaaacactgcaaattcgtgaagtcacaggccactaatggcccataaaagttgccattttttaatgagaaacacatttttggtcttaataaagaaaaacaaaattccatggaaataaataataaacaatttaaatgagaactgttgtctgtgttttttttaaccttgtatattatatacatctcattggcagaaaccaggggaggctggaaatcctgtccaagacaggctttggtccccattgtccttgtttatttggagaagcagcattttcacacactcagcaaaggatgttgctaggaagtgtcgaggccaagcccaggaagacctggtcccctgagattggcctgctggtcaggagaaagaatagacgcctgattccggcaatatcttcctgtatcttcaaacaggagattgtttcctcatgggtccctcccaatgttgccaggaagtgtctggtcagcagctcagcatccctagcctagcatccaggggcctccaaagaggcccacttgaaagtcaggccaccccatctgccatgggatgtacaaccaccataacatcctggctcagaagagaagggccactgcagtcaatacctggggggaaatgcccatcatcctcatggataacaactagaaactttgctaaatcaccaaaaaaaaaaaaaaattactacaaaataaaacaacactactgatcc

SEQ ID NO: 197117 - DNA, 1000 bp, Homo Sapiens
aactccctgttggcttaccatctcattctgaataacccaaatttttgacaaacatctggtcccagatagatttcatgttctcatttcctgatactcatcctttctaatactcaaatactcactccaccacagaaacactgtcttcatgtttttcctcaaatacataaggtatttctccaccttaggagtaaaagcatgaagacagtcgggggactgaaaagtactacaggtaaaaattacagaaagtgtagaagttttaaagcattaagaagggacactttctttgatcttaagtattaagaaacgaaaagctttctgtgatcaggtggaggttgtatgacaaattaaaaaccttataaactccaaattaaaagctgcttttcccgatgggacaattgctgaatcccttggactcacttgttacatgagttaaaaacccatttttgaaacaaaaactaaaatggaaataacacaaaagtgaataatcataacaaacaatgccttaagagatatagaagaggcaactgtgtgtgggtacaaagcatattagcatttattaaatgccatattctaattctgtcattccctatgtcttgagtaaggaagagaggagacacaggtgtaatgtagaaaagactcagcataacacctgaatatattgtatctctgcccattgaaaaggcctagaaaaaaaaatgaccgatctgtgagcatccttagtgtcaggcttttcccatgaaatataatttcccaataaaggaaatgaggacttcttggaaaagcggtggagtttagggcacaaaatgtacaagatgagtgtggaacatcttaacatgccagataaaaagatagttatcaaaaattatcagggtcatgtcaaaagattttaggagccaatttgaaaggactctattggtcaaaggtgagacaatttaagcttcaataaggatcatatttagaatggattgatactcatcaaatatatttcaattcatgaatt

SEQ ID NO: 197118 - DNA, 1000 bp, Homo Sapiens
ttctgagtaaactgttgtcaagctgaaattagaatattggcttctgtttcatagtctttcttccactctacctgcagtgactggtgcctttctttctagactaaagagccttcgctaatattagatcttattaaatcctgaggggaagttattgtttggatttgactgtcattcatttccatctacttctagagtgtgttcctgcagtatatgtgtgtatgcttgtgttggttcttttttcttatattcacttgagatccagaaccatcactgggtgagagcatttgataaagtcctgtccttgcatggctacccagagtctttgactggtaacagaggagcgtggcttccctcttgagatgctgacctcacatgtatttactaaatatctactggtgcatgactatacagaacaaaagtacctgctcttttaaaaatctgctgtatgaaactaattattttgctatgagcaaattataattaagtcaatatggaatcagtcttaagtggtatttggtctcctctcccttccccgtccttcattttacacatgagaacacagggccaggtgtggtggcccatgcctgtaatcccagcactttgggaagccgaagcagatggattacctgaggtcaggagttcgagaccagactggccaacatggtgaaaccccgtctctactaaaaatacaaaaataattagccaggcatgatgatgagtgcctgtaatctcagctacttgggaggctgaggcagaagaattgcttgaacctgggaggtggaggttgcagtgagccaagattgcgccactgcactccagcctgggagacaagagtgaagctctgtctccaaaaaaaaaaagcagcagctataggacctcagaaagcagaaaggctcagaagcagaggcaacatatacctatgaaagtcaggagtatgggtggtgttgaaaaggaaacgctggctcaaagtctgaataagaagcagtgaaactcctagata

SEQ ID NO: 197119 - DNA, 1000 bp, Homo Sapiens
ctttaaaaattaagattaaaagcctctacctactatatttgctactatgaggacaagttgatttagcattgtacaaagcattgatatccatgggaaataatctctatttaattcatgtatattattgaatcaattaaaaatttttgaacacaaaaatgtcatgagttccatatgaagagttaacttctagcatagccaaaattaactagtttgtgccacaagcctgtagttgtttaaactggcttacaaaatcaaactgcaaatcactaattaacctcctgttccagaaatctattctgtgcagcctagcatttggttggattatggtgaaccactcaattcacaattttatcttgtcatcctgctgtgtctgccttttaatgaaggcatcttcggctaaatactggaggaactgcagattgtgctgttgtaaccaacttgtctaaatatacctttggggctaaaatctaaaagccgttcaacctggtcatgtgcaatctgatgctgtgatattttagaaaagcaaatccacatttcttggcctaaggttttattgtttgtttgtattcctttcatttccaaagtaataatttggactctatgacttcaatggctgagaccacctcaaagattctgggctccctgtacaaaatgtggcactgataaagcttagtggttatatcctagagtcaaacagaatggctcccaatcctggctatgtgacttcaggcaaattaattccactaagtttctgttttttcattagctgcagaaatatttaaaagtgataattcacttagtgttctgtgttaagtttcctattgctgttataaatgaccacaaacctgatgacctaaaacaacatcaatttgttctcttacagttctggaggtcagaagttcagtataggtctcactgtgctaaaatcaacattcagaagggttgcattccttctgaatctggaatcattttgtactcattcaggttgttggtggaattc

SEQ ID NO: 197120 - DNA, 1000 bp, Homo Sapiens
tatttaactatatagaagcctggaaagatatgttaaaaaaagaatgagcatacttcgattacttttatgttccacacacatatgatctatgctcaaacagggtctaaatgagatactagatgttaaacagtgcttctctctaacgagtggtatttgggaactgacatacaatcacctatggcttctgtgagactgctgggcccaagcactgtatgcattttagatcttaatacagactgccaatccacgttctcaaagttcacagcaattcacacttctacctctacacactttccgacactgtatattatcattatttaaaaattttggggccgggcgtggtggctcacgcctgtaatcccagcactttgggaggctgaggcaggcagatcacgaggtcaggagatcgagaccacggtgaaaccccgtctctactaaaaacacaaaaagttagccgagcgcggtggcaggcgcctgtagtcccagctacttgggaggctgaggcaggagaagggcatgaacccgagaggcggagcttgcagtgagccgagattgcccagtgcactccagcctgggcgacagagcgagactccatctcaaaaaaaaaaaaaaattttgtcactgtatattatcatatttaaaatttttgtaaattaatgggaaaaaaagtaaacttccttaatttacattcactgactactcagattgaacatctcttcccatttactgatttacttgcaaatcctctctgactagttggtctttgtccttttttcctattgcattatgttgttttcaataaactcatcgtacctatattttaggaataataattgtttgtaagtcatccacatcgcactatttcttccaaactgttctttttcatttctaaaaccaaataagtcagtcctcccttttgattctaagttttgtatcttgcttagggaaatttcctcccagtgacatttaataaatattctcaggaattttctactgagta

SEQ ID NO: 197121 - DNA, 1000 bp, Homo Sapiens
tgagatggagtttcattcttgttgcccaggctagagtgcaatggcgcggtcttggttcactgcaacctctgcctgcgggttcaagcatttctcccgcctcagcctcccgagtagctggaattacaggcactcacccccacgcctggctaatttttttgaaattttagtagagacggggtttaccatgttggccaggctggtctggaactcctagcttaggtgatccgcctatttcggcctcccaaaatgctgggattactagtgtgagccaccatacctggccagtaatgtcatttcttagattccacagaacctgtgtttagaacctgttcaatcaaaacacaggttccatacagtgataggaaacaaaacataacaaactatatttgcacagagcttgtttgtagttcttagggctggatatttttatttttttatatctgcctaaaaaattctgaaatgttatttttggattctacaaaacatgactttggatcctttgtaatgaaaattacaaaaagtgtgtttggaacctattgaatcaaaacacagtttccactgagtgatataaaacagcacatccaaaagctctttcacagatagcttctttttactctgtagggcttgatattggtatgttcctgtaagtgctgaatgggctcagaaatgtctctctttcgatttcacaaaaagtgtgtttggaaactgttgaatcaaaacactggttccactcagtgatagaaaatggcacatcactaagcatattcgcacagagcctatttgtagtacttaggactggatatttgtattttcttgaataggcctaaaaacttctaaaatatcattttttggattatacaaaacttaagcttggatcttttataatgaaaacacattttattcagtgatataaaacagcaaattaggtggcacacagtggctcacgcctgtaatcccagtactttgggaggctgaggcaggtaggcagatcacttgaatt

SEQ ID NO: 197122 - DNA, 1000 bp, Homo Sapiens
ctggtcttgaactcctgacctcaggtgatccacctgcctcagcctcccaaagtgctgggattatagctgtgagccaccacgcccagcctgattcctcacttctttttgacatgtggctgccaggtccacttaaccaacaaattaaatgcctctttatctcaaaataaaagcatctccacaattactattctaatactcttctgtttttaacaggtatttagcacacttcttgaaagcataacaaatagatccattaaatatattaggaatgttttaggttagtagagggtatgattgaataacatgattaaaaaaaaaaacaccagaacttttatttttttagtacacacgaataaggcctccatcaaagtaatgctcttagaaaagtatttacttattccgacaatgattcctctgcccagcatatttttggaattcttttaatgatattttctgcagcatttatccaataaacactgacgtaactgatttgccttttggtctacaatacaatcttataaatatgctctgtgttaaaacagaatatccctcttttctttcccctccctctttccatattcagcagaaacaaagaaaatctcagaggtctcttcttatgtctctgctaacaataaaaagaacagcttttggggaagtgggctgctttatcctgtagccctcctcagatgccaagactgctgggctggccaccagactcacgtcctcagtaaggaatttacctcctacttttcttcgggggcaggtagggaagcacagcaccagccctcagctgtcttgggctccctgatctggttaaggagagtgtatttactcagggccatggtggtgcatggaggaagccaaccctgtcagcgctggctggtcatcagaatggaagtgggaggacatccttcatttccaggtcatgcctggttaacatttcaccttaactgaggggccaaagagaggctacgcagcctggatcagagctccgacagcc

SEQ ID NO: 197123 - DNA, 1000 bp, Homo Sapiens
tctcttggtttgtccctttatatcatatttctgttaagccatctatctttactggtatcacaccaaactcgtagcctctactaattgctggctattggtattttgttttctacaatgacctagggcataaattaatccagggtcttatataattaaattttatcctctttgcaggggtggtcttgaggcaagtctttaaagtttattctaactccaagaggattcttcttagatatcttgtctctagttcactctggtagactaagtggcctagtgtgttagcttattgccctcatttagataccaaccttcttttaattgcttactaccaaaacctccactgttactgagaatgccttaagttttagcttccccacactatattcaaaataaagccaagtcacgtgggggaagcttcagaggtctctgtttttatggccagcctctgtctctaagaaaacctctgaatcagcgctctggaactgggaatggaaagagttatttctctaaaggtgctgctgctgttttatgagcaggacatgcaccagatgggagagattccctctggtcttgtctagcctcactggcataaaacctctaccccagcagtgtgctgatgcaagagcaattagggccccagtgctctcaacgtgcttgtcctgggatggagcttctgctttagcagtgagggtgaatggggcaagagagctccagacattcttgctaaaatccaatttctgccacatggaccttagtgaaatgagaaattctggtcccgcctgaactagggagatgtcatagactgaaaattgggaaaaatagatgtcctgtttttttcactgtatccacccagagtagaactttcattattctgagctgcggttttgggtagcaagtgggcctttgttcaagcatcacagatttgctcttactgagatttagtagattatcttgaatgttttcttcatttgctgtgtgccattaggacacagggcttcta

SEQ ID NO: 197124 - DNA, 1000 bp, Homo Sapiens
attttaatacaaaatgtataaaatcaatttccaaaaattttctgcatatactgaaaatgtctgtacgaatgagctaactactataggccttccctaatttattctattaaatgtgggtactcaatgtaacctgaaaatattgagcttaactcttctttttttttttcaaaagggaaacttgaaaaagactgcttcccccagaaaatttatcaacaataggtgctcaattaaatgtttttaaacaatgaacaatatcccctttcatataaataatcaggggagagatatttttaagtcttttttttctttttccatagtgtcacctacacaaaaaattatgtaaagacaccacttctatgaggaggtattcattgtagatgtacagaagtcaacggaaacttaagtttacagaaaaaataaaccagattatcattcccccaactgtatattcccacagatgcttaataaaagctatctgatgatataatgaattatcagttcttgaggaagtatatacagttggtgactatttttcaaaaatcatcatccaacaaatttttttcatttaaaatctttcatattaccctttcgacaatcagttgaaattttaaaactaagaacatttaaaaatataaatgaaagtagcattagctatagactgatattcaacttcagacgttaaaataaatacaagtgtgtattaagagtaaaattatgtcaacaatgtataaatgaaaactgccaatgtaattaatgtttcttttaacatatcccatccattgctttccctccaaaagacaaaggtagcaaaagacgaagcaggaagaactgcttcagaaactgaacatactgatttaattggctaagaagtccaaatgctaatactcctaataattagccattccttttgtgttttggtgacatatatcctcatacaatgtatatcaaatggaattttttgatttacacctgacatttcaaagtttccatttttgaattc

SEQ ID NO: 197125 - DNA, 1000 bp, Homo Sapiens
gttttctgggtttttgtgcagatatgttaacaaggaatgttgtgcttgcagtggagaacatctgttttagacagcaattatttactgagcatctaatgtgtgccggcataccagtccagcaccaggtatttgggtagaagaggaggcctggagaaagagtcattgtccctgattttcattttagtgggggaggcaagcactatgatactatgctagaatacaggccctgccgaagtgctccagaaccagcctcagagcaatgaggaaggatttgagggcttgcatgtgagttggctctcgcaagagcagaactggacaggaggactgaattctgagtcctggcgacaaaattcaggaagcaaatgagaatccagaagtccagcacataagagccagtggaagggaagaatccagccgaggcagaggtctgtggggagggccgtgcgtgagcgggtggatccagcaaggcccacagatcagcaaggaagccagagagtgggacgtttttggtaaaacccgctgctggtgatggcctggaaagatgttttctgagaaagcttgggcagcttgaatgctgggagagggtgtggtggtccctggggcaggagacccttctttctgactctgtaaccacagccccggtctgcttcatcactccgtgggcagtgatggtctgtgcccaaaacgctgtgattcgaaaagagataatttgcaggcaacatgaagaagtcccaaaaaagacagtattagaagaaaatgtccttcaagagttttaatgtaggtggagagaaggcaggatggaattcaaaatcatgttttgaaaggacatggtgtcctttcaaagctccaagcgttgctttgctgtgctctgggcatgccttgggctggatgggaagaaaagtgaaaataaagtgtgtgtgcatacatgcatgtgcacgtgtgtgtgtgtgtgtgtgtgtgtggtgttttctaaaatatcagaggacaggatgtctgacaa

SEQ ID NO: 197126 - DNA, 1000 bp, Homo Sapiens
taaggctgaaagaaaatagctcacaacataggaaaacattgtatattgggtaaatgtagttaaatattggttgtacaaaacaataatgatgatggcttacagaaactaaaatatatttagaattaaaattcatgattactataagagcataaaggcatgagggggtaaataaagttaaagtgttctaaggttataacattgactgagaaatggtaaaaatattcatttgtatttggatgtaattgcccaaggtttaaaaaactaatgagttaatgcaaagtgaatatcaagtgataaaaatactttattaatacaaaaagaggcaggaagagagagaaaaagaaatgtaaaacagattatatgaacaggaaaataagacatatgtctgtgtttcacatgtattctcttggatccttttggcagtaggtagttatattgagatcaaagcagggaaataccaagtgacaaaaatattgcaacacttttgatgatttgtacatttgaaatagcaataatgaagttcatttccatatgaaccctaggttcttttgttatagagataaaaatataacagaatttatctattctaggtggtggcttacgcttgtaatcccagcactttgggaagccaaggcaggtggattacctgagatcaggagttcaagaccagcctggccaacatggcaaaacctcatctctactaaaaatataaaaattaaccaggcatggtggcatgcgcctgtagtcccagctacttgggaggctgaggcaggagcatcacttgaacccaggaggcggaggttacagtgagccaagatcgcatcactgcactctagcctgggtaacatagtgagactccatctcaaaaaaaaaaaaaagaaaaaaagaaatatatatatatatatatatataataaaataagacatagttatataggagataaataaaataagtcaaaatactgagaagacatcagcaaaaacagaagagtaatgaattc

SEQ ID NO: 197127 - DNA, 1000 bp, Homo Sapiens
cctggcaaaaacagtggtgaaggcaaaccaaagctttcaagagagcgtgttcttgaagagagcatgttcttgccggctgaactaatgaagtgcagaccccctgctgaagtctcaagtagattgccagttcacacaaatgagctgaaaaataccattcagttttaattgtgacatttctttcgcgaggcagttcctttcactgggtttttgcttttttcttgtttttgtttttgattttttacaaaaattcttgacgaataaaaaatgaaaccagcaggaatgttctttaaagagcccaagaaatggttttgagaatgcactgacacttgaaacatgggagaaatcattattttaaaatgcccaatccgcttccctcagttttgaacaaaatcaacgacaaagcaaaaccagttttcaagtgttatagtaattcgcaaaataaattgcaaagaatggcagagtaccatcagggttcttcaagggctctacaaacaatcaatttgaatttaagtttctacatagattttaaactttttaaagatggtaatctttaaatagttaaatgtcacatatttaaaatataaactcatcagaggacttcaatcaatgtatttgcttggactgatgggttcatatttttccaagtaggagtaagttataatgcttctcctgaccattcaatatcctgagactccaaggcaagtggtgaaatgaccctaacacttataagtacttgtctgtcttgaatgaggattttctttatgccatattgctaaaggaaaacatataaattaattgtaagctaaaactgcaagaagtctttcactgccatttatgagcctggatttatatttttgtatgaaagaaaaaggaattgtgttttcattaattggctttctaagcaaaatgccataaatttgaaccaataaaatgaatttattctaataagatgtctccttgttttaaatctctgataagatgttgttttaaaaaagaattc

SEQ ID NO: 197128 - DNA, 1000 bp, Homo Sapiens
atacctaaaaatgtttatactcccataccataaaaatgtggctttaaagacattttcctatcaattttccagttatcacctaacctgagattaatatttctttgcagtatttttcagtgggttgaaatgaccaaaatgcagtttgaaagaacacgcttcacattagaggcttctaaggcacaggccactgtgcaggctcaatgatggatgtcatacaggactgctgcacatgcatgcatgctttctctgcccactgttcctgggcatcgctgctacgttatttaaaattaccctgcaaacactcccaccacgcccaccaacccatgcctgaatatgcaataaatgccaggagacacggcactctctctgactcagaccaatgggaacctgatgacaagggaggtaaatggccagcgtcatggggcagccttcccaacatgccacttctcaagtccggcggctcaccccaaaggaagagaatgagggtgacaggctgcaggagaggtccaggccttgaacggggatataaaggctacatcacacacattcctcagtactagtcaacgggacactgagatgacatttattgaggaactactaaaaagctgacacatatctttcatctttatgagaactctgtagagaggcattatcatccccggctaagaaatgagaaaacaaaactgagctattcagcaactcgcctaagctcccacgcaaacaggcagcagaggcgggccccaggtgccctctgtgggaggctgaagccccggcctgtcctcacaccaggcagggatcccatggcaggtctcgacaggcagggtgcgcttcccaagccagaatattaatttgaagcccaccttttttggttcacttggaaactatgcatatttaccatcttttcccagcccatcaagctatcagaaaatcctcttaccctcgtgccacgcctggttaagcacaagcaagttgtctcaaaaatgccccagccacagaattc

SEQ ID NO: 197129 - DNA, 1000 bp, Homo Sapiens
aagtggtaactgacttggcaaaagaaaggaagcgataacttaaactgcttgcaaaagacaagttattctctagacctttcagaaaattagaagctcaaagcaccaagtactgtgaacaaatgttaacagaagggttgaaatctagtggatcaattgaacttacacattaggacaaccgatccaataacatatccctatcaatgtgacaaccaaaataccagcccataaaattcccaatcatctcctaggggtccatactacccactactgaaaacagctgttagagaataattaacaaataaaaaattcctgttaggttggattatgattactaatattaataatttaagtaactatcattttactggataaaaaatactgggtgtattttagcacaaataggtgtcaatttgagaaatgtggaactcgttaacattagctttttaaaaaataaatattaaacataaacaatacacataatattaaaaagatatacttgtagccgggcacggtggctcacgcccgtaatcccagcactttgggacgccaaggcgagcagatcacgaggtgaagagattgagaccatcctggccaacatagtgagaccctgtctctgctaaaaatacaaaatttagccaggcatggtggtgtgtgcctgtagtcccagctactcaagaggctgaggcaggagaatcgcttgaacccgggaagcagaggttgcagtgagccgagatcgtgccactgcactccagcctggtgacagagcgagattccgtctcgagaaaaaaaaaaaaaaaaatatatatatatatatatacttgcatgtagagtcaattacataagtatagtgaatgaatggaatctactgtatgataaaattatacacataccatttagttgtcatcaataagaaatttacttgtttaaaaaatctaagtgctgtcactatataaaaatttttaacggatttgcttataattgttataaattgaattgctga

SEQ ID NO: 197130 - DNA, 1000 bp, Homo Sapiens
acgaacggctaactggaaaaaccagtgtagagaagtctttaaatgacctgatggagctgaaaaccatggcacaagaactacgtgatgaatgcacaagcttcagtagccgattcgatcaactggaagaaacagtatcagcgattgaagatcaaatgaatgaaatgaaacaagaagagaagtttagagaaaaaagagtaaaaagaaacgaacaaagcctccaagaaatatgggactatgtgaaaagaccaaatctacgtctgattggtgtacctgaaagtgacagggagaatggaaccaagttggaaaacactgcaggatattatccaggagaacttccccaatctagcaaggcaggccaacattcaaattcaggaaatacagagaacgccacaaagatactcctcgagaagagcaactccaagacacataattgtcagattcaccaaagatgaaatgaaggaaaaaatgttaagggcagtcagagagaaacgtcgggttaccctcaaagggaagcccatcagactaacagctgatctcttggcagaaactctacaagccagaagaaagtggggaccaatattcaacattcttaaagaaaagaatcttcaacccagaacttcatatccagccaaactaagcttcataagtgaaggagaaataaaatcctttacagacaagcaaatgctgagagattttgtcaccaccaggcctgccctacaagagctcctgaaggaagcactaaacatggaaaggaacaaccggtaccagccactgcaaaaacatgacaaattgtaaagaccatcaatgctaggaagaaactgcatcgactaacgagcaaaataaccagctaacatcataatgacaggatcaaattcacacataacaatattaagcttaaacgtaaatgggctaaatgctccaattaaaagacagagactggcaaattggataaagagtcaagatccatcagggtgctgtattcaggagactcatctcatgt

SEQ ID NO: 197131 - DNA, 1000 bp, Homo Sapiens
acagaagagcaaaatataaaggaacatgaactaaaattaatggcatgcttcttttccctctactttcacagactttcattaatgtaaataagaaagtgtttttagcttcttttaaataaagatattggtctataaaaataattttccttagtatccagcttctcagttgtttccacaaccatcttgcaagatggggacgggcctgataatatgcttaaaaaacaaaaagaaagctactaatataaccaaaacaaaaaaaacaaatacatgaaaaaataaatccaatctagtccatttaacttctatgtaaattaaaaataaatgtaaaaatggcatgtgcacaattcagcccccttgaaaatcttatcactaattttccttccccttaattgatattttaaagccacataaagtcattctattttcaagtctttcagaagactacagaattttgacctttctaccttgagtatctgttaaccaaaagaacagaagatgaaaatatttattgattacattgactttatttcacttatggaatatacacttaaatattagctgctataattcttctcctattctcttactgttactatttttagtgtctaagaagcaaattttgctttatttctcttttcgtttcctccattgcctccatagccacaaatataacagattagaaagtagttgatttagttaaataatcctcagttaaaggaatccttatgtgcagaaaagccttcagcaagagattttatggcctggaaggcatcagattcctcatttacttccatatacagccataaactaacagatctcagtcatgtgttatcatacttaaagtttcactgttgcaggttgatttctttagtttatccattgcctttccaggcatcccctaatacagaaaacaaactaaggtataacgttatttcttcatactttgctcaaagaatgccaagtctaccaccttcatgtgatccctaaagcaagtgaattc

SEQ ID NO: 197132 - DNA, 1000 bp, Homo Sapiens
ttcagaatggaaaacataactccgaggtgtattttcaatccgcacaattttttttcacagaggtgtagaaaacattctacctgttattaaaaaaaattctatgtatttttggtttgtttgtttgtttgtttgagagggagtttcgctcttcgtgcccaggctggagggcaatgttgcgatctcggctcactgcaacctccgcctcccaggttcaagcaattctcccctcagattcccaagtagctgggattacaggtgcctgccaccacgcctggctaatttttgtatttttggtaaagacaaggtttctgcatgttggccaggctggtctcaaactcctgacctcaggtggtccgcctgtctcagcctcctaaagtgctgggattacaggcatgagccaccacgcccagccacaaattctgtgtttttaatagctttattgagatataatttacctgctataaagttactcatttgaagtataaaatttaatagttttagtccatttatagagttgtgcatcatcgtcctaatcttgttatagaacattttaaccatcttctccccaaaaaaccttgatcacattagcaatctctccccattccctctgctgtccacccctcatgcagcccccagccatagacaagaactcatcaactctctgtctctatatatttgcctctttggaacatttcacaaaaaatggtattatacaatatattgtcttttatatctggcttccttcatttagtatgtttttgagattcataggtgttgtagcatctatcagtgcttcatttctttcactgtctaatagtgttccatttcttggatatactacattttatttagtcattcctcagtgggatctttgggttgtttccatttttgactcttaatgctgccatccacgcaaaaggtttttcagtgtttcattttattgtcttttttttttttttttttttttaacgtatgttttcttttctcttgggtagaattc

SEQ ID NO: 197133 - DNA, 1000 bp, Homo Sapiens
aagaggagaatggctgagatctcaatcaagacagtctaagaacaaataaattaacgactcccctgaaccaattcttaaacagaagttacttaaacactggaacaacctaagacaagcagagaatcctacaataaacgttttcatttcattgcacagggtgattaaaatcacatttactttccagcagccacgtctacacgaagtttcccataaggatgatcatggttgtttatcagaatcacaagccagagcggggcttgcggggagactacccactattaacaggaatcctaggaacacgtgtatgccaagcattgtgggggttcaaatgagtggaaaacagtttcaaagggcttttccttggcatgtgatcatttggtcagtaaacatttgtgggcacttactatgaatgagaaatgagccatgatcgatgctgtcccgggcagagtatgtcaaagaacctacaggtgaggggtggagtatagctgataacccaattgctcattaaaattagaattatgatcggaaaacagccaatattatgaaactagagagccaggataacagcaaaacaggccactctcttttctctaggatgcttaaagaactaatttgcattctcccttcactcctatgtgacactgagctgtgcggccaccttgcatttgaagggatggatgatggaacaagacctgaggttcatctaaaagcaaagagcaagtaaatggcagaagacatggttgaaaaatcacatctcacgaaactctagttgcttattgtttaagatagatgcaaactggggtttggaatgcacagcacactaatatgtaataagttttttgttgttgtttgttgttgttgttgttttgagacggggtcttgctctgccgctaggctggagtgcagtggcacaatctcggctcactgcaacctctgattccctggttcaagtgattctcctgcctcagcctcccgagtagctgggactacaggtgcctac

SEQ ID NO: 197134 - DNA, 1000 bp, Homo Sapiens
taaatactggtcaaactgaaaaccaaacactagcaaagtctgtgctacctaatgagttaaaaacctggactttgaagtaggaagagggtcctggctcttctacttaaaaagtgactctagacaattaatgtaagcctcagttttctaacaaaaacagagattatcataactataccttcaaaaccaagttttcagaactcatactaggtaagatgtgtgaatacaccttgaaacatttaactcattatatgattcttgtagttatccaggaaacgatatcacaaatagccattaaaactaattttcttattacagcaatttaaaaacttactttctatttaaccaacaaaaagggtatcttgagttttagccttgatatatggcagtaaaacacaaattacaaattggatttgcaaataaatgtcagaaaaacttccctgatttttcatctgaaattattttatttggaggatctggtacatttccataggaaattaataacttgatcaaagccatgaaataaggtttgttgcatttatttagtctccttttacacaatggcttttccaaatctgtgtgtgctacttttgccccacaatgtgaaaaggagaccattaactgcaggataccatttgctgtgtagatttttgggtcttgtttgcacttgacatttgaattaatatatcccaattctccctccaatttacttgtacatttattgtagttggttaaaagaaaaaaaactgcaggtaagtcaggcaataaactctgagttagtaggccatttatcttctgtaataaataggagtcagaaagtcgcacagaaaattgggctatagcattcaataaggcattcagtaatgaatcaacgtgttacttcctccaccctattctgtaggcctcaatgaagtaacaaaaatgtttttcctctaacaaaagttagtagtatattccttttttaaaaagtcctttcctcacaagaacacatagaaaaggatat

SEQ ID NO: 197135 - DNA, 1000 bp, Homo Sapiens
atccctaaaccaatgctatgtaactgttaaaagttatgtagagagtatccatttctttattcttttttttttttttttttttttttctgagacagagtttcactctgtcacctaggctagactgcagtggcgtgatctcagctcattgcagcctccacctcccgggttcaagcaattctcctgcctcagcttcccaagtagctgggattagaggtatgcaccaccacaactggctaatttttgtatttttagtacagacagggtttcaccatgttggccagtctggtcacaaatccctgacctcaaatgatccacccacctgggcctcccaaagtgctgggattacaggcatgagctacctcacaggcctctttattctttcttataaaacaaaaaaatgtattgagctccaaatatgtgtaaagtactgtgttgagccttgaggatacagtaaacaatgcagcaaatttctggcttcagggatcatagaggccaaagaaggaagtttgacgtaaaagacataatctgactaattgactataagtgggataattactcagagagaaaactattaggtgttatgaaatcatcaagggacctaatgtactgggggctggtctaggaataggggcaggaaatgaaggcaaaggatagggggagagagtatgaggcagaggaaagagcaacaggattctaaatgtatattcatttacactgaaagatgatcataatatacagtttggtatgagatgctaattagacacccaagtacagatgccaagtagtatttagatacaggggatgcgactctggggaagattacagtttgatattgatatagtttggatctgtgtccccacccaaatctcatgttgaactgtaatccccaatgttggaagtcaggactggtgggaggtgattgggtcatgggggcggatttttctcagaaatggtttagcaccatcttgttggtgctgttcttgtggtagtgagtgaattc

SEQ ID NO: 197136 - DNA, 1000 bp, Homo Sapiens
aggatttcccagtagtgatgttagcacagatgtccctctgagcgacattattacagaacagaaataagacatagtttctttttcttcccttgtaaagacacatagaaaaaccttttcttcaagctttgctgtccccaaacaactatgttttgccttccaaaattcatttaataactgaggcttttagctctattgtgagattaaaagttatttagtcaagctaagtgataggtggataactgctgaactggcaaggggagtgtctgcagactcagcagctttccccgtcttcaccctccccaacacgtctcagaggagccaaactccagatctaggaaagatctccggattccttgagtaagcccttatgggactctgtccttctgaaaagaagctgaagatctctttctgtcactcatgcctaattctcattcccaagggttaataggctatgttccccttccataatccaagttattcacaagcatcatttaaaatcggattttgctcaagatgcccatttccacacagaagagtgcgtgtcttgatgaatgagttgctaacagtaaagcttcttcaaatagaaaaggtcagaggatcatccagcattatctcccccaggtaattcaggtcataagctctagagcggggcacaagactgtctcgtagttgagaaattgtactgagaaattcccgccccattggagataagtttgcaacatgtcacttgggaaagcaattcttttgttaataataagcccattgctcattttgttagataaccttgtgtaagatgggtatttagaagaaacccggcaacaaggctgagtaaaggtttttagaaggtatgaaggtttctaccttcagtgatcagccaccgttctgatggctcagttgttgaaataattatatcaccagtgattactgtgatgacagttcttgattcgttgttctcatcttcagaggaaacttgaaggatacctgtgactctgcagaattc

SEQ ID NO: 197137 - DNA, 1000 bp, Homo Sapiens
ggcagtgccgcctcacccccttacagcagagaatattgtcatttcttaaaatctttctgaatttgaaaagagcaaaaaatttatttatttatttattttgaaatgcagtcttgctctgtcgccctggctagagtgcagtggtgccatcttggctcgctgcaacctctgcctcctgggttcaagcaattctctgcctcagcctcccaagtagctgggattataaggcacccgccaccatgccctgctaattttttgtatttttagtagagatggggtttcgccatcttggccaggctggtcttgaactcccaaccttgtgatccacccgcctcatcctcccaaagtgctgggattacagacatgagccaccgtgcccagccaaatttaaaaatgtttaaaagagttttctgttgtagaattaattttctcagaatcctaatcatggcatttgcagttactaatgtttgtgccagaataaagggattctagaacatgaggcttataataagctgtttctccctctgccccaccatggggtctacaaaaagagaaacagcaagaagtggtggattctacttctaactcttttttataactaaaaaaaaaaaaaaattatcaactaactcatgttcactaatgaccataagattaggagattatgcccatgcagctcaatctttctttctttctttctttcttttttctgtgatggagtcttgctctgtcacccaggctggaatctcggctcactgcaacctccaccttctgggttcaagcagttcttctgcctcagccttccaagtagctgggattacaagcacatgccaccacgtctggctaagttttgtatttttagtagagacggggtttcaccatgttggccaggatggtctccagctcttgacctcgtgatctgcccgcctcggcctcccaaagtgctgggattacaggcgtgagccaccgtgcccagcccattgatcttaatggctatatagaattc

SEQ ID NO: 197138 - DNA, 1000 bp, Homo Sapiens
aagtccagactcagaggtaagagctcacccaggtgaatcccttacagctggtgaggggcagagcttagattcagacccagtctcctgacttaaatcctgtttccttgggctggatcagaatgagaagaaacttctttctgaaacaaagttgctggagcccagcccttctgtgcagagtcttgtgccaggggaaagcagtttcccatgttctggaagctacggtcagactggagtacgggtggtggaggactcttgcgcaagagcaggggtgggacacaggcacgagcacttgggtgctttgccttctcatcatctggtctttatgtgaagaataaaggaggagtttcacatttgtttgtttaatgacgagtgttccaagatgctacagtatcattataaattataaattcagggcagggatgggccatttctcccaaacagcaatatttttagcattagccattctcacgtaaatgcaaaatcttctttgataagagatcaaagcagatccctccttccagctttccctgtgggctgcaaagtgactggatttgcataaaccagattacagccacacagagctgttagcagcattacagatgcctcctgctgtcagcacccaggaaagcccacacttccccagagaggaaagcgacgctctgggggagctgcttctccgtcaggttctcgaaggctcaggcctctacagtgacagagatctcaaccccataccacatggcctcctggggcaccgcatctaaaagatggggatttggcctgggccagtggggaaatgtgaatttgggagcacgttcttgggaaagaagaggaagcatcagggcccatctctgggaagtgctgcctctagctcagactgggccctgacagccgtctgtgcagatggcttcacttcactgggcagtgaggccatatcacatttgggatcaaggaggatctcccttttcatgcatgtggttgggtcaacagactcttagaattc

SEQ ID NO: 197139 - DNA, 1000 bp, Homo Sapiens
acttagtaagcttcaaattgttcctatagatggattagaaaatggaatttaataagaacaatgaagactgaaagcaacaaggtaaataaaacagatttctccattaagcaggtaatttttttatattttattttttgagacagggtctcactctgtcgcccagcctggagtgcagtggcagagtcatggttccctgcagccttgacctcctaggcttgagtgatcctcccatctcagccttctaggaagctgggactacaggggtgtgccacaatgctgggctaattttttgtatttttagtagagatgaggttttcccatgttgcccaggccggtctcgaactcctggactgaagcgattcccttgccttggcctcccaaagtgttaggattacaggtgtgagccatcacgcctggccatgcagataatagatttgcttttttattgtgattttacttttataatttttttcaatagttgttactggtaaggtagtctaggaattattttgtgatctcctctcctgtcctacctcctcagtttatagagggcactcaataaggacttattggctgaaacataatactcctcccagtcatacattcatcagtgactaatatagaatgttgtataatggttaatacaatgtttgagcaatttactcattctagcattcagttaatattgtgcatttactcatttgatcagataatttgtgattagaagaatccaagaaataaaccagaactagccatgttgatttcaactcagttaactttgacaaacacccagtgcaattctttagaagctaaaaatttgatgatttggtgactatgacttatgatttctaaaaaacaaaaagagattgaatgtgtcgagagccagtataacatacatttgcccaaattttattttccaaaacatcacttttcctagccaagaataaatgctagaggctgcctgactaccactattgggtagcataaagaaacagaattc

SEQ ID NO: 197140 - DNA, 1000 bp, Homo Sapiens
agataaaaattaaggagccctaataacatgtacattttaatagttttattggattagttgtcagtaaatagcacatattttaagtgtctagtttctaagtttgcatatatgtatagatgcataaaatcattgttgcagttaagataatgagcttatcactcactgccaagtttcctcttgaaatattgtaattctttcctcctgcacattgcttttctcatatctctgtcctcaaccaagtactatactttctgtcagcaaaatgagggtacattttatagaaccatgtataaatataatcatagagtacatattctttattgtttggcttccttcatgcagcaaattattttgaagttcatctttgttggttcctgaatcaacagttcattctttgacagccaagtagtattccattgtatgaatatatcacaacttatttgtctatttatctggtgatggatattcaagcagtgtccaaggtttggctattacaaagaaagctgctacacattcatgcctaagaatctacaaatacatgcttttggttttcctgggtgaacatttaactgtgtcatggctaggacaaatggtaggcatatgtatacctttttatgaaactgtttttcaaggtgatcataacacttttattcccagaagccatgtatgatattgctacttgctccacacactcactagcaatgctatgatcaacctttttaattttaaatattctcataggcccatgtaggacttacctattggaattttaatttgcatttcttcagtgatcaatggtattgagcaaaattgcagtttcttatttgattcatgcatcttctgtggtgaaggcggctcaaatcttttgaccacttataaattggggtatctatctccttattattgagttttcagggttttaaaaatattttggatataaagattggaaaagttctttgtcatatgcatttgcaaatatttccccctagtatgtgaattc

SEQ ID NO: 197141 - DNA, 1000 bp, Homo Sapiens
gtgtcttaattctcactatcctaaaagatcttattttagtaatagccacaagtaaagactttacaattatgaattcctaattatttgaaaaagcatttagcaagtattttttaaatataatcttatgcttaaattaaattgacaccataaatatttagggatatatcaagagtagatttttatatgtcaaaggtagatattgttttctattcagacggccccattttctttcttctgttgtcctacttatttggcaaggatgccacttttaattggactaatggctcaaagccacaaatttaaattatttgaattaaatcctgtgcttgcacttgttcttctggcagttgattcttatcaccccaggaatggtcttggaaatttttatctattaggctaaatgttgagcgtggaaaaagttataaaaatatccatagattgctcaaggaaaaaagatagaaatatcgatagcagaagggcaaaggaattatgctcatgattcactaatataaggtatatttttagtagatgaaatgtgatttaaatatatttcctaaacaaatattagatctgttttctcatcatggttagttagaaataaaagcaagaaataaaagcaacaaaattataaagtgtggtagacagaggtaaccaatttttttcagggttttaaaaatatgtgtgtatgtatatgtatatattgtatatgtatatgtatatatgtatatatacacatattttagaaactaaaagtttctgtaaagttcttttctaaatggcactttatagtttctcagaaaaccatgttgagtgagaagctttctctatatctctgtgtccctcaatcttcactttgttggcttccaggagcttcttttcatcttggctcttaaagtatctgctactgtgatctcctccattatttttcctcattaatttaattttacagaaaataaagtgtaggttcagaaattaaatacttcaactaaaagacgaattc

SEQ ID NO: 197142 - DNA, 1000 bp, Homo Sapiens
gtctcattctgtcacccaggctgaagtgcagtggtgcaatcacagctcactgcagccttcacttcccaggctccggtaatcctcccacctcaccctttccggtagcttggaccacaggcatgcaccaccttgccaggctaatattcttttttttgcattttttgtagagacagggtttcaccacgttgcccaggctggttttgaacttaagcaatccagctgcctcagcctcccaaagttttcagattacaggtgtgagctactgcacccagctgaactgttactttttatatatgccataattccatgtgtggttaacgtggaaagcagccaaacacatgactaaaaattacagtaaattagtacaaaatatttttctcaaatattttaagttgtaattatatgactgatatcatttcagtagagagctataacaaatattactttttaaataaataaatgttgcttttagaaatcatgagaaaacaaaatttaagaacttatatgtactaatataactttgacattttttttttagagacagtgtcacacactgtcacccaggctgcagtacagtagcgcgatcatacctcactgtaggaggcagagcaagatggctgagtagaacctgcctgcaattatcctccctgcgggaacaccaaactgaacaactatccacataaaaaagcacctttttaagaaccaaaactcaggtgagtgatcacagtatctggttttaacttcatatcatcgaaagaggcactaaagacagctgaaaagacatacttgaattgccaacaccacccctctgcatcccctggcagcagccacaaggcacagggagtgaatctgtgtgctttgggaagagacagtgccatgactctgtgaccttgcattggaactcagtgcttccctgtcatagcggaaagcaacaccaggcagaactacgctggcgcctatggaggaagcatttatacctgccctagccagaggggaattc

SEQ ID NO: 197143 - DNA, 1000 bp, Homo Sapiens
ctaattatcttgaatgttccagagtttatgtgtctctgatattctgaaattttctagtgcgatgttgatgctctcttagggaggtctaaaatgtcaacctccaagggtctttgtacagcacttctatgcgccatggtgatttcaaacacaaacatggattggatctgctggaatgtatgaaccaaatgtcaaagcagctttccggagaatggatctggtgaagaattgtctctagctatgagccccacttacaacttgtaagcttataggttgctcatgagtaaattcaagcagcagcatactcaagggagttctatattcccttcacaaaccaaaagactgtgcctctttcttagtggtggattttgcaaggtacagcaacttattcttcaccttgtggggatgtctgggcatgtgtcagaccaatggacccctggaaaattcaccaagtaggcggcatctgaattttcacatcatttcattttctgcctcttggctgtaggaggaagactgccagtacatattttaggcagtaaagcaaataattatccaagggaattcatcttccttttcattcaagaggctccatatagggtctgggaatttggtgaaaggcatgactctttattatgacgatttaagtcaaaaaccatgagctttagattcctttgcttatgcataacctataactctctagtagacttcacatcaacttcagtcttagtgactttgtgaaatattaaccattgccaaaaaagctctgtgggttcaagtattttcagtggttttctggcttcgcaactcccggcaatactgatgcctacctgatctttggtgatattcatttctctgctagctctgccacaatgcacatttgatattctgaaacttaagcactaaattatagagttaactcttcttagcacacctaagacttataaaggcaaaatatactactttatttttctccctctgggatttcatcatccccgttgaattc

SEQ ID NO: 197144 - DNA, 1000 bp, Homo Sapiens
agataagttgatatacctttcactagaaaaaaacagaagactcaaaatcagaaataaaagaggagctattacaactaaagacacagaaataaaaaggttaataaaaagactattaccaattatacaccaacaaattggataatctagaaggaatggataaatttctagatacacataacctactaagactgaattatgaagtagaaaatctgagcagatcaataacaagcaaggagattgaattaataattttaaaaaaatcactcaccaaaaaaagcccaggatccgatggcttcactgctgaattctatgaaacatttaaagaagaactaataccaatccttctgaaagtcctccaaaaatcaaagaaaaagaaataactttcaagtgaattatatgaggccctgataccaaagccagacaataccattacaagaaaattacaatccaatatctctgatgcacacagatgcaaaaatcctcatcaaaacactagtgaaccaaacttaacagcacattaaaatgattattcactgtgataaagtgggatttattaatgggatgtaaggatggttcaatatatgccaatcaataaattgatatgccacattaacagaatataggacaaaaatcatattatcaatgcatcaagaaaaattatctaacaaaattcaacatcctttcatgataaaaactaccaataaattagttacagaaggaatgcacctcaacatcataaaagccgtatgtgacaagcccacagcttacatcatactcaatgatgaaaagttgaaagcgtttcctttaagatctggaacaatattcactctcacaacttctattcaagtagtactggaagccctaactagagcaattacgcaagagaaaaaaaaaagtattaaaatcacaaaggaagtaaattgtctctgcagatgacataatcttatatattaaaatctttaaaggcttcaaagaacttttagaactaataaatgaattc

SEQ ID NO: 197145 - DNA, 1000 bp, Homo Sapiens
gaagagcccagccacaactagcctacaaaagaaatgaaaaacaggctgggcgcggtggctcacacctgtaatcccagcactttgggaggccgaggcgggcggatcacctgaggttgagagttcgagaccagcctgaccaacatggagaaaccccgtctctactaaaaatacaaaaattagccaagtatggtggtacatgccccagctacccgggaggctgaggcaggagaatcatttgaacctgggaagtgaaggttgcgatgagccgagagagtgccattgcactccagcctgggcaataagagcaaaactccgtctcaaaaaaaaaaaaaaagaagaagaaagaaagaaaacaggcctggagcgggggctcacgcctgtaatcccagcactttgggaagccaaggcaggcagatcacctgaggccaggagtttgagaccagcctggccaacatggagaaaccccatctctactaaaaatacaaaaatgactccttttggccagaaccgccatcttcctgtagccatcttcctgtaattcgccaaaattacgaacacaaagggaaagaggagaggtacccgatataggttctccaggccttttagaaaacctggagttgttcctttggccatgtatatgcgaatctataagaaaggtgatattgtggacaccaagggaacggtactgttcaaaaaggaatgccccacaagtgtcaccatggcaaaactggaagagtctacagtgttccccagcatgctgttggcattgtaaacaaacaagttcagggcaacattcttgccaagacaattaatgtgcgtattgagcacgttaagcactctaagagccgagatagcttcctgaaacacatgaatgaaaattatcagaaaaagaaagaagccagagaaagatacctgggttcaaccgaagcgccagcctgctcactttgtgagaaccagtgggaaggaccctgagctgctggaacctcttccttatgaattc

SEQ ID NO: 197146 - DNA, 1000 bp, Homo Sapiens
agactccatattttcttgtagtccttccctggttcctcttctaacatctacctcattaatctggagttaattttgagggaggtatgaggtggggccaaacattattttttccaccagactccattttgaacgacctctccttccttctgacctaacactgggcagattgttgcactaagttgtcacatgccctcttcccagatcttcgggcagcagaattactcatcagtgctggaagcctgcccccctccccactccccgcgccttgctgtggtgacccccaccccaaccgagtccccacagctgggcttgctgtctgccctgtggtgagtggaaggaattcagcatgaactctgctcactcagcagccaggcctgagaagcaccggactgtggaaaatcacatatgtttttcaagttgttgaaaaccaaggaaattgttctgccagttgtgagggtggctagacactgtctgggagacctcaggtcccatggctctgggagccatcccatcttgtgggcccaaacaggctaaccccactggtaatatccaggcacttgggcggcagagaagggggagtttctaggagcctcccccaagagggaagaacaaaaaggaaggagcctagcctggtcctttcccctttggtcccaggaggcagatccaggactcaaggggagatatggaggggctggcatctgtgatcccagtagcctgctggccagatcccaggcctcccagaccttctatttatccccctcccccagatacacatgctggtgctggacagctgggctgtggcggaagtttacatacaaagggtttgctgggccatctcggtacacacagcttcacttccttctgaggcacaacccgtgtctgagctgctgccatgggggtcctgggggccacagaggccatggggcaggttgggagggtctgctcccagcctcccagaccctgccactcctgcctgtccccaggccctgatgacctctta

SEQ ID NO: 197147 - DNA, 1000 bp, Homo Sapiens
ctcctgagcaatcctgaataccatttgccagaaatttagtgattcactttgcaaatgggtaataggattggaagtaacctgatgagaagaaattacaaagtcaggcttcttgatgcatttcatttaagaaaaagaaaaaagaaaaagaacactggaaatttgccaggtaataggccacaaggaagtgaccatgaaacttctcttttcaccagtgttttcctcatgcagctgcccaggcactgagacagggcgggacccactatttcattcatgcagttcagccctcttaatctcatagtgaggagagggattgcgaaaagcagaagagccctcctctaaatatgtcactaagcacctgagatcaattttgctttctcattgtgcaagttttcaggagccagaagacccagggcctggatatttcctctccctggaaagacagtgagagccaagccctctcctgctgcctggtctcccaggagcacccacctcatgggataagaggattcaatgagataatacaagggaagggcctagaactctgtcagcttagagcctgggcatggtgaaacacagaaccccacaaggcagggcaaagacccagctctgtgcttcgagctgagggactctacacaagtgcaaactatctgagcctcaggtgctttgcttgcaaaatgagaatgtttacctgaaagtttgttttaaagattaaatgagtgacatgagaaagtgcctattatcccataaggtgacctggagagaacaacaaatgtatcctgtatctgtaactatcagagcaactgaaatactaattgtatcttacagatttcaaccaaaagcacctcttttaggcaagttgacaatgtagaaacaccttgaaatccaggtaacacggttagatccaaatccacacacatattttcactactcacagagtatttctgctccacatgggactggcttcctgtgaactcaggacaaaggtggtgtgatcatgaca

SEQ ID NO: 197148 - DNA, 1000 bp, Homo Sapiens
ggaataaatttaaaaaaagaataacaagagttatacagtgtaaacaacaaagcaatgttgaaagaactagaaggagacctaaattgatgggtgtacattccatgttcatggattggaagacttaattttgttatgacaatactgctgaatttgatctacagattcaatgcaatacctaacaaaatttcaacttcgttttttgcagaaattgacaagctgatcctaaaatccacatagaaatgcaaggaattcggaatcacaaaactatcttgacaaagaacaaagttgggaatttacattttctggtttcaaaatttattataaaatagcagtaacccatagagtgtatcactggcataaggataaacatataattcaaccaaacagaattcagagtccagaaataaaggaaatattctttcctttcaatgaggaaagaatagtctttttaataaatagtactgcaacaataaaatatgaaaagattgaagttgtttctctacctcacaccacaagcaaaaattatagactaaatgtaacaactaagattataaaactcttagaagacctagcattcaatctccatggtctcagattaggcaatggattcttaaatataataccaaaacaacaagcaacaaaagaaaacagactgaacttaatgttaaaaaattttgtgcttcaaggcactttaaggtagtagaaagcccacagaataagaaaatatttgcaaagtatacgtcggataagaacattatcagacatagcagataagaattaatcagacatatactttcatacagaatttatcatatatacaattcatacaactcaacaacaaaaggacaaagcagctcattaaatatggaccacgactagaatagacatttttccaaagaagttttttaaatgtcaataatgaggaaagaaaataacaggccaatatgcttactgaacatagatgcaaaaatcttcaacaaaatactagcaaagtgaattc

SEQ ID NO: 197149 - DNA, 1000 bp, Homo Sapiens
gtgtctatttgttatctccatatatgactgaattggtgcttacttattgccaatatttgcaaaataataatccaggaatttaaataattatttttctgtaaaagaggcatagttgtgggtgcgtgtaatcccaactactcaggaggctgaggcaggagaatcgcttgaacccgggaggcagaggttgcagggagctgagatcggccactgcactccagcctgggtgacagaatgagactctgtctcaaaagaaaaaaaaaaacccagaaattaaaacacagttatgcaattatgaaacttatactggagttacttgcagagaacagtggaaaaacagacagggtattaaaattttggacactgtaactgtggactctttctcagacaccatgcggattgatagtcagtagatgaacatataatcataatttcaggcagcgtgtttctttaaattagcagaaaaaagtatcaccaatgcttagatttattgatattttttcactggaaactgattttcttaattaaaaaaaagatgcaatggaactttaaactttcaaaaagaaaaaaaaaggaaatggggggacagaatgaaagggggaaagaaggaaaaaaaataattatttctaatcaactgtagtgtcatcctcatttttccagtattcttgccctttcactcaaaatatcctctggtctgtggagatcactgcaaatcagttagatacatcaccttccacttgctaccatatgttgaattcagcttgggtcttttgattataagctctctgatggaaatacatggcttctctgaatctgaccaattagtgttattttaatagttagtaccaaaggacttgtgaggattaagatattctgagaatcactatcattccttgcctctctctttttagaaatttgttattttataatcaagaggagactcttaaaattatttttgtcccacagaaaaaggtttaggcatttttatctttgagaaagaatt

SEQ ID NO: 197150 - DNA, 1000 bp, Homo Sapiens
tatgtattaaaaatgtacatacttggccgggcatggcggctcacgcctgtaatcccagcactttgggaggctgaggcaggcagatcacaaggtcaggagatagagaccatcctggctaacatggtgaaaccccgtctctactgaaaatacaaaaaattagccgggtgtggtggcgggcacctgtagtcccagctattcgggaggctgaggcaggagaatggcatgaacccgggaggcagagattgcagtgagccaggatcacgccactgcactccagcctgggtgacagagtgagactccgtctaaaaaaaaaaaaaatgtacatacattaatttaaaaatactttattgctaaaaaatgctagtggttacctgagccttcagtgagtcataatctctttgctggtgcaggattttttcttagtgatgatggcggctgactgatcaggatagtgattgctgaaggttgggatggctgtggcaatttcttaaaacaacttatggagtttgttacatcaattgactcttcctttcatgaaaaatttttctgtagtgtgaaatgctgtttgatagcattttactcacaatagaacttatttcagagctggagtcagtcctcttaaatcctgacactcttttatcaactaagtttatataatattctgtttcatttttttgtcatttcacacagcatcttcaccaggagtaggttccatctcaagaaaccactttctctgctcatccataagaagcaactcatcatccattcaaatttgatcctgagattgtggcaattcagtcacatcttcaggctccacttctcattctacttctcttgatagttccaccactctggaattacttcctctaccaaagtcttgaaccccttaaagtcattcatgagggttggaaccaacttattccaaacccctcaatgttgatattttgagctcctctcatgagtcatgaatgtccttaatgccatctaaaacggtgaattc

SEQ ID NO: 197151 - DNA, 1000 bp, Homo Sapiens
atcactcccagcctctccaagtgagaaacaagggaaactaaagcataatctttgccctcaaggagaacgtgacctacttaggaagacaaagctaacacagaacaattaaatgctacactgtgtggatctaaataagggagagagttgtagaaaactatatcctagaagagatagaatttgtcttaggacttgaaagatggataggatttaaacggggaaaggagagaggtccctaaaagcaagaggaggttgtttaaggaggggctctaaggagaatgcaccaattcagaagaagataacaccctgggaagtcttgggaaagagattaattagagaccagagtgtggaaagtcagagacttcagtaaatttgaaaacaatcttgacgctttctgtacttcataattttagaattttcctcagtgttttttgggggcggggggcagggggactttgtggttgttgttgttgttttgagacaggatcttgctctgtcacccaggctggagttcagtggtgtgatcatagctcactgcagctatgatcactgcagccttgacctctctggctcaagctatcctcccctgctcagcctcccaagtagctgagactacaggcatgtgccaccattcccagataatttaaatttgtttttttgtttagagacggggtctcactatattgtccagactgatctcaaactcttggattcaagcaatcctcccacctcggcctcccaaagtgctgggattacaggcatgggccaccacgcccagcctttcctgaaaaacagggcacattatcctgaagttgtgatggccaagatgtctggaataatgtgatgtatttgttgcctgaaattcagtctctagctatgaacattgcccttttttcaaacaatttttaaagcattattaaaacagtcaagctacaaagacattaattgcaatatttctttagggcatttgtgttcacccagactcctctgagccctagaattc

SEQ ID NO: 197152 - DNA, 1000 bp, Homo Sapiens
ttaaccaaaattaaaaatacctcatatcttaagatactgtatccatggctgggcatggtggctcatgcctgtaatcccagcactttgggaggccgaggcaggtggatcacctgaggtcagcagtttgagaccagcctagccaacctggtgaaaccttgtctctactaaaaatacaaaaattatccgggtgcaaggtggcggacgcctgtaatcttaaatgcataaatacaaagtaagaaggttgaaaataagtgcaatcattcaaaaagttggaaaaattcagctaattaaaaccaaaggaaactgggtgtggtggttcacacctgtaatcccagaactttgggaggccgaggcaggtggatcatgaggtcagaaatttaagactagcctggccaacatggaaaaaccctgtctctactaaaaatacaaaaattagccaagcgtggaggttcgtgcctgtagtctcagcaactcgggaggctgaggcaggagaatcacttcaacccgggaggtggcggttacagtgagccaagattgtgccattgcactccagcctgggtaacacagcaagactccatctccaaaaaaaaaaaaaaaaaagatactgtattcacgcaacatgatcagaagattattttttaataggatcctaaagagctcttggaaattaagaaaagatgacataagtaaaaaaattttctacagaaatatcagacaatgaagttgagtaaagctcactggtagtagaagagaagaaccagaagacggacaacaggagacaaaaggcaagaacatcagaagctcagaccaggagatccaacagccaatcaacagaagttaaagaatacaggaatacacaaaatggagaaaatattattaaagaaataatcaaagaaaagtttctcaaactaaaggatatgcattctagatcaaaagaatcccccacaaaggcccagcacaagaacgaaaacagcactacaccaagcttatcacagaattc

SEQ ID NO: 197153 - DNA, 1000 bp, Homo Sapiens
ctcctgagtagctgggattataggcgcctgccaccacacccagctaatttttgtatttttagtagagacggggtttcaccatgttggccaggctggtctcaaactccatacctcaggtgatccacccaccttggcctcccaaagtgctgggattacaggtgcgaaccactgcacccagccaacaaacacttctttagcacgacctggcatggggaactgctcacccctttgatgaaggtgggtttgtccttgatgccaaaattccagagcatgatatctccccctttggaacccacagccacagtgctggggtgagttgggtgccacgccaaggatgtagccctcctgtcaaagggggcagccttttgtaatatccggtaagaatccagagtgtgcaaaaaggactgctggagcccctgccacagagagaaatgaattaggttgaattaaaacccaagttctgggtaaactgccaatctctgcctccttcatggatgagccctagatccaagtcctcccaccaaaggaaagctaactgcctgccctgtgcatgaaaatatttgcaatgtacacgaacgaataatcttggaaagcaaaaggggcagagtgcattccagctgggacctttacaacataagacattttttacctggctgagtgcccagtaggccagtcaccacagtctgggtgatcggaccactctgacaagctggtgaaccaagccatcatctaatttgggagcatgcaatagtaaaaatgcacgtgtaaacccttgaggacttgaggcaaaaaatgccttacctgctggacagatggccaggaagctctgcccagcttatgctggtggagggtcctgacgatgctgcggcatggtggcaggatctgtgggccagccagccccacccagaggcagtctgagtcacatcttctgctaggacctgccaagcagaacagacatattttcctctccaatctcacgaaaggtttttctgctgaattc

SEQ ID NO: 197154 - DNA, 1000 bp, Homo Sapiens
ctttgcccactttctgatggggttggttggttttttcttgtaaatttgattaagtttcttgtagattctagatattagccctttgtcagatggatagactgcaaaaattttctttctgtaggttgcctgttcattctgatgatagtttcttttgctgtgcagaagctctctagtttaattagattccatttgtcagttttggcttttgttgccattgcttttggtgttttagtcatgaagtctttgcccatgcctatgtcctgaatggtattgcctaggttttcttctaggctttttatggttttaggtcttagtttaaatctttaatccatcttcagttaatttttgtataaggtgtaaggaagggatccagtttcagttttctgcatatggctagcgagttttcccaacaccatttattaaatagagaatcctttcctcattgcttgtttttgtcaggtttgtcaaagatcagatggttgtagatgtgtggtgttatttctgaggcctctgttctgttccattgttctatatatctgttttggtaccagtgtcatgctgttttggttactgtagccttgtaatacagtttgaagtcaggtagcgtgatgcccccagctttgttctttttgcttaggattgtcttggctatgcatgctcttttttggttctacatgaagtttaaagtagttttttctaattctgtgaagaaagtcaatggtagcttgatggggatagcattgaatctataaattactttgggcagtatggccattttcatgatactgattcttcctgtccatgagcatggaatgtttttccatttgtatgtgtcctctcctatttccttgagcagtggtacatagttctccttgaagaggtccttcacatcccttgtaagttggattcctaggtattttattctctttttagcaattgtgaatgggagttcactcatgatttggctctctgtttgtctgttattggtgtataggaattc

SEQ ID NO: 197155 - DNA, 1000 bp, Homo Sapiens
actgggcctgtcgcaggcccacagtcagtgattcacgctgtgaacgaccgggggtgtactgggaggtcccacccgacccccgatgactgcacgggtgtgggagcctccaccccaacagatcccagaggggccaccctggtggccacactctcatgggaccgactttcaccccataaagagaggtcgggagtggggcgacactctcgcatggcacacccaggtagaaaactcttctgctgaaatgtcctggctcaagccggggaggactggaaccagctctggaaggcggcgccagggccacaggcagcccgggtgggaagggcctccggcgggtctctctcccaccctcatctgccttggctcccactgaccccaaagacctagaacccaggcccaggcagggaagacatttggggagtggtgagtcgagaaccgcaggcagcacaggtttggttggagcgcttattttcaaaaaatgatcaagacgttggagtttttaaaagagagtagtgaacgatacggaaaatatgaccctcattacagactcggcggaggtccctgcttgccaagctcctccggcttcacctccgcgcggggagggcagacacgaggccttgagaatgggcacagacaggggcggacggtgaccagcctggggtgacctggacagaagagatcccgggcagcgggagaggggcccaggcccaggggtgcccaccccactcactcgctgctcttcgggagtggggagttatttgtggtttgtttacctgaaacccttatttctgacacagagaagagaaaatgaaagaaaaggctggggtcatggtagctccgggtaaacttgaaagctggaggcttgggggggtctgcggggcgtggggagacggcggcggggagggagggtgactgtggggaggaagggccagaaggcggcggcaggggcgggaggtcagggggagggtggctggggggagggaggaggatggctgaggcggag

SEQ ID NO: 197156 - DNA, 1000 bp, Homo Sapiens
caatttactaatcgtatgtagcttacaagtctacggagcttctcttttcactgtttcttcaacataaagaaagagaccacgagtcctctaccctcaaaagtgctttttacttcccgttaaggtaaagaccacgtgtagactgtacattaaccttggctatgcagcactgcaaaggagagctgctcccgcctctgcatttcccactccgtgtctttgccctagtggtcctcccctcacagctggcgaccctagaggttattcattccttggagggaaactgagggaggccggaagtgagtgagatccaaaaccgagaaaaaagcagcagacatttaagcaccgggaagcgattcccgcctctctcccaggcgctgtctggcggcctcagggcgcaggaagctgagatacaggagagcgttttcactgcttcagacctcaatctgaattcctgatttcactccaatgccaagcgcgggccgaagcactcacgcctccacccactgggcacgccagtctcgagctgaatcccggctgggactatggggagataccaggcctctcaacctgcgcacaacggtgcggcggcgcccgggcctaccgtcgcgactagaatgcagaccccaatcccaatcgcctctcacaggccagaagcgtctgtgggccccaaacgacagtggtagatccgctgacttacgaaattttgtcagaaattacctttgaactggccttctgagatccgcctggcgttttgtccgccatcttgagctttgcccctccttcggcggcggcagcagcacgggcgagtcgagcaccgaaagagcggatctcagtgaagcccgccagaggcgcctgcaaggctgaatagtcgactgtcgagatagcgaccttaggggcagccgctcacgtgacttccggtgtcagtaatttcctcagccgcgctcactccgctagttttcctgggagtcacggtgcttggtcgcgttattgggtccgggaattc

SEQ ID NO: 197157 - DNA, 1000 bp, Homo Sapiens
agcaagggagccagcctgggagtacagaggctttttcagggaccccctttcagcttcacctggctcagttctgagcttatcattttgttatcagagcctcctatcccccaaatctgtagcctccactcacaaaattaacctagcagtacagaacagttaaaacatagaaccacgtacataatccctatgtgtttgtgcataattcaataccttctgaagaacacacaagaagctgctaactgtggctgcggcagtagatggcgagtgggttggaggaggtagatcctggatgaaagcaagatatatttattccatatatcgtacatgctcatctatttatttttccttgtgtatgtattactgactcaaaatgaaatttaaatataattactatagacaaagccagcccagaatctgactcacatttaaactacttgcatcattgatttaaggtggctcattacactaaggtgttttaaaataaatattttatatggttttgtattatttatatgtttgagaggcctggggtctgacattttagtgtgctttctggaaaatttgctgctgaaataagggaaaaatcaatagcaaccctggacaaaaagcttttgcttatcttttcaagtatttactctgagttctgtgccatgttggttttatatatagatatttaaaagtgcaaaatgaaagtttgatagaaaccaaagtcttttatagcattttttctaaataaaagctatatggagtcctcctgtgtaaattccattaggccaggagtctctgcctcttttgttcagtaatggatctctaggacctaaagcctttcttggcatatattaggtgctcagtaaatatttgttgaatgaaggaatacataatcattataaaaatccaagcactacagaaaaatatgccatggaacatgtaatcttttctaatgcctttcctccaaataatcattaccctagtctcttaaaatgaaagaacaaatcatttt

SEQ ID NO: 197158 - DNA, 1000 bp, Homo Sapiens
aattttatactcaaaacttttcaaaaatttaactagggaaataataaattgtatgaagtgttagattgtgttatacatactaaagtgttaaaggcatataaagacaaggtagaccaatgtagcagaaaagagcatttcacagaagcaacaatcaactaagtattgttaatgtgatagtggatgttctcaaaagcaaatttaaagggagctaaaataacccagtttctgagatgtcagacagagataatctgagtaaagatcactggaatcccaccacacaagcctttccctgtataattcgttagagatcaaattccaactcctcctgagaatgtggagctatttttattttaaaagccactgataaccacaaaggtcttcaaaatgaaattcatgcaaatctagcatcatgaaaacaagtaatcaaacaaaatttactttaacataaacaacaggcccccagagaaaagacgagcccaatgtaagatgacagataccctggctcctcagtttaatgtgaaacaaaaaaccagatatgagttaatccattttaattaccaacaactttcactggtgaagcacagttagaaacaagcagtatttttagtcagtatcctaccaatgagtattatgcttcttaacagcttcaatcaagccaattaatgggatagaaaaagtatctatgctctgtagcaacagagttgggtgcttaaaagatcaaacacaaaacagtaactactgaatgcatttgaattcctaagtaaacctaatttaaaaagaaaaagtactcaataaacatagtatcatttatttaggatttaattatattttgtcttctgttatacagaggcctagctcactagtattggggctggttgtgtctaactaatgtgaggacttaaggaatagttggttaaggggctagagaataaggtcaattgccaacacagataaaagagtagtgaggcaatgatcagtatggccagaatatagagaattc

SEQ ID NO: 197159 - DNA, 1000 bp, Homo Sapiens
ccccatgaggtatctttacttcacctaaaacactgaataaaattcacctaattctttccaagacaaactgtttcacaacaatccggaaaatatccaaatcacaatttgcttttcctacatgatctccaaattaattctacttctaaacccatcctccctgcatatatagatgtttacttatcttctttcctatggatagataagaacttagtgacaggaacacatatcaaaatgtttatctgggaagtattttaattaatgactcttcaagtagagatatttctacaggttatcactcctgttatttaaaaaaagaggccaggcgcagtgacttgagcctgtaatcccagcactttgggaggccaaggtgggcggatcacaaggtcaggagtttgagaccatcctggccaacatggtgaaacctcatctctactaaaacacaaaaaattagccaggcgtggtggtgcacacctgtagtcccagctactcgggaggcagaggcaggggaatcccttgaacccgggaggcagagattgcggtgagccgagattgtgccactgcactccaggctgggcgacagagagagactctgtctcaaaaaaaaaaaaaaaaaaaaaaattgttagttcattcaacaaatatttacagaataggaaaacataaaagactcgtactaaaagagctcatattctgtgcattaaataaaaataaactcaaaagccaagaagcatatatgaaggcaatgcttagcatattaagcatttgtcaacacaatcatgcaggtaattaagacaataccagccctgctctggcgcgtttctatctaaataaagtactgctagagaacacttcgctaattcatttccatggcatagaaacctcaataattaaacattagaaattgttccaagtctataatcccttgaaaataaaatgtctatcacttgctttataactaaagaaatctgaggtgaaactcttttagagaataaaggaattc

SEQ ID NO: 197160 - DNA, 1000 bp, Homo Sapiens
atatgtttgttggctgcataaatgtctttttttttttgagaggtgtctgttcatatcctttgcccactctttaatgaggttgtttttttcttgtgtatttgtttaagttcattgtggattctggatattagacctttgtcagatggatagattccaaaaactttctcctattctataggttgtcttttcactctgatgatagtttcttttgctgtgcagaagctctttagtttaattagataccatttgttaattttggcttttgttgcaattgcttttgacgttttcatcatgaaatctttgtttgtgcctaagtcttgaatggtcttgcctagattttcttctagggcttccatagtgttgggttttacatttaagtctttaatccattttgagttaatttttgtataagatataaggaaggggtacagtttcaattttctgcatatggctagccagttctccagcaccatttattaaatggggaatcctttccccattgcttgttgttgtcaggtttcttgaattgtagatgtgcagtcttatttctgagctctctattctgttccatcggtctgtatgtctatttttgtaccagtaccatgctgttttggttacagtagccttgtagtatagtttgaagttgggtagcctgatacctcccactttgttctttttgcttaggtttgtcttggctaataagggctctgttttgtttccatacgagttttaaactagttttttctaattctgtgaagaatatcgatggtaatataatgggaatagcactgaatctataaattactttgaacagtatggccattttcacaatactgattcttcctatccatgagcatggaatgtttttctatttgtttgtgtcctctatgatttccttgagtagtagtttgtagctctctttgaagagttcctttacttcccttgttagatgtattcctaggtattttattctctttgtagcaattgttaataggaattc

SEQ ID NO: 197161 - DNA, 1000 bp, Homo Sapiens
tagatctctagtgaggccagggaagttttcctcaattaatccctcagatatattttccaaacttttaaatttatcttcttcctcaggaataacaattattcttaagtttgaccatttaacataatcccaaatttcttggaggatttatgtctttaaattcttttttctttgcctttgtctcattgggttaattcaaaagccttgtcttcaacgtgtgaagttcttctttctgtttgattctattgttgaaatttccagtgcattttgtatttctctaagtctatctttcatttccagaagttgtattttttttttcgttatgatatctatttctctggagcattcttcatccatatcctgtatttttttaaaatttatttcagatggttttcacctttctctggtatctctttgaatagcttaatagtcaaccttctgaattcttcatctggcaattcagagatttcttcttggtttggatccattgctagcaagctagtgtggtctttgggggtgttacagaacctagttttgtcatattatcagaattacttttctgattccttctcatttgggtagactatggtagtggaaaaatgtggaactagagtgctgctgttgagattcttttgcaccatggggcaatcccttgatatggtgcactcccttttgtcctaggaatggggcttcctgagagccagactacagtgattgttatcactcttccgggtctagccactgaatggggctaccagactctgggctggtgctggggaatgtctgcaaagagtcctgtgatgcaatccatactccggtctcccagccatggataccagcaccttctctggtagaggtggcagggagtgaagtagactctgtaattggttgtagaagtgtttagtgtgctagcattctcgaatgctggttatagtagcagtgacagtcacatggacaaactcaggatcactggttagccaggatgttgcaggcagcagaattc

SEQ ID NO: 197162 - DNA, 1000 bp, Homo Sapiens
aggctcttggagggcagggagaatcccattatgaggagttattatatagctttgaagaactaagagacaaaattagccacccactgtgcttcctattttgattcctgcagggtttcaatccctagcatataacacaaagacccagataaaatcattctattatgtaatggcatatagttaaatgcttcatttcctttctgtttacagctcaagcactagaccataattatgattagtcagagtacttatgctatcagcattgtttgaagaataaattataggacttaactatgctctattagtatcttttaatgacaggcagggaaccattctgatatgctgaaatcaacattttgccacgggagattcttagtttcttctcatacttggatttttaaaagtactttagaaaagaattgctctaaaacacagtgagcttcttttatttttattttttgagagacagggtctcactgtcacccaggctggagtacagtagccatctgcggccttgaactcctaggctcaacagatctcctggctcagcctcccaggtagctggaactacaggcttgtaccacacctggctaattttgctgttgttgttgtagagacagggttttcactatgttgtccaggatggtctcaaactcctggacttaaggaatccctctgtctcagccttccaaaatgttgggattacaggcatgagccaccatgtccagccttcttttttagttgcaacatgcactattctgttactggagtaataatacatcattttaatgtaatgtcatagactgttatagttgtcatagtatgtagcgaaagaaaacgtaactatcttttttctttgttcattaacttatatgtcttctccttgccagcatttcctgtgttacctgtaaattggacagatgtggaacaaatgcagtcttaaaaaggacatttcttataacccatgatcgatgcttgtctgtgagcaagagagtgggaattc

SEQ ID NO: 197163 - DNA, 1000 bp, Homo Sapiens
gctctgtcacccaggctggagtgcagtggcatgatcttcgctcactgcgacgtccccctcccaggttcaagcaattctcctgcctcagtctcccaagtagctgggattataggcatgcaccaccatgcccagctaatttttgtatttttagtagagacagggtttcaccatgttggccaggctggtcttgaactcctgacctcaagtgatccacccccctcaccctcccaaagtgctgggattacaggcatgaggcactgtgcccggcccagaggagctttcttgaaacaagtgggtttagaaccaagaagagatggcttgacagagatgatagaggaggagagtttagctggcacacagcagcagggatgagtaagaggccattatacatgacccataataacaaactctcacggcagtggttttttaatgagatttgctgaagttgctagaattcattcccaagggatctgtcatgcgtagactccaagctttaaaaacagcacatgtaattttatgtgtatgatgaaacatttctgtaagaaaagcagcaaaatcttaacatccccaggttactggcattagaaataccatggagattaaattaatacttgctggatgaattgcaattttaggcaaatcagaactttcagcctagttaccctaccaaatttctatgtttgctcaacatggaacattatagaactttactattaagtcaggcccagggagattaagggcaggaaaaaagacagaagcttctctaactccaggggcaagtctaccctgggatagactctgtggatttatcacaagaagtctggtctgacaaacatagtgaaactatcccagaccagttcccaaggtacttctgaaagcagagctcattccccaggaagggtctatgtggaccttctgtctggtgctgaatcagatctctggtctgtaattgatgacactcaagttctctgattttagtcatattcactgttgcagcatg

SEQ ID NO: 197164 - DNA, 1000 bp, Homo Sapiens
ttgcttaggtacacatacaacagtagtgtatgtgcctagactctttatggcaacccaatctggataacaagtacctattaaaatgaagacattataattaagtactaacaatagtctctatagcagtggttcccaaaaatgttgtctgctgggggaagggggagtagattcctttagggagttgattagggcaaaactgttttcaagaaaaaactaagatgtcatttcccttttttactttgttgacatgtacacgtgatggtataaaagtaccagctgtaaaactgcatgtgttttagcacaaataatggcagtggccaaaaaaaccccacctctattaacagtcactgtttcaaccactttgtactcataatttaaaaaaaaaaaaaaaaaaacattgctaagcacagtggctcatgcttgtaatcccatctacttgagaggctgaggcaggaggatcgcttgagtttgagttcaaggctgcaatgaactatgatcacaccactgcactccaacctgggcaacagagtgagaccctgtctccaaaaaaagtggtggttagggggcagcaattttcactcatatatgtctttgacaaagcggtacatattaaatcttggcccttgtatacaggtcttttttatattctctggaacaagatgggaagtgtatgttaaagcacctcttccaagtatgatggttgtcttgatgaaaagcacttgtgacattgagatgcaagctgacttagccacttttccatgcaacattatgtctacttaaatgacaaactacagttagtctaactttgatttttgggagatcttttcttgcaaatgaacaaaatgagtctgtcacttcaagaaaagcaattaacgccaggcgcggtggctcacgcctgtaatcccagcactttgggaggccgaggcgggcagatcacctgaggtcaggagttcgagaccatcctggccaacatggtgaaaccccttctctattaaaagta

SEQ ID NO: 197165 - DNA, 1000 bp, Homo Sapiens
agtggtccaaagggtcacatgcactgacatggccctgacacatcaccggtgaaccccaaggagacaaagccagctcagaacctttaacaccaagtgcacagtcctccttaatggaaaaggctcttaaagcctggcagaaattctgcactatatttacttgcaaatctacttttgtaacattttactgttaatgagaaggaggagagttatgaaagtaaattgttagcagatggtattggaatcaggcactttgctgggggctcaatttcctccctggtagagcttataaatgtttagaaggagtagctggatgagggtaagcaaaaaaaaaaagaggcttgttcaaacctcttcagcagttgagccaagcctccggagggaccctggttgccacgaaacagagggattaagctggtaatggtatgatctcttcaaaatgtaagtgttttggtaaaaatactcaaaaaacttctgtctgcaagccctgtaccatgtgacaggttaagcaccgaaggtcatatgctaccatctgcattttcaagacattctttaattggagggagttccagagggtacgactgccacaggccctgagatggttgagtcctggaatcaggcactgatcactagagggggaaaaaagagacacagtcttgcaagtgcagagagagaacagaaaactaaactttccctcttctgatctcccgtaacactccgagcctctagaatggccctgcccacaggctgcctaatggaagaattcaccacgtgctgctcttctctgtaatacctcgcacgtggtcccgggtactgttctgggaggcacggagcagctcattcatttctgtatccctggccactctaccagtgacagagaaacatagtagaaagtgggctgtggagtcagaaaaatgtatgatcttagcagtctcttcatctctcttgagcctctatccaactaccgtgagggatttctatgcgaatcaatgagaattccgcg

SEQ ID NO: 197166 - DNA, 1000 bp, Homo Sapiens
cttccttctctgttggctttattctcagggaagctctacctgggagatggtccggatggacatgccagctccaagtttacttaccaggttaacaagcccagagggccatgtctcctctttttccatagctccaggaaagcaccaagattggcactgattagcctgcattgggtcacacactcacccctgagccaatccatgtgacagggaatccagacccagccagttggcatgaactaggttgggggaatttgttcctcaaaaggatgagaccagctttgttctcagaagaaggctgctagacaaaaacaaaagatgttccctgtgcacggtgacatgcttttgactcggggctttctctgctccctgctcccctgagcctgtcctggctttgcacttcttactctcacagtcatgttcctgctcaaccgcagacactctgagtctctgccccaggaggacaactaaagggcaaacacaccctttctagtataaggtctagctcttgactgccaatactttgatttacttccataactccctggattcctgactcctaatctagtgagaatttgagggattcagatcgctttggttttggagttaattttctgcactccttacctgtctctcatagtcaggaaatgattactccttgacctgcgaccttgactttgaacctcttgacttcttagtccctggtgtttacatacctgttaacttttactttccttgaatcccgtctcttggtttttttcctctgcctgttaccacccattctggcccttgctgtcatctgctgtgcagttgtcagttgaggactgatttctatgccttgtgtccacatcttgaattaatagtatctcttggcccaaatgatttcctaacacacatcccctgatgagtattctgggtcataccttctgcactgacaggcctccctctgtccctttctcttttggaggacaagctaaggtacaaaggaatgagccttgaattc

SEQ ID NO: 197167 - DNA, 1000 bp, Homo Sapiens
tgtgatctgattcttcccctacaccaaggcaagaaaccccaggatacagaaatccctctgtccttgtgataaggaaggaggtctaattgagccagttaacacaagccgcctatagacagcaaactaaaagagcaccctgtaacacacacccactggggcttcagctgtaaacattcacccctagacactgccatggggtcagagccccacagcctgcccgtctgtatgctcctctagaggtctgagcagctgggtactgaacaagcgagccacacccccgtcgcatgccctgtgagagggacaaaggaacctttcctgtttcactcccactaactctcctcagacccaccccatgtccaccccagcctccatgcccaacgcgccttccttgttaagaactcagctcagaagcccttcaagtgttgtttattaatgtcagagtcctcggatttgtcggtgggaccaaatgatattctcatgatgagaacaaggagggatcacaagctaaaggtgggggcagcggaaaaaacatccagggccagggaccctcaggtgctggcggccgtgagtgtggcaacctctccagacatcctcctcgtgcccttcctcctgttcgctggagcattttccgctttcccgaacgatcagagcccccgggcccaactgttcttgggttccaggcccatgaagggacccctggggtcacagcacaagggcaccagggtctaatgggagagccctggtctgagacgcaggcccgtcccacttcctgcccacacaggtctgagacacaggcccatcccgcctcctgcccacacgcggtacagcctacactcttggtccagtggctctgatccttcatgacccagtcccaccccccatctctaccacggcagcgtcatccccaaccccatcctcccaccaggactgagaaatgctcccaaacccgccactctgtccaaatgacgcttttgtgttacctgggacacagggagaattc

SEQ ID NO: 197168 - DNA, 1000 bp, Homo Sapiens
gttttcatttgtatatattggtctttttgtggggtgtgaaggttgtgatgcctttagcatattaatttattcttagtttataacacttgtttttaaaactaaaaatcagttcatgattcaacaataagaattgtggtcatcccctcttaattgacaggaagatttattttttattctttatgtgcatgagtcctaaacccaaagtgattgcattgtagattacatgtgattaaaaacttaataacgtgctcatgatatagtcgggcatggtggcacgcaccagtaatcttagctacttgggaggctgaggcaggagaatcacttgaagccaggaggcggagattgcattgagccgagatcgtgccactgtactccagcctgggcaacagagtgagactctgtctcaaaaaaaaaaaaaacacgctcatgataaaatatttacagtaaatcagatatgaaagtaaatctgcctgttgttcattcccattatcacaagtaaccgttgttgcatatcttgagtatgcttccacaaagtacacctatgcttacaagcatatagttatacatttttttctcctcttctttatactaatggcttcatactaatatacatagccttttgcaactcttttcacttaatagtatatcttggacagttaatactataaaactaccttattctttttagcattgcatggtatttcaaaatagaggtggatcatcatttatttaaccagatctctcttggtggatatttatgttgcttcttattgctattataagcaatcttgcagcagacatttttatagatctcttagtgaaattactgggtcaaaaagtataagcattaaacattttgatagatgtagcctgattaactgtcaaaaatgtatatatttactcttctactgagagtaggtgagcattcagctgtgtgtcttggacttggttggcaaagttactttgcatattaaaatataatttcaattgggtagaattc

SEQ ID NO: 197169 - DNA, 1000 bp, Homo Sapiens
cttgacaacattttttggattgatgccagattcccgaagggcatttctggatggaaagttttaaagcaataaaaatgttctccaaggacataagactatttttaaaagttttgaaagtggtactaatatcaatatagatgtttattggagacacaggtagaaaacaagaaaagcaaagtaatattttgaatatatttttcaatattttgtatttcacaattggtgagttacgcttagtaggtattttttccaggttgtataaataagaaaatgtaactaacatgttattctccctttatcctggtaatcattttttcccaacttctaatttggagaagccaacctcgcaagtttagttaattttatctctgtgttttgcccccacttttccctattctcctacaattgtcactcacatgtctttttttccatttccacaggtaccacttcagcttacctcccgatgcctgaattgtaacaaaagccttccaacagtttccttctctacattttctctcctctctggtatattcccaacacagatgtcaggataacttcccttatataattttcatcacattttctctttcagataagaaccaccagttgcttcccactgcctggtttatcagtgtgcgttcaccataatgtttgtggtaggccactaatatatgaccttgctcccagacgaccaggcctccaaatttataacttagtacagtgtcttctaaaatatctcctcttttcgtagaagccagttctctctgatcaatccctttatttggcctgctcgttctagctacctataatgcctgcttctcaagagccttatagaaatgtttctggctttatctcatacacctctgatcacttccgcaatctgtccgtgaaaattcattgcaatgttctccttggagtccatactcaattatagatgagacacttgctaagtgaatttctctttgattttgaatgagaatagaccccacacacagaattc

SEQ ID NO: 197170 - DNA, 1000 bp, Homo Sapiens
agaccagctttgatattctcatagtgcaatctctacaggacagttgaagtttggaagggatcacaagtgtagagtctgacttgtctcagcaattcaagatgggatcagtttgtccattagactcaagataggagatggctttgatctagggattcatttaagaatgctgtttcctccaccttcaggctctaggggagccagacttccagggtcatcaattctgccatattgaggccagatggactagtaggcagaatacaggctttggaacctgagagatctgaactcagtttcttcttctgtcttttaacaactctgtaatcttgggtagatcatttaacttctttgatctttggcttcctcatctgtacaacgggaataataataattactttgctgcatgcccatgagaattagagatatttgtgtaaagcatctggaacatagtaggtgctcagtaaataaatgccgtttgtgataaacacgcagactaatgagatttctccaggtacaaagtggatcactgactatagatgaagcttgagaagaagaggggtggcaggaatgggggttggacacttgcaggggaaatctgactatttatttgagagaatgaggaagagcagcagaaatggcccaagtccaagacagatctcagtttatacaggagatgtgatgggctgtgttgttcaattttgagtagcaataagtatatgggcaatgggctgtggtgaccttgctcattaagttaacatcagaccatgcgccgtcattcggtgggaaaacatttagcaagtgggaaaccaaaagggctggaagcagaggactgcaagtagagggggactggaggaaagatagtgccagtaccctgagtgagcagcagaaacctaggcagagcaggaaatcagaatggctgggagtttccagagacaactgcattgttgttgaatttcctgctgatgagctgcaggcagatggagggtctttgctggtggaattc

SEQ ID NO: 197171 - DNA, 1000 bp, Homo Sapiens
tcacttgctgagccaattgtggagaggattttgtcttccagaagttgctcagcacagtgaatgaaaatatattcatatctcagcacttagtgaaattcagaacactgttgtataatttcagaacaccaaagaaaaagagaagattctagcagggtgtagtggaatcctgtaatcctgtaatgcctgtaatcctaacactttgggaggattactttagcccaggagttagagatcagtttgggcaacctagcaagaccttatgtctacaacaaattaaaaaattagccaggtgtggtggtgcatgcctgagtagtccaagctactcaggaggctgaggcaggaggattgcttaagctcactaggtccaggctgcagtgagctatgatcctgccactgcacttcagcctgggtgacagagcgagaccctgtctctaaaataaagataaataaataaataaataaataaataaataaataagagaagattctgaaaacttccaaaaagaaacaatgggttgtatacaatcaggaatcaaaatgtcttgaggatccttaacaacattggaatcaagaagggaatggagcaatggcttaaaaattctgcaagcaaatacttcctaagaattctatacttttcagactataatcaagtgtgaagataggatgaagaaattttctctgacatatacactttcccaccaaaatataggagtaaacaaacaaacaaacaaacaagatccaacaaggaaagagatgaagagcacctgaagagtgacaatcagtagagattctaggatcacagcattgcaccaagtgtcgagcataatcaggccaaagagtaaggtgattcaagagaggttcactgaggagtatcatcaggttaaaactgatgaaactactggaacagatatctcccaaacaggggtgcaaactgagaaagagaaagatacaaattctaggcaacagggatcccaactcagaaaaaggcaaaaaagaattc

SEQ ID NO: 197172 - DNA, 1000 bp, Homo Sapiens
atgttgttgcatgtagctctagctccttttcattgctgtgtagaattccattgtataaccatactaccaatggcagtcgatggatatttaggtaatttcttatattttattattacaaataatgctgttaggagtgtttttgtatgtgctttttggaacatacatgcgtgtgtgcttgcaaagtttgtacctaggtacacaactgctggttaaagggtacattaatcttcaaatacattacataatgtctaggtgttttcctgagagggtgtagcattttatactcgtagcaatagcatgtgagagttctctctactccacatctcaaccatctttcatgttgttaatggttttaattttagccattctgatgggtatgtggcagtgtcttgttgtggctttaatctgcatttccccagtggcttctggggttgctcacttttcatttggttaaaagccatgtggatatcctctttcatgaagtgagtactctagtctctacatcacttttccattaggttgcctgtgttttccttacagattctggatacaagccctttgttagttatatgtgcagcaaatgccttttctcactctgtggtgtttctctctattgatgtttttgttgttattgttttgtcttatgaacaaaggtttttgtttgttttgagtcagagtctcgctctgttggccaggatggagtgcaatggcgcaatctcagctcgctgctggcttgagtaattctcctgcctcagcctcccaagtatctgggattacaggcatgtgccaccacgcccagctaatttttgtatttttggtagagacggggtttcaccatgttggctaggctggcctcaaactcctgacctcagataatccaaccacctcagcctcccaaagtgctgggattacaggtgtgaaccactgcacctggcctgaacaaagattcttacttttaatgcagtgagattgatcagttatgtcctttatgaaagaattc

SEQ ID NO: 197173 - DNA, 1000 bp, Homo Sapiens
gtctctttgaatagtgtttttctttttaattctatcaacttttgctttatgtatttaggggctctgttgttaggaacatatacatttataattgttacatattcattataaagcatccatctgtctctagtaatatgtcttgtcttaaagtctattaatatagccactccaactctcctatggtactgtttttatggcatttttccccatccttttactttcaacctatttttatctttaaatctaatgtgtctattgtaggtagcatatagttagatcttgcttttattagtcagtcaatctctgacttttgcatagcatttagattgttcatatttaatgtagttattgatatggttcaatttgtcttccattttactattttatttatgtcccatgtgtttcttcttcctttgtttctcctttactgtcttttgtgttaaatggatatttttgtgtgtgctgcttttattcctttgttagtttttaaaaattattacattgttttgagttttgtaaattttttagtgtttgctctagggattataatatgcatcttaatttaacaaaatctacttcaaattaatatgaatgtaattctagtaaaattataaaaatttgctccaatatagctgcattcccccctttttgttattttattattgtcatatatattatttcaaggttgtaaactcaaactcaatacaagattataattatcattttatgcaatcttacattttataaaaatgttaaaagatttatatatatacttatatatttacgtatatataatattcctttctatttacccatttatttgctttttcatgtgcttttcatttctatgtatgaatctgagttactatgtggtatcattcattttcagcctgaagcatcttctttatcatttctttaaagcaagtatactggcaatgcatttgcctgagaatttatttctcctttatttttgaagaataattttgctgaatatagaatt

SEQ ID NO: 197174 - DNA, 1000 bp, Homo Sapiens
cctaatagccagtgggcttaattaagcatcttgtcataatttttggccatagctgtttcatctttggtgaaatgctggttcatggcttttttgcacatttttccttttcttgctagttcataggggtttttgataccaatcctgattatgcatgtatatgtgtatatgtctcctcccagatttagcttgtcttctcatttgctttaaggtatctttggggaaacaaaattgttattttttaattgtatcaattattttatcacagttaatgctttttggtgtattttatttaacaattatttccctgaaggcagaaagatattaacctatgttttctccaaactgtgttaaagttgtacctctattattaatccatttagaactgattctcggttatgctgtaaggtagtgatccaactgcactttcccctcacgtgaacaaccaattttacccactctgagtaatgaatagtccctcttgcacactgatctgacatgttcccactggcataggtcagagctccacgtatgcctgcatctgcctcggggctttcttctctgtttctttggtcaatttgttgatctctgtgacaaattcctaaatatatgggattttttaaattgtatttttgttattaccctctaacttcattgcatcatgatcaaagaatgtcctctatcaaatacaggctaagtatctctaatctgaaaatccaaaatccaaaatgctcgaaaattcaaaacttttattttttatttgtttgttgtgattgttgttgttgttgttgttttgagacagggtctcgctttgtcacccaggctggagtgcagtggcacaatcttggctcactgcaacctctgcctcctgggttcaagtgattctcctgcctcagcctcccgagtagctgggaccacaggtgtgcaccaccatgcccagctaatttttctatttttagtagaaacagggttttgccatgttgactaggctagtcttgaattc

SEQ ID NO: 197175 - DNA, 1000 bp, Homo Sapiens
cccggagaagtttttgaagctctggaatgattgacattttactgcctggattttatgtgaactgctgctaatgaacacggcctgccttgatgactctgcagagggcaccattcaaacgaaccaattatgaaggattttttaacgtaaacttttaaccaggtagcctgagggcttgctgagcataaaagtacaatttagaaaacatgaggtttcctgaggttccgggaggccccggcaggatcaatgctggtgcaggagcttcggggttgagaacacggttctctgaagtccgtgggaggctccagccactgggctgcccccaaaccttccccggcaaagaggggcagagggctttttctttgggaggagctgggtgccagggcggctaagtctggagtggggcacctggaggttggggtccctggcacacactccccaggccgctaccttgctccagcccttgcactgaaatcactgattcccagcgctttgctgactcactgctttcctgcctttagccagagtgctggggttttaagtaatttaatgattcattccctccctcccttggcagttatctgctctgacaccttgtgtgtcatccatcagaagctgcgactcagctcccccaagatgacaagaaggccaggggcctctctttgtttttcctggttcctcttctctctccagccctgattctccggcaaacaggggatgctgcccaggaaaagcacttccttcgaggaacctgctaaggaccctcctgcctgcctctgttttctgcggtgttatttcttctgttgctccacacttctgggcttttcctgcaaagtcccccactcccgtcttcttcatcctccctttgccacttggtgctgtgcagtactaccccaggccctttgcttggcaaactgacattggacctggtgtggtggctcatgtctgtaaccccagcattttgggaggctgaggcgggataattgcttgagcccaggaattc

SEQ ID NO: 197176 - DNA, 1000 bp, Homo Sapiens
gcacctagaacctggtacctggtacagtatagggcagacactttccctatctgggaaaaaacaatattggctcaatctctctcttttctgtcttaacagatctctacaaggttatcactctaagaaaacagcttcagagaactgaagtcaccagtacattagcccactcatctgggtacaaagctgtctgtgcagtggatgaaagcaggtcttcagactcagaactattcagagaagttgtccttaagggctctatttcaggaaaaaagaggcattatctagaaaggtcagtggttgaagacacatgagctgagctgcataacaatcacagtagcacacatgcgggtgaccagggaaatatacacatgcacaacaaaccgaagaatacaatgttaaactcattgttttagacaacgtgggacagaagcaagatgaagtactggacagaaaacacactgcgagaaacttgatttaaaaagcgcatcaaaatttctgaaccattctgccagtaagtgtgaagatcccgtgtgccatgcccgagaagccctcattaattcaccagagggggtgatgtcatcctgtgaaaatacgccaggctgggtcaagcttgccccggccaggacggctgctgctgctgccatggctccagcccctgcccctcccatttccctggcaagtggacagaagatgatgtaactgcacagaagcaagggaaaggaaaaacaagcttctgaaccacattaaggaaaaaaaaacccaaacaaacttcctttaatttgaaagttctttgttgtcaaaagggcttggatgtccttagtcttaaaataacctttcatgttaattacaaaaaaaaaaaaaaaaaaaaaaagaccctcctatttctaactaaaatcgtattttgctggattccaaaatgaactaaggagctgaaagctttgtctttcttaggacttcctctaagcctgccaacacgagggtccatagggccttaatggaattc

SEQ ID NO: 197177 - DNA, 1000 bp, Homo Sapiens
catgagaaatccatctctataattcatccacctctcaccaggccccacctgtaacatcagggattaaaattcaatatgagatttggaggggaaatctaaactatatcatatgacgattagaaaaacagatgaggtccttcacgtctctttgaagcaattgtgaatgggagttcactcatgatttggctctctgtctgttattggtgcataagaatgcttgtgatttttgtacattgattttgtatcctgagactttgctgaagttgcttatcagcttaaggagattttgggctgagacagtggggttttctagatatacaatcatgtcatctgcaaacagggacaattttacttcctcttttcctaattgaataccctttatttccttctcctgcctaattgccctggccagaacttccaacactaggttgaataggagtggtgagagagggcatccctgtcttgtgcccgttttcaaagggaatgcttccagtttttgcccattcagtatgatattggctgtgggtttgtcatagatagctcttattattttgagatacgtcccatcaatacctaatttattgagagtttttagcatgaagggttgttgaattttgtcaaaggccttttctgcatctattgagataatgatgtggtttttgtctttggttctgtttatatgctggattacatttattgatttgcgtatattgaaccagccttgcatcccagggatgaagcccacttgatcatggtggataagcttcttgatgtgctgctggattcggtttgccagtattttattgaggatttttgcatcaatgttcatcaaggatattggtctaaaattctctttttttgttgtgtctctgcccagttttggtatcaggatgatgctggcctcataaaatgagttagggaggattccttctttttctattgattggaatagtttcagaaggaatggtaccaattcctccttctacctctggtagaattc

SEQ ID NO: 197178 - DNA, 1000 bp, Homo Sapiens
cggatcacctgaagtcgggagttcgagaccagcctgaccaacatggagaaaccccatctctactaaaaatacaaaaaaattagctgggcatggtggcgcatgcctctaatcccagctactcaggaggctgaggcaggagaatcgtttgaacctgggaggtggaggttgcagtgagccacgattgtgggattgcactccagcctggacaacaagagcaaaactccatctcaaaaaacaaaacaaaacaaaacaaaaaattcaggggaggtgtggtaagtgtatatatatataacaattcaataataaaattttagaaccaaaattcagttgaggaaaaacacacttttcaagaatgttttatatacttatttaaaaccaggcttctcatagcatcaatattaaagaaaaggatttaaatcaaatccatgaaatacatagcaagaaatgagacacactgaaacacaaacttaaaaaaaatcttgttgattggaaggaatggggaagtaaagtagcaaagtgttgaatagcatagtttttgacatcaaagagaatcaagttcaagctcccagttgaatttactattcatgtgatcttgggtgagtccagggatcatcacctactagaaggaataataatgcctacagcacagagttgtcatattaaagaagataattcctgtagtaaagtatttaatagcatagtgcccaacacacagtcaactaataatattaataaatatcaataaatattaacttagccacaaaaggtccaatgtgttagttaaactacaacagctgacacagaaagcaggagccttttatttacagaactccctatctctaattcctaaagataaaacttagaaaaggctggttgatctttatcttcttgagtgttttctctcaataagggctgtagtgatcacaggccaccacacagtgaagggcattcagcatcaaaagtgtaaccagaggagagcccaggcaaacaacctgaattc

SEQ ID NO: 197179 - DNA, 1000 bp, Homo Sapiens
tgagccgagatcacaccattgtgttccagcttgggcgacagtaaggctctgcttcaaaaaataaaaaaattatacatatatattctctctctctctctccccaccttcctccctcccctccctccctctctcccttgcacacatgcatgcacatacattacatacagacacacattgatatatgtaagcaattgaattctaggttgctgatgcaactccttcatgtacaaagtatgcatgaaagaaggaatgaaggctgaggtgggcagatcacttgaggttaggagatccagaccagcctggccaacatggtcaaactctgtctttaataaaaacacacaaaaaagttagtcgggtgtggtggcacatgcctgtaatcccagctacatgggaggctgaggcaggagagttgcttaaaaacccaggaggcggaggttacagtgagcctagatcatgccactgcactccagcctggacgacagagcaagactccaccttaaataagaggaattaataattatattgcaagatcaagttgggataaagtaatgcttgtggctttaaggatgaaagcttgcgtgccagtgtagaaaccatattcccagactatagtgaggaatactgagcctgctagggtaagctttcttttatttagtgggccctagaaatgtccagcttctagaaaggtagctatttaaggaatgatatttcaacaggaaagtctttaaatgcatacatcaatacagaattctgggatcatgccagtcagtagatataaatccagccatactggttggaagtggcaaatggtatatgcatgagctgaaatatttctgtttcttcttggacattttaggttctcaactataaagacattttataactatttaaaacattaggatttcagccatactaatattttattttacaaaactagttttattttacaaaactagtagtgatttccagataacagtctgaattttttactgaagaattc

SEQ ID NO: 197180 - DNA, 1000 bp, Homo Sapiens
ataccatgtattaaaccagacattaaagagattttcaaaaattaaaataaaaccaatgccactcttctcataaaagtgttcgttttagaaagtgttttttaaaaataacgttgtatttacacaaaatgagtatattgctgtcattttaaaatagatgactttaaaatttctcagttttaatctcttacacaataaatatgaatagattctaagagcaaaatgtgtgaaaactgctggatgatttgaggcacaggcgcaccatgtgcctgccattccaggccatcttctctagattccagtgttgtatctccaatctcagcaccacaacattctggtcaaatcctctgtcgctggcactttcatctaccaatggtggcctcaatgctataaacacttctgcctttctcctttgctcatacctttccctctgcccaaagtgtgtcctgccaatccacgcagacatagctcaagctttctcttgtctctcttaatcactccaattctacccctcacagagcaaatggtattggtcattgaaatggtttggctctgtgtcccaacccaaatctcatgtcaaattataattttcagtgttgggggagggacctggtgggaggtgattggatcatagaggcggatttcccgcttgctgctcttgtgatagtagaggagttctcccaagatccagttgtttaaaagtgtgcagcacttcccccttcgcgctctctttttccctccaccatgtaaagaaggtgcttgcttccccttcacccttctgccatgactgtaagcttcctgaggcctcccaaagcgtgctttctatacagtctgtggaactgtgagtcaattaaaccttttttcttcataaaatacccagtttcagatagttttctaaagcagtgtgagaatggactaatatagtcctgtaccttgaattagtatcttaatattttttcttgcttctccaaccatacattaaggcttttaagtagaggaattc

SEQ ID NO: 197181 - DNA, 1000 bp, Homo Sapiens
ccccacccctccacccccagctcagcttgggtcttcaagctctaaataacatgcttatgatagaattcaaaccaaagatagttaacagatttcaaggagctagttagttgctcaagtctctggatccacaagaattacatcttgggtgctgaaggaacttgcagatatgatttcagaaatggtgtgggaaatggaaaggtcctgccaaagtgaaaatgagcaactttctcagttttagtttttttaatgtaggtcccagaaattcttttttttttttttttttttttttttgagatggagtctcactctgttgcccaggctggagtgcggtggcgcaacctcagctcgctgcaacctccacctcctgggttcaagagatcctcctgcctcagcctcgagtagctgggattacaggtgcccgccaacacgccccgctaatttttttgtgtttttagtacagacagggtttcaccatgcttgccaggctgggtttgaactcctgacctcaagtgatccgcccgcctcagcctcccaaagtgctaggattacagaagtgagccaccgcgcccagccaggtcccagaaattctaacaaatttacctaactttaccaacaagttaattagaaactggcatagtttcactaaaacactgtttgtttgtacaataaaataatctactatacactagttatgagatacaaatctcgagccaggcgtggtggctcacgcctgttatcccagcattttggaaggccgaggcaggtggatcacttgaggtcaggggttcgagaccagcctgggaaaatggtgacaccccctctctactaaaattacaaaaaaattagccaggtgtggtgacatgtgtctgtattcccagctactcaaaaggcttgaggcaggagaatcgctggaacccaggaggcggaggctgctgtgaaccgagatcatgtcactgcattccagcctgggtgacgagtgagaccctgtctcaaaaaaaag

SEQ ID NO: 197182 - DNA, 1000 bp, Homo Sapiens
ccatctgtgcccagaaacagataggcggggggctgggcactgccgtccttgggcttgccctcctggacctctcgctgtccttggaggaggggaagtgcagggctgctcttggaggcatcggtacctgtgcagcaatgacccaagctgctggaccgtctgtccagacgctggccaggagaagggcatccccggccagctcgtgtgcgatcctgcatggccctaggcccaaggtgagctcatgggatgagtcaagcctcctgctgagcctggcagctgagtaagaggacatgctgtgctctcacacctccctggccccaccgcggcatgcccacctttgtcttcccttctggggtttggcttgttgtcactgacaacatggggcagcccttttgcacacggcatccctggagccacgtgttaactgtgagttaataaatgggtgttgttttaagccactaaatctgtggtcattttttatatagaagtagaagatgaatacataccataagtctaaatattcaaaagtcataagtcaagcttacaaactgttaataaaatatgttctatccatctaccttgatttttttttaaaataatgactgtgaaggccagggtcaaaatcataattctctgacaactaggagttctgtgccaggaggtagctgcctggggagggctggcccctggatcccagtccctcgctggtggtctggtccttttaccttctcattcctggcttcatcctgcaccagaagttgggggacagaagagcctggagaagccaaattctaaccgctctccttcaaacagctatcccttgggcccagggtgtgacttgctttggggaaattaacctggagaagagtttcagggctgtatgggcaggaataccatggtcctccatgggcaatgcatggtctagaagggaggctgtggttctggtgacatccactcggacccacagattcttcattctatgggggtgaccagagcagaattc

SEQ ID NO: 197183 - DNA, 1000 bp, Homo Sapiens
tccttgtgctggattttagtttagctggccctccttgtttgcacagctctccgatgaattgaaaatataattttggccttttatttatcttatcctagctgctgcagaagaatattttgcctgctggaacctgctgtatctactcaagagtggaagttttcacaggtaacttctacatatcaagtaacacaggatcaaatgaaaacctagcaacacttggtttctgcctgtatcagacaggtgaaattgcaagcagttatacaagtagtgtactaacttctcataaagcctactcaaggagggtattgttattgtgtgcgttttacagatggctatcctaaggctgatagtagttgtaaaatatagtctaagttcatatctatatgaaacagagtatctgggtttctgtcctggccatcagacttgaagatcatttcttagaaacaattatattatcaaaactgaaaagaaatacaatccaaggttggagtcttattttagcatctattaatcttaagccattaagtaatcaaaaataaattaaaaagaaaaaaatatattcaaatatcacatgtagagaagtctagtttcttcagtggaaaacacatgttttttaagtgctcaaggaatatttacaaaattgcttaatatttttaattaaataattaatatttaaagacttaatagacccaaaaggataacttacttatagacctaagcatgagagatcagtttgataaatattgaaaatgggctaaaaagcatgagtgggaaaataaggacttttcaacctacatgacctccctgaaatttattcttcattttgaaaattataggacaataatttctcccatccatgtggtgtgtgtgtgggcgggcggggggggtgggttgtggtgctttgtacgtgttaattggcttgttaccaataaggttatacagaggtattagcagcaaccagattttaaagagtactggccttcctggggttcccaaaaaa

SEQ ID NO: 197184 - DNA, 1000 bp, Homo Sapiens
ggaagaatgtatttcccatgtcctgttgccatgggatagagggtgagagacaccagactgtggggtagggggttggcagagggcagagggctctttcctagggtgcctagtcctagcagggcacctgttagatctccgctgctgctacctgcatgggcagcctccctggagggaatagtagataccagacccacaggatggagagcatttccctggaccctctttctgattgtcttctgccactggatggagtttcaggaggtggcagcctgtggtgtttttctgtgagttctgaggtacctaactagtctgcctttctatatagcattgggctgggattggagctacagttatgaaatcatgatttcatacacacacacacatgtgcacatacgtgcagtgaaagggcctagaaacaaggacacactggtagtaataagtgcacataccactcaggtcttggtttccaaataccattctcctctaaaaggaaccagggctccttggaaaaaatggctgattccaaggctagcacaaggaaaatcaagaaaagcctggagcattataaatttataaagacatgtcaaagagacatccagcttaggaacattcaaaacggctaggcccagaactgatatttgtgtataacatatggtttttctcatatagatagactattccagcatcatttagtgaaaagtgacctgcaagacaatcttgctgaaattgctttgaatctgaacatcagctggggagaactgcattacatgaaacttcatacacataaatgtgttttatttttctatttatgtcttagaattattaaaataaattttcatacaaatactatatgtattttgttagattcattcagatcctatgcatttttcttcctaatacataaggcatatttttaaaaaatatgttttgtttgttgccaaagaataaaaatgcaattgatttttgaatattaaacatatctagccatggtattgaattc

SEQ ID NO: 197185 - DNA, 1000 bp, Homo Sapiens
gtgaactacatcaacaggctctcttgccttctggcttctggtgaattcagccccaacaacaaaagatttgagggatggagaagaataagattgtgataagtattccaccggttgatgctctgtggtgttgccttgagatggttgcgtttctgaacctaagatcagagcgtctttcaaagcagctctctccacattattccctctttccacctttgataaacactcactccctttgccattcaggcctaggaatattgatagcactgctgttagtagtagtgtggtacttcactattgtttgtggtttctctatgctgtctccacacttttgtaactagcctcttatccttgaattattttgatttgtgaggatcatctgtttcctaatgggcccttgactaaataaaggctgggagtttttgatccagctggcatcccctttctaagcctgaagattatagatttggtattaataaagtagataaagagtttatcctccttgtagttccttgtgaatggagcatctgatagtgaacttttatgcacacaattttattaaagatttatttgctataaagtgaaaacatacctggtgaaggcggaaaatatcagagaatagtaaatcagtgaatcaaaagatctgtatttgatccagataatgtctgagatctgttctgctctccaatttgataacgttcactctgaagtatcaatgtttatcatcatctagattgagaggtgtttgcacaatctcacatctgcccaggttgtgagatcattggctattctctgttatgttagcagcttccatcctaggcagagtctcataaacagataaatgatacttgaggacagaatattagatttcacagattcaagctctcattctttgcttaaagaaagttttgatttataggtaaacatacacaatcagatgacactgattttttgctctcaaatatttggtgaaatgggcagtggcatatctgacagagaattc

SEQ ID NO: 197186 - DNA, 1000 bp, Homo Sapiens
ccccctgccagctcagtccttctctacctctctcctactgacaggaagaacctccaccccactcttctctttcctttctccatccccaggctattctgccctaccccgggagagtgggaggggcagggactttggggctagagattgaggctgtgggctgggcggtggctcatgcctgtagtctcagcattttggaaggctgaggcaggaggatcacttgaggccaggagttcgagaccagcctgggcaacatggtgaaaccccatctctacacaaaatacaaagaaaaaattagtagatgtagtagcatgcacctgtagtcccagttaatcaagaggctgaggtgacaggatcatttgagcctgggaggtcaaagctgcagtgagccataatcatgctaccacattccagcctgggtgacagagtgagaccctctctcaaaaaaataaaaataaaaatagaaagaatgaggctgggtcacaacctcagctcagtggctgagaagctgggtgaccttaggcaaattactatggccctctgagcctgttttctcccctggaaatgaggatgattttagtccccacttcccagggctgtattaaatggcaccacgcatgttaacacagtgtccagcgtagagccaaccctccaagtgccatctttgtgttatgatcctgtatacgctgcattacccacaaatacaaaagaaggttggtctcccctgccagctggctggttcctcaagggagcacgtgtcctcttgatatctttatatcctcagccttgctatatacttcctgttgtggaccgggtgatgaatatgttttatgtattcattcagcatttaacaggtatttatgggtgacagtgttttaggggataaaaacatataagggaaaacaaacactccgcacatatttatttatgttttagagtcagggtccggctctattgcccaggctgcagaggcacaatcagagctcactgcagtcttgaattc

SEQ ID NO: 197187 - DNA, 1000 bp, Homo Sapiens
ttaaaaatgtaccaccatcaacagataaaacaagaactataaataaaaaaaaatactgttgataagccttgaaatcagttgaataaaccagtctaacaatgactatgaatttggtcataaagctgcctctgcctatactctatacataagaacttagtgtcatatatagcagtaaaaatggtaatttaataataataatataggccgagcgcagtgactcacgcctgcaatcccagcactttggcagaccaaggcaggctgatcactgcaggtcaggagttcgagaccagcgtggccaatgtggcaaaaacccatctctattaaaaatacaaaaattagccaggcattgtggtgcatgcctgtaatcccagctacttgggaggcagaggcaggagaatcacttgaacctgggtgacaaagtgagactctgtctcaaaaaattaattgattaataatataaacagccaaatgtagtggcacatgcctatagtcccagctacttgggaggccgaggtgggaggatcacatcgggtggggactggggagggcacagcttgcaagactgcgccaccgcactccagcctgggtgacagagtgagatcctgtctcaaaataaatatataaaattaataataatagctggacgcggtggctcacgcctgtaatcccagcactttgggaggccgaggtgggtggatcacaaggtcaggggttcgagaccagcctgaccaacatggtgaaacaccatctctactaaaaatgcaaaaattagctgggcatggtggcgggcacctgtaatcccagctactcaggaggctgaggtaggagaattgcttgaccctgggaggcggaggttgcagtgagctgagatcacgccactgcacttcagtctgggcaacagagcaagactctgtctcaaaaaaaaaaaaattaataataatataaacacaccagactttactaataaaggccagacttagtttagctatgtgctgaattc

SEQ ID NO: 197188 - DNA, 1000 bp, Homo Sapiens
gcaacctccgcctcccagggtcaagcgattctcctgcctcagcctcctgagtagctgggattacaggcgtgcaccaccacgcccagctaatttttgtatgtttaatagagacagggtttcaccatgttggtcaggttgatctcgactcctgacctcgtgatccacccacctcaacctcccaaagtgctgggattacaggtttgagccaccacgcctggtctacatgctttttgaaggaaatcaccagcctggccaactgggatccccacagtcatcagccacacgagctgagccatcactgctgctgacccgtcttgcctggagtctcctgccttgctctacccagaactcccctttcctaaagctcctcgtctacaccgtgtcactgcttctctcttcacataccttcttgccaatgttagctccagcaacatgaccctctttctttacagagataccattcaaatattttaattattttcataatcatatgtaataatattaaatatatttttaagctaaaaattgctacatgtcccgtcacaacaacacagctgattttacttttatattttttcatctctgttgaaattggcccatatttcttactgtgaatatgtttatattgttaaaatcttacatactattacataagttttttgggttccattttttgtttgtttgttttcttttgttttttttgtgtgtgtttttggagacagaatttctgtcaccctggctggagtgcagtggtgcaatcttggctcactgcaacctccacctcctgggttcaagcagttcttgtgcttcggcctcccaagtagttgagattacaggtgcacaccaccacgcccagcgaagttttgtatttttagtagggatagagttttgccatgttggccaggctggtctcaaactcctggcctcaagtcagctgcccaccttggcctcccaaagtgctgggattacaggcatgagccaccacttctgctttgaattc

SEQ ID NO: 197189 - DNA, 1000 bp, Homo Sapiens
agtcccttcttttcgctccccatcctcccctttcctccatgcctgtaaaataggatagagctaatacctccttcctacgattgtttttaagattaaatgaattcgtacccataaagctcttcaaccgtgcctagcatacagtaagtgctcacttagtgttagctgctgctgttgttgttattattaggtcacctcatgggtttctattgcctttgtcttcatattttccgatcccaagtctttgagtttagacagggaaattttatgtcttcagagagcagaagcaaatatacttttctttctatctcctaaaggatttcctcaagaccagcctcataatctgctgggctcagtgcatgatgaaaatgcagggccccttgtttgtaaattagtacaaatttcaaaatggggtcagaacagcatcaaaaccaagtgtggtcccttttgagagtggagccctgtgccatcccacctgttacaccccatgaagctggccccaggtttctcctcctcctccaaagctttggctttacagcatctgaatggacaagaaccagagcagcgctgcacactctccaccgcttccctttgaagtcagatcacacaggttcacaaaatgagaaagacctctgccttgaggcaaaggaggaaaaagtgatactgccctcacttgtgttttgtcctctcacaaccactggatatctctcactaccatctttgataatggtaaccatgacaacagataggagtggagggcttgctttaggtctctcatcttactaatcatgttttgctcccagacactttatagatcgcaaagacaattaacgtttcatggtaagcatagatgtcccattcattgtttcttttcattccagattggtcagcccccatgtcccgtgatcaggagagtgagttgagagttggtctctgccctctaagtggtggccactgaataccaagggagagtctggcctttgctgggctcggtgtggaattc

SEQ ID NO: 197190 - DNA, 1000 bp, Homo Sapiens
gacctcatattccagaaatttttgccctgatggaacactctgggagataaacttgaactcctgtgtctactccatacagaaggaaaagcctctgtctttatcttcttatcctttatacaggataaaggctatatcctgggtgccaggcaactcctcagagtccctttatctgaacaggtaaagtggggacaaccatttcttgaaagtgcaatcaggctgggcgtggtggctcacacctgtaatcccagcactttgagaggccaaggcaggtggatcacgtgaggtcaggagtttgagaccagcctggccaacatggtgaaaccctgtctctactaaaaatacaaaaattagctgggcatggtggcacacacctgtagtccccagtacttggggctgaggtaggagaatcgcttgaacccgggaggcagaggttgcagtgagccgagatcgtgccactgcactccagcctgggctacaaagtgagactcagtctcaaaaaaaaaaaaaagtgcaatcatcagttcttcattttaagaaacttattatatatgtatattttgagacagggtctagctctattgcccaggctggagtgcactggcataatcatgggtcactgcagcctcaatctcccaggctcgagcagtcttcccacctcagcctcccaagtagctgggactacaggcatatgccaccacacccagctaattttattattattattattattattattaataattgtagagatgaggtctcactatattgtccaggctggtcttgaacttctgggctaaagtaatcctgtctcggcctcccaaagtgctgggagtacaggcatgagccaccatgcccggtcttaaaaacttactttcaacaggcatattgtcaccttaacccagtaatcggtattggcctcatcaataccaggacaaccagacattatgtacagcctaatatgaggcagtaggaagtccacagcattacctgtgaagaattc

SEQ ID NO: 197191 - DNA, 1000 bp, Homo Sapiens
ataaataaaacagttgaccaaatggaataacactgttttcactcaaagacaaattattcttctaaatactcttgattttcttgagaccctgtctctaataagaataagaataataaaatcagctaggtgaagcggcccgtgcctgtaatcccagcactttgggaggctgaggtgggcagatcacctgaggtcaggagtgcagccagcctggccaacatggtgaaacctttctatctctactaaaaatacaaaaattagctgggcatggtggtgggtacctataattccagatattcgggagactgaggcaggagaatcccttgaacccaggaggcagagattgcagtgagccgaaatcacgccgttgtactccagcctggcgacaagagcgagaatccagctcccccccccaaaaaaagtcttgattttcttttgtataacttgtaaaagtgagtctttccagataatgttttaaagaatggcagtatcttggaataactaatttctgatgagtaacatcttcacagtaaatactactcggctaagtggaaagaaatataattttgtcttaaaataattatagattattgttttaaactgtcttcaaatgtgaaactgataccaagtagttagttttgaaagcatttgtgtactgtttctgggagttgtaagaatcatatcaattactcatattattttagttgatcatccacacttgctgaggggttagagcttccttgggaacttcataggctggttaacctgtttgttttggccttatgtgaggtctggtccctaaggatcatctcgatgtagagctttgggcaaacttgttgacaccaccacaaagtaaattctacttgcaaaacacaaataccagtggatttagggttttgtagaccaataatagtatgatattacatgtacaataaaaacataaaataatcttttaaagcaaactgggggaggggagagggccttaaagggcaaggaggaattc

SEQ ID NO: 197192 - DNA, 1000 bp, Homo Sapiens
attaactaggaaacttatttgttctgctctgatcatctttacgctaacagcagttgatttctggagcccatttagacatacgtgtgaggtgtctattgcatgattggaaatcactttcctctctgctcaccttgcttgaggcctcagagatgtgattggttactgctcccatctcctagtggtccagtctggttttgagggcagttccaaggtggagccctcagatcttgaggcagcagtcatttcttttaccactgtcttttcttggtctgatggtagcatcaaggtagattaaaaaatgtgggctttattaaccacaggtttgactctgagaatcacagaaacacttgccttaatgactttataatttcagccttccactaaaatagaacagtttgaaagtgaattttaagaattgttttagaaatttcagaaaccaaagtagtagtattttttgttactaaggagaacatacccctttctgcatattgccagcttagtattcttaaacttcacaaacagtaggagtaaaaaacattttcttctttctttcagctggtttaccatgcattgcaattgttagcatatacagcccttggtattttaattatgagactaaaactcttcttgacaccacacatgtgtgttatggcatcactgatctgctcaagacaggtaacatgttatgttggagtatagccactgtgataattttagcctttattattgagtggccctaaaataatgaattacaaagtcttttaagtgattatagttaaagctcttcatggttttgtacttatctttcttaaagggtaagggccaaagctgatcattttctatctttctaaagatttaaaatagttgttggtgtacaacaaataccgatttagtacagactgagttcatgagtgattactgcaggtgctgatagaaagcagagcttaattgtacaaataataacttttttttgttttgacattcacatcacaaagaattc

SEQ ID NO: 197193 - DNA, 1000 bp, Homo Sapiens
tttgaaataaatcttataaaagaatgtctcatcctccttttatacaggtaccacctctttactttcttaaaaaatccaaaagctaaaagagactctaatgtaccataccttattgggatagctggtggcttccttcccaaatcagcttcaaagaggaagccttccacagcaataaataaaaattgtgcaaatgtcacaatgttcccacatcctggatgcttcctgtatagtgaataataaaagagggggtgaaggcacaaaaactgagatacagaacactaaaatgcattctaattagagggccagaataacagcgtggatggatttcaattacccactgtcctttatctcaatgttcatagcctttggatcacatatacttagcattgatctcacagagaagaatgtcaagctttcttatttaactcttccttgcgtgtatcaggccatgagtgagaattactgtgacgacacacttgttcccagaactacgatacagctttcctagtaaactgcaggaaattggtcatatgttcttattgggatctttgcttcaccagaaaggtctttaatcaggatcccagtcagcttaggtagcaaagcccagggacagaaatatgctcaggtctcctggaatgtttacatatccctcctgaccaggaatcaccaagactgctgtcaaacgaaaaatggacccagtgttgatgataggaacattactttaaatggtgcccagcaacggggcaaaattggttcttgggatgggggagatatcttactctttttataacaataaagtacaaatatacatacagtacctgaaccagtacacactatatctatggcaggggagggattaagaaaacaacgtctaaaaagtattctggaggaggcataatgaacaaaagactgaaaaacactgccgtagtctactattctctacagcccttaacccagtgttttgaatatattaggcactcaaaaaatgtttgtggaattc

SEQ ID NO: 197194 - DNA, 1000 bp, Homo Sapiens
gggcttcctctcccagtccattgaatcaaatgttaatctcctctggcaatgccttcacaggcacacccagaaacaatactttaccagccatctatgcatcctttaatccaatcaagttgacacctaatattaaccatcacaggtctaaacatctaaaagaggtaaaaacatcttctgagttcttcattttatagatgaaataactcacttgctcaggatcacacaggtagctagtgatacggctggaacttgaattcaggtcatctggtttccagtcctggtttttttctcattgtattagtccgttctcacactgctggaaagaactacctgagactgggtaatttgtgaagaaaagaggtttaattgtctcatacttccacaggcttaacaggaagcatgattgggaaatcttaggaaatttacagtcatggtggaaggtgaagaagaagaaagcaccttcttcacatggcagcaggagagagagaaagagtgaggggggaagtgtcacacactttaaaccatcagatctcatgagaacgcactcactatcgggagaacagcaagggggaaactgcccccgtgatccaatcacctcccaccaggttcctcccccaacactggggattacaattcaacatgagatttgagtggggacacagagccaaaccatatcactcctgtacactaaactgctgtgctgaacttagattatggtttatgttgatctcaaatcaaatcgttagttacaaaatatttaaagtttctataattattataatctgcatagaaaaacaatagctgtaagaaataaaaaactctggaagaacctgagaagacacctgagcaaatattggtaaaatagctcaacgcactgcaggtatctggtaacttacttatccctggaagggagataaaaaaaatgccaggcaagaataaagcttcccatcttttgaggcacaaagattgaaaacaaagttggttcttctaagtggaattc

SEQ ID NO: 197195 - DNA, 1000 bp, Homo Sapiens
tacaggcacctgccaccatgccggctaatttctttttgtattttttagtagagacagggtttcactgtgttagctgggatggtctcaatctcctaacctcgtgatctgcccacctcggcctcccaaagtgttgggattacaggcgtgagccaccacccccagccaatagcaagtagtttcaagagatgaatacatagttcaaggggaaagtagaatgtgatttgtgttttacttcatgtctgtcttagcctgataatttaaaagaattggcattcccgatataagagtttttttcttttcccaatttgtgtcttagagctgataaagcagtgaaaattctttttgcctttatttccacctgtttatgtgaatctaggttcattacatattttgacaccagactgagaagtttttttgatggtgggatgtgatggctcatgcctgtgatctcagcaactttgggaggctgaggtgggaggactgcttgagcccatgaggtcaagggtgcagttggccatgatcaccatccagcctggtggcagagtgaaactgtttgaaaaaacaaaacaaaacaaaaaacaaaaaaagaaaaagaaatgtattactcacattttgaagcttttggggagagcaggtcaggtgcctcagccagtccaaaaatggcttcgacaaagcaaaagcaagtggccctgggattactgcagttaggggtggaacctgggtgagcattcctgcacaagggcccaggttttgtgtggcttgaaattccgcctacagtgccaagggaaggagtgcatggggtttctattggcttattcacatgtggggcagagggaaccgtggaagtggagcttgaaagttttcagtggtagaacaccaaaaatgcagtcaggttcttcattatatggggtcacctctcaaatccagcccagttttctgataccaagagattcgatgcaataatatcccgtccattaaccaatggatggttatggaattc

SEQ ID NO: 197196 - DNA, 1000 bp, Homo Sapiens
tcagctctgacacacaggcctgctggagaaaccctccaagcgttggtggatcttgcaccttctgtgtgcctgctgtctaactactgatgatgtggtcactgcctgatggggaactgcatcagctctgtgaattcttgcaatctattgcctgggaaagtgtcttgcacattaaacaggtagcccataaatggatgaacgggggtgggggcagaagggtggaggttggagggattcatctaataagggaaacaagcagaacagcctacaaaggcttaagaacgcagagtcctgctctgcagcccaagcccctccgtgggatgaagtgccatcagatatttggtgccatggagagttgatgaagaaagccttccaaaaacaatgaaattgttttttaatttattttaacttttagagacgagatctcactatgttgcccaggctggtttcgaactcctgggctcaagagatcttcccaccctggcctcgaaaagtgctggcatcacaggcatgagccaccacacgtggccaagagcaaaagttttaaagcaggacactatggcctgatggacaggagagactagggtccctcctccctcccaggggcctggcttcatctcagaaaaaccgagtccctcttgctccacacccgcatccttagcttcagccctggcagttgtgttgagcagatgctaaggagatggggacattttaccccctccgcagccgccccagagggtctcaaacccagggctgatttagggttgccctgacatggccaaccctattctatgtccaagtgtcattcatggctaaagcaggccagggccccaaggcaaccaagctcctctctcctctgcccgctcccacacaccctcctctgccccagtgttcctatcattacgtcctgggcattgaaacccgggccattcttggaccagggctgtgggctgaatgagggcaggaagaacagggtcaatgggaaaggacagcccagaaaaga

SEQ ID NO: 197197 - DNA, 1000 bp, Homo Sapiens
tgtaccatgcatttcctgaaatattataaaccaccagttgtaattttgaagatagttgttggaacaagctatattttaaaattaaaaacagtaatgattagattgaatggtactcccaccccaccccacatgatagcagttccccatactggaggctctcggcctcccatgccctgaaggagacaatctcttgctgaaggctcttactttgaaaattcaaacccatttcagagataaaaaagtattttaccatatgtctattgccacccaatttcatgtaacaaggtggacccagtataaacactccctaataaattcatattgtgacctattagcttctctccagagtcaaaccttagtccaatcatttcatatgaaattagcagaaaataatggtagctttacttccttgagttttacttcttctccatctctcaggaaggtaaatttgaaaggactaagaaaaacataaatgataacaaaggcagatgaaatgctgaaatgtcaacctccaagatggaaagctgacatttgaaagtggttgtcactgtccacgtggggactggctgcctacaacctcagaacctcaggggtctctccagtaccaggtgaccatacaagaaactcaacaacttggatacattctaaactgaaacttttctggagacatcaacaagaatacatttgacggttaccccacctccattccgtgacactgttttgaacccaggaagatgcttccataaaatccccctccgttcctccacaaagcaaaagtcctcctgccttggcctcctaaattgcggggattacaggcatgagcctgtaaacccacataaacggatacctccaacattaagaattaatttagtagaagataaaaactaagacccatcacccgagttttaattcttatcaaatgcaaccacggttttgtgcggagcctgaaagtcaggcagtcaggcaacaaagcttcaacatcttgcccatcagagaattc

SEQ ID NO: 197198 - DNA, 1000 bp, Homo Sapiens
ccaggcagtagaacgagaggccccagccgggcacagtggctcatgcctgtaatcccagcactttgggaagccgaggtgggcagatcacctgaggagttcaagaccagtctggccaacatggtgaaaccctgtctctactaaaaaaaaaaatacaaaaattagctgggcgtggtggcaggcacctgtagtcccagctactcgggaggctgaggcaggagaatgacttgaacccaggaggcagaagttgcagtgagctgagatcacgccattgcactccagcccgggcaacaagagcaaaactccatctcaaaaaaaagaaaagaaaagaaggtatggccccagcctggggaggcatacagcttagatggagcagtaatgtccacaaagtagaataaccaaacacacaagacaactagggaaaaagggcgtgtagcacagcataaagacagagctaactcaatgagcgccactttcacagggaagataaatactgcacttatcctgggggaggcttccgggttgaacaatcagtatacccaagccagttgtgtacaaaggtcaggaaagagaccctggccttggactcagaaagtgccagggttatgtaagaggctggctgatgaggggaaactgtagtcggagcagcagctggagcccacatgcacctaccatgagcaggtccctgccctctggctccagattgggcacaatctcttccagtcccttcctggtccacttagggaagctgcccttatagtcaggcagctgggtgaccccgggccatgtgtcttcgctgggtgtccccagcatacgaaagatacgaaagagctggtcaatctcagagtcaccaggaaacagggcttttcgagtcacctgaaatggggaagaagagaaggtgtggggtccgccactttgttatacagaatccaataccagataagtggccagacccagggagaggcctgtcaagatatcttttccatgactgtgcaaagaattc

SEQ ID NO: 197199 - DNA, 1000 bp, Homo Sapiens
tttcaggcaaaatctaaactactataatcatgattagaatcacctccctccttgaaattaagccaggtgggaggcaactgtgaatcacttaggccctctctttctctgtctataattcctcagagtcattcccaaagccccatttctaagcaggccttcaaaaacccaccccattcattctcacagatttcttaggtgttatattagtcagggttctccaggcaaacaaaaccaacaagaggacatgtgtgtgagtgtgtgtgtgtgtgtgtgtgtgtgtctgtgtgtgtaaagatatttattataaggaattgactaatgtgattatggagcctgagaaatcccaagatgtgcaaccaacagattggagacccagaagagctggtggtgtaagtttcagttcaaaagttggcgaaatcaagccctaagaagagccaatgtttccatttgagcctgaaggaaaggaaagactgatagtccagctcaaggcagtaagtcaggaaaagttcccttttactcacagaaggttcagcctttttattctattcaggctttcaactgattgcatgaggccaatccacatcagggagggtaatctcctttactgaaactgatgattccagggttaattttacccaaaaatcatcctcacagacacacccaaaataatgcttgacaaaatatctgggcaccttatagctcagtcaagttgatacaaaattaacaatcacaagtgaaatcacctttgattcattctgtaaaaattccaaagttttggcagttccaagactggccaggaagcgagaaaacaagggagaagtttttccattcatctatctaattaagtcataaggttggaggaaagacttcctcccactaacttccattataactatgcaggtacagagcaaaaaatacccaggatacatttatgacagcatatacaataatatataggtgaacactgataaaaacacaaaatgacagagttatagaattc

SEQ ID NO: 197200 - DNA, 1000 bp, Homo Sapiens
gttgctctttccccagagccctggtactccctctgtcaagtttccacttatctttctggcctatccaggaacccttctctgagttctcaaggactggctaggtgtcctgcctcacagtcacctacaacctgcattttcctcatcataactttgaaattgctactttgcctatcttcgcatgggctcttcctccaactacactgtgagagccttaaatccagaaaccatgtctttttttttttttttcaaagagagtcttagatgaatttgccaggactaaaatacagagttccttgttccctgtatatagcccactatagaaattcaatggtttttgaatgaaaggataaatgagtgaatgaagggacttcggatctggctggggcagagactgtggagctagaaacttaggttgctttccctttcttcccttcccatccctcctcttccaaaacccaagtctgacaggctgtgaagcacctctatatacgactgatggagctttaattgttcacccaatctttagaaaagatccttttaattcagcactgtgcccgaagtccaggcacttagctctggatgcccgactgcagaaaataccaacagccagtagaaaaactgcaccaatgctgggggtcctattttaattattctagaaaaattcactttttgctcagtgtttggtttcatttggggctgacctcctttcttgcaggccctagattcgtgaaatctatattaatcagcagaataatattagccaattccttacctcgtttttccttcccctcatttggacagctagcctggtttgtactccttatctcagagatgagatgtgataataagaggcagagaaataaaagtatgttcctggcttttggattcagaagttgcccttatgggaaggaaaaaacaaacaaatgtggcatagataaaatatttggaagaaaagataacaagagtagaaaagagtttcttagggggaggaagtgaattc

SEQ ID NO: 197201 - DNA, 1000 bp, Homo Sapiens
tgatgcaggcttgtttccagccggtatttaatacagctagagaattgctctttatgaaaatagtaacaactatgatacaagtttatcatgccagaattacagcaaggtaaacttgtatcacggtagcacccctgagcagttttttaataaactaaaaggaagattattgactggtttgtttcaaaaatgcatttctgtggtgtgtgtgatgtgtttcctgtgtgtccctgcacaacataaaactctactcttagccttgttgtgaactgaatgtaatgagtgatcagacatatgagctcttcaaccgaaattacatggttttgaatccaagctgtattaaatttactttccagagccaaagtctatgagccaatacatatcagttatgaatctaggattagaagaagttggaaagtggagcaagaaattaattaaaataaggctgcaaaaatacagaggggaaaacaaaaagatgtttttaaatgctaagtcttaaatactgcctatagaaacaagctctatggactgcccagcgtaagccctgtataatgtcaataaaaccagacagacaggatggcaccatgcagatcacggatttgtcccatctagctccttggactaggtgagtgcctgaggacctgctactctgtctaaaaatcaaagcccagtagtggtgggggacattatcatggatttgccacaagtcacttatttgggctttagattaaatctttttgtttttgttttgttttaccatgaatgtcttgctcagtactcttactcctgggatccttaatacagacttcagaaggacatggacatcttgggggaagtaaatgtgtaaaatttgcaagtttagggggaattaatatataaatattaatgacacagcaataattaagacaacagagcaacgttgttcagaacacagaatgagactctgtttgggagaaagcaaggaaagagaacacaagtctttgcctggtaatccatagaattc

SEQ ID NO: 197202 - DNA, 1000 bp, Homo Sapiens
ggctagcctgctgagagtcgtggctctgaagctgggcagagaggctggctttccttccgaggcctgctcagttccgcccaaaatatatctgttggctcacgtagctcctcaccaggctagaccaggcccggctgtgcacaggcccccgcaggatctgcacagcgagctgggtggtggcgaggacataatttaaaactgttgcctagtgtcttcctaagccgtgcccgactctgagaaaaaaaaaatcatcattcaggcaacagctggaaggcttggctgaatggtgtgtgcttcaatgtggaaggtcacaggatactgatctaagggctgagaagtcttgctcacccaactgttgacactcagtaaacggggcaggcggggctggggtgagcatctgaggaagaaggcccccaccccacccccagccagagaaagaataggaagcgacttctattcagggttcacaggggtccctagcccccctctgccccctgctaaagccaccaagccctttccttgcctctaagttaccttgtattataacaggattaaagtatatttagctcctctattagcataatttagcccccattttggcctacttaaggcttccggctggctttgatcagttttgcgttctactggtcaacaggagagcccagcgggctgcgggggagggggaaaggggaaagggagggaggagagagaaggagtcggactgtgaaattatcctgatgcttcttctcttattcccaatattctgtgttttttcttaaatggcccagtttacacccagagtgggcaggagggagaggggggaggtggcaggaaccaataataattaggtcttagttggaagaggagagaaagggttgagcatctcctaagaaaaggagggggggaccctataatttctacagtgtctgcctttttattgcttgcatttgcatataaattaaatccatattgtagctttaaggcaagcctgggcttagaattc

SEQ ID NO: 197203 - DNA, 1000 bp, Homo Sapiens
atattccggactttaaaattcaatcccggtgctgtgacttataggaactgcatttcacatttatacttgatgtttatatccatgctgaaatttgccagaaagtcattacatactcaaagataacaagaaaaattgactgatgctttccgatagtaattaattaaccataaaaattcaaatagcatacatccacccagaaagtgtttgagcagaaaagaaaatttcagtactcacataatattcaacatcttcaaagtcctttattaacaaaattgaaacacaccatactgtgttcttttgaggtcaagctctaaataccaaaaatgccggtcactcttgtatgttgagtcagcaaactgcttccaactgtgaccagtgcttctataggaccgagcatcaatgaaggccaggggccagggagcttgtgggggtttacggtctcaagtgcaaagcagcctggacatggtaaaggacttgtttcacccatcccttaaatctttgatacgtgctttgcccaaagaggactttcataaatcctgggtatgggggtggggatggaggtaatactcattggagctttgtttctataaaaaccaccagacaagaaactgtcttgcaggggatctaaaaataaaagcacctcttggaacggcagggttaggggaaccagagtgtgaacataactttccctagtggggttttcatttcttccaccaatgtcacggtccacactgattgtctgacaaaattcttcagcagcagacaacatctgcacatttatgccttgcctgagctgcagcgatttcttttccagcctgttatttgtgtctagaattgagtgaggaatcctggatcttaagacagagtagggcaaggcacagttagagctcaggggctgtaatatttctttccttccttatgaacaaaaatctgtctttcctgttggctgaatcgagatggttactgtcattggaatcataaaaaaaggacgattgaattc

SEQ ID NO: 197204 - DNA, 1000 bp, Homo Sapiens
gaaactgaagcctcctgctagcagccaagtgggtgacccatgttaggtgtgaatcttccaacctcagtcaagccttcagataactcagcctcagctgacatcttgactgcaaccacatgagaaattctcaactggaacctcccagctaagtcacccctaaattcctgcctcactgaaaatgaaataagaaatacttgtgttattatgaatcacgttgaggtaatcagctgcatagcatagagaactagcacagcagggttcaaacagaagcttgtctgacccctgggtgatgccatcagtttcccacaggcccttctgtcttccgccttttctcttatcaataataaatggagaatacattaatacttaaaaatcaaaatgcaaatgttataaaatgttcaggcagaaatttaaaggagagaaaaaagattctagcaaccaccgaaagcaaacatggcacgaacagagggcacgggctggggccgaaagtgttcaagccataaactgtaatgagtgcaaactctaggcccagcacggagcaggcaggggcttggccctggggaggtacagacatacaaaaaccccagcacctggcctcagggaccctgcaggctagccagagagagtctcttttttctggtgtgactggtggtcacgtacaagttgagcaaaagcaggaaaggaggagactgacgggtcctgggaacacagcaggggacatacattcaaaatggggacatttggtccttttcattctggaagtgtccagttatcaaccttaagagacagcgtaacctgcgcctagctgtgggtgagcagcaccctgaggtgtggccatggctggaacccactgggagctgcccgagtcaccttaaggtgcccgtgttcaaacagtgttgagttaatatcttctgagctcttgtttgcaaggcactgtgtcaggcattgcagactccacccttaagaggtcaaaagtgtgagacaaacacacaaagaattc

SEQ ID NO: 197205 - DNA, 1000 bp, Homo Sapiens
agtaccccacaaatacagaggaacaactgtaatgagttcctagtaaactaggctgaagtattataactgtacacaaaataatttaaggcagaatgattaaataatatatagcagtatgtataagaagtgaagataattgaaaattaaattgataggaaagacatgacaaatataatgaaatcaatggaaaagttaaaactttagcaagatgtacaagcaaggattgggtagatttcatccgaaagacataatttctaatgacaaagtactttaatagtctagcctaatattttattgtatcttaaaacttccctctggctcattctggtctgatcacaccagctttcttatggcttcttttatctgccaagaattatgctctggtctaattgacctccccaaatttgtatattaaaattctcaccaccaaggtgataatattaaaaaatgggcaatttggtaggtgactggatcatgggagtggagcccttatgaaaggtgccagagagacccctccctcttccaccatgtgaggttagactgagaaatacatctctgtggtttataagctgctcagtctatggcattttgttatagcagcccatgctaatgaatacagatgaccgtgagtctgcagaccttcctaggaaattattgagtccttcattgaatactaaactgtgaatacatgagagaaaataactgaagcctggggtaaaatgccaacacaaagtgtttgaagaacaattctcaaagctcagaaagctctgcaaatattattgttgccacaaaccaaagtagaagacagggtaatatatgagctattaggtagaatctttggaagaatcctgcttttgtgatggaactcactcattcctaaacctaaagcaactctacatcttctctaagaaaattttatagcaatctctaaaagcatcaaactgattccaaataatttaactgtgtttgagaacaaaatacaaatatacaaaaggaattc

SEQ ID NO: 197206 - DNA, 1000 bp, Homo Sapiens
ctgctgctgccagctcaggtgtgacctgtaatctggattaggtgggcccagggcaacctcttatcacgtccctcctggaaagcctgactgctgtatacatttctagggctgcagatagggcttggccaatagattacctcaaaatcaagaagaggaagttataaacatgtgattagacttattaatttttcctggctgggcatttggtggaattcgtttgttaatgtttaataaatcattatggatcataactgtagtagaatctcaggcttttgatgttacttagaatcttggaggagaccacgaaggacacacagacgtggctgcacatgtgcagagatcttgtaatgtaactatggcttttctctgcaccatgtgtgaaataagctgccgctggcgttggggcgccggcctgggttccaacacagtccgctggctgcctcggtatttgccgtgcctctctgggcctcagtttttcctctcttaaataaagaggggactggattagatgatttctaaagtattttccagctttcagatgctatgacttactcttctctttttccttttaaaatttctttttcctgtaaatcaccaagatagttgtcctgaacagtttagatgttatgaatccattaggaatcctgataagaaagtgttgaccctctttctagaaaaatgcgtgtactaacaaaatttttgcttttggttgcaggaggctcaggaactgtggattctagtttaagaaacttgtagcaaggaaatcaggggagttgaaagtctcagaagccaacccctatgttgtgttctggccacctctgtgcagctcattcctcaatctaggagaaatttttctaccttgccccaggaaagagctgctaacttgttttcggggagtgtgggggggtctttggtattggtgttccatttctcttctcaggtaccctctcccaagtctgtcccttctttatgataaacacagtggcctgctttagaattc

SEQ ID NO: 197207 - DNA, 1000 bp, Homo Sapiens
ggtgcccactcctgctacattgccttctctctcccagcctgcacatacaccctcatggggagttccctagaatcagttgatggagaaagagaagacttggcttaggcctggtttacagatggctctgcatgatatgcaggtcccacctggaagtggacagttccaccactatagccccttcctaagatatccctgaaggacagtggtgaagagaaatcctcctggtgggcagaactttaagcaatgtacctggctgcatattttgcttggaaggagaaatcgcaagacatgtaattatatacttattcatgggctatagccaatgattttaccggatggtcagggacttaaaaggaacatgatttgcaagttggtgacaatggcatctgggaaagaggtatgtagatagacctctctgaatgcacaaaaaatgtaaatatatttgtatctcatgtgaatgctcatcagaaagtgacctcagcagaggaggattttaatagtcaagtggataggatgacccattttgtggatactagtcagtctattttcccagccatcctattcatgacccaataaggcatgaacaaagtggccatggtggcagggatgtaggttatccctggggtcagcaaacatgactttcactaaggccaatcaagctacagctactgctgagtgtccaatctgccaacagcagagaccaatactgagtccacaatataagcaccgttccctggtgtggtcagacagctacctggaggccagttgatatcactgcatcacttccaccatggaagagcttacatgtgttcttattggaatagacactgactctggatatgggttttccttccctgcacacaatgcttccaccaaaaaggcttatggagtgccttatctatcatcattgtattccatacatcatagcttctggttgaagaactcacttcacagcaactaatgtgcagtgatgggcccagggcccacggtcatggaattc

SEQ ID NO: 197208 - DNA, 1000 bp, Homo Sapiens
tacagaaaaaccaggacatttggtctccagcctctccctttctcctttaaaacaaatgaaagagggagtaatgggagatactccatactttcaatataaaacctgcaggaaagccatgccctaaaagttttgagggcccatctaaaactttaatttgggaagactgtcttaactcacatgcagtaatattaaaaaataactcatatggtttagtaatagactgggcaacaaagagctatttaaaacacaattgctcctctggcagaagggaatgcctggaggctatttattttatttcttatcaggagaatgagaatcatcattctactttgcataggaggttcagctcgttctatcccttaaaatgggaagataaaggcattaccccccccaccctcccgaggcctcatatgatattccccattctgagcccagaacacccagaactttggaaattggctattgccacgtctggactgtgagtatgggaaggggaaactattctgtctgttgtccccactacccttcccctctctcagtgtcaacgtagatccacacattctgctttacttatctccaacctgactgttcccatacagagttgtgttaagtctccttacatgctgttagtggaaaatatcaaaatttggatgaacaatcaaactgtccaatgtattaattgtcatttatacacttgtattaactcccattttcactccaggaaaagtgtaatgttggttcgagctcgagaaggaatctggattctggtaactttgcccagaccttgggaatcctccccctcgatacactgaattaatgaagtgttacagcaaattctaaaaagatctaagagatttgttttcactttaatcgctgtgatcatgggcctaattacagtcactgcaatggccaccactgccagaatggcgttacatcaatctattcaaacagctcattttgttaatgattggcaagccaattccacctaaatgaggaattc

SEQ ID NO: 197209 - DNA, 1000 bp, Homo Sapiens
attctatgaggccagtattaccttgataccaaagctaaacaaagacactccaaaaaaaaacaaaaaacaaaaacaaaaaaaactgcaaaccattacccctaataaacattggtacaaacaaatcttcaacaaaataccagcaaaaagaattcaatagcacataaaaggattatactaacatggctatatgggatttattcctgcaatgcaaggatggctcaatgtataaaagtcaatcaatataatatatcgcattaacagaataaagtaaaaaaaaaaaaacctcattatctcaattgatgcagtaaaagcatttgacacatttcaacactttttaatgatagaaacagtcaaccaactacaaataaaaaataactacctcaacataataaaaaccacatatgaaaatcgcatagctaaaattgtactcaatggtgaaagactgaagctctttctctaagatcagaaagaagacaaggatgcccactattgtcacttctattctatactggaagtcttagccagagaaattaggcaagaaaaaatatataaataaaaagcatctaaattagaaaggaagaagtgaagttatctctgtttatagatgacataatctgatatttagaaaaccctaaagattccaccaaaagagtcagttagaaaagtgaagttttaggatacaaaatcaatgaacaaaactcagctagatttctatacactaacaatgaacaattagaaaaggaaattaagaaaataattccatttatgatagtatcaaaaataataaaatacttaggaataagcttatccaaggaggcaaaatacttgtacactgaaaactacaaaacattgctgaaagaagacaccaatgaatggaaaggcatcctgtgttcacagatcagaagagttaacactattaagatatcagtactattaaaagtaatctatagattcaatacaatccctatcaaaatcctaatgacattttttttagaaatag

SEQ ID NO: 197210 - DNA, 1000 bp, Homo Sapiens
atctgtgcaccccatggtcccttcaagttgacacatgaaattacccatcactccagccttcagccgtgggtttgcgtcatgcatagatttctagaactccctctttgcatagtgccctcctttcttttttctgccccatttctctgccatttcagctgtctcagcctgatctctgcctcctcatctctgcctcttcagcccagcgggatctccctactgtgctcagactccagctctctgcactgcagttgggaaacgatccccaggtagaggaactaggtgactttggggctcatctcacaagtttccttacacttagggatcagtcttttgcttcctgttgtcctctgcctgaaagtagttgccaagttgtactgttttatatatccaccacagcatgagttaaaccaaagtctggatcagcagactgccagatttttttttaacaaatttattaatcaatacattttgtccatgtctacagttgtttatggtgggaggactaacctgcagctggaaggattaattttcagctgctttatagtattttattatatgaattataccagtttgcccatccttgtgttgatagacattacccatgaagtgtgttcacattgtctgtgatacaaataatgcttcagtgactatctacccagaatgggattgcgggtttataggatacatacttcttcacccttattttttactagttattgccaaattgctttccaaattgtactgtttcatatatccacaacggcatgagttctgtttgtttcacatccatgctaagacttgatcttgttaaattaatttttctagtgtataaatgagtgcaaaatattgttagtctttcctagattactagtgaggttaaatgtatatgtgtatgtacgtatatgcacatatgtatatattattaggtatttgtgtttcccattcgatagcttttttatatcaattgtcctttttaaaaattgggtcatctttttgttat

SEQ ID NO: 197211 - DNA, 1000 bp, Homo Sapiens
gaggctttgtagcgctgaaggccagcaggcattactttagctctgttagttgaagttctcgaaaatagccaaaagatggcactagacacgaatgattccacctggcttcgaggccaccactgctttcagggacgccgccaaagccagagcctgcttgagcttcctgccttttcctgagcttctgaagcacataatccttactagaacatgatgttaatgaggatgccaaaaacaggaaaggaagcagaatgaaagcaagccaacaaacagaacaatgccgagcgaagaaacaaaatggttttgctcgtgtgtcagaggatgggcgggctcccacagcaatgagagacctttagggcagcttgcttgctctgcccccagctccatccagaagggtcttattcaggcactgtgggtgtaggctagatggtggtggcttaagttttcattctgcatctcctaagaaagaccttgcaaagtcccaagccttggaggcatctttgttagggctacccttacaccctttgtgggtctggccttgggaccatggccttggcctgtctgctgcatcctacatcccatctgtccagccatgtgcagccctcacacagccccagggctcctctcccatcttctcgaggggccttctgccaccaggcagagtctggtcattccagggtaattccccacaagagtcagggctggggaccctctggtgtactggactccacagcccctgggcatgaaggtgacagtggtggggtcagcactgatgtaactgtcatagcattggcacttcgtaagtacctaacgaataaaccaaacagcaaacaaaactcctttgtctggatgggacaaaggagtttcagaaagttacagggagggctggtgttgtgaggagaaactcaggccattgcctttattccctcctgaccaccagggctgatatggtttggccgtgtccccacccaaatctcagcttgaattgtatctcccagaattc

SEQ ID NO: 197212 - DNA, 1000 bp, Homo Sapiens
acatttgaagtgctggctgtggctgcccctggagtgtagactgctgctcagggtctttcaaaaacaccaactaagtttaactcacacgctcacaaaatcacagcagcactgaggcgattacagccagcatagctgcctgcccgtggcccctgctgggctccgcgctctcgccccacgatggccacctctctgcaaggcacgcaagactcctcaccttctgctttgggggtccctctgacccaagttggcccccaccttgtccagtcaagccactgacccagtgtgttttctggccagtcagatactcccacccttgggtctctgcagccctcgcctctgggcaaaggcctgtgctggggttaccagcagggtcggattccaacctattctggaaggttgaaggggtgggatataaaagaaagtggaggtggaggtagggatgggctgaggggccaaaagatgtactggggaagggggcatttcttggggtcctccaacgtcctggctcacgagcttccccctccaagggagcaacctgaggtgcacagagtggccttgtgacaaggacacagaacccacctccaccttggcttgggactcctgcagcctatgcagccagctcatccgtcacccaccctcttctcctggtatctgccactctggaacttccctctacctctgggctctgccttcagccagggttggggacagcaggtaggcagatcccatcgcagacaggcctgccttcctcagggcctcgcttaaatccacaggaatctgctggggctctgccctctggctggggcaggtggaactggccagattggcggtggggggaccactgtgcttgccatagggactggcccagctgccccacaggggagcacattggagtaacaggggaggctgacccgagcctggcccggctccacactccccacccccaccccaccatcagggactcgcatttaattgtcattcatttcccctctctgaattc

SEQ ID NO: 197213 - DNA, 1000 bp, Homo Sapiens
ggtatccccttcctcccgcaccactccatgtgcgtccctccagaagctgtgtgctcaatggaagaggatgaccatccccgatagaggacgatcggtcttcagtcaagagtataagagtagctgcgctcccctgctagaacctccaaacgagctttcagaatgttatttttctgtcttatgtccaacccctcattaaaatgttcatagaaaaaacatattttagaagttgaagcacaaccaaggaaacatgagcctggctttcctccctctcacttctgcgcactgggtccgcaagggctacagaaatgttttcctggctgaggaagggagggtgcacccttctgctttttttttcctggctgcagtctattcccagaacacattccatcacatggttcccagaactcagattgtgcggtggccacgtcatcattggctggggctcacagtcacagcagcagaggcctccctaaacctccctctcctctagccccacccgctgtcccctgctcctcatgcccccatgctgtgtcccctggcctcacttccgttgccatgttttcataatcctctcaggctctgggcagcagcgctgcccacagtaggaccagatcatgtaaggaaaatactgcaggctcatcttggggctgcactggggacctgagaacaccttatcctactgtacctgcggcacctcatctgacaccagcttctctgctttgcccaaggtccctaggccctgaatgcttactttttaaggtcagcctggctcaggatatgctagtttggctgcagagggccctactaagagccaggactgaggagcaaggcccaaaaaactcctctgggccacatcttccccgagggcatccccgcagggaggccgtgtgctgctgagccctttgctaggagtgggtagtcagtgtctcccacatgacgatcttgcttcattcagatagctttcgtagctcactgcttttctgagtcacttcctgtgagg

SEQ ID NO: 197214 - DNA, 1000 bp, Homo Sapiens
tgacttttaaaatataattatcttcctaagaaaaagatctataaacacacatataaacacataagtatgcctgtatatgtgtgcttgcgtgtatatatatgtatatatatatatataaatacatacataatttaacagaataaaatgcttaagtttaacaaaatacataactgctatggtttgtctcctcaaaaactcacattgaaatttaattgccattgcaaatgtattgagaggtcagacctttaggaggtgattaggtcaggtggataccacccttgtgaatggattaagactgttattgcaggagtgagttagttatcaaggaagtaggtagttataaaaagaataagtttggccccgattttttctctgtcttctaagcacaactcctcttcatgtgatgccttctgccacataatgatgcagcaagaaggcccttaccagatgccagcatcctgctctcagatttctcagccttcagaactatgggtcaaataaatctctattctttacaatttacccagtgtgtagtattattattgcaccagaataaagagagtaactatataaaatgttttttaaaattaagatgtcaccattcttgtgaatgagtagctgacaatatcttaaagaagactgccaaatagatctgtccaaaaaaactgtaaatatatacaaaaacatatatttaagagacgcgtggagaaagttaattgaaaatactttaacaagcacgctatgacttcagataacactcattccttgctactaaccgctattgaattttatacgttggctttttttcttagtgttttgagaccatttaactaggcagaagcatgggttcagttcagtagtaccacacatactagccatatgaataaacaaatacgtccttttaatgctcctggtctattatttctgctacaaaatgagattaacagtaatacttgcaaggtactttagaactaaaagtcatacagaatattctaagctt

SEQ ID NO: 197215 - DNA, 1000 bp, Homo Sapiens
tatctccttttaagaaactgaaaatagcaattttaaagttattaaatttaaaaattttaaatacagagattagaatagtcatataccacaaaataggatagggatagtattatattgaaaaatgtaaggaattagagtcaaacaccctaaatttgtatcctatttctggcattatccacatgtcaattcctgaaaataataaataatctgaattttaattacctcatgagtaaaatgggtttgatagtagtatctgcactaactatatcactgaattattgttagattcaaattacaacttctgttaacagaaactgattgtacatatattgaaggttttggggtgtaactacaagaaaactgaattgaaaaacttatgcttcaatgttattactctttcagatgtagggtagatataaaatcaaaacacaaaataaatataattaacacactatacatacataagatatagagttacttcagaaaatgtttattttagataagcatgatgtagatgcttatgtcagttaacatttttcttataaaaaaaccagggcttgtttaattcacccagatacccattatccaatgggtacagcattctttctctgaaagtggtaggtaccaagggatatattatgagaaaggaatgtatgttttttttctgttaccaatttaagagtacagagatgcatatacaacttagtttccttttactgaaacctagatgttttcaacctccacacaattatggaaacaacaagttgctgatgtatttcatcaatataaaaccattagtaattcttgaatttgtcctttcaggcttaaaagaatgcatctgaatacaaagtttccagatttgttggatggtaccattaaccctgtatctataactgtatttgtctttttttccagcaattttcctttcaatcttaatattcacaaatcaaaatctattaagtaaatttaagtaaatctcttctcctatccttgaaagctt

SEQ ID NO: 197216 - DNA, 1000 bp, Homo Sapiens
ctccttccccttttactcttatcaactaggacagaaactaagaattttggcttcaagtggctaaaagactgatgggggaaaaaagaaaatagaaaaaaataacagagagactgacgctctaggcagttacaagtccaagaaaaaagacagaaacttttaactttaagtattgagccaaaaccaggtctagcaaacataatgctggccctagattatttattaatttatgaagaaacttctagatatgggggtgacaaaaggaaattaaatccattatatatgcatatattttaatgtaaatatataatagataaattatgtatacataatatagaaccaaattgaaacagttttacaatttggtttgactggaaattcaaaatccatatattaatttttgtagtaaaagtttatgtaaaaaaagacaaaaaggacactgattggcttttgttcctctacaatataggttctaacttaacttctaacattagcggccggacgcggtggctcacgcccgtaatcccagcactttaggaggccgaagtgggcagatcacctgaggtcaagagttcgagatcagcctggccaacatggtgaaaccccatctctactaaaagtacagaaattaaccgggcgtgatgctgggtgcctgtaatcccagctactcaggaggctgaggcaggacaattgcttgaacctgggaggtggaggttgcagtgagccgagattgtgctactgcactccagctgcacgaattgacaaaatttatggacttcatagtgggattcaaattatagttatacatagggatctcattaaatttacttactctactcccataatcttgagaagctaactaaaattttgaaaaatgagtagacctcactttatctgtagcgtcgcctaaatttcccagtcatacagtcattgctctaaaatattctatgttggacatagattctgtgacacaattaataacaaattaaaattaaagtaagct

SEQ ID NO: 197217 - DNA, 1000 bp, Homo Sapiens
cctccaagaagcagatgccacagtgggattagacacgcaagagatttatggttaaaacacttgagaggaaaaatgaagacacctggggagactaggagagccatgagaccacaacagtggtcttacatctgtgaaggggtgagggaaggaaggagagccgggataggaagagtccagactgcagtaaagctgtaaggaagctttggccaggttgatgaagagtccccaagccaaatcaccagccagaggagttcaacatctcgcaagagtgggtctgcctcacccattggctgggatccatccatgggtggacacagtggtggattcagaatacaggatctgggtgcaatgagactctctgcaacaggaaattgggtggtgcattttcatagccaccacagccccctatccctcagataaagtaggattgatatctgtaaggttggaactacatgatgtgacgctatgcacctagcacaatggcctgcccacagtaagtgcccaatcggtatttgttggctaagcaagtgagcagcctagggcttcagactcctagcccagtgctcttcccaccacacccgtcttcatggttgaaggggaagaggcaactattgttctttggatctcagcagggggtgagggggcctcctgccacctcttgccattcacctgtcctaagggacagagacagtccatgacatacagcaaaggtttcatgtccttttctaggcgctttcaaggtatggtccctggaccacctgcacctgagtcacctggaatgggggtaaaatctggttcctggacctgtcggttcaatttctccaggagtagggccagggagtcctttaccaactcctcacctccactcccccaccaccaacccaggactctgcatactctacaatactacttacagcagtgctttaaggattacattctgtggactgagtcttccttcattgagaggctcaaggtacttccaacagcccagggcaagctt

SEQ ID NO: 197218 - DNA, 1000 bp, Homo Sapiens
actccgcctgggagcgcgttgggggccgttggagtccagcatggcgcggaccccgggggcgctgctgctggcgcctctgctactcctgcagctggcgacccctgccctggtctaccaggactatcagtacttagggcagcagggcgaaggtgacagctgggagcagctgaggctgcagcatctaaagggtaacctcaggcggcggggatgacgatgcccaaaggctccccgttgccctacttctcctgctggctgcaaagggaccttcctcggcgggctgcaaatctccacccagctccgcactggaggcgtccccttgggctggttacttttctctaaggctcggtttactcttggatatattgaaatagatactgctttaaagcagctcccaggggaagagagggtgtgggcaggacactgaagctgtcactcggggataggtgccaggaagggcagagacagagaaagaagggggcgggcaagcttgggaaatcagagagggtccgattgcagaagacccgtgaccagtgcagcgagaacgacaagcgaaagtcccatatggaaagatttggggaaagaatgtccaaggaagagggaatagcaaatgccaaggtgaaaagtcctgaaggagaaatggaaagaggtcggtgaggtgtggcagagacatgggtgtgggagggtaggaggtgtcagaccttggtgagcggtgagttgggataagatcggagttgggataagatctgtctcataggggaaaggggcagattcagtaaagagccctttaaagtgatcacagtggccggcgcggtagctcacgcctataatcctagcactttgggaggctgaggtgggaggatcccttggtctcggagaccagaccagcctggcccacacagcaagactccatctctacaaaaaatattttaaaattagcctgacttgatggcccagcactttgggaggccgaggcgggaggactgcttgagcccaggaattc

SEQ ID NO: 197219 - DNA, 1000 bp, Homo Sapiens
taaaagccacaggaaatatagtcaattgtatcatgagtatcaaaatacagctcagttatataagcccatgaccttaacctaagattgacagggatgctaataaaaatctgtaagctcatgtttcaagtcctactgaacataaatttgcaaaatttatttacagtcatatgtggctgaaaaaccaatatccaatcctgcttatttttcaccatggccagtcaaaatctaacctgaagatgtaattaattcagaaatcctgcttaccaattaagcaaataaggataaattattacttacaaaatatgaatttgacattcacgagtagattagcatttaggacaaatgtaacaggatgaaagccttcaccttcaagaagcaaaatgatctgctcatgagatggatgttcttctactacaggcactaaatgatgaaagtaatatattaatcaggataaatatcctgttaaatatgcttacaaatgaaaaaaacaaatttataaatccaccagtggcctgatcaaatttaaaaacagaagcaaacatgtttcataaaatcaacaccccagacaactgttatatactaatttttacctctttccatgtaaagttactaatactgtaatgcatatattacatatagtatatttatactgttgattaaacagcaaatgtatataattttagcaccttcaaagtttgaagacaaacgtttttataaagtagattccagtttggtaagcactccatttataatttttgatatttacaagtctatgaaagtagtctagagccacgttatatatgctgcttgttaccacatgcctatatcagctacttgctaccatatgcctatatcagtgaccaggtagcaaaaaaaaaaagatcttgacaatcaatagaaagatatgcatggcatacaaagaacagggcttactatatttttgccactacagctaggttcatgtaatggctcccactgacagaacagaaatccaaagctt

SEQ ID NO: 197220 - DNA, 1000 bp, Homo Sapiens
ccctcaccttgccctggggtttcaccccagctgcggtgaacactagcaacttctccaagttctcccagccggggtttgacttccgcatacgcttcttcggcagctcagcatctctcttctcatcttgggacaccagaggggtgccaggcggagtatctggctgggattctggtgtgcgggtctcttcccagcgcagggtcagtgggtggaggccattgaccaaatacagtgtgtcccccacccccagagagccctccaaccccggcttcaactcctgggtcccggtagttgaggggttaactcccagctgcagaaagagagggaggagctgggactggctccgcccccaccgggagcttcctccaatcaaatacccagcggaaaaatcagcccttctccaccactatcagacccttaggccccacctcttcactttggaacgggctttggaacggttacaggttttcagccttgtccgaatcttttttttttttttttttttttttcccctggagatataggcttgttttgtcgcccaggctggagtgcagtggtgcaatcttggctcattgaaacctgtgcctcctgggttcaaacgattctcctgcctcagctacccgagtagctgggattacaggcacccgccaccatgccccgctaatttttgtatttttagtagagatggggtttcgccatgttggccaggctggtcacaaactcctgatctcgggtgatccgcccgcctagcctcccaaagtgctgggattacaggcgtgagccaccgcgcctggccgccttgtccaatttctaaggtcttggacaggtacccaccccactgaaacaggcaacacttctttctttactggacacatccccttctctcccagccatattttttcttttctttttttgagacaggttctcgctctgtcacccaggctgaagtacagtgtggtgatcactgctcactacacccttgacctactgggctcaagggatc

SEQ ID NO: 197221 - DNA, 1000 bp, Homo Sapiens
cttaattttttagaaaaaaaacttttaaaatcatgattggattaaagaagggcacatgaaaatccatggaattgaatcaaatcactaaagagaaaatatataaacttaaatgaatttattacgataacaaagaagattgaaaatagtttgaataatttctaattcaggaaggtagaaaaagaagcaaaaaagagaaatcttttaggaaatgtaagaataaaatgttttaaattaaaaattaataaaattgaaaacaaaaaaattttttgatcataaaagtaaaaatgttggttttctaaaaaggccacaggctaggcaagcatttggaccctgactcagcaatagagggagagatttacaaaagtaatcatgaaaaacaaaaaaaagaaaccctacacgcgtctaaagggaaacaatattaagagaatactgcgaataactatacataaacaaaatttaaatatataaaagcatttgctttaaaattataaatgaccaagattgccctagaaggaaaaaaaaattaacagcacaaaatttaagtagctgtcaaagacctactccttaaaaataaagaaacaaacaaaacaaagcaacaaacaaacaaagcaacaacaacaaaaaaacacaaggccctgtcagtattcaggtcactattcttttcccttcaaaaatgcacataaatttcacattctgcttcataatagaaacagctgattaaacagtttgattagatgtaaaacgatcttttaaacgatttaatttatatacaattagtcatgctttagaaagatgtattgaagttattctggagtcctgcatagcctcagcaaaacaccaattctcctccatgaacatgaagacccagcatgattatcatgacgtatagaagatattggggactttcagcccctcaagccttgctaagtcctcactaagtttcctagaagggcattctggtcttcacaccacaaagtatgcgtgccaggcatgtgaattc

SEQ ID NO: 197222 - DNA, 1000 bp, Homo Sapiens
agtatttcaaaggatatgtgagatattaaaggtttggtttgaggggtgaagatataatgcacactttatctcagtacgttttggtgtgtcttatccagggattgtcgatcagtcacaacaagcataccaagaagcttttgaaatcagcaaaaaggaaatgcaaccaacacatcctatcagactgggtctggcccttaacttctctgtgttctattatgagattctgaactccccagagaaagcctgctctcttgcaaagacagtatgtattttacctgttacgtagaaatttagcagtctttattatttgagcactgaaatgtaatgtactatttttaaatcgtaggcttttgatgaagccattgctgaacttgatacattaagtgaagagtcatacaaagacagcacgctaataatgcaattactgagagacaacttgacagtaagtacataacagcatcattagtgatgaatgtggttgaagaggttatgttttactctagggaatttttttttttattaaatacatcttttaaaattttttctcaacacatttcataggctctcataaatatatctcagctactattaaagtcctatgaaggaaaattacagaaactgaaatattagactgagaactaaaaaatacacacattgatgagttacctgtcttgttaaaatttgttagtatcaaaagtgtgctgagactctacatgttttagttcctttaagaatgattttcttgcccatcaagttgcctccatattggtaaagataatggtagggaattaataacttgagttacaaaatctcaggtatctacagaatccaagtggaagtctattttgcctagcttcttattttaaatgacttaatatgaaaggtcgtgattgtccttgggatactgcagatgtataaaaagaaacagtgtcactatcacaccaggaacatcaacataattccctaataatgtttgaatatctaaataatacttgaattc

SEQ ID NO: 197223 - DNA, 1000 bp, Homo Sapiens
ctccttcaaaaaccataatctctgtacaatttggaacactccagttaattagagatctttaaactgtgccaagatacagaaaggaccaagctttaaaaaatattgtcttccacatggattggtctaaaagcagtattttaacctaagctctgaaatacagttttacagtaactattatcttagggcaaatgaaaattttgaaaaaatgcattttgactatgtgacatattattcaatttcagagcttcataatatgctctcagctatgaatctaataatatcctagaacttacatataaatttaaaatcaaatttaaaccacttatgttttctttgtaaagatttgtgtgtatgtatgtgtgcatgtggtgtgtattctggcaatagtggtattaaatttctgaagagaataaaaatgtgttaaaaatattatataagtaatccgctcagaatttttcaaaatatattagaaaatagaacctctatcttctaattaaatattgagaattagccattactgcccaaataaaagttgtgaaaatagttaaataccaaactacaagtaagatagttatggaggtaatatatttactatttatttttatttatttattttttttgagatggggttttgttcttgttgcccaggctggagtgcaatggcgcgatctcggctcactgcaacccccgcttcccaggttcaagtgattctcctgcctcagcctcctgagtagctgggattacaggtgtccgctaccatgcccggctaattttttgtatttttattagagatgcggtttcaccatgttggccaggctggtctcgaactcctgacctcaggtcatccacctgccttggcctcccaaagtgctgggattacaggcgtggccaccgcgcccagccatacatttactatttaaacagttcttaaaaacatataagacaacctttgaaaatcaaagaaattattaaacaaatgccatgagtagatacagaattc

SEQ ID NO: 197224 - DNA, 1000 bp, Homo Sapiens
tttatgattccacttatatggagttttagaacaagcaaaactaatctatgatgaaaaaatgagaaaagtggttctctggaatggagggttggagttgacatgggaattttcccatgatggaaaagttacgtatcttaatagggctgtgggttacacaggtgtttgcactgtcaaaactcatagaactgtaacatgtaatatctctgcatttcactatacatataatatgcatcattttaaaaaattaaaacaaaattagaaatagtttcttataaaaaatattaaatcagaatccttctagaaatgaaaatgattgccatgttaagaatgtaagatttcaggtgattttgttttagggcattctctgttcattcattcattcattcagaaactattgagtaactattatgtgtctgccactactctaggtgttttgaacatataaatgagcaaaccagacataaatgcctgcttttaagatgctaataatctataaagtaagtagagagaaagaaaatacaaaaaaaagtaagtaaacaagacagtgtttaaaaatgtgagaagtgctatgagagaaagagaaaaagcctaccatcctattatattgctatatcgtgcttcagctgcctgataccattttattaaagtcatggatatgcctatatttatggattagcatttttgcctttattaattgattgatcatacattagaagcattccaggaatagaggggtgtgtgtgtggcctgtgtgtgtgtgtttcaaagtgctgggttaccatagttgctttattcttaagcttttgcaatatttaatgcttgaataaatatctatcaggatatcacctggagcgtgtggaaagtttggtttcaaggacattgtgctcaatgctaatcgcattccatgggctactgagtcacagtcacattgagttatcgagtcaaagcagcctttttgtcttctgtatgaaagacaagctgctcaaatgttacagaattc

SEQ ID NO: 197225 - DNA, 1000 bp, Homo Sapiens
aaggcgggcagatcgcctaaggtcaggagttcaagaccagcctggccaacatcgtgaaaactcgtctctacaaaaatataaaaattagctgggcatgatggcggatgcctgtaatcccagctactcgggaggctgaggtggaagaatcgcttgaatccaggaggcagaggttgcagtgcgccaaggttgtgccattgcattccagcctgggccacagagcaagactccatctcaaaaaaaaaaaaaaaaaaaaaaaagaaaaagaaaaaagaaagattcactttgaaatgctgcatgcaactatttagcaacacattggaaaatctagagaaaatgggtaattttctggaaaaatataaatgaccaaaactaatccaagaagaaatttaaaatgttaatagaccagttacaaagaagagaatgtaaagtgattttttaaaatccataatttaaaaagtactagggttgcaagaaggataattccaatgttatttaaagtatcccaaattttttttaaaaagaaaaaccaattcatttcacataggcagtgcagcattaatatgaaaacctgataaacataagacaaaactgtaggccaggtgcagtggcttacacctgtaatcccagcactttgggaagccaaggtgggtggatcacttaaggtcaggagttcaagaccagcctggacaatatggcgaaaccccatctctactaaaaatacaaaaattagcctggcatggtggtgcatgcctgtaatcccagcttgaacccaggaggcagaggttgcagtgagccgagatcacgccactgcactccagcctgggtgacagagcaagtctccatctcaaaacaaaaaaacaaacaaaaaaaccaaaactatagaccaatctgacatacatatgaatgaatattctaaataaaaacccagcactgttatcaataattgcaacaacaaaaaagagtaatacagtatgcaaagagcactgtatttcaggaattc

SEQ ID NO: 197226 - DNA, 1000 bp, Homo Sapiens
ttatactattgctgtcaaaggtgaattatctgcttgtcctaagtttaaaagtgtaccgcagttaggactattaggtattgttccctgggtaaattaaaacaaatgtatttatgtatctactgtagattagaattttatgtcatattttgttccatgaagccagaagcccagccaagaccttgtcataaatagtcttttcttaaaaaagtcctttcttaaaattacaaatgactaactttgtaattagatacagtaggggatgcctgctgtttgggctgcccagcttcctttcctccttatttaggttatagaaccaagaaccactctgtatggcctctcaggttgtacactgcacaactccaggaggtcccaaacagatggactacaagatggattcgagtctggagctgtgcaacaccaccctgacagaactctttcttttggtaaatgctcatccacccagacagtccaacctgtgggtctgctctctttccactgtagtagacatgatccaggccagccaattagagtactatctctagaaattatcattgattactgcaggtgttgacacatgacctgaggaagccaaacagcactttcaggggggattatatagatggtagagaagagagaacattgcctgatatttccaacactggcaagcatgcaactctagaactggtaggggttcttttgctgcaatactgtaagagcctgcctgcaaatgaagtcaacagagaaaaagcagagctgaaagaggaataaaaggagacagatttttgacaatatgggttgatccccaaatcctagctgtgcctaaagtattcatagactggttgttggttatgtgagctagtaaattatttcccttgcttaggagagtttgagttggatcttttcacttgcaacccaagagtcctggctaacacagatgcataaacaaaaccataaaccaggaacttggaacttagtttctgcttaaccaaaaactgaattc

SEQ ID NO: 197227 - DNA, 1000 bp, Homo Sapiens
aatgtgtaaccaatggaaattttctttcttttagggttgggttgataatctaaatggatgtagctgactcattattgcggtatgtatagggatgaggaagtaactgtaatgtagtggaggaatagtaagaaaattcttagtgctggcttagcttcattgatccaaaaacataaatgctactttactatcaattgaagcatattatttcaattattctggttataatatggaggcaggatgaaattgtttttattcttttagaattttttttatcaggaaaacagaggtaaagtgctatcaattactatttaagagttctattttgaaaagtgagaattaaggatttttcttttctttttaaaaaaaacttttttaaaaattaaaaataaaagaagcaaaagtcttaggaaaatgaggcaagtagccctgccactctatgtacagtaataacaatatctgtcccagttattatgtacaatattataaaaaatgtcgcagacagtacaaattaaggcccttatttctcaaaggacatcaagtcttatgccccgtgggagggaagatgccacttaattattgcaccattttgaaaaacagaactcgtcaaggcggatagtggtcttttcccacctggtcttcagtcacagatgggggctggggcggtggcgccgtcttcgtcgtcgaggtagaccctatggagccacaccgccctgccgagttctctgggtgcaataaataccagtcacagtttgggagggggccgcgtgcaggtggggaggcctctgggctgcatgtgccgcttcctgtgcagggcaaggtgggcagagcgcaagaaggcgtggtggcaccaatggccctgaaatggccggtggcccctgtgcttgtggtggtggagcgttagcttgtctgagtgagcacacttccagctgcttccatcccagtggcagtggtcgggcttgtcacttgtgtgctgcgcagatgtgcctgcaggggagaattc

SEQ ID NO: 197228 - DNA, 1000 bp, Homo Sapiens
tatgagagtgggggccacctctacctcatcatgcagctgtgagtggcccaacctctgccctgcccccacacctctcccagctgtcccaaccctctttgccagactgccctatcccctgctgcagggtgtcgggtggggagctctttgaccgtattgtggaaaaaggcttctacacggagcgggacgccagccgcctcatcttccaggtgctggatgctgtgaaatacctgcatgacctgggcattgtacaccgggatctcaaggtggggctcaagggggtgtggtgagctagggtacccaggggtggggcctttgcaaaccccaaactgtctgaccttgggcaactttcaccccctcactgagccttggatttccatctacaaagtggatcttgtaacctttaaactgcctcctcccattctagtccagatactcaaaggaacacgagtgaattgtgtggcattttatccaaacaacattttgtctttttctgattaaaaaaaaaaaaatctggccagacaggatggctcacgcctgtaatcccagcactttaggaggcagagacgggtggatcacctgaggtcagttcgagaccagcttggcaaaaccctgtctctaccaaaaatacaaaaattagcccggcgtggtggcagatgcctgtaatcccagctactagggaggctgaggcaggcgaatcacttggacccgggaggcagaggttgcagcaagctgagattgtgccattgcacgccagcctgggcgacagagcgagcctggacgacagagcgagactccatgtcaaaaaaaataaaataaaaacaaaaaatcctattccccttctgtagaaaacttggatgggacagcaaaacataaagaaaaaagccagaaatccccgaaatcctactcctcggaaatagcgacggggctcacatttagcagtacatctcaatccgttctaggagaagggcacttggggtgtgacatgcctggttttgaattc

SEQ ID NO: 197229 - DNA, 1000 bp, Homo Sapiens
aagaagaaaaacatctgattttcattttggacaagaatactcggctaaaataaaataaatgggaatagagttttatttgatttgtataacatcattgagaataaagtgagttaccattccatctaccttgtaccagtaatcattctccttctatttgtccctatttattttttgtactcacttttcaggccaggactctatctctgggaggagtaattatattctgatacaaggttctaattgaaatggttttatctcagctctagcaaacagtagttctcatctaaggaaaaaccaaaaaaaaaaaaaaagaaaaaccacataaagttcaggtcaactggtggcagctaccagccattgttgacgcatccacggcattgagctaacacattaggacagctattcctagaattgtgcccattttctacaaactgatatgtagccagattttgctagagtgaatgaatgctgggagaaaactaacagcaacatagtaagccctctcaaggaagaaggaaaagaaaaagccagaaccaaagcaaaaactgttcttacaggtgacatcagttttgaggtccagctttctctacaccttagggtacaaaggagaggacctgaccctttgcagtgtggtttctgtgcacacataaacaccctagtccttgggaagctgtgatgatgccttgcggctatgaaaagacccctagagcctgtggggaaataaaatcacagcaggggttcattttttccccaatgtaaacatttcagacaggacaactgcactgttaggaaactctagaatgctcggactctgggagggggtgtgtgtgtgtgtgtgtgtgtgtgtgtgtgtgtgtgtgtctcacagacagagagatggacatagccaatccaaagttaagaaataataccaactgcctacttagggtacagggtatcaatgggtcaacaggttttgcaagatcattttagcttaaaactgacctagcaggtataggac

SEQ ID NO: 197230 - DNA, 1000 bp, Homo Sapiens
gcttttcctaaggaacagcagctggcagaacagatgatctgaatctcgggtgctactcacgagcttcttctgttctccgtttctctgaggggcggctgggctccccaatcccaatcacgttggctgcaactgtgcggaattcatattcaacccaagggttcaaacccaccacggtcgctgtgaatgtcttcccatcaatgagttctgggactgaaagacaacaaaaggtgggggctgtttcataggttctcagaaaacaaatgcagagattacgttaggaagataggaacatccatccatcctcatcattattgtattcagggcagtgtaggtgttctgatattagctgcatcaacagttgtttcagtgaggtaatctcagaactatctctgtatgttaaactaacacactctaatcagataccagcagatgacatcataaaagacacacagtccacaagaccccaaactacctgactcaatcattactatcaccccttcacatgtgtttccgcatttattgtatagtgccagacacactatttcaactatcctctgagaaaggtaaaagtattatattctttttttcttttctttttttttttctttttttgagacagggtctctctctctctctctctgatgcccagggtagagtgcagtggcacaatctcggctcactgcaacctccacctcccagactcatgcaattcttgtgcctcagcctcctgagtagcagggactacaggtgcatgccactatgcctgtctattttttttttgtatttttagtagagacgggatttcgcctcatttcccagactgctctcaaactcctgggctcaagcgatccacccgccttggcctatcaaagtgctgggatgacagttgtgagccactgcgcctggcctatattcattcttaaacaattcttattgtgcccatttaacagaagaggaaaatgaagatgtatagagatcagctgattagcagtcaggtcta

SEQ ID NO: 197231 - DNA, 1000 bp, Homo Sapiens
cacatcctcatgtttctattcaaaaatggtaagaaggctaaagtaacacggtggccacactgggtcagaacttctatctctacatttacagtctgagtgctggggagtcagatggagacttgaccccggaagaaagtgcacccttgggcgagttagtgggtgagggaagataaacaaccaaaaagtaagcagagttgctttggatgagctgttacgatgtgttaaaagctccatgctgagctgagtgccttccacatattatctcagtgaattcccagaatagtttatacagtaggagtatccacactgattcatcatgtacacactgaggacctttcatccagcacgtgtggaggctcctcgaggggactcggagtgaagacagacttggtctctgccccctcgggtcttacagtcaagctccagttgaagtgtggtcattactacagtaaatgaagcacaacccattatctctgcctcaggggatcaagaggaagtttctagagtaggagacatttcaatcagggcttggggagcctgccaaagggaatgagggcacgtcccacatgaagcaaaggcatctgagttcatggccccgctggggattggcaggcatgagttgcagctgcaggacaataagcgtaggggagtgagtggagaaacccaggtggggccagaccacgtgaggcactgatgggttccatcagggtggccatgggctccatactccacagaaggctgttcagatggggaagcaggtagtgagggttccatttggggggcatcactgacaaccgcgtggaagagagaaatgcccagaggcaggaggccactaaaaggctatctcagttatccaggcaaaaaggctgacaggtgcagatctcagcagccctatgctggcaggcggtcgagcctggtggtcaagaatatgaatcctgaagtaacagtgcctagtttcaaaccgctgctcctccattcccagctgggccactctgaattc

SEQ ID NO: 197232 - DNA, 1000 bp, Homo Sapiens
agagctaggatttgaagccaggtattttgccttgtctcagagctgttagcatttacttaatttggggtatttttaaaatttaagttggattatgggtattatttatgctagtaatttgcttctgtcaaaatagttaagcctcaagacttagtgggaacactaacagtggtctaccccctgtattttgttccacactcaacatctctgcaggctgtctattggaatagagggtttgaccaccaaataaatgtaagcagcctatgtacaactgttttctataaagacttacttggatattgagaggcaggtgtgtttattgcaaaatgaatgttaaatcttctaataacttctggatttgagttcagaactactttggccaactgacaaaataattgcacaaaatgtagataaactatcaatggaggaagatgtcactaaaacaggtaattcaggcagatcactacagatcaatccattcttctttttgcaaagaaaattcatttttttaaaaaagtgtgtttttcacccaaatatgctttcttaactcttcttgcacatttaaggccgattatcagaggatacttggaatctgaactttttttagactgtatgtgaggaaataatggaaaatattttaattccttcactattaaatggagcaccaaacgttcaaactttcctcgctatacttttaagcataatttctaaagataattaggatttagatttaagtatagaaaaatctatatgttgctctttctttaagaggtggttaagacacaatcattgctttccacgagctcattctagtagggaatacaaatgagagcaattaacctctcatctgtgagagaaaggcttgtatagagaggtatggggagcatagaggaagaagtaagttagtttacctggaggggtcatatctgaatggctttgaagagagtaaaatttctccagacaaaggaactattattccaagcagatctttctgagcttctgt

SEQ ID NO: 197233 - DNA, 1000 bp, Homo Sapiens
ttcagattactccctttcacgcttcctagtatatatattgacgcattcactatgtgccaaattacaaacctgaaacatttagagaaagacagaagtagggtactttagctgccaaagagacaggtgcaaaggctcatgaatattagttgaggagctgcggtgcatataacatgaaagtactgcctgcaggcattctgtgattgggcagtttaatgtcagtgggaaacggagggtgtcactggggagttaaaaacaacagcagttcaccccagaagggcttaaaacagatagtctccaggaaactgtgaaattatgactgaacgtagaaagggcaacctctccactttggtcgtacttttgtttagatgagaaggaggatggtttggctcttgggagcgttggagagatagctggggaaagaaacggtggtttctcccagtcccacaaaaggttggacaactctggattatagtactcttaatacatgacaactaaagcgtcagaagccaaagcagatcttctagatcatttatacctcctattaaacagaaaaatatatccctatgagcatggataatgggagacactgttcattcagagcataaaagagaggcatttccagcatttgatttcagagccatgcaagtgctcttttttccttggttatcagctctggcagccacctggtgcttaaaacagcctgatgtggttgctgaaattacccttctatgccctccttaaatagtggctcatgattgtagatcacctgcatctgtaacccagggtgcaacattctaatgcatatgcctgcaccccgtccccaaatctatgtaatcagaaagtttgggaaaggccacggaatcctatagtcctcatttttaactggctctctgggagattctttatgcgtagaaagaatacacaaatgcatattgaaggcattagcactgcttttggttaacggtcttttcaaaaggccaccattaaagtgtatgaattc

SEQ ID NO: 197234 - DNA, 1000 bp, Homo Sapiens
atagtgaaaccccgtctctacaaaaatatacaaaaattagtcaagcatggtggcatgcacctgtgatcccagctactgaggaggctgaagtgggaggagttcttgaacccgggaggtcgaagctgcagcatgctgagatcacgccactgcactccagcctgggcaacagagcaagactctatcttgaaaacaaaaacaaaaacaactttcaaatccagctcttttggcatggcaaggcacagactgagagattattatttattataatttcatggctgttttgctcaggggtgattttcaatttgaacatcaaatttggcatgaacaccaaccaaaagcagccaatactatctatggtgtttgggtgcgctggctgatggcagccccaggactttcagcgggaatttccttttgtgctaatgccttgctgtcaacagcaggtgaaacgatgctggtgaagaagccaagtgtcaggtgtgcctggcatgtcctgagaatctgattcctgggggtggtgcctccctggctgcgagggcccagggcaggcctgctgctgttctctccctcctggtgcaggagaacgcagatgccgagaagttggaatctgaagatggatcatccataatataaaaaatgacactccaaatcggtttcaaataaaaggatatttcatgatggtgctggcactgattgtttcacgtggcttcatgcttcaaatgtttttcggtcaaattaagaggcctagtagccatcaaactcttgtccagtgcaatgaccagaaatcattataaatgagttcgaatattgctagggacatagatgcacagcagtggtcacagggaagtgagaccaagagattgtttcaccgaggaaatgccattatcacatcactctcagagcccgcgtctttgctcaaggaagggaaagaaatccccccaggatgtcttataattgttacaggtgccaccaaatgtgggaaataactagaatgcaggaattc

SEQ ID NO: 197235 - DNA, 1000 bp, Homo Sapiens
ttgcttctcttaggctcaatgtcttcttcaacaaagtgaggactttgctgccttatttcactaggttgttataaagatttaacgagataacattttttaaatgctcagagaaatagtaaagcaatggaataatctgttcctaaactttatgactaaaattatcttggaatcccaaataaaacccaatgcgtattttgttcataggttctaatatgcaaatgttgtagttttcagaaaatgttattaagtcctaattttgcttcttagttgtcctactctttatggcttataattcagggcatctcaactatgtcatagtttataactaaatttattcataaatatctcattaaagtagataatgtgattgtccactattacggagttgatcaatcacaccaagggcagaaaaaccaatggatgttaagacctgacttggaccaacgatccttctctaccgactcaaactctcagccagtagatgtctgttaggataatgctttatattgatgttcaattccagctgacatgggagaccaaaagtctacttttattttttttttagtttccacggagaagtagcaagctgacattctgtaattttcgacatacatactaacaatatattttgcacggaacatgttattcagctcaaagtcatctcatagaccatcttacatgactatttttgcagcacaaatcacaatttcaatatttgggtggcacccattttgctttgattcacactatttcctcagagctagtcagcaaaaatagtcaaatgaccttccagtgactgcacaaaatatggaatgcttcaaagatctgtcctgcctccttatgcagaagccacgctaactttccccgtattgttccaattttaggatatgtgccgccgaagcaagcacaaagccctacttttacatatgattagtgatgcgtcatggacaaggcttggctctgtgaagtccaactaacctacttgagattctgagaattc

SEQ ID NO: 197236 - DNA, 1000 bp, Homo Sapiens
caatgtttaaaatgtgtgctctttggaagcaattctatgtcttcctattcatcctagaaaatacttcacatatgcataatgaagtatttataaggctgctaactgcagcatcatttgtataacaaaatatggaataatacttctctgctgctttattctccaaactgaaataaataaataggtgctagcaccctcacattctagaggaatccactaatgatccccaaaacttgttccctaaggatatctaaaactgcaggcataatatggagagcgtgacggaacatagccttaagaggaccagcaaacaagcagagaaagaatctgagtctttcaggatatcattaatccaatggcactaaacttgggagccgttctactctgttctacctaaaaaggatttccttttttaaggtcatcaatgtctgttgcaggcatttttattaggtttctagccttctttgcccagtcatccactaacctctaaacctgataccttcttcatagacttttatgccccattcacagtcttcctctgcaccttaatccatgtcactctcccttggataaacactgacatatgaatcatgaagatactgaaagtaacactagataataaaaactatattttgagcccttattaggtgtcaaatgtgagacgctttacatacattatcccatttaatcctcacatcagttctaaaagccaggaaataatgtgaccttcattgtatggatgaggatcagacatggaaaagtttcggaacttgcacagagtcacccaactagaaagtggtagagctgggattctgactgcaaagctgatgtctgtaagcactgggtcgtattcctaacagtctttcctcactgctttctggacttcctgaagcagacttacacctgtaggcaagacctacccagactcacttgatgtggtttcacttccaagattttgatctctggaaatccacaggctgacttcaacttcaaatcctccatt

SEQ ID NO: 197237 - DNA, 1000 bp, Homo Sapiens
cagaaagcaaaggaaccagggagtcaagatagggtttcaaatgacaagattgtcactagtgtcaaatgcttcaaagaaatctgaaaggacaagaatttcaaaaagaccatgagcttggcaattaggagaccattggtgaccattattaattgggatatgttgtaagaaaatctacttctaaattggttaacagtaagtaaaatctataggggtaataaaatctataggggtgataagttaggcttcaggcagttgaatcaggtttccagctccattactctgtgattcttttctttgcccccctaccccattccctctgtgttttgacttcaccagatgagtgtccctcatggtaccaaaatggagggagcttcttctgtacacccactaatccttcctgaatcactacagcaagtacgtggttttgctctgatagaattaacttaggtcagtgctcacccccaagccaattaccctggcttagacctgggttacctatttctgaacagtcatcatggcaagagagatgtgagtattctgacagccttagactgatcacgacccatggctgagctgcaactaggtcagtctaaccctgactacttggctgatatacagtgaagggagaaggagatgtggttacaaccaacaatgaccactacaatagccactgagagagcaactcccaaaggatggtgaagaaaacatgtattcaataataaagggctaagaagttagtgagtgaaaaggccatgaaggaagtagatggaagataaatttgcaatagttcttaccataaaagaaaaaaagtcaattgtgacagtatccagaataacaaaactaaagttgtttgtccccacaaacacacctttttaagttaggtacagagaacaacatagattgcttatccattcatttctctttctaaacacaacttcaaatttgaccagtaatacgtatcactccctggaaaccatgtgcttaaaaggaagttgaattc

SEQ ID NO: 197238 - DNA, 1000 bp, Homo Sapiens
gtgtcagttcttctagcgtggccatggctagtggctgctgatagttgctggcacttgctgcagtgaggatggggtgattctggactcagcagccccagggaggcaacatcttttcagaagttgacccctgttatcaaggcccctcttctcagctgatctgcagctgacagcttctgatctctgggcatcacttctttcatttttgcttcttcagaatctctcttctccctttggtgcttcttaaccctgccagcatctttggaaccaaacccctatattaaatttttcctgtttgaaatacttaacaatagttttcctgactagatctcaattgatacatcctcacatcctcctctgatgaaggtgagaaagaaggcttggtctcagacctcctcctgaggtgcctgccatgaagctgctcctccctgccatgccagctgtgccatggccacataagttttcctgttggtagtgacaaccctgcgtgtattggagtccctttctggagcatatgtttctctttcctagggtctcaggagaaggatagatgcaaggccttgctgccctgttgctttatttcccaacataccatcaccccaggatgagtgagtatgctagatcttcttactggtttaggcagacagatgggtttaatatagcatcataaataacttaaaattgcttatctaacattcccattcttgagtcttttttaaaaatatactttattttttagaaggctttatattatggaaaaattgagaagatggtgcaaagagttcccacataccccataccatttttcccctattattaatatcttgcatctgtatgggacttttatcacttcataccaacagttcacactatcaacatgatttgtgactgctgatgtggaccttgatcagatcaatgccaactgaggtagtatttatcaagtttctccactggaaaattattctttaacccctttccatactgtactctttggaaggaattc

SEQ ID NO: 197239 - DNA, 1000 bp, Homo Sapiens
ggaacagaacaccagcactaggtgagaaaacagaggtttcatgggcacctattaatgattattctgcttgaaaaaacaatgggtatttcttgggaatttaagaatgtaccatcacgtgagaaactgaggtataagaaacagaaggctcaatggcagcccactgcatccattatcaaacacatcatggaaacgggaagaagtcacttaacaatcttggggaagaaagaaaagcatactagcctaacacagggaaaactatcaaaataccaccattttacctgcctctcaatctcaaaattgtgattcactgcataagctacatgaatacatgaaaaggtcttagaataagcccatttaaaggcattgttttaaaagttagtggattgaatatggctcctttaggtgatatcacacatactcttgcctctgaatgccatcttcaggctgggcacagcagcttatgcctacgatcccagcactttaggaggctgaggtgggaggatcgcttgaagccaggagtttgaaaccaacctgggcaacatagagagaccatgtctacaaaatattaaaaaattagccaggcacattggcatgcacctggagttccacctattcaggacgctgaggcagcaggatcacttgaacctgagagatcaaggctacaactgagctacgatcataccactgcactgcagcctgggtgacacactgagaccatgtctcacaaaaataaaaataataataaaataaatggcatctttatagtgataacccacaaaccatttttctagactataccttttcctctgagctccatacttatatatccaagtgattacctgacatctctatttgatgttcctcaggcatctatctatccttcagctcaaatggaatccacccagttgcacaggccagaaacccagtgccatttctgtcttccttctcctcttcattccctactcctaaaacccaaaccaccaccaagtgatgttgtttt

SEQ ID NO: 197240 - DNA, 1000 bp, Homo Sapiens
atctgaacatgctattcctagcaaaagctagggggacagtactaagacccaggaatgggcacctggttggggactactctgatcccagaaagcaataattcttcatgcaatgcttcacatttactaggaaggccacattacaaaatctttgcaatactcctgttcaccagagtaatggtatccataatccccattttagagactggggcaacttgagacttaaggaggttaaggacttgttcaagaccacacagactaatatatactttttttttttttgactttacttgatttcttaaggaggctgtttatacaggataaacacactatgagaagttctgtgcagaaattgtagtcttcctcataaattactaaactggctttttaatgcaaatcagtaaccctgggcataactggcaatctctaagagcctgttcatcccagaacaactgatcttaaccttgaacaagccacattggagacttaggcatgtaaacttgggggagagcgagaagtggattttaaaaggcagggttaagagggagaagaacaaaaacagaagcatagcttgagcatgaacaaggaatgacaaaaaaggcccaaaagactgggaaggcacaaaattaagaaatcaacagttttctgcaaacttctttgtgccatgcactcctctggtactgttacctttattcgtgattaagtatcaccttactgctgatttctacactgagattacatggatacaggtaatggcctatatttgaagcaaagtaaaaacatttagaagacttgccttgtgagagactaagccaattaacaaagcagactgaccatgccccttttgctattccagggaacaaagactcctatcattctgtggaggtatccaaagaattcaagtagttatggcagttttgggcaaggacccaattacatttcaacttaaaatttcacaaggcttttcaatacaacacacagtctggagatcccaaaagaattc

SEQ ID NO: 197241 - DNA, 1000 bp, Homo Sapiens
ataacatagtagttaagatcatgatctcaaagccagaccacctaagtttgaattctgactgctgctatgtgacgtagggcaagatactgaatctctttttgccttagtttctccatctgtaaaataggaatgatgatagaacctgccttataggattgttgtgaggagtaatacacctgatacatacaagtgtttagattgcctagaatagtgcctggtatatagcaaaatgataagggtttgttattacttaggtatagtattacatgaaaagtagggagtggccaaagaaaactcttgtgtggcatggtaagaagtttggattttaaaaccattcattgaatccctattgccctcaaggtaatcagggcagatagcctcaacatgagttttggcggggacaaactgtattcaaaccatcgcagaagctatagggcattattaagtttattctcccctccaccaaattagcattataattatatttgcaatccaaaatttgggatggtaataagtttccttccacctaggctatgcatttaattgtgtgggaagtatataaacaaactaacgctcttcaatacttattttgaaggccggccagaagcagtggctcacacctgtaatctcagcactttgggaggccaaggcaggcagatcacttgaggtcaggattttgagaccagcttggccaaagtggtgaaaccctgtctctactagaaatacaaaaattagccaggcgtggtggcacgtgcctgtaatcccagttacttgagaggctgaggcaggagaatcacaggaaccaggaggcagaggctgcagtgaggtgagaatataccactgtactccaccctgggtgacagagcgagattccatctaaaacaaacaaacaaacaaacaaaaaagaaagtcaagcatgataggaaggaaaagacagaaatggtcaaaagaatgtaaccttctgcattaatggttctgcttttctatgggagtggaattc

SEQ ID NO: 197242 - DNA, 1000 bp, Homo Sapiens
ctattaactgtatagtctatgaatatatactttatgtattgattattttgtttcaaatcccattcaggctacaagtgtcaagaaagattctgtttcgaatatagccacagaaataaaggatggacaaatacgtgggacaggtattttggaatacacctttaatgtaatgttcgatcaaatagaagagaaattcacttccctaaataaatcagcggggggttcattgaagttttatgtttggattcagcatgcctgagattcttcatttgtaataagtcctcaggtgaccctgatggtgctggtccttgaccatgatctgagtagtaagattgtagacttccctacattgaaattgggaagaagagccataggagagcggttcagcacataacagcctcaggggacagcatcattttgctttaattctacagcaagtttccatcaagaggggaaggagaaagagatgaagtaatagatattataggcgtcagatcatattgttataaacagagggaaaagtgatcctaatacctcaaaaacagcatagaatgagaacgaacaagatcactgaagtagtaattattttccgcaaggaagagggattgtgaggcaggaaggagagaaaagaagaagttatttatgtaattttggggtttctgttgaggaaagctgagtgaactcacttcagataaatttggaatatttgcataaaagaatattaaattttggcttctccaagaactactggaagcaggaaacaatgctagaattgggataaagcacactgactcgttactcctctttgttactgttaggcatcagagatacatgttttgttgattttagttataaaaatgagataaacttgaatatgaatacattggcttcattgttcaaggagctaactcttgggtaaaatagctattggatgaaacttctttagagaatagcatgatactcccaacaagactattatagaaacaaaaagtatgtggaattc

SEQ ID NO: 197243 - DNA, 1000 bp, Homo Sapiens
ctgcagttttaaggactcaccatggatcgcatttccctgcaagctgcactgcagtaacccagacacaacactgacagctgtggagtaaataaataaaaacagagtattttgatcctaatggcagggtggggggggggctggggggtgaaaggttggggacgagaagagagagaggcagacagaatgaaacagtcacagctgtgaaaagaacagatgccagccaggagagagggaaagagtgagaaggggaggggagaaaagatcagggttccaccaatgtcagaaatgttgaagctcttgcaaagggatacacatacttgggacaggtgggaagtgtttacattaaaaccagaatgtcaaatgccttcctaaatgctggccagatcattcaagacccaagttgacccaaaggaaaaagctgaattccttgcccagaaagcccattacagagagagcttccagaattctttatattccattcaaattactggatatcagctgtgtgttgccagctatcagctgtgtgcatcaacacatcatgctgtattccagtggctcttaaagtgcaatctcctgaccagtagcatcagcatcaccaaggaaattttgacagaaatgcaaattttcatgcttcattcagatgtactgaaccagaaaccctgagggtgggacctgaattctggttttttttttgtttgtttgtttgttttgagtcagagtctagctcttgttccccaggcctagattgcaatggtgcaatctcggctcactgcaacctccacctcccggcttcaagagattctcttgcctcagcctcctgagcagctgggactacaggtgccagccaccatgcccagctactttttgtatttttagtagagacagggtttcaccatgttggccaggctggtcttgaactcctgacctgaggtgatccacccgcctcggcctcccaaagtactgggattacaggtgtgagccaccacacccagcctgaatt

SEQ ID NO: 197244 - DNA, 1000 bp, Homo Sapiens
tccccagatgtcaagccggcatcctggcagtgacttgaccacactttcttcatcaagatggacttctctagaaataagaatttcattctgtctgtaaaaactaagaaaggatattatttcctttacccctctatagtggcttttcagttatattaaaaaacgtcatccatgagttaagtatttcttaagacatataaaactaaaatgtttaaatattataaaacttacaactaaaattgctttctttttttattattataaaatttcattttccctgtactcattttttcctcattttcttagttatttaaacttctcttacagacattttcatcagtattttagtatgctttatacagaagaggttttctgttttgctaacttgttctacagatttcctaaaagctactggaaacattgttaatctgtatctgaaataatcagctaccaactgtatcaaaagcacttccttttatttgacctgtgaattacttatctgaagcttcaaaagatgcctaagctatttttgtagtgaataagtcagcattgccctcttcaggtgcctcatagtgttagaagcttccaccagatcaaaagttcattcttcatctttccagatggaagaagagcataaattttttaaacagtgcctcacatcctcttaatcattctagtttatttttaatttttctgaatctcaattcccttacttacaaaataaaccaattagactgtatatacaattacatttgagaacatgggctctggagttagacagatccagaagctccaatactttccaactgtgtgaccttgaacaattacccaactttcttcctcaggattctcatccataaaactggttattagtaatacctgcctcagagagttgtgatgcagataaattagataaggcttaaaaccactacacagttttgtcgccagcccaaccccaggccaaaccccgattcaggtacctcattgtgctgcatctgaattc

SEQ ID NO: 197245 - DNA, 1000 bp, Homo Sapiens
caggctgagcatggtggctcatgcttgtaattccagcactttgggaggccgagatgggtggatcacttgaggccaggagtttgaaactagcctggccaacatggtgaaacgccatctctactaaaaatacaaaaaaattagtcaggtatggtggtgcacacctggtcccagctactcaggaggcaggagaatcacttgaaccttggagggagaggttgcagtgagccgagattgcaccacttcactccaacctgggcaacagagcgagactctgtctcaaaaaagtgtcctctgcaattgatgctcctagaacataccaacttctttcctctttcaggatttttgcgcttgctcttgtttctgtttgtaatgctcttctttcagcttttcacatggttggccccttctctttctttagtttttaacttcaatgtcaatttctcaccgggtgctgtggctcatgcctgtaatcctaggactttgggaggccaaggagggtgggtcacctgaggtcagaagtttgagaccagcctgaccaacatggtgaaaccccatctctactaaaaatacaaaattagccgggtgtggtggggtatgccggtaatcccaactactcaggaggctgaggtaggagaatcgcttgaacccaggaggtggaggttgcagtgagccgaaatcgcaccattgcactccagcctgggcaataagagtgaaacttcatctcaaaaaacaaaaacaaaaatgtcaatttctcaaggcagaaattcttggtcatcttatctaagtaggaccctctattattccctttcacagccaactgtttatattcttcccaatacaagctgtaattattttatttatttggttgtgtgtgtctttcactagagtataagttgtgcgagggaggtgatcttgtctttcttgtgttcttatgtattcccatggatttagcatggtgtctggtgtatcaccgtatagttgataaatttttattgaattc

SEQ ID NO: 197246 - DNA, 1000 bp, Homo Sapiens
acttttccacttggttgaatggatagatgaagccattaaaaggtcaagtcatgacatttggaaacatcagaaatacttttgctcttctctctctttctcttttaaattttacctgtgatggttaattttatgtgacaacttgactaggccaggtggtaaccagacatttggtaaagcattattctgggtgtgtttgtgagggtgtttctggatgaaattaacatttgaatctgtagactgagtaaagcagattatccctccctaacgtgggcaggcctcatacaatcaattgaagacttgaatagaacaaaaagactgagtaagagggaaatttcatctgcctgagtccttgaattagaacgttggtcttctcctaacctcggactggaacttatatcattgagtctccaaatctcgggcctttggactcagactgaaactataccactggctctcctgagtctccagcttacccactccagattttgagacctgacaacctccataatcatgtgagccaattccttataataataaatctcacatatgtatataatatacaacacacatacaaacacacacacacacacacacacacacacacatcctgtttgttctgtttttctggagaaccctgactaatacagtatccttagacttttttttttttatttaagaaattctaccataatatataccacagagagtgcatcattaatgacagttttgaaagtgacagtgtctgctcgagttccctaattaatcccatagagctcagttctctaggttatttctcctagctgttagcaagcctcccattagatccagcagggacttgtgtgctgggtttgcaatcagagaattgagtgcattctgtagctttcccttcatatctcttggagcaactttgtgaggctatcgctcatcttactcttaaaggaatcctttcagatttcctctatatctcacagttaatcatatgcaaatatggttatgtcag

SEQ ID NO: 197247 - DNA, 1000 bp, Homo Sapiens
tccatggcgttccgcagtctccctgaggcagcggagctctatgcagcccctggggcccctctggtcacaccctccaccgcagtgttttggaccaggtgtcctgaaagtcctcaccatccctggagaatccacgtccctatcttgctgtatcttctttatggtccctgaaccagcacggggagctttctgaacgccccgtacaaatctcaaatctctgaatgccagtagccaaccactaagtgaccttcgtggctaccagctcctaagtcctcacctccttccccagtgctgtgcctgtggctgtggtgcagtgctgcggagccacctgcgggtggaagcaagctgtggagggctggggacaaggaagggaacacagaaggcgaacctagaatcctacttagctgtaaatgtggggaaggtagccctcagtatctgggaataggcccttaggtgtcacttccaccacaactggggaaccttacaagaaaattcctacctatagactcattaatgaccgagtttagtctaaactctgtccttctccctctggctcaggcaaagcctagaaaagctgtaaactgggagaaagacaccattactagccacctttctttgagacatcactgaggctgatcatggcaactatccatataccctccctctccttacctgttctgtgaacttgaaagtgttcctgcagtctcaccaccctacaacctgcaaccttatccagaaccttctttgtttttctcccacagggattctctcctggaacattgacctgtcatcctttgacttgaaccaacagttgagactcttcattacccggcacctagctcacttctcctcagaggtcaaaggttaggactaatgttttatttcagtcctttgggtaagagctggtcacagaggtccagtctccctgggagaagtggccttgcgggaggtttgagtggaggagaagggaggaactttatagaggaggaaaatcatggaattc

SEQ ID NO: 197248 - DNA, 1000 bp, Homo Sapiens
tagaaactaccaaacaaattcagattaaaccatgaaacactttttttgtcactggttacctctgtagcaacaaagtgtatctgaaaacccaaaaatatactacagctgcaaataaacccctggggcaggctgatgactctgggttctgtgggccttcaccaaatccacactgaagtttttctttgtttgtttgttttaaatggagtctcactctgttgcccaggctggagtgcaatggcacaatctcggctcactgcaaactccgcctcccaggttcaagcgattctcctgcctcagccttctgagtagctgggattacaggcacctgccaatacacccggctaattttttgtatttttagtagagacagggtttcaccatgttggccagactgctcttgaactcctgacctcaaatgatccgcccacctcagcctcccagaatgctgggattacaggtgtgagctactgtgcccaacctacactgaagttctaatcctccaacgaccccttagattagccagaaaggccacccacctggaaagaaggcaagactcataatatcactcatatatcatattaaaaaaaaaattagaatttgtgaacaacttacctccttgctctatctgcaatgcttgaagctcctcttgctctaaagatgaacattctggggcgggctcacagctgtcagtgggggtcacagaattcaacatttctatatctgacccctaaggaaaagtgataatctttcagttatttgcctattagctcctcaaagctagatttgactacatgtaaatgcttcttccattattaaaagtctcagatgctgccatactccaaaggaacagtatctaattagacaagcttttgttcaatttagtccacaaaggcctatggcaggaaaatggcacaatggagtctcaggtttaaattctaagtcaggtcagcccaaaagtggaatgctctattttatgagctcaagcaataaatttgaattc

SEQ ID NO: 197249 - DNA, 1000 bp, Homo Sapiens
ctcctgcattaactggggatttgtctacttatctttatagttctgtttttgctttatgtgttttaaagttttgtttttttatatacaaactttcaggattgctttgatgagttaacctctttatttttatgaaatgaccttatttatcctggtaacattttttgctttgcagtctacttaatctgatattaatatagccatcctagctgtctttgactcatgttagaatggtgtatatttttacattcttttacttttaacctttttgtgccttcatatttagagggcattcttgtaggtagcatatagttgggtcttcctttgtaaccactctgacaatctctgccttttatggtgtttagaaaatttacatcttttatgattaccaatatggttaagtttacaactattatcttgccatttgttttctatttgctccatcattcttttaccttttttctttttctgctttataaaatcattttttgttattccacttatctcctttgttggtgtgcttattttcttgtcttttactggttgctttagggtttatagtatatatctttaagttatcacagtctatctccaaataccactttaggtatagatgtatagtataagagctttgcaacaatatattccattttgcccttcctggcctttatcctattgttgccacatattttacttttatatatgttattaataccatactacattgtcattatttttatttaaacagttaagtatatttttaaaagatttaaataataagattattatttactcatgtagtatcatttcctgtgcttttcatgcctttgtatagattcatatttccatcaggtagcattttccttctgattgaagtacttctttcaatacttaccatagtgtgggtctactagtgattaattatttcagcttttgtatgtttgaaataatctttattttacttttaattttcaaagatattgttgctaggtatacagaattc

SEQ ID NO: 197250 - DNA, 1000 bp, Homo Sapiens
ttaggtgaccacaaagctaagcaagcagagacttcagtgatacgtgtgacaaagaacagagactttatagaactggttcggaaaattaattaataagaaacagcaagagaaacaagcagtggcagcaacaaacaccagaaagggagagtatctgatgtccagtgtttacacattatattattaaaaatttccattttcaaaaaacactttaagtcaactattatatacatgcttaaactgggttgaagacccccaaatccatgcccactcataaactcagaatgtgagcttatgttaaaatagggcctttaactatataattagttaaaattagatcatactggactaaagtggatcctaatccaatatgactggttttcttataagcagagggaaatttaggcacagatacatatagagagagcaccaaatgaacacaagagtaaaggcagaggcatacaattacaagccaaggaatgaaaaggattgtcaacaaccacaagaagttggaagacaggcatggaatataaattcctctagagccttcaaggggagcatcaccctgatgacaccttgattttggaattttagctcccagaactgtgagataataagtttctattgttttgagctatttagagtgtggtagtttattaagcaatcctaggaagctagtacaattcacaaagacctaaacacaatcacatctataattaaaatatgagactatttcaccaaataaagacaatcaataaagaaatagaagttatatttaaaaaccaaatacaaattctatagtttaaaattgcattagctaaaataaaaaaaatcaacaggaggtttgagcaggcatataaaagaaattagcaagctagcatataaatcaactgagattatccagtgtaaggagcagaaggaaaaatgaatgaagaaaaatggaactatccacagaaacctatggaacattaataagcacagcattatacacaaaatggaattc

SEQ ID NO: 197251 - DNA, 1000 bp, Homo Sapiens
gacagaggatggtagtaacactcctggaaaagggaagctgcagggagaaatggttttcagaagacatatgctgaagctggctctggatacgtggcaagaagaaatttagatgtgagaatgacattagggagaaatgccttcaggctgttggaaatacaggaataggactcgagccatacatcaagactagaattacccatttgggaattacctacatagataatagtgtgagcatgaaaatttttttttaaatacccaagttttgcttcaagacctagaacatgaaatatggatgagatttatgctagaaatatgagagggagaagagagaggtgagagatgactgacaacataacttcctgatagagtgggaaaagaataggaaagaaatcagcagggttctatatgacagaaagaaaggtggaaaaagattaagagagtgctccactgaagggttaacagtatcagataccacagaaacaataaaaaaggtgatgactaggaaacggccacaggatttgaaaattgggaaatcatcagtgaattctgggtaggactgaaaaccaggctatgggactctagaaagagaacagagaaagtagaattaaagactgggcgtaaatcacccacgaattcaagttcaccttgcatgagaacaatggaaatggaactacagttagtggggcagtagagccatgggaagggctgtattcactccgagaccagggcattctgtgtagacacagaagaacaaacactaaggacaccttagagaccagtgcaagaagtgacattatggtgtgtgtcggggagagacagaaagataacttggctctagaaatggaatgaaataaaccctcctttaacacaggaagaaaaggagagagaggaggtgaaaaagagagaagcagtgataaaaagagtatacaaaaacaacttaggaggttaaacaagaaatcacaagattaggaataaacaacttggcagagccaaggaattc

SEQ ID NO: 197252 - DNA, 1000 bp, Homo Sapiens
ctttataaaaaagtagcaaactgtgtgtgcttatttatagcttgctttttccttttaaacttaatatatcctggtggtcaccttatagcaatatgtaaagatctttgttattttttcaggagatggatagtactccattgtttgtatccactatatgttcaatcatttctgtatagtaggatatgtgaaatgttatcagtcttttgctacctgaattagtgcttcaacaaatagccttatgcatatatcatttcatatatttgtcattatgcctttgggagatcataggaggtttttgatcagcaaaatgttataaaagcattgttaggaagattaaactggcaatggaatacatatttggatgtgagtaggattggaatagtgaaaatttagaagccataactgtactgtacattaagatggttatgtgcctagaaatttattacaataagtaggtattctataaaaagttatttcttcccatcctgatctgtgtactcattgtctgctcatctgtggatatattgcttcattggcatctctactcttatattttttgtcatctttctcctcttccgactctcctggataggatgtacttattttctctgcatagtctgagcatttgtttccctccatttgtttctctttgcaaatcatctgaaagagtcaaatccacttgctccttgaaggcatgcttttcactttcattaactcttacctattacagaactgcctttttgttgagcacagaaaacgaaggaaatttgcatttccaatgtctttcagacatggagactagaccacagagcaaggattcaacttcagtgcaagatttttccaaagcagaatcatgcaaagttgcaataatagacagactgacacggaatagtgtctatgactctaacttggaagcagcccttgaatgtgaaaattggttagagaatcagcaaggaaatcaggagagacatttgagagaaatgttcactcacatgaattc

SEQ ID NO: 197253 - DNA, 1000 bp, Homo Sapiens
tgcacattaatttctagtgtacatggaacatttaccaagatagaccatatcctgagtcataaaataagtctcaataaattttaaaatatggaactcatacagagtatgttctctgaccacagtggaattaaattagaagtcaataacaaaaagaaatctggaaaagtcttcaaatatttggaaaccaaacaacacacttctaaataacccgtgagacaagtgagggctgtggactaagatcgtgttagatttatatctctctgctccaaatcttagttttcaccaaataaaattacctccttggtatcggaagccaaggagttaactccagccagagcttagaaagtcagagctggcactggcagtggggctgtgtgttaactgcctgaagaatgcaacgcagagctgtcagtcaggaaggctgcactggcagagtggagcaaaaggggaagaacctggggcaacatcttgagtcctggtgagaggcttcaggctgatactgacataaatccaggacagaaattcagaccaatgcaataaaagaagaaaaacctcaaaagccaagggtagaatcaagaggattcaggaaccagaagcaggagattcaggataaagggctgctggatcaataggttaaaattgcgagcaaaagtcttttgttgtgatccttaatgtgccccaagggctccgtggtgagtttgaagtcctagcaggttcatcttcccaggaaagaggggtggactggctagagtgagagaaggttgggaggtgggcaggattgtgccagggaaaacaatgtttttttgaaacacagctctaaatgactacacagtattttcctatatacacgtgttatttatttatcctttgtgctatttttggacacttaaatcatgctgtttttctccattgtaaataacatcatagagaatatgcttagatataaatctctgtccctagctctgatttttttttcttttggataagtttttaagaattc

SEQ ID NO: 197254 - DNA, 1000 bp, Homo Sapiens
caatggattgtaaaactttagacccatatggcccgttggattctgctcctgacaatacatagtaaaactcaggacataagacaaaaataaaagaattataggttccagaagcatgtaactccctcaggaaagaataatcttcatcatcattttaacccattatggattagcagcacgcctgggaatctgccatactagaggactttttttccacagtagatggtgaactccattctggtctatatggtaataatttaatgaaattagattagtctgtaataataattttatttttttgagatggagtctcactctgttgcccaggctggagagcagtgagatgatcacggctcactgcagcctccactttctaagctcaggtgattctcccacctcagcctcctgatagctgggattacaggcatgcaccattacgcctggctgatttttgtattttttgtagagatgggttttcgccatgttgcccgggctggtcttgaactcctgggttcaagtgatctgggtgcctcagcctcccaaagtgttagtactataggtatgaaccaccacacccagccttgtaagaattattttaaattggatttccctgacacctttcctttccaatgctcaaagcataaacccatgagtccattctgaagcccctttggacgatggcaggttatggtagtgcacagtaaagagcacaggctcaagagtcaggcagatctgagttgaatcctgagtctagtgttttgtggataaccataggcaagtgactcagcctaagcctctgtctccttgtccataaaatgggagtaatgttaaataactacctcagagttttgttgaaggaattgaattaagtaattgtttagcacagtgtctagcacacagatgctcgataaatggtggctatagttaaattcagttggcacttgtgttttcatttccaatctattgtgaagtagggagagggcaagcaggtattattgaattc

SEQ ID NO: 197255 - DNA, 1000 bp, Homo Sapiens
tctgaaaaaaaaaaatgcatattgcttatctgatgaatttaataacagatttacaaaacagcagcttaaataaatgaagggtttctttttcctcccaaaagaagaagcctggagagaggcaagcctgggctggccaacagctgcagagtctgctgggcccagcctcctcccggccgtctggtcaaccatggctcccaggtgcttgttacctctgggcacccccgagaggggcatctccagcatctgcattccagtgagaagaagagagaaggtgagagaagaggcagctgagtcggtccctcttaaccagcttccccagaagccaccctcatgcctccacttacacaccactgaccagactgggcggggtccctcagggctgcaagggatgctgggaaatggggggaggggtgatgtggaaggatggggagagcaggttttgaataggcggctcacgtccctgcccagccaccttgtttccccaccattcacacgcacccttcggtcagcacacagaacactccctccccaggagagacccgggggccaggccgtgcctgccctgctgctgctcagtggctcctcctctgtccatagcattgtccacacccagcttccctccagggctctaagtaaacctcagagtatctgtcaccctcctaggaggtgtcagggccccaggagtgggaaacggaatcaccttcccagaccaaggtacttaagccaggtgctctgggaagctctcaggtcacaaaagcaagactgaatgtttagatttcatagccaagacttgtattgtgatcacacgcagtgctggcaaggccaaggtgaggcgaacccaaacacgctgctggtggaagcagtgcccctgcaaagccatatggaattgtgcacaaagactctgaaaagcttccctcatgacccaggaaggcagaacctggaccacaccttcaccacgatagaggcttagtacgtgtttattgaccacatgaatgaattc

SEQ ID NO: 197256 - DNA, 1000 bp, Homo Sapiens
acctatttactctatttcccccccattcccctactcacgtgccttgtatgtaatctcagagtcttaagctttagcaggctgtgagggtgatgttacactgcaagctgcctttaattaaaactggaacccaggagagatggacagtcccatccactctaagaaatgcatgatgaggtcatctccatgattccttgctttaaggatgctttctttttgtgagcacaccaagtccctgaagggagcaccttctgttacttggtgcttactgcctgccttttcaaacactagttaatttctctagatttttttccttacaaagaccaaattacctcttaatactcattttgtagatagaaataagcttttttttttcttttttaactactgccttttgaagtcaggtctttagcttattttccttcttacttcctttctgccaccgtctgccactggcggttctcccataggttgtccttacatgcacgacagccacagagtgtgcctgggaggttatgctggagtctctctattcactgaacacagtttacctctccacgaatacttccaggcatcatcttccacaccgggagccactgagcccccttgatagttacaattctgactacactgcttcctaggcagagtctcctacacaggggctctgctgttctgtgcttggtgcatttccaagggggtcttcagcccgtgaatgagaagttatggagtgcaagggaaggaactgaggtgatggaggtcagccagcctgggatccacatttagctgggccctgacttgctccatctctgtgggtaatttgccatcctcctctgtgcctcttttcctctctataataaggaattcttgtctatgatgtagtctttcctgcatgccttgtgtctgctttgccctgtggttgctctctcttggaatgtttctaccttctgcacatctgctttgtaatgtgaaggccacagcttatccacatatacgtaaggaattc

SEQ ID NO: 197257 - DNA, 1000 bp, Homo Sapiens
tgatatcaagtctatgaactctttgcctagacctagattttaaatatttaccattcttttaccaaaaaaacatattttacatttaattctattatagtcattttatatgtcaacttgattgaactacagggtgcccagatatttggttaaacattattctggatatgtctgtgggggtgtttttgtataagatcaacatttgaaactgtagcctgagtaaattagaatgccctctctaatgtgaatggatctcattcaatccactagaggcttgaaaagaacaaaaaggtagaagtaggaaggattctctttctctgactttctttgagctgagatatcagtcttctcctgccttcaggcttgaacccatactggaacttacaccatcaattgctctgtttcttagaccttcagattcaaactggaatttataattgtctttatacacatgtatgtgtatgtaaaagtatatatgtatgtgtatagcttatgtatctattatacatacatacatatatataatattcttctgtttgtttctgtggagaatactgtccagtgtaaattcaaaaattcaatttgaatttacttttgtgtaaagtgtgaggtagtttagattgaggtttctatgtttcttttttgtttaattgttttgcctacaaatatatattgctcaagcacaacttgttgaaagggtaattaataatccttggcattgcttattcatctttgtcaaaaatcatttgaattgacatcaaaggagctccacaaaatgtgattataaataaaagaaattagagggaggaggttccaaggcagccgaacaggaacagctccagtctgcagctcccattgtgaacgatgcagaagatgggtgatttctgcatttccaactgaggtaccaggttcatctcactggggcttgtcagagagtgggtgcagcccatggagcagggtggggcatcacctcacctgggaagtgcaaggggtcagggaattc

SEQ ID NO: 197258 - DNA, 1000 bp, Homo Sapiens
tagacattttctgtaaatgaaatttttactgtaaatttaatttcttgcaactgaattctttcccatagcacaaagttttcaactaattagttactcatgcagtaatgtcacagaatccttagggtgttgcttcaccagccagaaacctctgtggctgatgtgctttctgcttgtacattgtgcatgcccatccagctcattctgcccactcggcctggctggctgtgctcggctcatgctacccgcctagattccacatctgccagggtgagccaggtgcagagtggtgaggagtgtgtgagtgagcacaggatcaagacagccaggtgtgccagctgtgggagggtgggcagctccaggcgttggcacaggtgctggctccatgagaggctatggctgtacaaggcatactgcaatggctttcactgtgggcatcagggaactcagttccatctagaagcttggaggcaccaggaatcacagatccccaaagagggtgtcacagctctggcccagggagaccctatgtctgggctcccacaagggttgtacctcttctctccttctcatcacctgcaacgtagtgagtggagggcatattttagccctgtttgtgtcacagctctttcattcccaccatttggcgggtcccatgttcttgttccacatccaggaagaatgaggtatgtggacaactggagggtgagcaaggtggagaggaacttcattgagtgacagaacagctctcagatgacccaaaatgggtagctcctttctgcaggccagtcatcccaatgagtggccagctgtcagtggagagaagaccaatggtggggagctccttcctgaagcagttagtcccgatgtctgtgtgagtctggctgagtccaaggtttttatggactcagcagggaggaagtatgtgctgattgatctgtgggtggccatgagtgggcccagaaaaagcaccataagttatcactctgggcagtaggctcca

SEQ ID NO: 197259 - DNA, 1000 bp, Homo Sapiens
acagctattttgagtttaagtcaaaagcttccctacttccagctccaaaagtaaataagaaaatgagacgttgtatgtaaaaggtttatacttcgtaaagataatttgtaataacaaaggcaagatcttattttttttcagtacctcttaagaatctcagttttagaactgaatccaatggagaaaccatcttcgcatcaacaactatctcttcagattggataaagaaaatgtggtacatatacaccatggaacactatgccgccataaaaaagaatgagactatgtctttagcaagaacatggatggagctggaggccattatcctttccttagcaagttaatgcaggaagagaaaatcaaataccacttattctcacttataagtggcagctaaacagtgagaatgcatggacacgaagaagggaacagcaggcactggggcctccttgagggtgaaggtttggaggaggaaaatgagtggaaaaaatcattactgggtaccgggcttaatgcctgggcgatgaaataatctatacaacaaacccctgtgacacgagtttacctatgtaacaaacctgcacacacacccctgaacctaaaataaaagttaaaaacaaaaacaaaagcaaccgtctcttgtcttagctgactgcactcgtggctgctgtggatcacttctcgcgatgtccacgtggcaagcaatgggttttccatagtgcctattggggcctctattttctcaacccagatgggaattgcagatgtgaataccaagtatttcagcgttaacttttctctttttgctcttaacaaactaagctgcgcagccttgaaacaggagtcgccctaacttggaatgattttgagacccacaatcttgtttccagcatcagattctaaatcagttgttttgaaaacggcggctccattctgttgactgtgaagttagcgattgttcctttaacgtgtagctccttcagaactaatgggggaattc

SEQ ID NO: 197260 - DNA, 1000 bp, Homo Sapiens
ctgcttctctgtctccattatcatacttgatgtccctggattgtaagagctatatatttccccagcagttttcctattgtacattacagtgaaattttactgtacaaataaatgaataactacatataaaggtcttttttcaatgcctaggaaagagtagggggtcaatatatttcaattctttatcaattttctcagtctgtagtgaagatgatggtgttacaatctcctagtagagttccctctgctttttattttgaccttttgcatgaagtaccaggccattaggtgaatcttttttacttagatctaagccaatttttactgctgagtttcagaacccaaaccccaataatctcctcataataggagattaagtcccgatttccatttctgggccttcttttaaaaagtgaacactagagaaaaacgtccataacaatagttcaagacacattcttcagacaccacaatgccatgatgatgtgggtaaatgagattcttccaataaacatgctcatggctagatatttgttaaatttaaaatattttccaggctgggtgcagtggctcattgttgcaatctcagcactttgggaggctgaggcaggcaaattgcttgagctcaggagtctgagactagcctggctaacatggtgagaccctgtctctacaaaaaatacaaaaattagctgggcatcatggtgcatgcctgcagtcccagctatgtgggaggcagaggtaggaagattacctgagcctgggaggtcgaggctgcagtgagccatgattgcaccattgcactccagcctgggagacagatccacttaaagatccactaacttgcagaggttttccataaagatacatgatatctggtatttcacacctattcataactagaatatgagtctgtatctttcagtgtttctttttttccttttgagacaggatctcactcttttacccaggctggagtgcagtggcatgatctgggttc

SEQ ID NO: 197261 - DNA, 1000 bp, Homo Sapiens
acctaaccttcagcaaccagcaccctgattaggtggtggttagtcagcaacattcagcattgaggaaagatcatccagcagcaaaaagttatgacttactgaaggctcagatgatcgctagcatcttttagcaataaaatattttttaaagcaagctgtgtacattgtttctttagacataatgctcttgcacactcagtagactacagtatagtgtagacagaactttttttttttttttgaggcggagtcttgcactgtcacgcaggctggagtgcagtggcacgatcttggctcactgcaacctcctcctcccatgttcaaatgattctcctgcctcagcctcctgagtagctgggattacagatgcccaccaccacacccagctaattttttgtatttttagtagagatggtgtttccccatgttggccaggttggtcttaaactcctgacctcaggtgatccaccttccttggcctcccaaactgctaggattacaagcatgagccaccgtgcccagcctgtagacataacatttatatctattgggaaaccaaaaaacaaaaaacaaacaaacaaaaaaaactggtgtgatttgctttatagtcactttattgaagtgatttggaaccaaactcacaatatctctgaggtatgcctttatgtacagaaggtgttaatctagattactccatgagtcttgtctagcagtaaaaacttttgttgtcatttgctttagtcagctttatgcatttactatttttgaacagacttactttcaggtagcaaagttacttcctaagtaagagagttcttattatcaactgttttttttttcctgtatttgcaatctctgaacatactcctgctgttttagtagagatgaaaaattattattttattctttcatagtagtatcttgaagagatttttacctttttatctagtgttatcaaatgttccacagaagtgatgtatttcttttgcgaactgaattc

SEQ ID NO: 197262 - DNA, 1000 bp, Homo Sapiens
cttccacctgtttccagctcccgttggctccatgcagtgcacagccctggtcatgccacccccactgcagccaatgtctttgcagcagccactccagatgggctgctggtgccatcacttctagaactgtttctaggcatgcaataagcacatgaatgtatctagtttttaatataaaaaagaggaccatatgtgtttcatctgctctttaaattatgtcatcaatatattaacatgtaaatgaacaggtttgcaccattgtttttaaagagttatataattcttttattgagaatgcatggtttatttaactccctcttaatgaacatttaaattattcttgatttcagaattacagaaaataaaggaaaaatattctttttaaaatttctttggtatatacatctttaatcattttctttgggtaagctcctttagttgatttgttggatcaagaagtttatacattttagactttggatccttacagccaaattgccctataaaaattttgtaccaattgacattctcactaacaccatgagaatctttgtaatttactggacgtcttatttatgtttttgtattttgttaattgctagtgaatgtaaacttttaaggggtcctcattggcaatttttattttgtattttgtgtattgcttattgatgttctctgctcatttccttcaataataaatagactgttgttatttatcggtccaaaattcattctaaaaatattttggatttttacctaaccacttctgattcagatctcaggaactatttttagagtgatcctacttccccagtatacttactttctcatttgtatgatgagtcacacatctctttccttctcttaagttcagtcattgtttctactgcttcatcccaatttgacctggtcataattaatatttaattcttttcactgttttctactaagtgggattgaaggtggggataaagggagaataatttttttcttagaattc

SEQ ID NO: 197263 - DNA, 1000 bp, Homo Sapiens
atcactgtagtggggttgttgcaggagtgagctatcaatggaggctcagggtggtaggtggagatttgatgaggaatgagaatggacatctttcttcagcatacttttccattacaaagaggaaaattgagactttctggtgggaaacaccagcagacaccagcgtggccaggtaatgagacacctgtcaccagtggagaaaagttgaaactgagtccccgtgcactgtgctgagaagagcacagcagcacgcctgacacttttctgccagaaaccacagcctcagtctagcctagggaatatcagatagacccagaaggaaggccattctgttttctttattactgtcatgagccaggaacagtggctcacgctttgggagactgaggcagaaggatcacttgaggctgggagttcgagaccagcctgggcaatgtagtaagactccatctttacaaaaaaaaatcttaaaaattgccctggcatggtggcacgagcctgtagtcccagctactaaggctgaggcaagagtattgcttgagcccaggaattcaaggctgcagtgagctatgattgcaccactgcactctagcctgagtgacagagggaaaccccttctcaaataaataaattgtcataagagacaggataagactaagaattgttccagattatatgagactgaagagacataacaactccatgcaatgcatgttcctgggaggtcccagacatgggaaaagaagtgtgggcacagttggtgaagcttgggtggggtctatgggttggacaatgtattgatattgatttctccactgggaaggttgtgtagtggaggtgatccttgtttttagagtatttgggggtgccgtggtttgaatgtgtcccttccaaaattcagatgttgaaactgaatggccaaggccaggtgtggtagctcaccagtaatcccagcactttgggaggctgaggcaggaggatcgcttgagcccaggaattc

SEQ ID NO: 197264 - DNA, 1000 bp, Homo Sapiens
ggaacagtttcattaaatgacttcctatttgtaaagtgcttagaagaactcaggggatagaggaagtactatataaaagttgtaaatcaaacggccctcgtatgcctgccctggtctccctagaacatgtgctgagtcgtgcggggtggtggctgctctggatgattcccctgcttctgctgcctctgtagtttacaatcccttgccttttgggtgacacctggcaacaagacctgagacctcaatgctctgatttcctgcttcaaatgcacattttagtagtcttgattttaacaaagagccctgttcaaccttgttgtgtaaggacaataaaccagattcagtgggtggtagtttttactagcttcctattctaattttcaggtttgaaagatataaaagccttccatatccaagcaaatgtagtggaacacattgacgtctctaggcaaagcagggtgctctaattctgtagaatttgagagagggctttagagtcactgctaggtttgtgtcccagtttttccatttaccaggcgtctggctttggacaggctaatccctaggcttctttttccaatactggtcttacaaggttgcttccttatatggagtctttctgggaattggtggtccttctgagcatcctccacagatcgtttaggattcaacttctggttccactagctaagccaacattcctcccctcctgcagctttccaggccctgaaacagggtggttgtcttcactccagttttgtgtccctgggagtttatgctttactgaacaaaatccctcttttgcccgtttagtggtactttcataaagacacagaggtaaatttatgtgtttaatttaccttgtttaaccaagagtaatctttaagtgtttaaagaaatagtcttagtctatttctgttatcaaaagaagtcttttgaaattttcccgtaagaatgaatttaatgcttcctttcctcgttttcattaatctaagaattc

SEQ ID NO: 197265 - DNA, 1000 bp, Homo Sapiens
attactatatttacttgagaaaaacactattttcaaataaagcttccgatgaaccaggaattgatgaggaagacaattttaaaatgaattttcattgtgattgtagctacaatgataaaatggatgaacagatattttgaatcacctacaaatcataaagtcactttaagtttcttgtatgatcaccacaagttgtaggaagtaccattgcataaccttatattttaagttaatttcagactttcctgaaactaattgtataaagagttaaatctttttagaaaaaatgttctctaagaatcatcaactccagatgtacaatttatattttcaaaaaatatatcagaattgtcataacctaagcatactcttaatagtttcaagaacagttccatcagcagaaagattattctgaaaattaaaaactatcaaaaattatttgtgatcttgcatttttcaagagtgactgatgtcacttttaattatacagattgaaaatgaagttacaaaaagtataaattctgatgtcctaatttgcagaaaagcaagacataaaaatgttatgatcaaggaagacatcacattaatcagtattatttattgtattaaataaaatcgtgacactgaaatattattttttataatttttaagtttatagcattaatcatgtacttcttttaccccatcatgttttataattaacaaactatttcttagagaaaaaagttttgtattttattgcgtttacctgatcttcttttatcttgctttttaaactgaggaacctgtgataacatttcactctgggcatcacaagttacatatttggcctcaagcataatgtatgaattgcagcttttattaggagacccatgcttcgagatttttttttttttttcctaaggaaaaatgttaagagggatgcccaccttccttggctcaggctctttgttctccataggaccagtcaaaaatctttcagcaaatactatttaccta

SEQ ID NO: 197266 - DNA, 1000 bp, Homo Sapiens
taaactagttcaatcaccccagaaaaatgtttggcaatacttaccaaagctaagcatatatatgccctgacttagaattccacacctggataatattccggaaaattgagtgcttgtgcctaccaaaaacatctttaagaatgttcatagcagatttatcataatagcacaaacctggaatcaactcaaatgcccaagatggtgcccaaggtaaattggtatatccatacaagggaatactacacagtgataaaaaggaatgagccaaaattcaaaacatggttgaatctcacagacataatattgaataacagaagtcagataccaaagaagacacactgtgtcagtctacttatgcctgtctatgaggtttaacaacaggcaaaattagtctatgataatagaggttggaatagtggttaacctggggttgccacgaattgaagaagcacacaagaaggcttcctgggtgctggaaatgatctagatcatgatgtggatgatggtggtaggggaataatcatatgtaaaagttcaagctacacacttaagatgtgtgtcctttaggtcagacagactcagaaaacagaaaccaaaccaatccttccctgcacacaaacaagatttacccaactgtaaaacaatgcaattttatgaaatttatcagccatgataaatttctaatagaaatataacctcccagcctcggccaacactaagccagagctatttaatgttcactaaacctcagataccttcctacagatcagtaaactggccggatcagatgtatagtatttaaattaggagaaacattccaaaagggaaaatatagaaggccttgaacttgttctgacctaaatctgcttgattttgatttatttatttatttatttatttatttatttttgagacacagtctcactctgtcacccaggctggagtgcagtggcatgatcttggctcattgcaatctccgtctcctgggttcaaggaattc

SEQ ID NO: 197267 - DNA, 1000 bp, Homo Sapiens
catcatggaggctgatgcagccactgccgctaggcaggaacggggttctctgactaggaatgccagccctaatttactgtcttgaaacacacagattgtactggctacagcacgatactgtccttggggcgccaggcttacacaggacttccttgctagagtctcggctgtcaacactgatttcatcttcttttgcttgctgcctgtgtggactttgcacggtttcagaatcgtaccaggcttactgctttcccgtgatacttctagcgttaggtcttgttttgtgttcctgtcaaacattctgaaattattgttaagacccagtcacaacaccgtcagatccattccaacaacactgaatttgtcagacacatggtccttttcacacagtgcacagcttacttccgagctactgatgcacctgttacatttccacaggcattttccataattttttttttttttttttttgagatggagtcttaccctgtggcccaggctggattgcagtggtgcgatctccgctcaccgcaacctccactccccaggttcaaatgattctctagcctcaggctcccaagtaattgggattacaggcgtgtgctactgagcctggctaatttttgttattttcagtagagatggggtttctccttgttagccaggctggtctcaaacgcctgacctcaggtgatctgcccgcctcggctttgcaaagtgctgggattacaggcgtgagccaccgcacccggccgcgttttccatattgaagttccaacttttgactaacaaatggtctctatcatcatatttgaccactatggctgaattttacgtcagaaattagatgatttcagacaaaaatgacccattactggaatcatcaggttcttcagtgtagatgcctatcacagagggcagacgctctcatgtcacatgagcaaatagttcctttactgctgctagatacagatgtgttatagctgttcagatggaattc

SEQ ID NO: 197268 - DNA, 1000 bp, Homo Sapiens
tatttatttattattttgagagacgaagtcttgctctgtcgcccaggctggagtgcagtggtgcgatctcggctcactgcaacctccacctcttgggttcaagagattctcctgcctcagcttcccaagtagctgggactacaggcatgcaccaccacacccagctaatttttgtatttttttttttagtagagatggggtttcactatggccaggctggtttcaaactcctgacctcaggtgatccacccacctcagcctcccaaagtgctgagattacaggcatgaaccaccatgcctggccttctgttaactaatttattaaatgaagtgtcttgaaaaggaaatcctgtttcccactttttttccattcccagaacctgtaaagagtctgaaaaatatgtatgtgtgccatcacaattgattgaatggatgaatggtggtaatccaaggtctaaaatactgtcagacagaagaagggtaaggcaagcatcagtttaggcttttgggcataaatatgaaaaatctaaaaattcacagaagtatctcaattgtcggttgtcttgtattcttagaatatgacatacctaagggcagtaattatgtttcacatatggtacttactccatgttggaaacaattgggaaaaaaagaaaagaaaaagagtgtaccaactcattctcatgtactgaactaggtatccctaaatattaaatgacctccagagagtattaaatgtttttggaagctgtgctatttttttagactgaccaggaccctgttatgtgctttcatgatagaatatgattcatgttcccagacataagtcttaggcatcattttttatgttcagaagtgaacagaagacaatacattaaaataaagcattcactttgaaaaatcacctcattatccaaaatcactgaagaaaaatagacatttaacagggagattatatttaaaggggcatttttttttttgcgggtcgggggaagaattc

SEQ ID NO: 197269 - DNA, 1000 bp, Homo Sapiens
ccatcttggccaggctagtcttgaactcctgacttcaggtgatccacccacctcggcctcccaaagtgctgggattacaggtgtgagccacggcacccagcctcttcctcttcttacaaggacactaatcccattaagggggcttccccctcatgacttcatctaaacctaggcacctccccaaagccccacctccaaataccatcatattggccgtttgggcttctatatgtgaatgtgaggaagggaacacaaaatttagttcataataagaagagagaatgggtgattgcgccttaccataaaaatatttttaagctctacatttggttctataacagtttttcttttttaattttgataaaaaacctgtgttacttttgtccctcaaatccctcaagaaagttcatgctccaacaaggggcatcgtgtttatcatggaaccaagacagctgggtgggaagggctccctgtcaaaactccaaccagcctgtgcactgggaggaatgaacagtgggatggagccacagaagtctgcaccatttgcagcagggaagggtctggcccctcctcttcctgtgtgcaacctgagattcaaactacgaggtgagaattgcaccagcagggactccggctttatggagggtccctgtttccctttttacccaataacacactgccttactcacccttcaaattgtctgcaagcctaaattttcgtagccctgtgacaaggaccctgtatttagctgaactaaggaaaagtcccacaacagaactttgcctgacctctggcatcatcttctcagctccctgcttatctgtgcctcagctggagaatcgacctcagaggcttatgtgtcctcaaatagcaaggagtaagacccttcagacaaaaagtcttactcataacctcattaagccttggccataggacttgctccaggcattctatgagtacatgaaggtctagattctagtgcagacaaagactgaattc

SEQ ID NO: 197270 - DNA, 1000 bp, Homo Sapiens
ttgaaaaactgtccggcagtgtcacagccattgatacagaacacttccaagaagtagaaatttccaccctacaaggtccttccagttgccctttaccacacccacttgctccctgcctgcatttttctctgtaaccctcggcaattaataatctgtttttcgtttctacaattgtctgatttcagatgttataaacacgtttcaaatgttacatacaatccttctgggaggggttttacttactcagcacaaatttcaggaaaggaattcaggtggttgcttgcatcaattgtctgctcattgtgtttgctgagtcatattcacggtagagttgcaacacagtctgtttaaacagtcgcctgtataaggacatctaggttgcttcttattcttggctattaagaataaaacaatcattgatatttgtgtatgggtatttgtatgaacacagtttttctcttctctgggataaatgcctaatgtgcattactgggtttatatggttgttgcatgtttagctaaacaacaattaaaaaataaaaaccttccaaacttttttccagagtgcatgtccattttacactcccaccagccacgtatttgtgatcccgtttatcagcatcctcgctagccttgggtgtcctcaccgttttttattttagatgttttcataggtgtgtagtgatgtcttactgtggttttaattttcattgcactaatggccaacattatgggctgaatcatgtttctccaaaattcatatgttgaaaccctaacccccagtatctaagaatgtggttatatttggagacaggtccttgaaagaagtaattaagtcaaaatgaggtctttggtatgggccctaatccaatctgatttgagcctttataagaagaggggatgaggacaccagagagacatctccagaggggcagccatctgcagaggacgcaggagggtggccatcatgaagcccaagagagatacctcaggagaattc

SEQ ID NO: 197271 - DNA, 1000 bp, Homo Sapiens
cagtgtaggtcaagcctgtatttttatgttaggagcttttgggaacatcaacctagattttcaaaattttctctctgaaagagccacacctcaaatcttctaacgcttgaggtttctcagctctgctagaaaacataaaaggtatctgaaattcttagaaggactcaaagtaacaggaaccttgatttctaccgtttagattggcgctaaaatcttcacaagggcttattagggcttacgttatctattccatttgagaagctaagcatcacacaaagccaataaaaaacctaggagacatctactgtaattctatgtaacgtatgaaacaaatgaaatgtattatctgaaggatacagaccttaagactacaaccaagatgaggaagaaaaagtgtatgtaattgaaaatgcagcaaatatatcagagttacccaaatagctgatagaaggtaaagtacatcattgcaagatgtggcctaattgagctaatttatcacttttgcaccttggcataccaaaggcaattatgtccacacaagtaccaaggacaagaagatgcaaaaattaagagaacatttttaaaatttggatttctgatgctcgaagccctaattaaagtgttgtccactccctaagtaacaaatgcttgctgtacctggcatattttaggctctcagtgaatgtgtgtagaagcaatgaataaatatttgaacaaggatatgtaaattcagatacatttctcctttattttttaaattttagagacagggtggtcttgctatgttgcccaggctggtcttgaactcctggcctcaagcaatcctcccacttcagcctttcaaagtgctgggattataggggtgagttaccgcacctggcccagatacatgtttgatccttcatatatagcaagctaccaacaacaatttctggatttaaaaatctaaaagtattcataagagtatcttttccattcatttgcaatcatattggaattc

SEQ ID NO: 197272 - DNA, 1000 bp, Homo Sapiens
ttggtctccatctcacaatcctaataagcatttcctcataaatatttaattagctcttataagtctaataaaccaaacttaaaacacaacaaattgaattccctaataaatttaaataatgtttaccaacctaatcaaattctcctaatcctcattcaacttaaaatccaaaatctaaattcagttttgagttgaagttgcaaggcctgtcaggttctctgatgatatgattctcttaggcactaacacatgtacaataacaagaaaaagccctcaccctaagacgtgtcacagaaagtgttaacattctaagcttaattaacttcattatttctgtagcagaattactgtgttaggccagctgaggttagtggctgaaaaaattcaggaccctgattgccagttggaaatgagagaatgaaaaccaggacttgggacctgcatcctctcagtaatgagtctgccctgcccaccataggatgcggagcaccttcttgcttccgtgctaacgggatcccaggtgtttctcatgtgtgtttttttataatcagtatcttccattgcagtgactttcaagggaataataggacagaaaaaataaataggaccttttatccaactatacatgccctcccgtaggaatcagataccttctcctaaggggatatcctcaccccactgagattccctagtagatcaatagctgccagcaggatggggcttttatggatggtcagggcctcctttactaaactggggaagaggtactggatttgtgaaaggggccaaataagcaggaatgaatggcagagaagccaggtacaaaaagcagggacagtacgtacataagaggaaaaatactagatgctaaattgtgtgtttttaaaaaataaccatgtttgggcaggtgcattggaaggaaagaaagcaatgggcaaggaagccacattccagttatgatcctattgtagtcattgaaagcagaagaaaagcaaacatg

SEQ ID NO: 197273 - DNA, 1000 bp, Homo Sapiens
gttaataacaataaaacattaataagtataattttcatgataaatttaaccaaagctcacaaataagttttgccttttcatttcaggatctggtcttcctttatagacattcactttattaagcctaatttcttttatcccgtcatcctcttccattcatggtgttaataatattttatgcatgtgctagtaaacttggggggaattgaggacccttactcaccttaggcagcgtccttgttactcagtggtgctgttgaggagaattagaatgtaccaaggagggagtcaggttttagtcttggaatagtcactgttctcggatctcctatagctgagggcaaagttgagcattgaaggagggagtgggcatcaaagttggtgtgttgggatgctactttttaagaacccagatgttcttatttctgggtaactccaacatgtagacacaaagagggggataagcctcaaggacagagcagtctttatctcaaacattactgctggaactgtggaacccctgctatgagcagggtgctatgcataaatgttttcttcacccaggactggaagacacccctacctgtagaaggagaatctctgtgtcctttcctcactctggggcaggatcactacacctcaacaggctagtcagtcattgtatcccatccccatccccccacttccttgcttctttgcagttgggtggtaggagggcctgccctctcttgtgcttcctgtgcccatatggtggacacacctgatgaggcccaacttctgccttcctcattgccacctttccatctgtgtgggcagtcaggtggtattctcagtgggccagagaaggagcaggaggcctcactctggtgtctacccctaggctgattaccagggaagcctcctgggagaatgtgggagacttgcccataaagcaatgcagcattttccacctggctgccacttagcattccttatggatgtattccataattgagaattc

SEQ ID NO: 197274 - DNA, 1000 bp, Homo Sapiens
tgcatatcttttttggaaaaaatggctatttaaatcttttgcccattttttaatagttttttttaaattgtagagaacatagcctttaaaattaaaataagagtccagaagttgggctatatttcctaggtgttagctagtatcttgtccccttttcatagatttatttgtgtatctcaggttatcagtgccactatagatctcctccctcacagcaatcaaacttaggacttcatccagaaatgggtggagagaccactctcccagctccaaaaatgcttaccgggatggtcaatgactgcctccttcttgttgctcagccctctgagagtccttggctggctgtgcagtttgctgcacccagttactttctttctttctctctctctctctctctttgtttttgagacagaatctgattctgtcatccaggctggagtacagtggcacaaacatggctcactgtaccttggacctcccaggctcaagcgaccctcccaccttagccccccaaatagctgggactacaggcgcatcaccacacgtggctaattttggtattttggaagagatggagtttcaccatgttgcccaggctggtcttgagctcctgagctcaagagatcctctggcgtgggcctcccaaagttctgggattacaggtgttggccatggcacccggcccactctgttactttctattgcattgcctgttaccttattttatagctttcataatactcatcatctgatatttctcatttgtttgtttgctgattatctcttccttttggaagcgtgaattccatgaggccaagacattgcctgttatgactgactgtgtgactgatgctgacacagtgcctgtcacatggtagactggggctgaggttcagttcccaggggtctggctcctcaggaagtagcatgtgtcaagggaagatgtgtgacatggggaagaactttctagaggagttaccaggtcctccagtattagact

SEQ ID NO: 197275 - DNA, 1000 bp, Homo Sapiens
caccatgcctggctaattttttttttttttttttttttttttagtagagatggggtttctccatgttagtcaggctggtcttgaactcccgacctcaggtgatccgcctgtctcagcctcccaaagtgctgggattacaggcatgagccactgcacccagcctaaaccaacatttttaaatggttgttagccacatttgcaaactacacaggaattttttcatataactctattataaattatataagtatctttacaccaaaggaatctttcgattgttcaaattagcaagaatgttttctactgagtgttattgtagatggtaaacaataaccctaggcctttaaatgatgtgttcaataccgtattttgtattttttaagatttagatgtattttacagactttgtccaaactagtttcattagatacatcattttttttttttaccagtttattccatttttaaggtgaaatttcattctatttctgaaccaacacttttggtaaaggccacagactcatttgtaaaacataaatggatgaaatatatcagaggaaaaaataagattcaacagtcagaaataaagtataagagcaatctggccgggtgcagtggcttatggctgtattcaatcccagcactttgggaggccaagtcgggtggatcacttgaggccaggagtttgagaccagcctagccaacatggcaaaaccccgtctctactgaacatataaaaattagccaggcgtggtggcgtatgcctgtagtcccaaataggaggatgaggcatgagaatcgcttgaatccaggaggtggaggttgcagtgagccaagattgtgccactgcactagagcctggacgacagaaaaataaataaatatatgtatttatttccatctttgtaccttgactaacatacctttataatggccagaaatgtcatgttcaaatttagaactgtaaggcaccccatactcctacgtgggaagaacctga

SEQ ID NO: 197276 - DNA, 1000 bp, Homo Sapiens
aagcatttattctattctcaaaattttactaaattgagggtatataaaggaaggcaaaataaaagtttctgtcctaatggaatttaaagtcttaggactgaacagccatgtagcagctggacaatatagtttttgttttcacctctcatctgaaggcatgaaaacttaattttttagttacatttgcttaaagatattagaaccaaaagtactgtaatacttctcaccttaaaacaaaatgaaacagaaattacttatcaggacctcagatcgccttgcaaccaccccctcttttctctgttccctcttacactgatactgctgaagagttgcctacaggtgttgcaaattctttataaccaatttattctccaaatctctttaatcttgctctgagcccttcactcagtggaaactgccattgttaaaagtctaaaactaatattcacgttggttaatctgaagttaatttctgttttcacagtgttcctctttatcaacagtaaaacttttgactactcttcctttttgaaatactgttacctcattagctcctcctcggccttcttccctaacagctccttttctgcctcagatttaatcttccttacatagttattaatgcatttaccttcttctctctttgttctctccctacacgattttattaactccatcattttatgctacatccataggctgttgatctccaagtcttgctcaggttcctcttctaggcatcagattcccatttttcactccccacttgacctttgctttggaaattttacgaattgcagacaattcatctcaaacggaacttgtctttcatcctagttttctctatttccagtaaatggcatcactatctacctattgccttgtctggaaatgaggaattcatatttcatttagcatttcctttactcctgaaattcagtccagcattaatgaaattccgtgtttctatatccaaaatatatcttcacctgttgaattc

SEQ ID NO: 197277 - DNA, 1000 bp, Homo Sapiens
aaattagccgcgcatggtggtacgtgcctgtggtcccagctacttcggaggctgatgtgggaggttcacttgagcctagaaggtggaggctgcagtgagctgagactgtgctactgtacacacacacacacacacacacacacacaaatcagcatgaagcattaaagtagcattaaaggttcctcaagtaatcttcctgttacagttttaaaaaaaaaactttcttaaataacatctgagtggccgggcgcggtggctcacgcctgtaatcccagcactttgggaggccgaggcgggcggatcacgaggtcaggagatcgagaccatcccggctaaaacggtgaaaccccgtctctactaaaaatacaaaaaaattagccgggcgtagtggcgggcgcctgtcgtcccagctacttgggaggctgaggcaggagaatggcgtgaacccgggaggcggagcttgcagtgagccgagatcccgccactgcactccagcctgggcgacagagcgagactccgtctcaaaaaaaaaaacaaaaaaaaaaacaaaacatctgagtaattcagggtccataaaaccaaatctttaaattacttattttcccatgtatatctccactcccaactccaacaggaagttaccagaatttgacattctgaggaatttcattcactggtttgcgcctttctgcctgtgaggtagcccagactagcaaggaaaaccaacaaggagtcatcttcgtggccacatggttggactattcacgaacttactgctggtttgcctcaagtactcctggttcaccagttcatagagtaaaaatttggggtgttacttgaattgttttcttttgtcttactgttctgtttgtggttttgcatattaagtatttaattacataaacattgaatatgaatgcaaagtttatatgattagctactgaagtaaattgtgtaccattaatttcaatgaaaattaatttctgacttttaagaattc

SEQ ID NO: 197278 - DNA, 1000 bp, Homo Sapiens
taatcaagacaaaaatgtaagcaatgcagccattctattgatgaagtaggtttcatgtattaacattaaaaaggttaatgataagtttcaattttaaaaagttatagaataatatgcatttcatgtttcggttttcataaataatgaaactatatatgtgtgtgcataacaaaatatatagaagacacaaccaatgtttattagtaagaagccgaataacaaataagtgagaaattttaattttaatttatggatttgtttgttttatggtggattttttaagaacaacattatggcgtttgaattaaaaaaaagagagcgagagacataggacattcttaaaatatgaaaaaaaaactaaggaagattatatatgtattttcatggaatttacatcactgcagtgtccaaggtaccactgtgattcttcttctgacccccacctttccacattactcacaactattttagtgacatgctctcctgagtggctagaagtagacaaaagggataatatgggacaaaggaaaaagagaatccagtcaaaaatactttgaataaacaattaagagattatatttctgagccctgccaccaactcatttattatatagtcttgtacgcagagattcaattatctgtcttaatttctccatatgaaaaacaaggataataagtccagacccctcctaacctaatgagctaggtagagataaaaatgagaaggcggtttggtactttgagctcccaagtggaaaaatcattgtacaaataacgaggatgataattatcatcatcattattttaattattagtaatagtggtaatgaccacattactaagatgtttgtcacttgaaacattatttgttcttttcccagtctgtatagcattgtttttcaaactgattcaccctattttttagcttttttgagatataattgatcctatttcttagttacttttttattttctcagtaagtgattcaatactgaattc

SEQ ID NO: 197279 - DNA, 1000 bp, Homo Sapiens
ccaatttttcccatgagggtagactccatatctatcttgtttgccctctatccccaatccataacacatcataacaacaggagcttttgcccttaccatatcttcatctaaatgcttcattgatgttaatcatttaataaaaaataacagtaggtattattattacctctgtcttataaatgaggaagctgaggaacaagttatccaagattacatatctagtaaacagaaagccagaacatgaacccaggcattttgactctagagtcctcattcttctatattgcctgtcatattaggcatgcaataaatgtttgttgaaagaatgcatgaataagacagtaaattttggctgggcgcagtggttcacgcctgtaatgccagcactttgggaggtcgaggtgggcagatcacgaggtcaagagatcgaggccatcctggccaacacggtgaaaccctatctcaactaaaaatacaaaaattagctgggtctggtggtgcgtgcctatagttccagctactcgggaggctgaagcaggagaatcacttgaatctgggaggtggaggttgcaatgagccaagattacgccactgcactccagactggcgacagaacaagcctctgtctgaaaacaaacaacaacaacaaaaaacaaaaagatagtaaattttatattttagcttgactaaatgaggcatagaccattagaaataccaattctaccttcctacaaatcttataatagaggtactcaatagtatttatagcataataatatgacaatagccagcttcattcttgatgtaattgtagaattctctcaagtttctaaagagatattttttaaaaatttggttaggtttaatttgcccaaagttgttttcgtttccatttaaacatattctgccataaacaatacacaaatatataagcacagaactctttcatagtacttgtaaaagtggcttacaaacttggaaattcctgtgaagtgaattc

SEQ ID NO: 197280 - DNA, 1000 bp, Homo Sapiens
gaggctgaagcgggtggatcacgaggtcaggagatcaagactatcctggctaacgtggtgaaaccctgtctctactaaaaatacaaaaaaattatccgggcgtggtggtgggcgcctgtagtcccagctacttgggaggctgaggcaggagaatgacatgaacccacgaggcggaggttgcagtgagccgagatcgcaccactgcactccagcctgggtgacagagcgagactccgtctgaaaaaaaaaaaaatgtaaaaaggcttgttgattaaaccaaagtagttttagtgcccagctttttaaaaggggagtaaattatacctcctataagccagtcaagttaattttgatacctttaaagattctgcactagatgaaatcattgaacaatcaattagtcaccacataggagagcatgaagcactgggtagtcactgtcttggctttgcaaagagcaaattgtaccagatcgatttaatttccttcatgaagagattgacagtttatacatacatttaggaagcaattcagctgaacttcagaaaggattttgattcagccacacatgacattttagcactaactcaaaggatgtggtgtaggccagaccatattcctgtaggaagtggcctgcttctctggggggttatatttgaaaagtgttatgaagggcttagtgtcaaccatgaatcttgttttataaatacatatccaaatgctggagttattctgaatttctgtgtcatgcataaataattgaaaataaactcatatgttggcaaaggaaaaccttgatatgagtactctggaagattgttatagattaaatgaaatgatcttaaaccataaaagtgacaattgtgtactttatgaagggctgtaagatcaagttcaagtaacatgctatggtgatcctacgctttaccaaagatagatggaagatgggaacagctaggccataaataagacaagagacttaggagtcatagtggaattc

SEQ ID NO: 197281 - DNA, 1000 bp, Homo Sapiens
taactgtatccagagtagtaagctgaagatagtcgtacaacgatcccatttcatgataatgtgtaattaaccacagctgggtactggagtgtcttgatgtcatgtctgaagcaatgaaacctggagagagcaagaaaaaaattaatatacatgaggattccacattataacttaaagtatttagaaatagcgacctacacagtaaatgtcatctgtaacaaaaagtaattaaactgaccaattgccctaagaggaggtttacagaagcatcaacagagaaaaataatagcatttattccttaaaagggcactgctaataggaaaatttcatattcatttcattataagtaatactttaaaagatattttacattccttaagtttcagatagcaataatatctttgtgctcacccataatgatagtgccaagcccttcagcatgttgatattttaggaacagaccattcatcaaccatcctaaaagaacatcaaatctaaaacctgagtactgtattctagtcctgactctgcctgtgatttacttgtctaatactgggcaactcagttaggctccttagcctatatctgctcagatgtaaaataaagggggcaagtttacattaaatgattgactgattcacgaaataaaaaaagaaaccaaccaaatatatgagtatttatgatgctatctgtcagtcacacacagaaaaaccaagatgatagtgtttgctggctaaagaagacagatgtaaaaacgaaaacactacaataaaatacgaaaagtactataatatatatcttcaaagggcaacatgagcccagagcaggaaattatagtaattcagactaggtgttacaataggcttccattaggaagtggcaactcaactggtcttgaagtaaagtgagtgactgacaaatgtggatgaagaggttggagaagatttttctttttctttttctttttttttgagacgaagtttccctcttgttgcccag

SEQ ID NO: 197282 - DNA, 1000 bp, Homo Sapiens
caagacaccccttaagaagaaatagtagtacctttttccggttctgtctgtcaaggttggtggtttaaatcaggatttttcagtctgttttacagagcctgattacttcacaagtttataatatttttcaagttttctgaattgagattttaagatgatgtgatgatgtcacttgtgatttgccaattccgttgtgttgtttttttctttctttcctttttttttcttttttgagacggaatcttgctctgccgcccagattggagtacagtggcgtgatctcggcccattgcaacctccacatcccaggttcaagctattctcctgcctcagcctcttgagtagctcggattacaggtgccgctaccacacctggctaatttttgtatttttagtagagatggggttttgccatgttggccaggttggtctcgaactcttgacctctggtgatccgcctacctcagcctcctaaagtgttgggattacaggcgtgagccaccatgcctggccctttgttcttttttttttttttttgagacggagtcccactctgttgctcaggctgtagtgcagtggcacaatctcgactgcagcctccacttcctgggttcaagtgattctcctgcctcagcctcccaagtagctgggattacaggcatatgccaccatgcctggctagtttttgtatttttagtagaaacggggtttcaccatgttggccagactgttttcgaactcctgaccttgggggatccacctgccttggcctcccaaagtgctgggattacaggtgtgagccaccacgcccggcacctttgttcttcatttattctcccatctactctgcagtgacctcactgttctcagtaaatgaattaaggacttgatcagaaagtacacattggaaagctaagtacaatttatcttttgctcttttttcttatttggaaataatttcatacttacagtatagatgcaaaaagagtacaaagaattc

SEQ ID NO: 197283 - DNA, 1000 bp, Homo Sapiens
gtcggatcccacagagatccaagactcacaggatgctggaggtcattttggtctaaggtcctgctgcaccagtgagaaaacaagctcaggactaaccagaggcagaagaccatcccgagtggcacctaccaggtgattaggaattataagtctgagaagcaaaaatcaggccagtcaggagttaacagggaaaccactggcacaacttctgtgcttggtcctttggaggaaaaaaaatgcaatttttagatccctttaggtgaatcagcccccaaaatcttaagcaagcactttaaaactttgggttttggaggccttggctagaggcacagattgcctggagccatgcagcaccgccattgggcctcctagtcagtcaagacactcaagagtcaacatcctgtctgcagcgtctgccagaccctgtgcaaatttatacctccaagaagaggcactggcactcggtttaaaacaaaccacagatattcagagtgaatggtgaatgggatggaagtgaagccgatacccctcctcccgtgataaaaagctttcatttctgcttcggggttgttaacaatagagaaaaatataaaaatgtgaaaactgtgcttgacaaacagacatcagtctagaaaagggcacagttgccttgtttggtcatcagaccaagatgtgaccaaaagcagagaaataaatgtaacaagttcaagactcacatcagatgtcatgaacaaatacagtctcctcagcattcgtccagaatgccgcaacagcacattagcgtgcatccaacttaaacaatggggaccaaccagcacaggcaatatcctctgggaagaagcaacctctctgtggtttaaagccaccacccggtttaaagagacctacaggctgattcaatacacaagtcacgtgtacactcttcagggtgtgagagagactgagctaacagttcattctcccacttgcagtccatcgcttacccgaaggccaagaattc

SEQ ID NO: 197284 - DNA, 1000 bp, Homo Sapiens
actgtttaattaaacaggtgtaagtgaaataaagggaagcagaatcaaaaacatttgattctatgaattacatatgaattggtttataataactatattaagaaaacaatagctgggcaactgatgacttaagctacttgaatgaagccaatgttccaaattacctagctactgaatataaagcatatttagcccacaaactcctgagaatacgggacactttatacaatggcacaataaagtacaagcaaactgaatgtgcttcctcaaagccttaaaaagagttctcatttttgactgcatgaaatctgtataaagtaagtcacatcaatgtctgtctgcccaaacccccttttaaggaagttcttgctcaaggattcacatattccaaggaaagtcaacctgtatgctgttctgttatctgttcttccagttatcaattgtattgtctaccacttccaagtccattcttcattgccagatctgcaataacagagatggaccctgtaaatatccttggtcaactgtcacgttgttaagtgctgtcattagagggcagtagataaacagtacaaaaagaaagggtttctcttcttggatctgagctgttcctcttgctaagttcctgcagttcaggtggctgtttcagagctcagtagtcagtagctctttcccagacacccttggagacgaggcacattcctatgaacgcttctctgagagactgttgggaggccttacagcaagttataaaaaccgaaactcccagtaggcaattttccttgatgtcccaaagagcagaatttacaaaagtcctgctacaacatctcagtaacttatctaccatcctttatccatagttgttccctctccagacaggtctggatctgagcccgggatgggggagagctttaacattctgttccttccttggtcaccagatctaaccccagagctaaagcctactctacatgtgccacttctttactctttagaattc

SEQ ID NO: 197285 - DNA, 1000 bp, Homo Sapiens
ttgctataatcaatattcaaatcgtagttattaaagtgttatttttacaggtaattttttaacaatgttcaaaaacaaaataacttgtatttgtactccttttttttttttttttttgggagacagagtgtcgctctgttgcccaggctggagtgcagtggcgtgatcttggctcactgcattgttttatacatatgatcattcagtaaacacttgttttgattttatttaacttcattatttatctgtggtaacaaaaattgcctggtcactttcagtaacatttacatcagcaaaattccagtacaataaaataatatggaacctattgtaaaaggatttaaccattaacaataatattacattaaaagttatgaagaaattattgcctcatattgattgaaatgtgtttttgtcttaaatatgaggtagtattcattttaaatattttctcaagtaggcaaaaaagcttgtttacaattaatagtatatatgtgtgtgtgtgtgtgtgtgtgtgtgtatatttttttttcttttttttttttgagatggagtctcactctgccgcccaggctggagtgcagtggtgcaatcttggctcactgcaacctccgcctcctgggttcaagcaattctcttgcctcagcctcccgagtagctgggtctacaggcgcgcacaaccacgcctggctgatttttgtatttttagtagagatgggatttcaccacatcagccaggctggtctcgaactcctgatcgtaggtgatccacccaccttggcctccgaaagtgctgggattacaggcatgagccacagtgctcggccaatagtatatatttttagatatattcatttatatatttttaaaagataaaccctaagaattcaaagctgaagagctaggttgacagttctatttggaaggagtggatttttaaatttgcattaataaaatgatttggtttttacactatgtaatattttcttttaaatttagt

SEQ ID NO: 197286 - DNA, 1000 bp, Homo Sapiens
ttataaattgaattgtatagtttttattctattgtttcttgcatcttgctctcaatatcatgtctataagattcatgatatagttttttcagtagtttgtctctttttactgtactattgcattatatgagtacaccacagttcatctcttctactcatggtcattagggtggtttctaattatttgcttttatacacaaagatgttatgaatattcttgcacaatcgttctgtaggtatatattttcatttggggggataattaaagaggagtggaattatgggtcatggggaaaatgtatctttatctttataagaaactttcaaacagttttgcaaagtggtcgaacaatgttatgtaagtgtgagagtttcaattgctccacattgttgccaatattggggcttgttatgttgtctttataatattaggtattctactgaatacagtagtgtctcattgtggttttaacctccatttcaaatattgagtacattcctatgtgcttactgaccatttgtcaatcttcttttgtgagatgttccagtctgtggcccaatggggaagagggcatttattttcttataattggattataagagttctttttatattctcattgcaacacttttgcagatatagattttggccagtatttttttcctgtttggtgccttgcagttcctctttctgtagattaaacgatagaattgtgtcattgttaatttcctatttgataattgccatgtagttatccagtagaatattcttatgtttaggagatgcatactgaagtagggagaagtaaagaagcatcatatcagagatatatatatgtgtgtatatatatatatatatatatatatacacacacacacatacatatatatgtatatatatatacacacatacatatctatatggagagagagaatgatatagcaaatgtggtaaaatgttaacatatggggaatctgagtgaagggtaattaggaattc

SEQ ID NO: 197287 - DNA, 1000 bp, Homo Sapiens
actctccttctcttacttgagaagggagtgttcgtgatcatttgacctgttttagggaactgtccatgcgttttacagatattttggaaagttctttttaaaatattaatgtttcttgttaatgattaatgtttaaaaatgtaaactagaatttttcaagtagtctatgctatcacaattctaaatttactgttagtgtatgaccttctcccagaagttaaatcagctcaagtggctgaatagttctccttcattcagtgaaggagagattaaaagaggtaatatttctgagtggtggaggcgcctgcttaaaacaaacaaacaaacaaatatttatataggcagtagatatgtgatgagttgctccatatcagagaactttggaaattaagaggtttttctgacctcttgtgaaagtcttgttaaaaatggcaagaaattaaaaaacttttagaagctttgctattacccaagggggtagccacataataaaatggagattcattcaaagtccaataacccggaatcctgaggaaataatttaccactatgctaaacaagtagcattaaccaaagcagttgccatactgatggtttgtaaatacgttctagccattgtctgcttatctcgagaatggattgaggatattcctgatagacagcgaaggttttgctgataaaattgcccgactgttattctggacttaaggaattccaacgtattcttcagtgattgggtggtggggggtgtgtctggcacacatttcccgtgactgttattaaaaaaacagctccaaaatgccttttaacaataataaacacacttgctgtaccaaatgaatatttagaacaattagaaggaaaaaaatgaattctaacactaaatttgagaacgctctccaagacttgaacttccatgtcttgggaatttctaattagccttgatggcaatagcaactcctcctgggattcataggctactccatgcagttaggaattc

SEQ ID NO: 197288 - DNA, 1000 bp, Homo Sapiens
ggaagggacaagatgagcctggaacatcttgtgccagaaaataaggaagggctcttatgatgatggggacacgtcccaaggagacaggagccagtttgaagctgtccccatggccaaatctaaaacaatttgagcatcaaaataaataatgattgtaaatgagtataactcatagaaaaataagaatctctaagtccacatggtataaatcaaccaataaatgagtagagaaagctcttctgtagagttgagggccagctaataggtatagaaggatagaattagtcctgtaagcccagctactttggaggctgagtcaggaggatcacttgagcccaggagtttgagaccagctagggcaaaaaagcaagaccctgtgaagaagaaagaagaaagaagaaggagaaggagaagaggaagaagaagaagaagaagaagaagaaaagaggaagaagaagaagaaagcagaggaggaggggaggaggaggaggagaaggaggaggaggagaagaagaagaaggagattagaaaatcaccatcatttggtaatttggtaatatcacagtgacaattcagacaaagatcaccaatgggtgctgaggctagtggtgacagtcttatgagaaacaagatatttatatggcttcagagtgtctccccacaagacacttactcatgacgggggtaaaatagttatttatggagtaaaaacctggcaaacagcattttgaccaagtgatgaaacaagtcggcaacatatgcctcctgatacgatgtactgaggatgcaccatcacttctgggtattcctgcccgaaacccacagcccgaatctcaccacaactgaacatcagattcagccaaactgaggaacattctacagaataactggccaggcgtcctcaaaactatcagggtcatgaaaacaaagacagaggaattactcagattaaaggagatgaaagagacacggcaactaaatgcaatatgtagctgaattc

SEQ ID NO: 197289 - DNA, 1000 bp, Homo Sapiens
tgcccatgtgagtctcatatttgagaaaggtggaaagcactggtcagtgaagatgagactgggtaatcctataagaagctgacaatattaataataatacacacaaaagttacaaatgttaggtgaaaatattcatacagtaaaattactatcattgagaattccttcatcccaaaataccataatgtaaatgaaaacacctgccaaaacaaaagaagacaggcacaatgtactaataggagaatgtagagcaggagtctcttactggaggggtagaaattagcatgacttcagaaaatgatgggcattaccaaggctgaacatggacataatttgacactgcagttttacttaggtatgagaccaaatgaaatgcttgcacagctataccagaagacatgtatacccacattcttagcaagaaaacttggaagaaaaattgttgaaagcaaaaaactgaaaacaacccaaacgtccatcaataataaaacaaatgaaaaagttacagaataatttcataacagtaagttatataccagtgcaaataaatggaccacagttactgcagctatgttatctgcatgcatgaacctcaaaaatactctttttagagagaaggcaagtcacaaacgaatacaaacagcgtgattccaattacatgatgttaaaaacaagtgaacaaaaacgtgttgttcacgtacccatacacgtggtacacaacctgaagaaaaacgagatgactttgcttgcaaagaagagaaactggggaactgccacaggaagggcattagtatgttttgctacaggtacttaacaaacagaaaatgtttaagaaattccttcaggtgattcatgcatggtgaagtttaatactgtttcacagtatatagctctcatatatgctaggagtagggtgaataagaaaaatatacttattctttcctacttaagaaatgcaactgttgcttgtgaaggttactctgctctatcaccagaattc

SEQ ID NO: 197290 - DNA, 1000 bp, Homo Sapiens
ggaacctctagactagtttttttatttttattatttgagacggagtttcgctcttttacccaggctggagtgaagtgacgcaatcttggcccactgcaacctctgctctccgggttcaagcgattctcctaactcagcctcccaagtagctgggattataggtgtccaccaccatgcccggctaattttttgtatttttagtacagacggggtttcaccgtgttggccaggctggtctcaaactcctgaactcaggtgatccacccacctcagcctccgaaagtgctagagttacaggtgtgagccaccatgcctggcccaaactgttcttcatagtggttgtattaatttacattcccaccaagaatgtatgagggtttccttttctctgcatccttgccaccatttattattgtctgtcttttggataaaagccatcttaactgaggtgagatgatatctcattgtagtgttggtttgcatttctctgacgatcggtgatgttgagcaccttttcaaatgcctctttgctatttgtattcttctttggagaaatgtctattcaaatctttgtccatttttaaaattggattattagattttttcctatagagttgtctcagctccttatgtattctgattattaatctcttgtcagatgagtagtttgcaaatattttctcccgttctgtgggtttacttttcacattgttgattgtttccgtcaatcttattagtcaagaaatttttgctcagaccaatgtcctggagagtttcaccaattttttttcagtagtttcatagtttgaggtcttagatttaactttttaatccattttcgttttatttttgtctatggtgagagttaagggtctagtttcattcttctgcatatggatatccagtttgcccagcaccatttattgaagagactgttctttctcaagtatgtgttcttggtgcccagtgaatgttcttggtgtatgttaaaaatgaattc

SEQ ID NO: 197291 - DNA, 1000 bp, Homo Sapiens
cggtgtcgattaaagtctcagcaatgtccaatgtcttatctcactcatgaggtcttcatcttgccctcagtttggtatgttaaaaaagaaaaacttaaagacactatagaaatgagatcactcatacgtgaccactgctgctgatagttctggaggtaatttgacgatcaccagtcaagctgaagatgcacacacctggcaattctatccttagaaacacattctagagaaactcttgcccatgtgccaagaagacgaagataagcatattcacagcagcactactgatcacagggaatctgggaaagtgtacgtccacaacaggacgtcttaggtactggaacactacagaggccacgaaaaccagcatcgtgggcctcaactcaggccgcgcctgtcaggagctctgcggttcatgcctcgttccccagaaattctgatttaactccaggaatcaggaatcagttgtattaaaccttgaaccatttaactaaagctagatgtagccacagggataaatccaggaagcgtaatgctgtggctgtccagtctgataacatttattcgacatttcagaaccagttcaacaatgctatatactgtttatgcctacacacacttatcaaaaaagtatataaacatgaaaacaaatgacaaacaccaaagttaggatgcccccagggaagggggagcaggaagaaacgaggataggaaagagaattccaagtgcctctgttatatctattatgtttatttctcaggctggaagcagtcatagctgggttcatgtgttactttttgaatgttttaaatgttttggcacaaaaatatgctaacatgcccaagccagaactagagacacacacaatatagccatgccctatatttgtagtttagccatacggaaggttaacaggtcagcctgaaaccatgccagtagccagactctgctgagggaactgggggaggggaatctcctgagcgcctgagcctggaattc

SEQ ID NO: 197292 - DNA, 1000 bp, Homo Sapiens
taatgtttcaaaaaagccttttctttttgtttctcatttaaattcatggttatttctttaccagtacaaattagagacttgcaagaccccattgtgtttgaagacacaaagtagaatccatttctaggtctcaaactatatttagaatatggcaattctacaaaactaccttcaaataaatttaacattctttcagattttttccggaaaatataaaatttcttacttttctttttcttctttgaccgttttatcctcaagttctaaaatataaaatttcaaagatgacattgtaattgccattttcagtgatgtgccatctttgcttaagtatttaagttttagataggaagtatagagacactcagcagagtctgggcaatgactctaataactagaagatatacagtgtttatataaaatttgagaatcagacagccatcttttgttctttatttcactaaacttttaatcattttatctcattttgttgttcagggaagctttgctgaaaacctttcatttcttctggaagctttaaaaaaaggtaaatattaacatattcagccgtttcagaagatctgttttaactttattttttccctgattataaaggtaatacaagcttttgccaaaaaaaaaagctctcataaaatacagaaacattaaaaagaatacaatgttcactgtattcccaccactataacagtgattatctcaattagcatttggtttcttatctttattcaatgatatactgatctttatatcagtatattattgatagagataaatgtgattttttacaacaataaaattattttacctattttgtaataagattttgatctgcatcatcatttttatggttcttgttttataaggtgctatttattaatcaccaattatgggcttttgtttctaattttttataattaagaagagatactttgatgatcatccagatatttcctgggataaatttctgtgggtagaattc

SEQ ID NO: 197293 - DNA, 1000 bp, Homo Sapiens
tgtcgctcaggctggagtgcagcggtgcaatctcagctcactgcaagctccgcctcccgggttcacgccattctcctgcctcagcctccccagtagctgggactgcaggcacccgccaccacgcctggctaattttttgtatttttagtagagacggggtttcaccatgttacccaggatggtcttgatctcctcacctcgtgatctgcctgcctcagcctcccaaagtgctggggttacaggtgtgagccaccgctcccggccaataatagctattctttaaatgtgaagtagtatctccttgtggtgtcgatttgcatttccctaatggctggtgatgttgagcatcttttcgtgtgtttattgaccaattgtttatcttctttagagtaacgtctatttgagtcttttacctacttcaaacaaattttgttgttattgttgaatcgtaggagttttacgaataagatgtattctggatattaatcccttctcagttacatgacttacaaatattttctccttttctatgggttgcatttttgcttttttcgtagttttctttctttctttctttcttttttttctttttctttttttttttttttttgagatggaatcttgttctgttgctcaggctggagtatagtggtgcaatctcagctcactgcaacctccacctcccaggttcaagcaattctcgtgcctcagcctcccagtatctgggactacaggtgcatgccaccacacttggctaatttttgtatttttagtatagataggggttttaccatgttggccaaactggtctcgaactcctgacctcaggtgatccacccacctcaacctctcaaagtgctgggattacaggtgtaagccatctcacccagcccttcatagttttctttgatacacaaaatttttaaattttgatgaagtccgatttatctatttttttttctttttttgcctgtgcttttcatgtcatatccaagaattc

SEQ ID NO: 197294 - DNA, 1000 bp, Homo Sapiens
tctcactgcatttatgcacaacctcaattgcagagccacattctacaagacttaaaagtggtggttttggagttagttcacttgagttcagattccagttctatccacttatttgctcagtccctttgggcatgtttcttattcacagagcctcagttcttcatctataaagtgagcatcataatgtcaaccttataaggctggtgtgagtatgaggagtaaataggttagcatatataagacatttggaagacccccggcagattgcttgtgctcactatatgttagccattgtttgtattgtttttagcatttcaattattattactacagagaaatactatctagtccttattgtactttgacacttattgaaagagccaaaccatccaatcattgtgagcatgatcttgagcttgaacatgccttctgtagccaactgagaaaagcatttacattggtatcattagagaaagttcatcatatactggtcttgaagaagatattccaagaaaaataagaattgttacaaaatatagggtctttattatctcccactatggtcaaagcatagctgtgacacattataaggtctttagtgaattattttaccacagtgtagccaatgcatttagaattctctttatttcagtaagtgtgaaaagccatgagtaaaagctgttaaaatgaggaagaagatatgaaagtaggagagtgttataattttttggccacttcaactccaattgaacacttccagtagctacaaactattagaaaacactcatagcctcctgcttctccattgtcttgattttaattttttcccttacttgtattttatttctgagtggctaatggatcttagtctaagaactggaggtggaggaggaaaggagacttgtcattacggtttttatgaaagcatggctttgtgaagttgtgttgtcatttcttcaggctcttagaaactgggtacaaacagctatcaaaagaattc

SEQ ID NO: 197295 - DNA, 1000 bp, Homo Sapiens
gtttttgttactgtagccttgtgtatgatttcatgtctggtagtgtgatgcctccagttttgctctttttgcttaggattgccgtggctattagggcttgttttttggttccataagaattttaaagtagttttttctaattctgtgaagaatttcaatggtaatttaataggaatagcaatggatctataaattactttgggcaatatggccattttcacaatattgattcttcctatccatgagcatgaaatttttctctgtttgtgtcctctctgatttcctcgagcaatggtttgcagttctccttgaagaggttcttcacttcccttgtttgctgtattcctaggtattttattctctttgtggtaattgtgaatgacagtttatttattatttggctctgtgcttgtctattgttgatgtataggaatgcctgtgatttttgcactgattttctatcctgagactttgctgaagttgcttatcagcttaagaagcttttgggctgagactatggggttttctagatataagttcatatcatctgcaaatagggatagtttgacttcctatctttctatttgggtgccctttatttttttttcttgcctgattgcacgggccaggactttcaatgctatgttaaataggaaggttaagatagcgtatccttctcctgcaccagttttcaaggggaatgtccagcttttgttcatttagtatgatgttggctgtgggtttatcatagatggctctcattatttggagatatgtttcttcaataactagttcattgagagtttttaatatgaaaggatgttaaatattattgaaagctttgatctgcatctattgagtaatcaggtgattttgtctttagttctgtttatgcactgaatcacatttatcaatttgcatatgttggaccaaccttacatctcagaaataaagtctacttgattgaggtagataagctttttgatgtgctcctgaattc

SEQ ID NO: 197296 - DNA, 1000 bp, Homo Sapiens
tccaagaaagatgtcctttaaaagtggaggagaaattaggaaaaaagtgaaggagaaattaggacattccaagagaaacaaaaggaattcatctctagcaaacttgctctatgaaaaatattaaaggaagtctttcaagctgaaatgaaagaacattatacagtaactcaaataggcatgaataagaagccccataagggtaactacataggtaaaaaagggtataaatgtattttttatttgtaattccttttttctctgatctgatttaaaagataagtacataaagcaattattataaatctctgttgactggcatacaacgtataaagatataatttatttgacaacaacagcacaaagggaggagacaacacagctacacatgagcaaatcttgtgtttactactgttattaagttggtattcatcagaactaaattatcaggtaagatgttcatccccaaggcgactactaaaaaatacagtaaaagaaatgacaagggaattacaatggtacactaggtaataaaaaaggtagtactggagtaacagaaaaacaaagatatgacatacagaaaacagcaaaatggcagagataagtcctcctctatcagtaattatattaaatgcaaattaattaaatactccaattatgaggcaatattggcagaatgcattttttaaatgatccaactatatgctgtcttcatgagagacacactttacattcaaagacacaaacaagttgaaagtaaaaggatgaaaaaagatataccatgcaaatggtaaccaagagagctggagtcatcatactaatatcagacaaaacagacttcagacaaaaattgttactagaaacaaagaaggaattttataatgataaaagtgtctatccatcaaacaggtataacaaatataaacatatatacatcccaaaacacagccctgaaataaaaggagaaaaacctgacagaactgaaggaagaaatagagaattc

SEQ ID NO: 197297 - DNA, 1000 bp, Homo Sapiens
ccaggatggtctcgatctcctgacttcatgatctgcctgcctcggtctcccaaagtgctgggattacaggcgtgagccaccgcgcccggcctactattcttattcttggtaaattgttcttattgcagatatgtctgttctttatatctaagttaaacagcttttggaaaacagaagacattcaccagattggaatcaaggtaactacaaggtagtgaagagctcactctcttccagcagtgtttaaaaaagaacgttgaacgcatagtgtatcagttgctatagctacccctatggttttattgttgcttatgatgatgcataggtatcattagcacaaagaataaaaataaatcagaagtaactggccttaaaactttggaatcacaggcaacatgcatctggcaatttcaaactgaaatatattgactatccaacatagcctcttacatagtcttaaaaaacaaacaaaaaacaagcaaaggtagtttatgagctggttttatttatttatttattttatttttttatctggttgccggcatttagggaactacacaacagacttacctatcatagtaactaggtgtgactgaatatctgtcagatttgcagttcttgtgggaatatgattactgaaatttgtatctcgatcatgatcaagtgtttcagattctattagctgcaaaggagaataatacttgggtgattgtaacctctttgctgtaaggtaacagagattaatcattgaaagagaatattttaaaaataagacctgttaggacatggagtactttcttcaggtctgatttaaggaataaatatacctaaaagtctgatacatattcagactaacagaatatttcctacggtgtttttcccattgatttcttatggatgtttgttcatgaaaaggctttacttgtgtttacctttgaaataggcctgttgaatgtagtgaatttggtaaagatttctcataaaatagacacaagaattc

SEQ ID NO: 197298 - DNA, 1000 bp, Homo Sapiens
ctccaacagaaactgaatgtgctctgtgtgcctgccttgatccagatacactggagcttttatgatatttttcaaatagaaaaagggcaaaataataagataatcctacattgaggaaaaagaggatttactaaagagcaatgtatttaatgcacagtttctgcagtttttggagttaaggcagctaagatattctacactcttgcctccagaaatctctctcttaataatctcagagagtttccttgtcaagtgtttctaagtcctcagcatccgacaggagaaagaattttcatcactagggttctgcaatacatgatataaaatctacgattctgtgactttcctggtgaagcatattggttatgaaagtagaaaatcttatcaaaacaagatttattgcaaaaaacaagatgaaaagcatttaccacatttttaaagctctaccccctggatcaatgatctagagagatttataaaatttcacaagttcaaaatgaccaaaaagctttgaagctcctcttccctagatagatattttttatctcaaaaattgcacttgatgtttgctctaacctgtaagagactgtctatcatattaggagctattccctagaaaaagcattgcccacatgctgttagaggagctctgaaaaagaacacataacctgcacaatggcatataaaaccctgagattctggccacaacagcctagaaaatgtaatgaataccagagcagtgcttcttttacacagtcttttttggtcctattgaatccacaaaattattttcatgtaacattttaaatcacattaagtatgtaagtcaaatgagctctttagcaccttttacataagaaatgatgctataccagtaacagtaacaacccataagtaaaagatacctacggaataaagtcaatttgtgcttatttgggaaatttaaaaactgtaaaaaaagaaaactttgaaccaagtttcttcaaattagactgaattc

SEQ ID NO: 197299 - DNA, 1000 bp, Homo Sapiens
tcaggttgctacgatttctgcaaacggagacaaagaaattggcaatatcatctctgatgcaatgaaaaaagttggaagaaagggtgtcatcacagtaaaggcaagtgtgtttgtatttttaaagataattttgagttatcttatgatcaaaagtttgagttatctgatgatcaaaactgaatttttcaaacagaaaaattctgttttaaaaactgctttttttattccttcatatgtagtctcagcacatgtatagaataaagtacttactgtgttttatgtgaattagcctttgctgcatgaaatgaatccatcctaacttaaatgattattcaaataagcacttttgggattttttgcagaagtgtaattggatgtcctgggctgtttcatactctaccctgcatctcttatggccagaggggtctgtttttattaatctggcctgtaattccatgttttgtgttcaatgaaatccatatacctaattctttgacttttcataggatggaaaaacactgaatgatgaattagaaattattgaaggcatgaagtttgatcgaggctatatttctccatactttattaatacatcaaaaggtaagaacaaatcaataactgaattattattatttttattattttagacagagtctcattctctgttgccccggctggagtgcagtggcatgatgtggtggcgcgttgctcactgcaacctccgccttccgggttcaagtgattctcttgcctcagtctcccaagtagctgggattacagtcacacgccaccatgccaggctgatttttgtatttttagtagagatggggtttcaccatgttggccaggctggtctcttaactcctgacctcaggtgatccacccaccttggcctcccaaagtgctgggattataggtatgaggctctgtgcctggccaatttttgaattttttaatagagacaaggtttagccatgttggccaggctggttttgaattc

SEQ ID NO: 197300 - DNA, 1000 bp, Homo Sapiens
ggaaggtgtctgaaacccaaggctgtgtgtgtgtgtgtgtgtgtgtgtgtgtgtatgtgtgtgtgtgtgtgtcggggtgtgctgaggggttggtcagccaggtgatttaaatgcgggtatagaacaataggtagtggtggggccccgaagaacttagattccttaaagatatttattttctttctctttctctttctctttctttcctttcttttcttgcttttctctctcttattttttttttttgagatggggtctcactctgtcccccaggctggagtgcagtagcactgtcatggctcactgcagcctcgacctccctggctcaagcgattctcccacctcagccttccaagtagctgggactacagatatgcaccactatacctggctaattaaaaacaaaacaaaacaaaacaaaacttttttttttgtagcgatgagtctcactatgttgcccaggctagccttgaactctgggctcaagtgatcctcccgccttggcctcccaaagtgctggaattacaggcatgagccactgcacctggcaacgtatgtcaacttcaaaattttcactttttgctctgctttccaatcaaaacaaacctagcagcctgagttcggcctttgagctgcaagtttgagactctgccccaacactgactttattgagcctctgcattgcatagcgtgcacacccctgctcacccttctacctgtgtgcaactaaggatgacaagcagggtcagcagcagaagtgtcttggggctagctctgctgacagtgatccctgatcagttcctagttctcttctgagaagactgagccctctcaaccagcatcattcagagcagtctcaggatggttaggcctatggctgtcctcctctggaagggccctcgtttgttcagaagcctccctggttaaagcaggcagaggaaaatcactcttgaaagctcaactcactaatcacctcctccaggaagccttccctgaattc

SEQ ID NO: 197301 - DNA, 1000 bp, Homo Sapiens
ctgcatctagggaaggtcttcttgctatctcatctgatggtgggagggtcaagacagatgcacaagagagcaagagatggaacttgcagcctaaagccctttgataattgccattaattgtttatgagggcagagccttcatgacctaaacacctccctttagtctctacctttccacactgttgtactggagattaaatttccaacacatgcattttgggtgacacattcaaaccataccagagtattttactatagaatttaaattcactggcaaatttaaatatttaccagtggaaaattttaagaatcagagtcatatattttaaaattttattttattaattatttttaaatttcaatttaatagctctagtagtgcaagtggtttttggttacctggatgagttgtgtagtagtgaagtttgggttttaagtgtacctgtcacccagatagtatacattgtctccaatagaaaaagtaaaataaatttaaaaattagtgatcatatataatatagaaaaacaaggtcatagtaatcacagagatgcaatgtacaagatttggatcagaaatccttcctgatataatttttcttttccttttttttggcaccaagtttagacatggtggaaaaggataaaggagggttgacaactggcagaaaacatacaggaagtggtacaatgagacaagaaggaataaaccttaagagtaactccagattagagtgtagcagggtagataggatgagattgaagagactgtcaggaagacttccaaatggtgggagtcttgaaacactagagatttagaatcattgtagggacctggtggtagtgagtttcttgaagattattctagtaactgagtgggttaagagataatagggacagtgaaactcatttggaaggtgtttcagtgggtcaggtatgaagtaattacaccaaaggcttgaagttctgaaataaagaggagacagttgatgtgggagaattc

SEQ ID NO: 197302 - DNA, 1000 bp, Homo Sapiens
cgcttgaacccaggaggcagaggttgcaagtgagccaagatcacaccactgcaccccagcctagagtgaggctttgcctcaaaacacacatacacacacaccaggcggcagcaaatatcttacacacacacgcacacgcacacacacccggcggcagcaaatatcccgctcagagagaagggcacactctgaagtgcaaatcctcaatcttcatttacaacagaagaaacaaggatatattagctggtggcaggagcttcccgggcctgtttggttctgagaagcaggagagccagggcacactgacaagaaatatttgctagaagcaatctgtctctgtgacagcagaatgccagaggctctttatgatgaaaaaaaacaaaaaatcccatagttgccagtgcccagcaagatgttaagactaattgaactcacactcaaaacctaggataatagaaatttcacctggcctgaactctactctggttccttccctacaggaacttcccacagattttgaataaaagctcaaaattaaaacagaggtaaaaccaaaaccaaggggatatgagaagaaaaaaaaaaaggacagttaaacagatgtcagaaaactcaccagaaaacaaaattgctacagagcatatgaaaattgtttttccaagaattaaagctacttaatgaattcctgactcacagaaatcatggtaataataaatgtttattgttttatgttattaggtattagggtattttgctacacagcacacatgaatataatatcctacaaggcaattaaaccataatctttgaggttatcttctctactagacagaaataatttacacctctacccgataaaaaatctgttgtatcttacccattttctggaagttagaaactgagccctaatccatagtaaatagtaaatgaaacaaaaatacattcctgtaaagaaggttcctatatctctgtactattgacatttggggccagagaattc

SEQ ID NO: 197303 - DNA, 1000 bp, Homo Sapiens
ggccatttttatgatattgagtcttcctatccatgagaatggaatgtttttccatttgtttgtgtcctctcttatttctttgagcagtggtttagttctccttgaagaagtccttcacatcttttgttagcttattcctaggtattttattctctctgtagcgattatgaaggggagatcattcatgatttggctctctgcttgcctattgttggtgtaaaggaatgcttgtgatttttgtacattgagactttactgaagttgcttattaggtcaagaggtttttgagttgagatgatggggttttctaaatataaaatcatgtcatctgcaaacagagacaacttgacttcctctcttccgattcgaatacgctttatttctttctcttgcctgattgccctggccagaacttccaacactatgttgaataggagtggtgagagagggcatccttgtcttgtactggttttcaaagggaatgcttccagcttttgcccattcaatatgatattggctgcgggtttgtcataaataccaattattattttgagatatgttccaacagtacctagtgtattgagggtttttaacatgaagggatgttgaattttatcaaaggccttttctgcatctatgaagataataatgtgttttttagtcattggttctgtttatgtgatggattacgtttactgatttgcgtatgttgaaccagacttgcatccgaggggtgaagttgacttggctgtggcggagaagctttttgatgtgttgctggattcggtttgccagtattttattgaaaattttcacattgatgttcatcagggatattggcctgaggttttctttttttgttgtgtctcttcccagttttggtatcaggatgatgctggcttcataaaatgagttaggggaggagtccctcctttttcattgcttggaatagtttcagaaggaatggtaccagctcctctttgtacttccagtagaattc

SEQ ID NO: 197304 - DNA, 1000 bp, Homo Sapiens
gaaataacctccttaccccctctactgactgcaagtaaaactttgacaatataggaacttttatatttatttattcattttttaaagagagggtctcactctgtggtccaggctggagtacagtggcaagatcataactcactgcagccttgaactcctaggtttaagcaatcctcttgcttcaacctcccaagaagctggagccacaggcatgcaccaccacgcccagttaatttttatattttttgtagggacggggtctcactttgttgcccaggcttatctagaactcctggtttcaagcaattctccttccttaacctcccaaagtgctgagattataggtgtgtgtgagctatcacacctggcctagaaaattataagaaaatattaatcacataatctcactacccattgatgatttaacatctagtatatacatatgtatatataattttaaaagtagggttatattatataattacttcattattcttgttttccacttaatatacttaagatatctttcaaaatcactaaatacaggaacatagtatatcatctttcagtagcctcattgtatagctaacccccttaatggctactgaaattgtacatccatctacattatgtcatttaagaaaagattttaaagttttcagaccttgtagtgaatgtttttagggaattggtagactgtgtaatacatataacaagcatctggttggtacatttttaaactcagttttaaatgtctggctgaagtaaactgttagaatttattcatgtaacttttcattagctgatactttatatcaattttactaattagtcaagattttaacacatttttttaaaaagttgtgatgtaatttcacttggtgtttttatagcttatagtaattctatatatttataacttttctttaaaattataaatagtaataagccttatcatgattataggtatctctggtatgtacatacttaaatggaattc

SEQ ID NO: 197305 - DNA, 1000 bp, Homo Sapiens
cttatatgtagatgctacatgtgggaattgagaaagcaagccttctcatcttttgtttttaagccagtgatctatccttaatgataagaaaaatattgtataaataacttttctctttattttagaatattgaactctaaagcaataacagttttagatgaattttttaaaacttatgaagttttgaaaaaaatttaaaatattgcaaaacaacacagtatattatttgttgttgagttttcaaatagatgcaagggaaattcgggatttcaaagcaacaatacattggacaataatgaggtcacagaaattatagcaggtataatgaaagatagatactgcagtgaaagtattaagaacaaactgagttaatctccgaaaatgcacatatatatattctaaatctaccaccttagaaaattctaaaaaacacaagaatacaaaaagcacttgttgccagaacaaagtatcctatgtcatgtagcctctggaagctctaccatattcttgagaaaggatgaaagtaagaaaaacaaatgatgtcttcatattattgtaaaatagtttcgacctcacagtcctcctgaaaagatcttagcgccccctggagtccccaggctacatctgatgaatcactggtctagggagccatcagttttaaatgagtttaaattgtcttaaatatgcttattacactttctttatttgatgcaccttgtagaacctaaaattagatttcaggagctgctgacgctttgaatgaagtaagagatatcagaggttaacaattcaagagccatgaattctcattttgatccattaaatccttctacctttgcagcatgagtctagaagccctgattcagtccttgttaaaaagctggaaataggccgggcgtggtggctcacacttgtaattccaacactttgggaggccgaggcgggcagattacctgaggtcaggagttcgagaccagcctagccaacatggtgaaacccc

SEQ ID NO: 197306 - DNA, 1000 bp, Homo Sapiens
aaaaatctgatactaggagctgagctccatattttattgcttcttgccctgggcataaggtttctgacaaaggaatttaatagattatcctcatacaatccattgtctgtctttgagtaggagtacaagtatactttcaaaagggaagctgaatgtgagtaattatggttttttagaaaagcactgcagtagttggtattcttaaggaagaaaaaggactggaaagtaatgccaggagttctcatcagtcattcattagggagcaaatccaggatgcctgtgtctcatttgagccatacacattttaagtattttatctccttttttaaaatatcaaattgccaccaaactgtattttggttatcccattaactatatgtaggagataaaatgcatttaggtgtgaaaaataattcacttcataattctcgagtgaaatttaagagtagctgaaaaaaaatgtttgaaccaagaacaagttaagcctgggttatttttttccttcaaaatggcttatatgttggggggtgtggcgaggggaaggagtggtccgttgtttttaataattaagtagctttccaaagaaaatgattgaaatctaatcctcagactgctggaagctttcacatttctctgggaagaagagtcttctaagcttgtgtgttattgatctattaatgatgatactgattaaaaaataaaacctcattcatcagttgagacacactcaggactattagctgaaaaaacgatggatgtggtagtgtggttatactgtgaatcatagttcttgcaaagcacgctcttggttcattattcaaaatgtatcttttataggtttttaattttttatctcatactattaactatggatggatggagcaaaataattttaagcattttacatatcattttctaaatctagggaataatttgttaggatattgttacaaaaatagcagaatttcaaagttataacacatttcatttctaaggaatt

SEQ ID NO: 197307 - DNA, 1000 bp, Homo Sapiens
gacctcaagcaatcctcccaccttggcctcccaatagttttcatttttattgaaattatacactaacatagtttaaaggctttaatatttctttgtttgttaaaaaaaaaaaaaaaaactattcccagcattttgctctctagtggcaactacttgtacctccttgagccgagtactttgttgtttatatcctgtttttaggtatatactcatattactttatatttcagtttttaccaataactcttgattcatgacaatggatgatgacaacttagttctttcctacctagtcacactcttcctttatcctgttttgcttagatcaatgttgataaaatattcactgtttatattatgtgagcattattcacatgtggttacttttccttccttgcttgactacctccctccccaagttattctctcaccttttcccctctccctttctccctctgtgcccttccctacccactacatatatatacttgtcacaaattcaaccccagatgccttcacaattatctaaaagtcctcaaaagacattcagatgcataggttttatataaattttattttactttttatttttttgagacggagtttcgctcttgttgcgcaggctggagtgcagtggcgcgatctcaactcaccgcaacctccgccttctgggttcaagtgattctgctgcctcagcctcccaagtagctgagattacaggcatgcgccaccacgcctggctaattttctatttttagtagagatggggtttctccatgttggtcaggctggtctcaaactcccgatctcaggtcatccacccacctcagcctcccaaagtgctgggattacaggcgtgaaccaccgcgcccagcctgaattttatcttttttgaagaaatctctccccagagccatctgacctcttctggttttaacaggctacctgctaactctgtttatagctgtcataccggattctcgtgtcactgtcttttggg

SEQ ID NO: 197308 - DNA, 1000 bp, Homo Sapiens
tgttactatttttgagacagggtctagctctgttgcctaggctggagtgctgtggctgatcttggctcactgcaacctccacctcccagacttaggcgatcttcccacctcagcctcctgagttgctgtaactacagttgtgcaccaccacaaccggctaatttttgtatttttggtaaagacaaggttttgtcacgttgcccaggctggtcttgaactcttgagctcaggcaatccacctgcctccacttccaaaagtgctgggtttacaggcgtgagccacccagtccagcctacaaaaataagtttttttaaaaaggcggccaggtgcggtggctcatgcctgtaatcccagcactttgggaggccaatgtgggcggatcgtgaggtcaggagatggagaccatcctggctaaccatggtgaaacccatctctagtaaaaataaaaaaattagccaggcatggtggcggtcgcctgtagtcccagctactcggcaggctgaggcagaagaatcgcttgaacctgggaggtggaggttacaatgagccgagatcgcaccactgcactccagcctgggcgacagagccagactctgtctcaaaaaaaaaaaaaaaaaaaagcaagaaaggggactaaaaggaacataaaacaagtaggacaaatacaaaacacatagatttaagatcaaatatattagtaataatgttaaagtataaatggactgtgtgttatttatctatgggctctcagctccaaattcaccctgttttctgctctgtgaaaatggttctgggccttttaagttttctcttgccagatggcacagaaactatcagtagagggcgctagagagacattgcaaaaagaaaaggttttaacttccgggggcccctgcactccatcctgaggttcctgcagcatgctccccttcttagcatccagcttctgtggcatacatcaccttccccctttccctggcaccctggtgtgaagaattc

SEQ ID NO: 197309 - DNA, 1000 bp, Homo Sapiens
gggtcttgacaataagttaaatccagaaataaacagggctcatcttagtccattggtgctgctattaaggaacacctgaggctgaatgatttgaaaagaaaagaggtctatttggttcatggttctgcaggctgtataaaaagcatggcaccagcacctgcatctggtgagggcctcatgctgcttccactcatgggggaaggtgaagggatccagcctgtgcagaggtcacatggcgaagaggagctagggggtggcaacgggctcttcaccagcagatcagaaactaacagtaaggacttactcaccctctccccaggtcccacccccagcattggggatcagatttcaacatgaggtttggagggtcaaataccctaaccgataggagggccaaaacaaaaaagaaatgattgttagcaaaacaagactcagggaagaagattacattaactttaggtaattcgttagggtttgtttcaagttcttatgttgtgttttaacttgggtcagttgatgcacaactagaagtcatttcatggacatattaaagatacctctgggtgctagtgacctgtagttttttatgctttactcagtctttcttggtgaacctcttctactcagtccctgaagtccaaatcctattattctctattcccttttcagaggtaggcaacatttattggaggactaatggctttcttgacactaagtaaacatcacatttaccttatctgttctctaggctcttcttgtatagggttccttccaatagttattgattttgaaagataattgttaccccataatgtgtgtgtgtatgtgtgtgtgtgttcacatgcatgtgagaccccaagcccaagaagacaagtcagagctgttcaggtttaggagacataccttgggttcaaattctgtaaacctcactttacttgtctgtaaaatggggattcagtgaggtaatatatgttaaaaagtgcttggcatatagtaagag

SEQ ID NO: 197310 - DNA, 1000 bp, Homo Sapiens
agaaatataaccaaagagctcagtcaattccagtacatacttaagcgtctaaaacactattgacgagttaatgggtgcagcacgccaacatggcacatgtatacatatgtaacaaacctgcacgttgtgcacatgtatcctaaaacttaaagtataataataaataaaaaaaattaataaagaaaaaataactaatattagatattacagttatgtgctacctagctctagctttaaggaaattcaatattaactattttatagaccctcctgtaggcttccaaatgtaatcttgcttgtctcatcaaccctgcagaagactattaacttattactaaagtaaaactgtttcaggtcctatgacagattctcaatacctagactgagagatcgagcaagaaaacaactgaatccaatttgttttattaatgtaaaaagtgtttaattagcctcggactttttttttcaaactgaactttacatggaggcacaatgtgtacaaaggaagccaccctggctttagatagaggtaggggatcttagcctcctccttacccaaagtgcctttgtggacttgcttgaataatgatccctaaatatcagtccgaataggcttcaaaagaatcactttggaagcatgttaagaatggagactcctgggccccaccctagatctactgaatcaaactctgaaagtaggactcctgagcctttatttcatgttctccctatgactaaggggctgctttgtgggcaggcacagaggactcttcagtgagtactacttgtgaaactgacttagtaacaaaataaagggacattgataccacttgcacctgaatgaaattctattcagaactattgttttaacaggtatcctgctctccaaactggaccatggatccagagatcatccggttatctccagatttggaataaaagatctccctgcagagttggaagccagaagtgttgttacactcatgcccctatatgaatt

SEQ ID NO: 197311 - DNA, 1000 bp, Homo Sapiens
tccttaaaagttggacttgtacagtaaggacttcaactgaccttctgcagactgagggctgttcccagtgtatacatcaagtcactgagataggacaaaatgttgctacagtcctattattttacggttattataagtgtgctggaaatctaaaaagaacttgtttgtataatgttattctatacaaggtatgtagcccgggaaatgaccaacctgatgtgtgttatgacccatctgagcctccgatgaccacagtttttaaaataagattaagaactgaagactggtgggggctcataaatgatacaagtaaagtgttagccaaaacagaaaaaaaaagaggtgcccaaacaaatcaccttgaagtttgatgcctgtgctgtcattaataataataagtaaaaaatgatatgaaaacacggtgaaaccctgtctctactaaaaatacaaaaaaaaaaaaaaataagatgtggttctgttaattagaaaagaggctatatggcagaaaataagtacatttatcatgaattagatctgtgtgaaaataaatgtagatactgctcttgtgtcatttaggctacttgaataaaaaaaataaaaaaaatcctgtccaccttcagaaagggaaaagtggcccttcctgtaccagcggtcagtgtaaccacttagatctagtaataaccaacccccttaatcctcgctagaaaaaaggggaaccctaaaaattgatggagctggactggatcttcaagtaaatattgtggtttgagaaaaagtttataaacaccctcctgagccagtatttcaaaccttctatgataaactaaatgtgccagtaccagaaattccaggaaaaataagaaatttgtttttgcagttagctgagcatgtagcccagtttctcactctcacttcatgttatgtatgtggagaaactgtaacaggagatcaatggccgtaggaagcccgagaattagtacctacagacccagttcctgat

SEQ ID NO: 197312 - DNA, 1000 bp, Homo Sapiens
cttctctatgccagagccactcctaagactagggtccctgaactgacaatgtactcccaaacccaagtgcacagagccagaaccttaccacagccccgctccctcccagcccagccaggtcttgaactgtactcctcctcaaatcctgctgtcactcaaatccactccatccctgctccttaccctaatttgttctagtctgtataattgttagcaaaacagctactgtgactgaggcttcttgcagaactggagcctccttgcaacccccaggacagttcgagatataaagcctgtaccgctcccatcccaggctgcagctacgccctggcctcagaggccgtctccggggcgggggtgccctctagtgttctctgggtgtgcaacagtccttggctgcaggaagggacaattctctgtccaggggactgactggacttgtgccatgtgagggtcctgagcactcagctgatcctctcccaaacactccagggtaacgagactctcatctgtttgcagaaatatctcagaaccatcttccaaatagccttccacttagctcatggatctcatagctcattctgaacagattttttttttttttaagttcagtggaagacccttccctagtggaaagatggaaaccagttcacctttctcaacaaccctttatgcaccaagagctctgctaattgaactgtggtctttcctctacttctctctcactcctccccttgtggtcaaatagaagagaggcaggacaagaagggaaaagcagaaggggatgtagcagcctggaatctttctcttttttaaagagatcgggtctcactctgttgcacaggctggatttgaactcctagacgcaagcattcctcccgcctcagcctcccgaatagctgggactacaggcacttgccactgctccctgcttagtccggactcttgatccgagtttcctgcagcataaaggaacacagtgcactagaaagaggggctg

SEQ ID NO: 197313 - DNA, 1000 bp, Homo Sapiens
gacagttgtggtgctttgataagctcagtttttcttctttacttttatctactttagcatgaattaatttttatattttatagatatgtaaaattttacatactttattaattttaataaagtaaaacataattcatgctaagaaaattaagtttataaaacaactgacaatgaacagtttagcatagccttcaatctcactcagactatattctctctttatttcattttaaaatccagttatttcaaactggaactgtgttgtagaagagagctttaatattactttttattgtttcttaatatttctaactattctatcttcaagatatccaaagagaaaggaatttccacagtgtataattatttattttcatgtttaaaatcttagaaatcactccccaatattatatataaaagaaatactattagaaaggaatatttttaaaacttgtttctaaagagtgaagttttgcttcactctttaatgatggacaagaacgccttccctaaacttgtaatgtggctgccgctacttatagaagcctggtgataattgccctatgggccttttatgtaagatgaatcaaaacttgcaaatatataattgctgaattaaacactcaccttaaaggaactgttccagaatataacagaaaatcagtcaatctctttatgcaggttccttgattttagcaattttcaaacagatatgattaggttggtgcaaaagtagttgcaatttttgccactgaaagtaatggtcaaaatcgcagtcacttttgcaccaacctaacagaagttttaattggcgtgcaatcacttgtagagtgccttgaataatataagcatccatactctagcctgaatctcttaaattggaacctgtgaaaatggaaccaggtgactataatttctttaaaacactgtggaaagatgatcttaatgcaaggcagtgattaacacaagaaaatgagcagtagaatacaactaagaattc

SEQ ID NO: 197314 - DNA, 1000 bp, Homo Sapiens
agccagccaaagctctttgaattctctctttcctgaggtctcacggtcacttttatttcctgagtcagaagcatctgctactgctgcttatggagcaggggaagccaagtgcaaggatgaacccaactggcccctcctcctgtggcatcacaactaaccagtctcctggtggttcttcctcacctttgagtcctggcttctaccacctccagacaggagcttgctcagggcttctcccgcctttatgttgcagctgtctcctgggcttgtcctggcctccagcttttcttcctggctgatgctccctctgtagttttccatttgcattcttttaagatttttcatagtttctggttccctgatagttctcttctttccaagtaaaataatgcatatgcatttatttccatggatttgatgtgagaagggggagtccacagcctgtgattttccatcaactgaatactttttcaaatgtactatgaagcacatttgcatctctttgtttctgatattatctctgttatcctagaaagttgattgtgcagttactatgagactcagttcactgatggagaaactaagagagcacagttaattatgataattccctatatttaacatttggatttgtttgctttgtgttttttgttgtgtttgttggttttgagatggagtctcactctgtcaccctggctggagtgcagtggtatgatctcggctcactgcaacctctgcctcccggattcaagcaattctcctgcctcagccttctgagtagctgggattacagacatgtgccaccacaaccggctaattatttgtattttttttgtagagacagggtttctccatgttgctcaggctggtctcgaactcctgtcctcaaataatccacctgcctcggcctctcaaagtgctgggattacagccgtgagccactgcacctggcctgacatttggtatgtatccttctgattatactttcactcctgaattc

SEQ ID NO: 197315 - DNA, 1000 bp, Homo Sapiens
gaggacagtgggaggagggagaggagcagagagggtactgggcttaataattgggtgatgaaataatatgtacacaaacccccactgacatatgctttcctgtgtaacaaacctttacatgtacccccaaacctaaaatgaaagttttaaaaaaaatacaattcaataaataaatataaaaacacaagtaggtttaaaaaataataactggctgggtgtggtgactcacacctgtaatcccagcactttggaaggccaaggcagctggatcacttgagcccaggagtgcaagaccagcctgggcaatgtggcgaaaccccgtatctaaaaagaaaatacaaaaaattagccagacgtggtggcgcacacctgttgtcccagctactcagaaggctgagaggagaggatcacttgagcccgcgagacagaggttgtggtgagccatggtcatgccactgcactccagcctgggctacagagcatgaccctgtctcaaaaaaaataaaaaataataaaattatggaaaaagatatacttgctaacagcaaacaaaggaaagctagagtggttatataatatcatacagagtacatttcggagcaaagaattttaccaagcatgaagaaggccaactcatgatgataaagcaactaaattcatcaagaggacacaattctaaacatttatgtacctaagaacagaatttcacaacacatgaagtgaaaactgacagaaatgcaaggtgaaatagacaaattcacaattatagtgagagacttcaatattctcctttcaataactgatagagcatgtagacagaaaatagtaaagatatacagaagacaaccaacaccatgaaccatgttgatctaactgacatttatagaatactccatgcaataaaagcagaatgcattcctttccagtacacatagaatatataccaaaatagaccatattttgtgccataaacaaatctcaataatgttttaaaagaatt

SEQ ID NO: 197316 - DNA, 1000 bp, Homo Sapiens
aataccagctgatgaaggcatctgatgccttcatctgttcagtcatctccaaaaacagtaaaaataaccactttttgttgggcaatatgaaatttttaaaggagtagaataccaaatgatagaaacagactgcctgaattgagaattttgatttcttaaagtgtgtttctttctaaattgctgttccttaatttgattaatttaattcatgtattatgattaaatctgaggcagatgagcttacaagtattgaaataattactaattaatcacaaatgtgaagttatgcatgatgtaaaaaatacaaacattctaattaaaggctttgcaacacatgccttgtctgtttttatttagactcctatagtgtctctgaagaaaagaatacagatatttgaaaaaatatgatttggtgctcttaatatctcttatatcgtcacttacctcacttaaatagtcagatattgctggagaaaaattcacaagcatgctgacaggtctcactttaaattcataaccataaatctcaaatgagccctcaagtctgcctgaccattttagttacttctctacaatccttccatttttatgtccctagtctccaaaatgactgttactattttacttttcctcttctctcttcaaagcctcaagacacacattcagcctcctcctctgcccccttatcctccaccctcctctgctctcagcagataacctggcctcatattacacttctaaaacaaaagcaacttcataccaagctttcccttctacatcccaaagcagcagtcataccttcccacaggcccatccttccttccttccctcctattatcaggatgaagagcctctgctcctgccaacagcactgactccacatgcagtttccctcccatccctctcactactccaagtcaggctgtttcctgcatccctagtttgtcccttttagctggatcacctccatcattctacagtctgccctagtaaccttcca

SEQ ID NO: 197317 - DNA, 1000 bp, Homo Sapiens
aaaacatttgagaatcactggtatagatagagcagtactgttactggctgcctagctagcttgctccagggatgctatgctatcaaccatcttcaaccatggtcctctactggccaggactgcccccactgccactccaacttgctgcttattacaacagttgtgctgtctagcttctatgatttcatggtcctatcatccccactgctatctggagccagttctggaatggcctcttgctgtcaggcatggcttacagaggacagtccaaactcagcttctcagggatgctggtaccgctctcaccagtgtgttccttgttgctttggtaactagagtatcctctgggccttcctgcagaacttaagtggtttctggccttacatagaatatacccatttctgtgagcttttgaacccttcttccacattctgctgtggtagttctggcatttccattacactctggtggccattgccttcctcctgtctcccaggatccttgtcaggatatcacatcctgattcacaggagaatactcctataacaacgaagtatcccttgttcaacttaatgtgtggcaccacaccccaccttgatctagcctatacattcgctcctggatcctgccagtatatactggctacttccgcaactacttcatggtctagccttcttccctagtgggcccctgcacatctctgactgggctttattgtgatctggctctatgtattgggcttgtaggccaggacagagaggcagcttcctttggtgtcagaaggcaagtcccagtgacagttgcagctgagccatcatagccaacactcctgacaattggaagaatgagcacctccctcctgaggctgacccgggtagtaacccccaatatccactatagagacaaagtctagctttgcctatgagacagagcagaaccaggatcaagagcttaatgccctggagtcagaggtctgaattccatcagggcttttgaattc

SEQ ID NO: 197318 - DNA, 1000 bp, Homo Sapiens
accctgcccccaggccatccaagtgcggtgagttgagaaatgaattgacagacgctgcagggctggagcaggaggcggaagcaggttggaaggctgttgtgtgccacccctccctgggagctggggagattcccaagtcttagtgcagtgtttctctacaaacggggtcaggagaccctcactggcaggctgacaacttggaagcagactgtgggagcaataggctggagttttcattttccctttaaactcaagaccggaaggtttgtgttatgcgataccatatgctgtgtagaaaacagggcctcagcttcttagatgttgtagttctagagtttaggtacttccaccctctctcctatacataaacactctgtggaagaggttctttgaaaattggggtggtgcaggaagggcaacggtgatggtgagcaggccccagggtcggccctgccgccctgccgtgtggggtagggagacagctggtggtgtggacacattcacagaactttgtactggtcctgggaagatacaagtcctcacttggtcgccatccctcatattttctagtgttttcttttccagtcaacttttcttgatgaatgactgcatgtaagaggatattaagaaaagtggccaaatgatttcctttttttttcctttctctccaagaacattaccaggtgccagcagggaaaggactccgctgcctgacgcctctcccacctgagagcgcagaggtagggagatcacagtgcctgagaggttttcctccacggagaaatcagagacctcaacctgctgccctctaaagcagctttctgtatccagacaaaacttacatatgtacacgttgttttaaaacgacatactcatgtgacacacatgtatataaattcatgtttatatatgacaattgaggagagttaaagaacaagataattctggatggaaaaatcagtttgcctgggcatctgtaaacctttgggcaagtgaattc

SEQ ID NO: 197319 - DNA, 1000 bp, Homo Sapiens
tgctgtagcaaaatgtgattctttttcaactaatttcaaactaaaagtttcaaagcgcaagtcatgctcagattttgcaatgggatagttttaacgatcttcttataaaaatctattccataattgaacacaacctaaggtatgataacttgctactaataatcctagattaggggttagaaaaatatggcctgttgggccaagtctggtctaccactattttaaatcaagttttattgaaacatagccatggccattcacttatgtattgcctatggctactttattacacaagcaaagttgagtagctgcaaccatgattgcatggcctccaaactctataaaatatatactatctgtcagtttctataaagttttcttcttttggtttttttttttttttttgagatggagtctcactctgttgcccaggctggcatacggtggcacaatctcggctcattgtaactttgacctcaggattcaagcaatcatcccaactctgcctcctaagtagctaagactacaggcatgcaccactatgcctggctaattttttgattttttttgtagcgtccgggtttcaccacgttgcccaggctggtcttgaactgctgggttcaaggcatcctcccacttcgacctcccaagttgttgggattacaggcatgagcagctgcacgcagcctctataaggatttctgacccttattctagatgatcaattaactccccccaaaaattttagctcccctctgtgttaacaaatattacatttcaactctagcaaaaacacgtctctgcattaaatgtttacattttctaatgtggtcagtattccttaaatacaaaagaatacagtaattcattggccttatgccagagaataagaaaacaggaatgatgcctatgcctaaaagacgacttggggcaagtcttttatgtggggactataatttatacaaagcagtagcactgcaagggaatgggtaaagaattc

SEQ ID NO: 197320 - DNA, 1000 bp, Homo Sapiens
actgtgttgctaacctgtattaactctcaagctttggtctcagcaagaacgagctccatatgccaagaggagggaggaggaatgacagggtggactgtgacaggttctcctggagaccatgaccctgggagcaggggtgaaggcctctggagttccctttggaggtgtcctatagtctgagtgaccagtttccctcttgcttgcagcttcacagccctcaatgccagtaaggagaagaagaagaagaaatattctggggctttaagcgttaaagagatgctaaagaaatttcagaaagagaaagaggctcagaaaaaaagggaggaggagcataagcctgttgcggtcccatcagcggaagctcagggcctgcgggaactggagggtgcctctgaccccttgctctcactctttggctctacttctgacaacgacttgctccaggcggccactgccatggactcgctgacggatttggacttggagcatctgctcagtgagtctccagaaggaagtcccttccgagatatggatgatggaagtgattcccttggggtgggattggaccaggaattcaggcagccctcttctctccccgaaggcctgccagcacccctggagaagcgcgttaaggagctggctcaggtatggtggcacagtgcggctgggctttcctggaagcagtttgggcagattgctgttggttctgcactgcgtgaagcttgcccagagaaactcttagtgagttggcagttaaggtgtcagctttttccaaaccctattctcatcctgagggagaaaacagtgtaagccttgcccgtcaggcatcattttaggcctttcttggtttcttcatttctggaaaatttgctttcttctggggagattgttctctttctgttttctgtcagtttgttttccacacggcatcttttccttcatgtgatagacggatgatgttggcagcaggcagctgaggcagagattaatcttagaattc

SEQ ID NO: 197321 - DNA, 1000 bp, Homo Sapiens
acagtagctgtgatgctccagatggagctgcggataacagcatataagtttcagggcagtggttgaggggctgtgggagggtggggagggaagatggatgacttttctcaaccatctgtatttgattggaatattgtgtgacttgtgaaatagaattaaagatatgatcttcttatggtcttctcacagttttcaagggattttaggagaaaacgcttagccatacagagctgtggacaagaaaatcacctatcagaacatatttatctagaaaaggaaaatttaaacagtcaaatagaagagttattagctttctttttccttctctctaagaaggttagttagaatcagctttcttactcactacatcctgtacttagaaaggaataacctgcacatgacacgttcaaaaaatcacctttgcattctgaacctagctgggaaattatgacaacaatgaagagatatgtgggcgtcctcacattttgtgtcttaaaatgtccagctctcaaggtgaaatattttcccccatgaaatccccattgaaaacagaaaccagaactatgatctaaaagaaaaatatctatttgaatatttctacttgtgaactgacatttttagctattttagtacctttttttggtgactgaagcatagcaaatagagttttgtttccttcccacagatatcagatttcttcaaacagtacatagaatggtgcacattacaaggcatttaccacacaaaaaaacaaaggcactggaggaaataagggttgggggagagggaggaaatggtaggtaccatctcacatggggatatagttctcacagatcaccaggtagggtcatgtgatctgcgtgagtttcctaagggagagaggggctctccttttgttcgtgttggctgcatcactgcatttcattaattctgaatggcaagtgagcaagaccctcgctgctgaaatctgatcagatgttattgatgaatcatggaattc

SEQ ID NO: 197322 - DNA, 1000 bp, Homo Sapiens
ctttttgcttgaaccagagattattgtgtttcacatctaaaacttgaaaggaaatgaaattggccttattttccaataattttctactgcatcccaaatagttggtgtcagtcttctacgtatattagcatatgtttaatgacatttcatgttaatgctttagttaagtttgttttcagtctaatcatccttgtcttaaaaatttctataatgaattgattgaagaatgtgcttattccaagtagattgttacttgtttccattatagatttggcgaatcattctgttgttttataaatggaaatgatactcttcaaaacttattcgtcattttaagaagagttactaaataagattgaggctatcgtgtttttgtgtttttcaatacaaagtaaaaacgggggaaatatagggaggaaaatgtgttaaaatttaaaaaatatttttgagatcatactagtaaattttgtttgcattttttacttattggtgagtagagaaaaaaacccaagtgagttctgtaaatcatgagatgatcataacctagttttaaaatttcagaaactgagagattatatttaaaagttatctcatttaaattctgattaaaaaaccagactgtcattgtgtgtcattgacattggtttcatcacagtgtcttagcaagatgtttcagggacatacacaatttgcacaagtttatttactcacagtaagagaaaatttcaagctgatagctttaattattttagctgattcctctgattgcactcatggaaaagccaaaagaagtgactgtttttactttatctctcccagtcataacttatgtgtagctctaaaggcatccccaggttggaaaacaagtttgatctctttctgaaaatgctactaaaagaagatatgcaagagatgtgagataggaacattgtaagaacagttaaaaacctaaaattcagaactaaagcttgggatgcaagaaggaattttcatggaattc

SEQ ID NO: 197323 - DNA, 1000 bp, Homo Sapiens
tctttattcatcaggcttcgctctgtcctccctcttttttgacatatgcacaccgaccttcacaatcctacacatatgtaaggttcaaagagttccccagccatgatcaacggtaaataaatcccagaggcagcatggagttacaacagttttatttccaccatcattctcttgcctttaccgtccgtctctaagaaaaaaaaaaaaaaaaatcctggtgttgttgggaaaccagatgattgggtttggttagcggagatataatgcttgtggtgtttcttaggggaacctgagggtgaaagtgcaaagtaggctcttgtctaggtcagggagggggacattcattatttactttaaaaggtattgttgagaattcatcaaaatgaaacacaggtgttccttctcttatggaaagggcagagtctgaagtctagcaaacttaagactgaatcttggtttggctacacatgatcccagtgaacttgggcacggtaatttacactgggactcagtttccccatctgcaaactgggattgatagtgcctccttcttgccttgcactaagaagaaatggacagaatgtctcttcatacaattagttagatcactttccctgccatttcctgagcctctggcttttctctttatttccttctctctgtctctccctcattctccaacatgcctctctgttgtgctcactccttctcttctcctcccgcctttccacgagaaagtggtatcttctttccatcttttgccttttccaccttcttttggaggatgatggcacagcccttcccctcctgtgaacagaaccattttaatcaagataaaaccaccatgggatcctcgaaaaggtcacgtggagccatggtgtgtagtaccagtcccacaaagagatcgtcctccatgaagtttcaaattgaaaagaacatttctgttcaccacatctttccaccttaacaaggggaagttaaaagacctgctcctgaattc

SEQ ID NO: 197324 - DNA, 1000 bp, Homo Sapiens
tgacagaatccacatggacccttttactgaagcccgtcaggctccgcggttttatagatgatgtcaggaggagtgattaggaccaaaggaaaaaggttcctaggcacagttgctaaaactgtgctcctgaggtctgtaggagcccccaaggtctctgttgattactttaagcaaagttcttcagtttctctgtggggaacttctccctaagtgaccacaatcaggttagcaggtggctgagtaaacaaggctgaacaatgggttttccgtcaagttggtttatatcagcaagaagccctaaatctgtttttttttttttccagtccctcctggagatgaagaaagagttcagtcaccctgctgaggagagaaaaggccattattgtcaaaagaaggcacctgtcctagatttaagggaggtgcgttatcctggatggtttctaggcctcagtgggatggtctgatgacttcgtctcaccccccaggtacctaggaaggtgatgaatgtgaaggtggattcttcatggagctccacactcaggatctggtatctgaagcttcctgcattatgtcagcttatctactttgtccagctccccattagagaaatcctgctttcttaccagcataggtcactgcgctactaagaacatttcttttccttttttttcccctccagagatgtggtcttgccctgttgtccaggccggagcacagtggtgcaatcctacctcactgcaccctctaactcctggactcaagtaatcctcctacctcaacctgcacgtagctgagactccaggcgtgagccattgtgcctggctattttttgtattttaattttctgcagagatggggtctcgtcatattgcccagattggtcttgaactcctggcctcaagtgatcctcccacctcatcctcccaaccccgtttcttttcagtcagacaaccagcctggtctttattacactggttcagagtcagctggaaaagaattc

SEQ ID NO: 197325 - DNA, 1000 bp, Homo Sapiens
aaattaaacaacatgctcctgaatgaccactgggtcagggaataaattaagaaaggaataaaaaaatttcttgaaacaaatgaaaatagaggcaggacataccgaaacccaaaaacaatgctaggaggtaaattaataccaataaacgcccacatcaaaaatctagaaagatttcaagtaaataatctaacaatgcaactcaagatagtagaaaaacaagaacaaacctaaaattggtggaagaaaaatactaaagagcagagcagaacttaacaaaatgaactcttaaaagtacaaaggatcaacaaaaaaagttgcttttatgaaaggataaatgaaatcgacaagagaaaaagaaaacccaaataaattcagaaatgaaaaagacattacaactgataacacagaaatacaaaagaacatctatctccaatcatctatttggagatagggtctcactgtcacccagtctggggcacagtggcgtgatcatcactcactgtaacctcagcctcctgggttcaagtgatcctcccgtctcagtctcctgagtagctgggactacagagcatgccagcatgaataatttttctttttctttttttttttttggtagagacagggtcttgctatgttgcccaggctggtcttgaactcatggcttcaaaggatctcccacctcggcctctcaaagtcctgggactaccggcataagctaccatgcctagctatcagagactactgctaactgctgtgcatgaactggaaagcccagaataaatggatcaattcctggatacatacaatcttccaagattcaatcaggaagaaatagaaaacctgaacagaccaataatgagtaatgagattcaatcagtaataaaatgtctcccatttggtcccaatccaggaccaaatggctttattattgaattctaccatacttacaaagaagaacacccattctcctctaactattccaaaaaattgaagggaattc

SEQ ID NO: 197326 - DNA, 1000 bp, Homo Sapiens
cctaacaatctaactggtcagaggacttaccagactagtaacaaatattagattcaccgactatgctataaattcaataaagctacctgtaatgttttattcagctaatgatacattaatcatcctacatgtgacacttataatgaatgtacattaaagtatataaaggataattataaaccttgtaatttattcacctcatttcttaatatacctattaattatataaaaacaaaatacattaaaatattttttcttattgaaatttctaccataagtttgagtctgttaagtagcataaaaccaactgccttaaaaaaaaaatagaagtttttttctggaactttgccatcaaaataaaaacttaattaggaaaattaaaatatacattcattagtatacatgccctaatgtcattttttaacctaattactaagtctaaaatattatactataaatctcgatttcaagaatatcaaatattttttacaaagtaatcaaaatttttaaattggtagtgctgggccacaggtcagaaatcatcatatcacctgtataaaatgtctgaaaaccagtctttgtttttaatatttgagtaggtacttgtttatttaagcttttcaactaaaaaatgagaaataataaagtaatgagacaagaagttggtggcttttcaaattaagcatcaaaacaaaatagctaataatgaaatgccacatttgagattctctgtgtacaactggcatctgtgaaaaaaactcctgcaaaaataagcttccagcatctgtattatgtgatctgtgtatgtattcagctagtgactgctgttaagtattctgaatgcagcatagattatccgtaagagtgagaataataaaattaaaatgacattttcagttttggatacaataaaagaaaatacaaatgaaacaaagtacgcatatgtttctccttaaacctcttgctgaacaataacccagtaatggaaaaattggaattc

SEQ ID NO: 197327 - DNA, 1000 bp, Homo Sapiens
cattatacatttatatttcttcatatttttattgctttctagtatatttcttgtcattgcagaataatattcctttgtgcagatgtaccacagtctatagttccatttgcatttgagggacattttgattgctttcagtttggacgttatgaataagctgttataaatgtaagcatataagtttctgtttgaatagttttttaaccaattaagtaagtatctaggagaacaaatggaggatcatataacaaaactatatttagctttgtaagggactgacaaactgtcttccaaagtgtatcattttgcattttcacaagcaatgaatgagaatttcttttgctctacattcttaccagtatttagcattgtcaggttttggggattataaccattttatgtagtgtgtggtgatgtctcattgttgttttaatttgcaattttacaatgacaagtgataatgaacatcatttttgtttaattacaatctgcctatttcctttggtaagaagtctgttaaagtattttgctgattttaattgatgttttgtatattgatagtgtcatttctccagtttttttcctctttattgttgcattggatcctttgggtatttttttctttgaaagtaactttaaaattagtcttccaaaatttacaaaataactttccaggattttcattggtattgtgtttaatccataaattaagatggaaaaaattataccttaatattaagtatttcattatatgaccatgaataacattccatgtttttagactttcttggatttctcgtatcagttctagttttccacatatagtttttgtatgtattatatttatacctaaaatattcattttgtgacactattgtaaatgacatcttgtgtttaatttaaaatcccaattgttcattgctggtgtatagaaaagaggttaggcaataatagttaaaagactatgcagaatttgggtgattggaattgaagagaattc

SEQ ID NO: 197328 - DNA, 1000 bp, Homo Sapiens
tacagaagaggaaactgaggcatggagaagtctagtaacttgcagaactaactccaatagtttggccccagagtctgtcatttcacagccaggttctgggctttccatcaacccccagcgagtccccttccctgagcttcagtgtactcatgtgaaatggggaccacagtgctagctttgctgcatcgttagatgggagataatgcctgcatgcctgtcacagagctgggctcagggtggggtgataattacaatattactattaatcttgagttaattctctcttttgagacggatgtttctaagctcccctgccagccaagtgtggagcagaaaagcatttgctcagacctcctgtgtgatctctcctcaccacctccctccttttgtccatgaagcctcccccagttctggcaactctttagtgctatcctttgtgttccataaggctcatgtcagaatttattatgacacattttgcatcagaatgaaactattaattgtccaccgactttactagattgtgagctccttaagggacagatcttcctttctgctttcttgtgactacctgcatctcaagagccacctgcaatggtacactctcaataaatacaggctttctgaataaataaatgaatacatgccaccagagtgtttatgcttccggaaatcctgctccaatcctgttcctattcaaagaatcaactggagtgacacacagctctgttcttctttgttctgatctgttcaggtcagattaatatattattttttattactcatcaaaaacatcttcagaaacttttcatcagaaagattttttgtgtaaacctatctatctcctccaaatcactatatctgactcagtgtgatttttagtctcttataaccaaatgatattgatagaaatttgttgcttttgagaacctaagtgtatttctcttacaaatttcaaagggaataaagtgaaagtattatcaggaagtgggaagaattc

SEQ ID NO: 197329 - DNA, 1000 bp, Homo Sapiens
gcaccaaattgagactctcttggaggtaatcaggactgaaatatacaagttaagacttgaaaatctgtgagagtcaattttaattaatggtacatctctgtaccatttacagtcacttcaggtaacacccaagatgtggtaaacaccactgtcttaaatctcgtcatatattgttttgctcctaaatgccttgaaggaaaagttcaaactccttaggctgttggtatgacatttcctccatattttgacccacagcactccagcaaaaatgaacttgctgtccccaaacaccccaggttctttcagtttttgggggctctacacacagtattctcttctccaggaagaggatgtgtcttgcagattagcatttcatttatgtttactattgtctccttatgggcctatttcagagcccatctgaaacaaagtaggtgagaagaatgaaaaggacaaaggaaaggtggaaaggttgataaagaagatgggaagaaaaaggaagggagggaggcagagggaaggaaaatgtcaatgaacttctatttattctacgacgtccatcttaactgttccttcttttttgaagctttcctgtatcccttagccatatctaagcatttcttcttctgggttcccacagtattgtttccatatctctattaaggcatttaccactatattctttttttttttttttttgacatactctcattctgtcacccaggatggagtgcaatgacaagatctcgtctcactgcaaacttcacctcctgggttcaagcgattctcctgtcgcagcctcccgagtagctgggacaacaggcacgcaccaccacgcctggctaatttttgtatttttttaatagagatggggttttgccatgttggccgggctggtctcaaactcctcaggtgatccacccatctcggcctcccaaagtattggaattacaggcatgagccactgtgctcggcccactatattctacagaatgaattc

SEQ ID NO: 197330 - DNA, 1000 bp, Homo Sapiens
gcagctaaaaacttttcagtcctaggatccaagtcacaagggcttagcaatggaacaggatggaagcaaacccaagggcagatccctctgtctgagttctgcagcagcctctgatgggttttgccaaagctggagagaggtctctatttacctggttgctcaatcaaaccacaggagtcaatcaggtccccttaacaattacacagatgggacttgtcattgagtcacatccaatctaattttaaacttttgtaggtcctgcagcaacaactatgaaaattcctttccacatattcaagcccaaatccttgtcctagcccttcctcttaacagagaacaagcaagctgatgggcagacttccagaggaagctcggtggtgacaactcctgattccatagattaggttttcctttcttacataaccccctaccttctgtacggagtgtatgtattttagtcaaacttgagttagaaaagaggcgaggagctgctcaagtatctacgctgagttcctcagatgactgcatgtcagtatcacacaatttgatagaatggatttagggccacaggaaaaaatgagccctgaaattaggttttcaaaatctaattcagaactactgtctactatgcaaattcatgagctaagtgagaaaaaaacatgttatttagggattcgattcctggcaaaacctgggtctctcttgactgatctaaaaccaagtcatgattcaagagatacttagttccaggagacagtgtcacagtgtcaggaaccctctgttctgggctctgagaggttcagattgtattccaccattcctgattctaacccagtgctcaccagatcatttgctcaatttagatggctgagcacatgcagacgaaagaaagttttacatttgtgaagtattgagaacagtgagctcacttctccaggttcaaggcgcaaggacagcctggaagacgagggcttcccacacaactaaacaggaggaattc

SEQ ID NO: 197331 - DNA, 1000 bp, Homo Sapiens
aggtcaggagatcgagagcatcctggccaacatggtgaaaccctgtctcaactaaaaatacaaaaattagccgggcatggtggcgggcgcctgtagtcccagctactcgggaggctgaggcaagagaatcgcttgaacccaggaggcagaggttgcagtgagccgagatcgcgccactgcactccagccttggcaacagagcgagactgcgtctcaaataaataaataaataaataaataaataaataaataaataaacaaacaagtgcatagtaaaaatttgtcacactgaaggtaattttctttttgccgataagtagcacagtatagaagatcaagcttggaggcctggtgccagccattggctcacgcctgtaatcccagcactttggttggccgaggcgggcagatcacgaggtcaggagatcgaggccatcctggctaacacagcgaaccccatctctactaaaaatacaaaaaattagccgggcgtggtggcatgcacctgtagtcccagctattcgggaggctgaggcaggagaatcgcttgaacccgagacgcggaggttgcagtgagccgagattgtgccactgcactccagcctggctaacagcgagactctgtctcaaacaaacaaacaaaaaaagatcaagcttgggttccatcataccttagttccagttccctatgaccaaatattgtaatttaatgtgtagaagtccagttcctcaaaagtaaattgaggacaatttacttttatggtggagtttgatgatgtatgtgaatgattccaacactgcccaataggcatcctctttctttgggaattgactagtcctggagggctgtccttgtgacacacacacacacacacacacacacacacagaagttttcatccaaagttccttgcttataactcccacagctcttgttagtcttttgtttataatgttgggggcactttaggctcagaagcaggcctcagagaacagaattc

SEQ ID NO: 197332 - DNA, 1000 bp, Homo Sapiens
agagaaattggaagggaagaatgaaaaaacaaaaaacagttaagatgactgggtaagagggtgagagaagcactgagagaacttgcaatgtaccagatgaagtcaggctaattcaggtatgaatttgtccagtgggccagagattttccactgtttgatttttgtcaatgcaaactttcagtttgagacactgaaatgaaaaattgtgaattaaacctattggaaatacatgagttgtagccactacagatattattaaaagttacacgggtactgggctaagtaatagggcacacacagatgaggaaagccatgattcctgcattcagtgacctggtagtctagttgggtagatagacacatatgcatgtaagtaaaatataaagcagatagtggtatgtactataaggtggggcagataggatactaagtgggtgtgacatagggagaaattagtgaaaggtaagaatgactacataggcttcatgaatgagttatctttttagctggactactaggaactatagaatattaataggaagaggtgagagaaaggatgtttcaattagagaaatatgataacaggaaaagtgaatgtgtttgggacgtcaagagtccaagaggtctggaacataggatacatgagattctgggaagagtcttaagagacaatatgacaatatggaaagtgtgctgtaactttgagagacttaaattggccgaagagtttgagttctactttctgtgtggcagggaacatacccaaagattcctgagcaaggagattaaacccagagacagaaagacaagttaggaatcggttgtagtagtagagggctaatgaaggtcttaactaggaccaaaaaaaagggagagacactgcaaagatggataggagttgtccagacgaattggctatagatgttgaaaggagtggaggagtcaaagatggccagtttttaaactacatttgaaggaacggggaagaaaccgatgaatt

SEQ ID NO: 197333 - DNA, 1000 bp, Homo Sapiens
ctggacatactctgggtcagaaaggaacccactgtcttaaagggaaggacccagtcttggcaggatttatcacttgctgagtaaaggggcctttgggccctgaataatcagcagtggtcgccaggtagtacatgtcgtgggccttgggtgaacctctgagacttactggcttcaggtgagacccagcacattcccagctgtggtggctgtggggaaagacttcttgtttaaaaaaaagcagagggaagaataaagaggacttcgtcttgcagcttagctaacaggtgggtcatagtggggtggagcaccaagtgggtgccaagggggtttggggtccctgattccaggccttcactcacagacggtatttctggacctgtcctgggccagaggggagcccactgctctgaagcgtgagtctcaggtctggcagcatttaccacaagctgactgaagagcccttgggccttgagtggacattggcagtagcctggcagtactcctcattggcctgtagcagtggtggcgatgggaagagactcttcttgtggaaaagggagagaagagtgagaaggcttgtcttttggcttgagtgccagctcagccacagtagaacagagcaccaggtagattcctaaagtatctgacttcaggccctggctgccagacagcacttctggacccatccagggatggagggaactcactgccctaaagcaaagaacacaagcctggctggcattgccacttgctgattatagagctttgagcaaacataagtggtaaccacatagtcattacagtgggccttggatgaaactcagtgctgtgctggcttcagggctcacccagtgcagtcccagtggtggtggccataagggtgcttatgtcactccctcccccagctccaggcagcacagcatagagatagtgactccatttgtttgggagaaagtaaaggaagagaacaagattctctgcctgctaatacagagaattc

SEQ ID NO: 197334 - DNA, 1000 bp, Homo Sapiens
ctatctctcagaccacagtgcaatcaaactagaactcaggattaagaatctcactcaaaaccgctcaactacatagaaactgaacaacctgctcctgaatgactactgggtacataacgaaatgaaggcagaaataaagatgttctttgaaaccaacgagaacaaagacacaacataccagaatctctgggacgcattcaaagcagtgtgtagagggaaatttatagcactacatgcccacaagagaaagcaggaaagatccaaaattgacaccctaacatcacaattaaaagaactagaaaagcaagagcaaacacattcgaaagctagcagaaggcaagaaataactaaaatcagagcagaactgaaggaaatagagacacaaaaaacccttcaaaaaattaatgaatccaggagctggttttttgaaaggatcaacaaaattgatagaccactagcaagactaataaagaaaaaaagagagaagaatcaaatagacgcaataaaaaatgataaaggggatatcaccaccgatcccacagaaatacaaactaccatcagagaatactaccaacacctctacgcaaataaactagaaaatctagaagaaatggataaattcctcaacacatacactctcccaagactaaaccaggaagaagttgaatctctgaatagaccaataacaggatctgaaattgtggcaatattcaatagcttaccaaccaaaaagagtacaggaccagatggattcacagccaaattctaccagaggtacaaggaggaactggtaccattccttctgaaactattccaatcaatagaaaaagagggaatcctccctaactcattttatgaggccagcatcatcctgataccaaagctgggcagagacacaaccaaaaaagagaattttagaccaatagccttgatgaacattgatgcaaaaatcctcaataaaatactggcaaaccgaatccagcaacacatcaaaaagctt

SEQ ID NO: 197335 - DNA, 1000 bp, Homo Sapiens
ttcattaaatgctcactttagaaggcacaatcctcctgcattccaagaagctatgtattaattggaacagaaatatgcaggatgaaataaacagacaagaggcttggagctgccatcttaacagcaggagatgtaaccaatccttaggaatgtctgcttctcctaatccttaattttgacgatgatgaaaggagggaagatgacggcagctagtactcattgagcacttattcttttctaggcaaggggctaccacttgacatgccatatttcttttaatcttcttaataacccagtgagggagatataatcatccctattttacagataaggaaagtgagtcacagagaaggaaacttctgaagtcactagctagtaagaggcatgctgggattaggatggaagttggcctgagtacagagccccagatcataagcagcaccccactatatcacatgcactttcctagagtcaaaaagccaaggaaaggccctgtgagagggcttcttagagaaatatggaatctgttaccacttttataaaaaggtgtttacctatcagctataaatctcccctaaagggaataatttttgaaaatctttcatactgttcctgagaggtttttctttttctttctttttttttttttttttgacaaagtctcgttctattgcccagcaattctcctgcctcagcctcctgagtagctggaattacaggtgcccgccaccatgcctggctaatttttgtatttttagtagagatggggtttcaccatgttggccaggctggtcttgaattcctgacctcaagtgatccgcctgcctcagcttcccaaagtgctgggattacaggtcctaagagtttttttaatgagtgagaaaatatttattttgtatggttaataaactagacacctacagtggcttcttagtcatattgagatattactatctcagtggtgagaagaaaaaaaatcacttagaaaaagaaaaagctt

SEQ ID NO: 197336 - DNA, 1000 bp, Homo Sapiens
ctgttgaccacccctgggatgctctgggatttttggcatttgcattccctctaggattgtgggtgagattcccatcctaggtgaattttggtctcaccttttcttgttttctactccaaagttattttctgtaacagcattttttttcttattttgcctttatttaatgctttgctacaggaggtggaaatttgcaggggaaaataattgggctttcactagacttagaaaaatgtatgtgtctagtaaagatgtttgttagacaccgggaaaatggtaagtcctaaaggactcaccactagggtgccttttagggaactggggcaaattcaaattagcaaacaaagtttagccatgtggacaaataccaattctgtctgagaaataatttggatccagctatcttttataaaataatgagtttgtgttactatatcatggctagagttccaagataaaagtcactggatatttgtttatgtgtgtgtatgcatgtctagatgtgtttatatatatgtgcatttattatggtatatattgtgtctgtggggtaccaaatggtttataaataaaagagcattcataaattaaataaacaagtccaagcatttttctagttcacatgacttaagctcactaaaattatggttactaaaaattcatgtataattctgtatataaaatgtgccaaagaatatatacttttattgaaaaaattttggccaattcggctgttatttaaagtggaatttaaaatatggatttaggaaaaaaatagaaataaggtaagtaggggagagagatatgaagaaagttatggatatgaagatgcatttttggtaaggaaggttacaaagaaaagaaattttatgtgaaaatcttacatggtaaattcttgtcctaaagtagaatgactgattatttaggaaagaaggaaatataggtcaagtcagaaagtccaagcatgtcatagatggtctgtgtaagctgcaataagctt

SEQ ID NO: 197337 - DNA, 1000 bp, Homo Sapiens
caaaaaggtactgaacataagttctctgtgatccttacagttggtcgggcataaaaggattcctcactgtacctatttcctataaaatgaaggtaattggtgactgtgggttaataaaagtggatctttttcctgcatatcaaccattgttcagaagtagaggcaaaagccattatgcagcggtcagggttctttatgaaatacttcctgaaacaggacctcatcatgcagccaaaatgatatttataatggcctgggaatgtcctttcctacagagcctgtgtcagtgcatagctcataaattaaagcagcaccttctaagatgaatacgtttcatagcctgctgacagcctgagtcttgctaaaatggtaagcaaaaggcaaggaaacacttgcgtctttgtatctgcagatcagatcagatgctgagggctgtttaggctcagaagacctcaccaatgtcctctgccagactgggcttcgttggaggaggctgtttgcaaaactgtgctccttaaaatccaattagcaatggaattcagtaagtgcggcagtgaaccgtataccatataccgtataccgtaatcttagatttttaaaaataaagaatgctttttttttataagtaatacatgtaatatggtataaaattcaaaaagtatctgaagatagacacagtgacaagtatgtttcactcccacttccatgccccagtcaacagttcacctccttggagaaaactaccattgccaatttcttgtttctcttttcagggaatctgaagcgtatatcttatatagatatatataagcacttatggaaatagtggaatactacgcaaactttatgcacttcattttttcacttacaatgattttgtacatatgtaggggaagaaaaatatttttcctcctactcatcctgggtccatggccgagaaccatatgacaaaagacagattagcaagagaaaataatacacatgtatttaatataagctt

SEQ ID NO: 197338 - DNA, 1000 bp, Homo Sapiens
ccgctcattccacctcccaggttcatgccattctcctgcctcagcctcccgagtagctgggactacaggctcctgccaccacacccggctaattttttgtatttttagcagagacgggctttcaccgtgttagccaggatggtctccatctgctgacttcgtgatcctcccacctcggcctctcaaagtgctgagattacaggtgttagccactgcgcctggccttttttttttgaaacggagtttcactctttcgctcttcttgcccaggctggagtgcaatggcacgatctcggctcaccgcaacctctgcccccgagttcaagcgattctcctgcctcagcctcccaggtagctgggattacaggcatgcgccaccacatcctgctaattttgtatttttagtagagacggggtttctccatgttggtcaggctggtctcgaactcctgacctcaggtgatctgcctgcctcagcctcccaaagtcctgggattacaggcatgagccactgcgcccggccaccttttttttttttttttttgagacggagtctcattctgtcacccaggctggagtacaatggtgtggtcttggctcactgcaacctccgcctccggggttcaagggattctcctgcctcggcctaccgagtagctgggactacaggcgcctgccaccacatccagctaatttttgtattttaagtagagacggggtttcactatgttggccaggctgatcttgaactcctgaccttgtgatccgcccaccttggcctcccagcgtgctgggattacaggcgtgagccaccgcacctggctcaaactcttgatcttaagtgatcctcccgcctcagcctcccaaagtgctgggattacaggcatgagccacagcacccagctgcttcgggtctctcttaatccctccagtatgggggtgctcctgctgtgctatgtcttctccaaaatgggatttcctcaaggtggggctaaagctt

SEQ ID NO: 197339 - DNA, 1000 bp, Homo Sapiens
tgtgtgataacatcaaggttgacatgttcttacactagggacagtaagtaaagtagaaatcagaaggaattcccaggactgggattaatcagaagtcaacatggcggataaccatccaagatggagtcacctttgtctccagtgtgacatgcctattatagattagctgaggttctgctccatgccaccctgactctagagcctcagctgacagtacaacctgtgcttggagcatttggttatcggaacacaaggaaaaaggagcaaacttggcagcagtaaaattaagtggttgcaaatatgggctgaacctggattcaagtcctgcctctgtcctcgactagctctgggagcttggggggatgacataaatcctctatctcagtgtccttgtctgtaaaatagggagagcaatgccttcttcatagggtggtggtgtcagctcagtcaactagtaaagctcacaacgtgttgtcaataagtaacacctattattatttcattctggcaatgagccatctagctttttctcatgaggacatatacggtttacacttttttttttttttgagacagagtcttgctctcttgcccaggctggcaccatcacagctcactgcagccttgccctcctgggctcaactgatcctcctgccttagcctgccgagtagctgggtctacaggtgctcaccactatgcttggctaacttttatattttctgtagagatgggggtctagctatgttgcccaggctggtctcaaacttctgagtgcaagtgatcctccctctttagcttccctctttgaaatcccaaagtgctgggatttcaggtgtgaaccactgcacccagcctggcaattcttttagtgttttacgattaagcttgatatgaggttttgattatatggacatacataaacacaataagaagccagtaattctttaacattgtcgctattgttgttcaatatgaatatatgcttaatttattaagctt

SEQ ID NO: 197340 - DNA, 1000 bp, Homo Sapiens
cctcccctttcccctgaggccagccgtcagcccctggcagggggtcttggaagccagaggtttttgctcagggcagggaaagggctgcaggatccccgggggctgccggaggtcggtctcactgacatcatggctgaccccagcatcgcctggtcccacagatgtcgccctctggtcgcctgtgtcttctcaccatcgttggcctgattctccccaccagaggtaagacccatctctggcctccaccctgccccagagcccccagccaggccagccccacgtgtgctgcggggtgggtggttggcccgtgtgaacgttgtcctgccctgtcaccctcccgctgagccggcaccaggaagtggggatccctatggcggggcgacgttacaccctctttggacacctcagacccgggtggctgcttccagtgagtctggccagggcctgtcctgctgagcatcctccaatttcacctccaagaagaactcactgagtttcatttggcggggagattggtgtcggttttctactcagcagccaggaaacctaggctcccagagtccccaggcattacacagttaggcaaagctgttgagctggggttagtccaaagagttggcaacatctcagccttgcctggaaagtgtctcctgaaagatgggaaccacaggggggtattgatcgttctttctgtgtggcaggtgtggtgtgtgttaggtcagttaggctttgcctctgacagtcagtcacacctgttgtcttgcccattttactgatgaggaaactgaggctcagcgaagggaagtgccctgtgtcagaggagaatgggtggaggagctgagaaaacaactgtcctgcctgcccccagaacccagggtgcatgccccactgaaggcgccctcatttctccttcataaaatgattttcatatactcgttcagtcatttgacaaatatttattgagcacctactatgtgctagatattctgtgcactgggga

SEQ ID NO: 197341 - DNA, 1000 bp, Homo Sapiens
cctcaggaggatggctactacttcctgctgcaggagcgcaacgcagatggaaccatcaagtacgtgcatatgcagctggtggcgcaggccacagccacccggcgcctagtggagcgtggcctcctgccacggcagcaggcggactttgatgacctgtgtaacctccccgagctaaccgagggcaacctcctgaagaacctcaagcaccgcttcctgcaacaaaagatctacacgtacgcggggagcatcctggtggccatcaacccctttaagttcctgcccatctacaaccccaagtacgtgaagatgtatgagaaccagcagctgggcaagctggagccacacgtcttcgcgctggccgacgtggcctactacaccatgctcaggaagcgcgtgaaccagtgcatcgtgatctcgggtgagagcggctccggcaagacccagagcaccaacttcctcatccactgcctcaccgccctcagccagaagggctacgccagcggcgtcgagaggaccatcctgggtgctggccctgtgctggaggtgagcggggaagctggtcggtctgtgggagggggcatttgtttggaaaatgcgggtttcaggccaagctcggtggcccacatctataatcccaatgctttggaaggctgagggaggaggattgcttgagcccaggagttcaagatcagcctgggcaacatagcaagatcttttctctacaaaaaaaaaaaaataattagccaggcaggcatagtagtgctcacctgtagtcccagctgctcaggaggctgaggcaggaggatcacttgagcccaggagttcgaggcttcagtgagctatgatcatgccactgcactccagcctggatgacagagagagactccatctcaaaaaaaaaaaaagaaagaaatttcaggctgggtgtggtggctcatgtctataaccccagtggtttttgagaggctgaggcaagaggatcgcttgagcccaggaattc

SEQ ID NO: 197342 - DNA, 1000 bp, Homo Sapiens
tctccaccccttaacttttaacctaccagtatctttatatttaaagtgaatttcttgaagattgttgggtcttattttttattcaatctgacagttcagatctttaatttgtattaagtttctactgacatatcttcaagctcattgattcttttttccactatgtccagtctactgatgagcccttcgaaggcattcatttgtgttaacaatgttttttatttctagcatttcctttgtttttttttttttttttttctttttttgagacggagtgtcgctctgtcacccaggctgcagtgcagtggcatgatctcggctcactgcaacctctgccccccgggtccaagcaattctcctgcctcagcctccagagtagctgggattacaggcgtgcaccactacgccctactaattttgtgcttttagtagagacggggtttcaccatgttggccaggctggtcttgcactcctgacctcaagtgatctgcctgcctgagcctcccaaagtgctgggattacaggcgtgagacaccatgcgcctggcttctagcatttccttttgatcttctcttagcagttctacttatattacccatctgttcttaaatgttgtttacgtttttccaatagagcccttgctgtatattcatcagttattttgacccaatgtgtttttactacttttatcagtccttccacctctgtgtggtaaacatgagcaccttctccatatcacagtcagtgatctgaggaagttgtccagagtatctcagtctagtgagcaggggcaggatttgaatgcaggtctctctggtccatggtttatgtggataaacctcatactcttccactatcacagtaacaaggatgtgaagcatttctaatatctgttgctcctaaattcatttaatccatccctgaagatatttctgtgtacatggacagagaattttccatttttgctgcattaataagacctttctccagcgtgaattc

SEQ ID NO: 197343 - DNA, 1000 bp, Homo Sapiens
ggcaggagaatcacttgaacctgggtggtggaggttgcagtgagccgagatcgtgccacttcactccagcctgggtgacagagtgagacctggtctcaaaaaaaaaaaaaaagaaaatacatccagatcctcagcatagggcctggtatacattaggtgctcagtaagtattgctctctccccctcttctgtcctgtgtgtcaataagagcgaggcagtaatggcctggctggcaagaagatgatgagaggttctgatgggaacccatcagtcatcagcccagtgcaatcccgcatcttccccaagcactcgcgacctatttatgtagtagtaagaaaactccagaggcagggccaggcgtggcggctcaggtctgtaatcccagtgctttgataggcaagggcagaaggatcgcttgagcccaggggtttgaggctgcagtgacctatgatcacaccactatactccagcctgggagacagagcgagaccctgtcaaaacacacacacacacacacacacacacacacaaactccagagacaaccaggcaaatcacaaagtgacctttcctatcagacctcagctccaagcattgcagcgacaaggtggtgacccgagataagaagcgcacttgcagagggtgcctctgcccgtatctctccgcatcctcaagaaacacagaactatcaaacatttttgcaacatgaggagccaagttttgcaacatactgaaaaagggttgtgcaaacttcagcagaaacaccccaattgccccagctgggagtcatcatccagttgctgctgtaatgtgattgtaattcctccagtgttcataatttgtcttggaagctcagctgtattttacatgacgtgttttctgtagaattcctgagtacttgctcttgggatctgagccaagtgcacacaatagctatttggggcaaaacagctggtaaagagaaaggcagcttagaccctgaagaaaagtggaaagaattc

SEQ ID NO: 197344 - DNA, 1000 bp, Homo Sapiens
tcatcttcattagcatgatcctcttcattcgaatcatgcctaaactcaaataaagacccccgcccaccttgtctgtcttccgtctgtcccctgcccccatctagcagtgcctttcaggctggccaatgagatgggagggtttttggaggtccctgaagagccacagacagacagtgcatgagcaggggaagaaccacctcagggccagatgcgggggctcacgcctggaatcccagcactttgggagtccaaggcaggtggatcacttgaggccaggagttcaagaccagcctggccaacatggtgaaaccccgtctctaccaaaaaatacaaaaatcaggcaggcatggtggcgcacgcctgtagtcccagctacttgggaggcttaggcacgagaatcacttgaacccaggaggtggaggttgcagtgagctgagatcccagtactgcactccaacctgagcaacagagcgagactccattgcaaaaaaaaaaaaaaaaagattctaaaaagaaaaagtcagtcttggcaggtggtgactcatcaaacgctgcctccgcccatgttcctctggagcctaccccacaatggacgaggcccagccccaggaggccctaggagcctccgactggcagacttgtagccgaacacagtgccttcagcgatgtaaggccagggtgaggccaaagggcagaacaggggcttggagggtcggggaggagtggggccatgacaggagctcagcctggaggagggcgcatcaacacgaggtcttccctggaattaaaggcaatagttcaaggacacagctcagccacactgcagcctcagctctcgggacactacagatccctcacagtcactcgacaaacacacatgggtcgtgcccagtgctcactggagactctgccctccccaggtcacagtctgatcacttcaaaggagaactgggtgagtactagggtaggggtcctgaaaagggtcgtggagtaggaattc

SEQ ID NO: 197345 - DNA, 1000 bp, Homo Sapiens
ggtagtacgactggtactctggagcgacactcctcctgagatatattatgatcagggagcgtgggcaccaggacccctaactccgtctgacacagagcaatagcatcaattacaccggcccattggaaggactccctttatgtatcaccatggatacgtcactcaactgcagctgtcttgcagtccaatctcaggcatggttaagtcaccatggaaaaattatgtatttattaggcctcagctttattaatgttactggcgtgttcaccaatcactcctagccccatcactcaaattgtatggattatatggaatgggctccctttgatatttctcacccccctccttggacccagtgtcttggccccttggccagacaacagtctatgttaatgggaaacattgactggggtccccgtggccatttagaggggagagatgaaaatcagacctcttggcacaaacttcactggcactggtggtggaccttcaacacctcttcatcacatcacactgggattcagtcccccagttggctgcacaacttgcttggtataggacaggctttaacccgcccttacctcagtgacgtcatctaggaaacagaggcccaattcaggaatcgatatggaaggcaacactcccatttatgaataacagcatctgggtcagaacattatccaacaatagtaatattactcaacacagttttaatatcacctttgtaaaaaatattaccactcaatttacggtttgtgggttttttgttgttgttgttaactgtttgagatggagtctcactctgtcgcccaggctggagtgcagtggcgcaatctcgggtcactgcaacctttgcctcccgggttcaagcaattgtctgcctcagcctcccgagtagctgggattacaggcacccgccaccgtgccaggctattttttgttttttgtatttttaatagaaacgggatttcaccttcttggccaggctgctcttgaattc

SEQ ID NO: 197346 - DNA, 1000 bp, Homo Sapiens
aggaggatcgcttgagtctggcggggcagaggttgcagtgagctgagattgtgccactgcatgcatacaaacacacacatacacatacacatacacacacacacactcgcacacatctcctaatgactgggcgcagtgctcacatctataatcccaccactttgggagtccaagattggaggatcacttgagcccaggagttcaagaccagcctaagcaacaaagtgacgccttatctctataaaaaagtgaaaaaatcagctaggcatagtacccgacacctgaagtcccagctgctcgggaggctggggtgggagaatcacttgagcccaggagttccaggcttcagtgagctatgatcacaccgccacactccagtctgggcaacagaacaagaccctgtctctttaaaatatatcctggacaggcatggcggctcacgcctgtaatctcagcactttgagagcccagggcaggaagattgcttgaggccagaagtttgagaccagtcttagcagcatagccgagactccatctcgacaaaaaaattttaaaaattaggtgggcgtgatggcgtgtgcctgtaatcccagctactcgggaggctgaggtagaattgcttgaacccaggaggcagaggttgcagtgagcctctctgcaaaaacaaaaaaaacaaaaaacaaaacaaaacaaaaaaatgctgcagatccattcctgcctctcatggcctcggccccacctcttcctcccacctggcatgctgtccccaccgccaccttcacggctggcttctcctccttattcaggtctcagctcgtacacacttccttgggtctgaaggtaccctcaagcacatactactattttatttgcttcctgacactgtgtttccctgttgagtttattttctttctttttcgtttcttagagacaaggtctcactctgttgcccaggctggagcacagtggcacaatcacagctcactgtaaccttgaattc

SEQ ID NO: 197347 - DNA, 1000 bp, Homo Sapiens
caggcactcccactgctgctgtcctggctccctgaaggtggcctcaacctgacggttgcagacactatgcctgcttcttccccctgcttcctctcccacctagaccctcacctgtccaaacagctaccccacatattcctttcacccccagccctttctactcttcctgaaacaacctcaggccaggttcctcttgatcacttcatgcccatatcacagagactgtctcggagctagaacccagctccaagcactccctgtgtaagcagccagatcatctaaaggtgtcactcctcaagaacctgccatagctccctactgcctctcataatgtggcccatgctactcttccctcaacagatgattgttgagcacctgagtgccagctgcagcctggcaaacaaggatgaataaaacaggcacagtctctgcccttgtggacctagtctaggtggttggggaagacagaccatcaatcaaccccgcaaagagaaaattataaacggctaaatggaaaaggtgtccatctccaccagtggtaacagagatgctgggccagtttgtcaggaaaggcttccctgaggaagtgatgccccagctgatatgaaaaggtgtagggattcaccagaggatgaagggtttggaaagagcattccagagagagggaatagcagatgcaaacgccttgaggcaagatgaaggatcgcctgcgcagatgacagaaagaggggccagggggccacagagcagagggaatgaggactgcaggcctgggaaacacggggagcaggtgtgctgtcagctgccggtagcagcgcctgatccagcctggctggtgtgcccaagaggaggagaagtgactttatgtcagcctgacctgcaggcagtcagtaaacagattctgttatcaggtctacattccacaccacaggcagtgcagatggaaatccgagacaaatgtctgtggtcatctgtgacctttactttcaccccaaagctt

SEQ ID NO: 197348 - DNA, 1000 bp, Homo Sapiens
ggcgcatgcctgtagttccagctactcaggaggctgaggcacgagaattgcttgaacctgagaggcagaggtggcagtgagcagagatcgcgccattgcattccagcctgggagacagggtgagactttgtctcaaaaaaaaaaaaaaaaaaaaaaaaaaaatgggccaggcacggtggctcacgcctgtaatcccagcactttgggaggctgaggcgggtggatcacaaggtcaggagttcgagaccagcctgatcagtatggtgaaaccccatctctactaaaaatacaaaaattagcaaggcatggtggtgcgcacctgtagtaccagctactagggaggctgaggcaggagaattgcttgaacctgggaggcgggggttgcagtgagccgagattgtgccactgcactcccgcctgggtgacagagcaagactccatctcaaaaaacaaaacaaaataaaaaaagaagtaaaagaaaaaagaagttacagagcagtctatatataggaaggctgatttgtaaaaaaaaaaaaattgttttcatgtggaaatttctagaagaaaacatagctaatgtaaacagcatttgactctaagcagtgagaaatcaggagatctccattttgttatctccttctctggattttctaatttttttttcccctataacaatcactgtcattgtgacagtgcacttggttgccaggaacagaagccaagagaggtttgtgggagaactgagggacttccatgggttcacttgttcctcaagaacaaggaccttgtttgtgccgttcactgtattttgttgactgaattagtgaactggcatagcagaaaataaaattcaaccgtgccccttggagtctcaaactggggatgggtagttgctgcctcatggtatttttctacctctcttttatctgtgtctctccagttctctttccagagtgatgcgcaaacaaaccctcagatgcaaggtgaaagcctgaagctt

SEQ ID NO: 197349 - DNA, 1000 bp, Homo Sapiens
tcttttctcattcctttgactccgccggacttcgtagcccccacggcctggtattgggtctgatcaccccaacagggataaaaggaatcatggagctatctttgtagacaatcttacacagagattgttatcagttagaatgtctttggatttagtaacccaaatacaagcgactaaaacaatacaaacaagtttattatctgacaaatgaaaatacacaggtaaggtggactgaaagttggtgaattcagtggttcaatgaaattaacagggacccaaatttattcatcttcctaacgtgctacccttggtatgaacccaacatagctatggtagctccagacatcctgtacgtgcacaaaactcaaaggccataaaacaggatggggcaagggaagaaggctgcatctcttcctcatgactcttttcagaacaaagaaatatttcccattaaagccatatatctcattgtccatactgcatcatgtgcctaatcttaaaccaaaggaatgactgtgacttgcttagattaatcaagctcccccaggagctatacaggacagtcttaccggaagcacttgattgcctgatacctgaacaaaatcagttttatcagtgaaaggaagaagaagaggacagctatttgataagcaactcattctgtctgctacagatgtcgaagatattgaacaagaattatttataagtttgattcaaatatcaaaaggtgccagctgaagcaccttggttttcctgcacatggcctctttctccatcaggacagtctaaatgtcttttaataatacaagatgtcctttaaataataaaaactcctgaaacattaacagcaatttacaaagattccatgctgatttttaaaaactcgtagatttttctaaaaagcacttggaaaaaaaatcttacaatagataaaatgcatgtccttttgttattaatattgaaagttatcttggctatttatttaggctatagggagatg

SEQ ID NO: 197350 - DNA, 1000 bp, Homo Sapiens
ttccggccgggtgcggtgcctcacgcctgtaatcccagcactttgagaggccgaggctggcagattacctgaggtcaggatttcgaaaccagcctggccagcatttcgaaaccccatctcttctaaaaatacaaaaattagcccggcatggtggcatgtgcctgtaatcctagctacctggtaggctgacacaggagaatcacttgaacccaggaggcagaggttgcagtgagccaagatggaacaactgcactccagcctgggcaagagcaagactccatctcaaaaacaaaaacaaagatggccagccattattctggaggtcacaaggtttgcaacttccccagttatttctgcaaataacatgactattgcaaaacctaacgctggcctttttagatgtctttttaggctttttgcatatctgacaactggatgactccacccagactagcgactctatggtccccacccagaagctgactcagcaactgttttccacagctccaggattgcagcaaggcacccattccctagccctcctgcccaccaaactgttcttgaataaccctagcctctgaattttcagggaggctgattcaagtaataaaactcccatctcccatttagctggatgtatgtggattaaactctctctattgcaatccctctgtctcgataaattggctctatctggacagtgggcaagatgaaccccctgggcagtcataggctgtgaactcttaaatccagggagatgtttgctgtcaatgtccgcagggttcaaggcagaagacaaggacagtgtagcctgaactgggtgggaaaagagaggacagcaaggcctccagtgcccaagggggcttgttggagttgaggggtgtcactgtagtttaggagatgagggtgtgtaaggccctctaatatgacctctaggtttacagcctcctgccatcttccagcctccaaaacccaaaaattcaggccaacgctgaagctt

SEQ ID NO: 197351 - DNA, 1000 bp, Homo Sapiens
tttactctaaagaacagtcacctccattcagtactgaacccttctttacagctttatgtaactgctaatccataagtatgattttttctttttgttttcatcttataaagaatttaaaaattggagctatttcttttcatacttgagctcaatggctcaaatgtaaccaagcattaaggaaatgttaccatatcccattaaattgaagaggttaattccacataatttatagcaccttgattttattaatcaacactgtaatatttgggcatatcactcctatcaaagagattttaaggataagagcagcatgggggaaaataaagcagaatgcatttaattttttcttcatcccatgaaaaaaaaagttgtatttaaaaagttatttatattttcaaaaacataagaaaaaatataaaatgcccaggtcctgcttttttttatttttattttttggaaacacagaaatttgagggattttacaagtcataagctacagaaactgagtagctgtccacaactttagtgctgaatacaaacagattcataatttgctcttggcatgtgtttgtcctggcttgtattgtaagcctttaactacatcagtatggtgataaataccaaacttttttgtggttcacaaccaaatcttccttttggccctgtctttgaaaacattttgtgatgaaaaagttcaaacaaaaaagtagaaaatatagttaataaacctccacatctccctcactggtctcagtaattatcagcttatgggcaattttaattatttcacatacttcccttccaagctggattattttgaagtaaagtccatatatgataacaacatttcatccatatttcaatatattaaattaataactattgtatttacaaacagtccattcagatttaaaaatcaccaatgattggctgaattaactgattaaatttttctgacttaacagattagtcacctggatacaatataaatgtgaagctt

SEQ ID NO: 197352 - DNA, 1000 bp, Homo Sapiens
ctccagagcttcacgaagttcttctaggcatgccacgtacttttgctgtgtgacagggagcgttctttggttagcatggggactttgtggggccttgcccaccttgagctctgacctcaccccattcccccaaaggagcaggcaggctctagccaggatggaataggggagccatggggaagacagggcagaggagtgagggcttggattcatcaaggtggcatggagaagagtggtggattccatgaatttccactcccatccggaggcggagtctgtctccagacccctcgatccaggctgggtcacatgacttgccgaacggcagaaatgatggtggccattctgagcccaggcatcaagaggccttgcatttttacttgttctcttggccccctgcctccactgtgagagcaagcccaggccatcctgctatcgagagacgtgcggccaagtcatgagccaaccggcagagctgggagcagggccccctggaccagccagccttgccaagccaccagctgacctcagactgagcaaagccagccagtatcagtccagccccacccaaagcagaagaccactgactctggagcaagaataaatggtggctgtcttaagctgctacattctgggacatgggtgtcccactcaccaggatgacgtggtctccatccacgaagtcctccagcacttttgtcacctgctccagtgcctgcgtcttcttgaagttggtgttacaggtcccatctgccttctgtagggcagggtgtggaggggcagggtcatgggcttttccttcccgcacccaatacccagcaacctcaaatacctcccaggaggccgggcgcggtggccaagaccagcctgggcaacacagcaagaccccatctctatttaaaaaaaaaaaaaattctggtgtggtagtatgcacctgtggtcccaggtgtgggatcatgcctataatcccagtgctttgggaggccgaggcgggaggatc

SEQ ID NO: 197353 - DNA, 1000 bp, Homo Sapiens
atgtattttttcccccccgagactgagtcttgccctgtcgcccagagctggagtgcaatggcatgatctcagctcactgcaacctccgcctcctgatttcaagcaattctcctgcctcagcctcccaggtagctgggattacaggcgcctgccaccatgcccggctaatgtttgtgtatttttagtagagacggggtttcaccatgttgaccaggctggcctctaactcctgaccttgtgatccgcccaccttggcctcccaaagtgctgagactgcaggcgtgagccaccgcgcctgtaattttttgttgatattattgcatgcatccttttcttagttttctttatttctttctccatggttgtctttactactttgagcatagttaaggcggttgcttaaagtcttcgtccagtgagcgcaataactggagattctcaaagatggtttatctcaattttttcccattgatgagccatatttttctgtcttctttatgattttgtttttgttgaaaagtgggatttgaattttttttttttttttttttttgagacggagtcttgctttgttgcccaggctggagtgcagtggcacaatctcagctcactgcaacctccgcctcccgggttcaagcaattcttttgaattcaagtcttttgaattcttctgagcccagaaaaggtcttttctggaaatgcgttctttcctggacatgaagggggcattctcaattccccagcatacctgggtttttctgagtatcctaatttctgaaagaaatttttctcctcagcttttcttcccaggctttagatggtctatcatatgtctcagccataatctgttggctcaggtagcttcagggtttttgtttactttatgacatttcaagcagttgctgcccttttttttcctcaaaaaataaaaataaaacagtcagatgtggtagtgtgcacctgcagtcccagttactatggaggctgaggtgggaggatc

SEQ ID NO: 197354 - DNA, 1000 bp, Homo Sapiens
aagaatgtaagcattgtgggaaagcattcatatctgccaagatcgtttgaatacatgcaaaacacacactggagagaaacctatgaatgtaaggaatgcaaacaagcattcaattatttttcttccttgcatatacatgaaaggactcatacgagagagaatccgtatgaatgtaaggattgtgggaaagcattcagcttgcttaattgctttcatagacatgtaaagacacaccagaaggaaaccctatgaatgtaagcaatgtggcaaaagctttcacttcttccagttcttttcaatatcatgaaaggactcacactggggagaaaccgtatcaatgtaagcaatgtgggaaagccgtcagatcagcctcaagacttcaaatgcatggaagcactcacacttggcagaaactctatgaatgtaagcagtatgggaaagccttcagatcggctaggattctttgaatacaaataatgaatgtaaacaattaactgtttataataactgtatactaacaaatgttattctttttaaataattaagaagctataataaaatatccattggtgtcatgtattagatcaagcttataatgttacattgttattatttggatattgtgaatcagcattacctggattaaatgccaggcatatttttcctcatgtaaactttacttttcatgcttatgtactttaatttttatttcaactgtaatttttctttttttttccttttgctttttctttttcttttttttttttttttttttttagaaagagcctcactctgttgcccaggctggagtgcagtggtgtgatcttggctcactgcaatctctgcttcccaggtttgaacaattctccttcttcagccttttgagtagctgggactacaggcatgcaccacttcacccagctaattatgtgtattatttagtagagacggggtttcaccatattggccaggctggtctcgaactctggaccttgtgatc

SEQ ID NO: 197355 - DNA, 1000 bp, Homo Sapiens
ctccctagtagctgggattacagacaggtaggtgccaccacacctggctaatttttgtatttttagtagagacggggtttcaccagattggccaggctggtcttgaatgacctcacgtgatctgcccacctcggcctccccaagtgctgggattacaggtgtgagccactgcacctggctgtttgaacatgattctttttttgtggaggtgggaggtggctggtcacatgtctatttctgaaccggctgctgtggccaggagaataccatgctctgatgggccaggccagggtcatgtgcctattccttgagttgaggttggggtggcttccacagaggaaactgaggaactgttacctcagaagggtaaataagatgtcaggaggcaatcagtgtttatatgggcagtgacttctaaatttaagccagaatttctgattctcagtcctgttgacatgtggggccggatcattttctgtcctgggagctgccctgtgtattctaaaatgcttagcagtatgcttggactctatccatttcacacaagtagcacctctcctcagtatctccagacattgccaaatgtcccctgggaggcagaatcgccctgggggcgggcaaaccagttttggagggagtgagcttgctgtcttggggaaaatccaaagagatctgatgattactggctgagaacagcaaagaagagattgagggcttctttgaattagaatatttattttaatttctttctttctctctcctttcttcttttttttttttgacagagtctcactctgtcgcccaggctggagtgcagtggcgcgatctcgtctcactgcaagctccacctcccaggttcacgccattctcctgcctcagcctcccgagtagctgggactataggtgcccaccaccatgcccagctaattttttatattttcgtagagatggggtttcaccgtgttagccaggatggtctcaatttcctgacttcatgatc

SEQ ID NO: 197356 - DNA, 1000 bp, Homo Sapiens
ggatgagaagacataaacataattaaactccaagaagaaggatccagtagaaaaagatagagaaattataaaagagaggtgatgggggcaccgtatagcctttaatacttaagttttaaaaagacaaaagaatgaaaacattaaaattttaattaagaaaaaacataataaaaaaagtaaaaagaagttaaatatagaaatcagtgaaacagaaaggcacactgaaaggtttgataaagccaagaactatggaaagactggtaaaaaatccagaaatggcataaataaataacaggaataaaagagtggggggatataactccagatgcaaaaagagaatactgtgagttaattaatgtcaatagatttgaaaatgtaggggaaaggaataaagtcctagaaaaatatatatgaccaggcgggcacataggctcacgcctgtaatccaaggactttgggaggccaagacgggcggatcacctgagatcaggagttcaagaccagcctggccaacatggtgaaaccccatctctatttaaaaaaatacaaaaattagccaggcgtggaggcaggtgcctgtaatcccagctatttgggagactgaggcaggagaatcacttgaacccgggaggcagaggctgcagtgagccaagaccacaccacggcattgcatgcagcctgggaaacaagagcgaaactccatcccaaaattaaaaaaacaaaaaaaaaaaaaagaaaagaaaagaaagaaagaaaaatatatatgaccagaacaaactcaagaagaaacaaatctgactagtcctacaaccacaaatagaaatatatcacaagttaatggctccccacaaagacagtcccctgtccagaaggttttggaggtgagctctgtcacatgtgcaagggaacatgagagtactcaacagatactgttaatgaatggaaaaagaagaagcacttcccccaaatcactctgatatccggaatatataaagaattc

SEQ ID NO: 197357 - DNA, 1000 bp, Homo Sapiens
atttgttcccatgccattttctagagatggaaaatctgaaagatctctagagaaaacttcctcactgggtcggtcaagatctgtgaaatggataacagaagttcagactgaagcaccataacaaatttcaaataaaagtgctgtctaaagatatctgactttaatctgaaccctctggcaaccttggcattcatctagcctcctgggtcaacttgaatcaatttaaccacatactgaactcctcctaatcctgcaacactctttctccacagggacacaaatactacacatccctctccatatttagctttcctcttaagcacaaaacagtgtatttactgacttaacattcacctttgtctgatattagcttgaggttttgactaaagtttaagcatttactataaaaattccccatcctgcgcctagggtgggaattatcttaagccaatgagtacacatgtacatgaaatttaaaatactataataagtttccttgggttttggttaatattatccagcctcagcattttcatacatagagatctatttcagtgcctgtaatctgtgtttgttttaagcaatgaaaggaagatactgctccttctattccatataacccaagagtttatggaaacatttggctctctataactatagctgaaactgaccataccaagatttaggacatttgaaagcaatgtcacattagaaggctaatagattttattgtttttacctttcatataaaatcttttaatataacagttaactccctgcaacagtgatttgaaatcttcaattaatgaaaagccttgtatgtggcttggattattattgtctcttttgttgaatctgagatgggatgcttaagaacaaggtacttgttattcttgttctttaaaatatgacctcaaattgtaggtactgaaagcttgtagagcttgaatgaccttcagcaatgctcctgttctaatttaaaggtgaggaaattgagatc

SEQ ID NO: 197358 - DNA, 1000 bp, Homo Sapiens
atactactcgaggcactggaatcagaaaagtcactgaaaggccatttgtcgggacctatcgggtgtcattaaaatgcccgcaccctttaagccagcaatcctatttttcttgaacttgtttattatgaaagtaattcaaaagcaaataaaaatccacatgcataaagatgctcatcatggtgtctacattctggagaaaaattagaaataaagtgtccaaaatagatagtcaacgtcacgtcaactcagtggacacaatagatattccttaaaaatactatcaaaatgaatcctgtctttggcatttccttacgggagcaagtggcggtgttttaggattttcagagctgctgcgttacattatttccaaaaggtttctctacccgtggagtctaccctggtccttttctgagtctcttaaattttcttttctcctgatccaccagaatcaggaatctgctctaatctcatgacttccctttggtgaccttcggcgtccacgctcatctttttccagatgcttttactttctctcccactatgactgtcatatgtcaaaacaggattataaaaagtgatgatttaatgtcaaatttaaaaatgatctttacgaaggatgcacagtaatatggggagggatctcatattaggtaaaacaaagaaaagaaaaaaattatttccatgtatactacaatcatataaaattatacctgtctacggctatagagagaaatagtacaagaggcaaaatacaaatgaagacattagagtgatggggtttctcatttttttcataatctttcttattttaaatttcacttattttaaagttgtttttcatcaaaatgaattttgttgttttttcattaaaattaatttttttagcctctaatctgaaaaagattatagacgctcagaaataagcctagcttctgggaattaaagggtaagtggattaaatacaaactggaaggtgagacagcaacatccgacagaattc

SEQ ID NO: 197359 - DNA, 1000 bp, Homo Sapiens
tgttgaggatcacaccctctagaccagtgtagcctttgaaacctgcctgctggtcatcaaacttggatgcccaagggccatttaagtcatgaacaaccaaagattttttaatccaggctcaaaaacttagggggcttctgttcgcttccatgtcccagtaacaacatctaaaattctttcctagacatatttctcaactcgacattcttcctttgtcccttcatctctgtgcctctctgtttcacctgaaggacatcttccttgaagctttttctaaaaataagtgtgagagatcacacttttttttttttttgagacagagtcttgctctgtcgctcaggctggagtgcagtggcgcaatgagagatcacgttcttaatgtggctatgttagtctggtttctccaaggagtacagacaggatgggattaatcatgcaagggttttattaagggaaatgtctgggagagaaaaagggcagggagctggaggaggctgagggagtcattgtaagcttgaccttgagtgaaggagagggcaagggacagtgggcagaggtgttgcaggcagctgtgcagtccagggaaagcaatctttcggcaaggaggtgggtgtctcctgggaatgagcctagcatcctcaataaaaggctaacagcagcctctgggaagcagggccttgggcaaacgcaagggcacaggagctgcggggcttggtcagtgatgctccttgtggttgaaggtggacggagcacatcctcatggtcaccataagaacttcacagagcctgacctgcaggtgctgtgtgcccttcgtcactttattcaccttagaagttttcctgtgctctgtcatacaaaacctttaaaaatcccatctcttgcaatgtcggtcctggtatatgaagagatgctttttcaatcctacaacatctcaaatttctgtatttgttctattccctttctttcagcttgcaaagcactcagttctttcttgaattc

SEQ ID NO: 197360 - DNA, 1000 bp, Homo Sapiens
cctgctgtggcctgtcatgcctcgtatcatgccttctttttacttttttccttttctttttttttttttttgagatggagttttgctcttgttgcccaggctggagtgcaatggcgcaatcttggctcaccacaacctccacctcccagattcaagcaattctcctgcctcagcccctcgagtagctgggattacaggcgtacgccaccatgcccagctaattttgtatttttagtagagacggggtttctctatgttggtcaggctggtctcgaactcctgaccgcaggtgatccgccagccttctaacctgtagctccttccagtccctgtgtgactaacagatgctggaggtctgctggggcctatgcaagtatgttgagtctacagagtgaatggctagcagcttatgctagctgtggcaacaccgttgggtgtggctggagaacaaggcaaagatatgtcaagttggttgtcattatgggagggtcagtcccaacagtatgtgctcaaggaccatgatacatgattcaccaggggtgttagggagggaggtggggctcgctttgtaaatcaaaaccctctcctgggcaaaattcagagccatttctttgcttggactcattctccctctattccaccttcatccctgaagagtgaggctgacctttgcctgccttagtcttctctcagtctctgcttgtacagaagcagcattaaaaatgaaatcgggcaaatctgctttgatctgaaaaaaggaaagtgccattcagctccctgatttctctgtaagagcagagaaccatctagcattgggagattcaggtcaagggaagacttgcttattttaaaatggccaaaggccaccaagcccaaagtaatgggatgaataagatgcagaggggtgagggtgttggggagggaggcataggaggaatcagtgcagtttgtgagggttcagcaactgtggaattgcttactgaagaaagctgcagaattc

SEQ ID NO: 197361 - DNA, 1000 bp, Homo Sapiens
aatgctgggcccacaatccagcctccagactcacagcattgagaattaagaagacgcttgccaagatggttgaatcccaagatgtaaaaatctgatggttaaaccatcggaggagaaactctagactgcaagaactgtttttacccatggcatgggtggaattagagtggaataaggatgttaacttggttctcagactctttcttcactacgtgttcacaggctgctaatattaaacctttcagtactcttattaggatacaagctgggaacttctaaacacttcattctttatatatggacagctttattttaaatgtggtttttgatgcctttttttaagtgggtttttatgaactgcatcaagacttcaatcctgattagtgtctccagtcaagctctgggtactgaattgcctgttcataaaacggtgctttctgtgaaagccttaagaagataaatgagcgcagcagagatggagaaatagactttgccttttacctgagacattcagttcgtttgtattctacctttgtaaaacagcctatagatgatgatgtgtttgggatactgcttattttatgatagtttgtcctgtgtccttagtgatgtgtgtgtgtctccatgcacatgcacgccgggattcctctgctgccatttgaattagaagaaaataatttatatgcatgcacaggaagatattggtggccggtggttttgtgctttaaaaatgcaatatctgaccaagattcgccaatctcatacaagccatttactttgcaagtgagatagcttccccaccagctttattttttaacatgaaagctgatgccaaggccaaaagaagtttaaagcatctgtaaatttggactgttttccttcaaccaccattttttttgtggttattatttttgtcacggaaagcatcctctccaaagttggagcttctattgccatgaaccatgcttacaaagaaagcacttcttattgaagtgaattc

SEQ ID NO: 197362 - DNA, 1000 bp, Homo Sapiens
tctaacacatacactggccacctctcttttcctccaaactgccaagttgttaccgccttaggatctttgctttccatgttcgtctgccttgatcacacagggcccatttctttgtatcattcaggatttaggccaaatatcacccaccttgcagcagaaacgacccagatcctcctccttttttttttctttttattattattatttttttttaagacggagtctcgctctgtcgcccaggctggagtgcagtggcgcgatctcagctcactgcaagcttcgcctcccggttttttttttttttttttaaagagacagggtttccttctgtagctcaggctggggtggcacgatcatggttcgctatagtctccatctcctgggccgggcctcaaacaattctcccacctcagcctcctgaactcctgaatatctgggactagaggagcatgccatcatgcccagctaatttttttatttttaaattttggagagacagagtcttgctatgttgtccaggttgttctcaaactcctgcactcaagtgatcctccccgcttagctcctcaagcactgggactccattggtgtgagccactgcttacctccccaggtccccttctgaagaagttctacacccacatctttccctttgtatgaaatctccctgttttatttgtcttcacagaacttatcactagatgaaattatttagttcacatgtatttgttttcttgtttatttcttcccctttctaccaacagaagcttgaaaaattacttgccaagaaaattgtctggcacgtaatatgggcaatatatttctattgaattaacaaagaagcaaagaattttatatctttgttttgtaataccactaaattgggaacatcttttgaatatctatcaataggaaattagttatacagataggggtacaaccatacaacacatctactaaaaaggtaaaagtgtattttctgtatcttgacacagaattc

SEQ ID NO: 197363 - DNA, 1000 bp, Homo Sapiens
gccaaaaataaagacattacaagaaataaaaactacatccaatatctcttgtagacatagatgcaaaaatctcaacaaattgttatcaaatgccatccaataatgtataaaagtatttatacaccacaatcaagtgtgatttactccagatgtgcaagtctggttcaacattaaaaaaaaaaaataatggccgggcatgatggctcacacctgtaatcccagcactttgggaggctgaggctggtggatcatgaggtcaggagattgagaccatcctggttaacacggtgaaaccccgtctatactaaaaatacaaaaaattagccaggtatggtggcatgtgcctgtagtcccaggtactcgtgtggctgaggcaggagaatcgcttgaacgcgggaggcagaggttgcagtgagctgagatcacgccattgcactccagcctggccatcagagcgagacttcatcacacacacaaaaaattaatccatcaaatcaacattgtaaaaaagaaagaatatgataatagcacttgatatagaaaaatcatttgaaaaagcccagtactcattcaagatgagggggaaaaaaaacctctaagaactctaagcaaactaggaatagtagggaattttctcacctcaataaagaacatctgtaacaacctacagctaatatcatactttattgtgagaaaccgaatgttttcactttaagttggagacaaggtaaagatgtcctctcttaccactcctgctgaagatcgtactgaaaatcctagctaatgcagtgagtaaagaaaattagaatcaagacacagagaattacaggaagtcctgtaattacatcagaattacaggacacagttcctgtaattaatttaaaaaatatggcagggccacaagataaaaagttaacataaaaagttgattgctttcctttgtaagagcaacaaacgattagaacttgaaatataaaacacaatataatttacattaaca

SEQ ID NO: 197364 - DNA, 1000 bp, Homo Sapiens
gctaatgaggaacaacacgttgaacatatcatgtaatgtcaccatatctcagagtgataggaataaatcaatactataaaacttcgttatgtttccagacttgctgatcatgttacatatataatatatataatttaaatattttgaatgtttccctttttttgaaagaaaattgtgccattttcttccaaatatttacacaatgtaaaacagaagagcaatgacatttatagaaatgacaattttcagtatttataatcttttctctgtctaaagagataatttttctattccccattttcccatggtttgaatttgtaattttctatagcagagttctcttgtatattttcttctttgactctgtcacatcgtaggaggtgctgtcagaatattcttgtctccaaaaggagcttttggcttggatttcctctgtcatacaaacatcaaggaaagacaagatctcaatatggaaaccacatataaagtgattacagagattcttatctaattcatttacagttttgactggattatttctcatttcactccctttttcctattttcccttttttcttctctgttttttccatccttccttgtctagttatctgtggcattatttttttctctccatttaccagttaaatatatttatttcatatgtacttgtttttagctctcttccctaagtgaaaagtgtcactgtaaacatctatgagaattctgaccagaatagaaactgtcagaatgccactgaaatgtcaggatctcctattgtgctgctgacaacatttgcagttgttctggacattggatattttcttcctgttcagcatttatcacggaaagtgagcgactctcaattctatttctgaccaaattgtttgtggagctttcaggtaaaggacaaaggtgtcatcagctattgtttctaaagattttgttgatacctttaattctatctgatggtgattgatatttgaaattcagagagagt

SEQ ID NO: 197365 - DNA, 1000 bp, Homo Sapiens
aactaaggttcagggctcagcagtgctaccaggctgtgcccatgggctgataacaaccctacaaatggatcggacagcggcagccacagaagacacagctgtgtgtcagtttacatgtccgtttccctttccacaggcagggaggctacctttcccatctttgaatccccacagggcagagcatctggcacacagcagtgcttagtaagtgtgtgatgaatgaatcaaggagaagacggcgcaggaggtgtgcactgctgcacctgctgctgtggctgtcagctcagcccaaggggaccttgtctggtgagttttccggggagtgaaggccacaggagggcagggtggggcaggggaggaggacgctgacgctcatagatatgactgttcccagctctggagttaagagccaagatcagagaagtctttcctccctccccagtctgagcagggctcaccctcaggccactggggggtggccccacaatgcagcctcatcaccatgggggcaaaggccatctttccctccacacagtgcttccgaatggcatcgatgactccagctgggaagtggatgtggaggtcacagaggaagatgatgctgtgcgggtcctggggacagatgtgggcagggtcagcagaccctgcagaccagagctaggaggtcaggtcgccgtctaggagaagcctcggagtcttccctattggagtgattcacaaactcccacaaaaccagctgctgggcagagttccacagtgctgaacattggagcacaggtcttaaccatcagagtgaattctgactcctccccactctttataggctccaaggaccctggacaactgggcaaatgctccactgtgatttgctggtcccaccctagcactggcctgcagcacagcagagaggacctcctgtgtcctcattcccgtcctccctgaggggctcaccacctcatttaccccaaatgtctctctacctcttaaccagccttgaatt

SEQ ID NO: 197366 - DNA, 1000 bp, Homo Sapiens
tcccaaacagtaacatttaataaactgtaggaaataaaaagaagctcacagtaaaaaaaatcatgagatgtctagacatactattaggaaaataaagcaaagataataaattatgccaaagaaacactcttattggaagaaacatgatgaaagagactaaaacaataatatgtcattggaaaaattagggcaccattaaaaataaaaaatagttatgaagaaatggaaatattggacatgaaaaatatacttgccaaaataaagacattgatttagagggaagataatatttgaagaataatgctaaaacatttttcagagctaaagaaagacataagatataagagtgtgtagccaaacatataagaacaatttataattgggcacatcaaaaattacaagagcatcttaaaatttccaatagagaaaaagcaaataattttcacagaaatgaaaattatacatttattcaacaatgatttatagaatgtttgttataggctaggaattttctagattcttatgataatttcaaataaactaagatccctgtccttgtggaatttacattgaggtaagggagatgaagagactataaataataaacataataacaggagaaattaaaacagagtaaggggattagaagtaccatggagaggagcttgggtgatgagaagattggttttaaaatatactcatcacaagagtcatccatctcttctagccattatccctttatgggtaaccattatgctaacttacagcagcatacattttttccagtttgtgtaatcatttatatttaatgattatatgcatacttaacttgtcagtttgacatgtctggtgggttattttaggtttactgactggcaattccagttgctgctgctgttccagatgttatcttactacaggtgtggataacacagaacttagtacttgatatgcagaaattagaatgttatttttctccctaccaataaactgagaattc

SEQ ID NO: 197367 - DNA, 1000 bp, Homo Sapiens
ttcgggtgactggattcagaaatgggtatttggggttgggggaggagaagggagtttacactgggttggaaagagcagtgcattccctctccatccctgcttcaagccccctagtcagccttgccaccccgaggtttcctcgccatccacaagtcaggccttttcccagccccggcagccccccgcccctcccccgcgcccgccatccctcgcctactctggcaccccttcctgccctttattcttccaacaggcgccccactcctgcagcaccccagtgcgccccccacccggtacaacagattcttagaaaagcgcgccccgccctggcccagccacagccgcctggcgggggaagggccgggccgggcgccgctcccgctccgcggcgctgcccgtgtgagcggcgctgacagagccggctgggcaggcaggccgggcggcccggcggctgagggcggggcgcgggggagggggggatttccgggagtcgccgctgctggcgctgtccggggccagggtccccccattcggccctgccgggccagggcaaacttctgacgtggccagccccccgcccacctcacccccttctccgccgggcgagggcgctcagtgccggaaggggcaacccagggaacagtgttgcggccttggagagctgaggggcactaaccgaagggagggcagttatgcctaggctagagggtatttaaagaccctgagaacagtcagtgaccagaagcgcccctattgccgagggagcccttggcagtgagaaactggaggaggggagttggccatcaggggcagattcatcgaggcgcagttggcacggcaggcacagcttatggggtagttttgtgctctaaaagtgaagttatgttcgaagaaggagcatcgagagagacggtcgaggcgcttagggggcgtcagttgcgggataaggcttcggggactcggagggaggcggcccgggccgcggcggagggcggactgc

SEQ ID NO: 197368 - DNA, 1000 bp, Homo Sapiens
gcagcatgctggcgggtatcaagcttctgcatgaccagcggaaagacttcttcaggtgagtgggggcttgagtcacagtggggtaaaaactgagaagagtaatctaaactattcatactattgacatctctgacacagtattttacaactgcttaggggattcacggttaaaagtgtgtggcactggtttgtcttttacttcagttattcaaaacatagagataagatgaatcgtgaagctgctctttctggaataacaaccactttgtaatttctttcctttttaaacaatcatttttctatggtttgactgtatcctccaaattatgtgttggaaagtaaatcctcaatgcaacagtgttgagaggtgggctcttttatgaggcagagccctcacgaatggattaatgccattatcatgggagtgagtgagttatcgtgagaatgggtccttggtaaaaggatgaatttggccccctgcgtccccactccatccttgtctttctcttttgggcatgcacatgtgttgatgtgttcatgtgctctcttgcgtttccaccttctgccatgggatgatgctgtgagaaggccgtcaccagatgtgggcccttgactttggacttcccagcctccagaactgtaagaaataaatatctgttctttatgaattacccagtctcagatattctgttatagcagcacagaacggactaagacacctttattttgactgaggtttagtttccttagttataatttgagggagttagactacataacttctgggatcccatactattttctcttttaggaattgtttatttttcaagaatagttgataaggttttgtttttgtttttaagtatttatacttggggaatcaaatacacatgaagaatgaataggtgaccatactaacatatcacaaaacatttcaaaattataaataaatctcactgtttcagagcatcttgctagcttgattttcatcctttgaatt

SEQ ID NO: 197369 - DNA, 1000 bp, Homo Sapiens
ggtctcttacaatttgaaagttttgtaactccagacatacctattttgatagtaactgagtcaccagtgctcattagcagtttgcataatagacatctattctagggaattgctgtagtatagactgcatggtggggtaaatagatttagatttgaagactgaacacttccatccagggtctaactccagcatttgtataaacttggacaatacttttgctacagggttgtcattgaaagtattgcctcattatatttcttagtggtccctgtatgaagccatataagagaaacttcttaatttagcactaggaaatgcttctgttgacttgagatgtgtgtgtgtgtgtgtgtgtgtgtgtgtgtgtctgtgtgtgtgtgtgtgtgtctgtgtgtgtgtgtattcccctaattgataaactataaaataatctttctcttttcactttggccatctggaaatttgccaccaatttatggttcaactgtataattgcatgtaacatttataatctgctttcatgaatttttatccttgtattcctcccactctgattcaattttatattataactggtccttgtgtctcattttattttatctctacttttttaatgtccgggatttcctatatgtcaccccaaatactgagtcactgtgtaaataagtaaatatatatctactctatatctataagtagtgtgatatatgagatatatatatatatatatatacacacacactgaatcactttgtaaataagtagaattgccctgactccatcactaagtattcaaaagtcagttatttcttttagagctttagtattctcacttgtaaaataaagaatgaactagattgcccttgagaactttttagacccaaattctaggattaaaaacaacataggacttccagtttccatttggagcctagaaagctggaaagagcatcactttcacctctgaaacaacaataaagctgggaaaactgcaagctt

SEQ ID NO: 197370 - DNA, 1000 bp, Homo Sapiens
tgtattttcaaatgtaaggcctagcatgtttccttggggaggtgacatcgacaatgaggacaagggaggaaacatcagctcacttgggatgcacccataagcaggtaacagccttgcacttcacgccttgcagagataagaagccggtaggggattcataggcttggccctaggagccccctggactgagctccttgaggccaagggccccagtgtggagaccaggcacgcagtgggctgtctggatgcagctgcagaatgaaagaaaaggcaagggcctggcgcagtggctcatgcctgtctgtaattcagcactttgggaggccgaggtgggtggatcacttgaggtcaggaatttgagaccagcctgaccaacatggcgaaaacccatctctactaaatatacaaaaaattagccaggcggcgtggtggggcacacctctaaccccagctactcgggaggctgaggcaggagaattgcttgaacctgggaagcagaggttgcagtgagccaagattgcgtcaatgcacactccagcctgggtgacaaagtgagtgagactctgtctcaaaaataaataaataaataaaaaagaagcctctagctcagctccctgctttccaggagggagaacagccctgagtgggaatttgatgtgcaggagccacacagcaggtgctgagagccaggccacaaatacagggactccctcccctccagccttccccctgtgaatggacatcacccgggccggcacccccgagaaggtgctatgctgcaggtaaagactgctttgtcctgccagagcgtggttcctggaacttgtcgcagtcccagtagtccttcccccacagtgatcggctccctcttgggttcctgggtgcgggaaggaggtgaggtcagcagttccagcagccaggagaggagggtgccgccctgcctgagatgacttcactgtctccacctcatctttcccactttgcctacagtcggaagctt

SEQ ID NO: 197371 - DNA, 1000 bp, Homo Sapiens
gtggattgctcaaaccctgcacgttcccaggaggggcccttggctggctcctgggagctgagctcctgcagtgttctgactgatgagagagacttgagccatgttgcactactttgcctgggtagttgaccaacaaggtgatggatggcaaacacctgctttcgctgtgggtggctggaacttccctgactgacccccaggttcaggagagcctccctggtccgcaccacggcactagctgtcccagcttcttgctggaggaatccggcgcaccctgtgtgactccgctgggagggactctggaagcgcctggcttccctggcagccctttcccttggctggtttactctgtaccctttcaagttggagggtggtctcagggacccccatgcagtctttcgtgctttcaccagaaactcaccttggcagggcttcaggggaaggcttgggatttggtgacaagtgactccatggccttgggcaaagcacagcatctacttaggttttcaggcggttgcccaggtatgtctagcacctaatgtaaccgaggcgtgaaatgcctgtgcgccacggtgcttcagctcgttacgggccgttaggccttgtggtggttctctcttggtttctgtggagaagccagaccccgctgtggttggcaaggaaggcgagtggagacatcaggagtgtccatccctcagcggccctttctagtggggtggctgcctctctcatccttgattaatcccgggacaacctctgctctcctgggcaatccttagaatactccagaagaccccagtatggccgtccggttcctcctgggccccagctctcaggaatgcaccatcacggcacactccatgcgtgcccgtccagatggcacctgagcctccctgtgcctgcgctgcggcgttaacatctcgcttgtgttttaacctgtgttgctttggtttaaaacttgtttgaccgtgttatttgctgagatggcccagagaagctt

SEQ ID NO: 197372 - DNA, 1000 bp, Homo Sapiens
gccttagcctcctgagtagctgggattacagatgcgtgccaccacgcctggctaatttttatatttttagtagagacggggttttgccatgttggtcaggctgctatcgaactcctgacctcgtgatccacccgccttggcctcctaaagtgctgggattacaggcgtgagccaccgtgcccggccccacgccaactcttaagataaaaatgtcttcaacctctttacatagatttttacttccatttgctttcagcattgaacacagactctccaacttatttccatgaaaatatcaacaggtctgttttttatgaaaatggtataatcgtctattgctgtattataattttaactcatatttctgccttaagtcaaaactataattttgtatcattctcttttttaaaattccaaattcatattggtactcgtgatacagatgattagggctaaaagtactatttccatttcctcccatagtctatttacatatgaatcacttcctacagtctaagcactcaatctgttttcttctagtttatgttataaaagtagacaaacaaggaggtctttatatatatttgtatgtgtattgatcatgaagactatttttagaatgtgatgaaagatgtgtactatctccataaatatacacatatataacatattacttctataccatcaggggactgactttttgaagcccacctataatttcccaggcccaccaataccagactaagtatcttcacagtacaattactaaaatctagaataggtaacaatatgtgctgaattactttgaaaatttatttttattctccatagtgtcggttttttgttatgttctttgagagctgaggaaatgttctgcatgtatgcaaatttttggatcactacgttcttgaatcattaccattttgctgaggacactagtaatgtagctgatttaagtctttaagtctcctagtgaggtttattattttttttccagaac

SEQ ID NO: 197373 - DNA, 1000 bp, Homo Sapiens
ttctgggcacatgttctcaggacctcctgaggctgggtctccaaataaaaaacaaaaaaacccactattctttggattccttcaaacagtgaatctttagaatgtagacttcagatatttttaataattctctttggaatttgattcattcttataaaaattcggcctttaaatgtaggtctttgttttaagaatatgtctttttttttaaaggtaaactttgaggatgattctcgtggaaaataccttgaacttctaggatacagaaaagaagatctaggaaagaaggtaaacttttgggaaagttagatggcatgctctttatgaatcatacttttaaaaaataaagttctacacagattatctcaaatcacccaataaacatttaataataatttgtgtttggttgccagcgttttttccctttttctttttcttattctccatcattacccacagtggttgccagagttttgaatacatattgataaatgactatgtaacttgtattagcctttcatcattctttggaaatggctagagttttctatagcattgcaggttgttgcatgtgtggtagaggtatactgtgcactttaagtgcatattgaagattagtgctcttttgatgtcaggcagaactaactaagatcacatcacaaccccactgcttagtggctatgtctttgctcactcctttagagttttatatttaactttattagtagtctaaacttcttgaggctgtaacttttttaggcttgtaagagattgatatgaaagttttacttgcatgcctgatggcaaaaaatgaggaaatagaatgattgtcggattatttctaattacttccatgtgaaagaagctagcaccatggagaaccagttctgcatagcttttttaatttttttaaacatactattcctataagaacttttgtggattttcgccagtgagaagcaagaggtgaacatttgctggatgctctgaaatagaattc

SEQ ID NO: 197374 - DNA, 1000 bp, Homo Sapiens
cgactatttttgaagaggttcaggtacagtacagttgctaatttctagaaggaaagaaaaggcaggcagcttacctgggaaatgctatgtgtaaaaaatagcaaaccagtgttgtcccaacctgggggaaggtgccttgagttcgtcttggtttcaggggtgaccaatcttttggcttccctgggccacattggaagaagaaggattgtcctggaccacacataaaagacacgatagctgatgagctgctaaaaaaacaaacaaacaaacaaacaaaaaaaacagcaaaaaaaaaaatctcataatggtttttgtttgtttgtttttttgacagagtcttgctctgtttcccaggctggagtgcagtggcatgatctgggctccctgcagtctccgcctcccaggttcaagtgattcttctgcctcagcttcctgagtagctgggattacaggagcacgccaccacgcctggctaatttttgtatttttagtagagacaggctttcaccatgttggtcaggctgttctcgaactcctgacctcatgatctgcctgccttggcctcccaaagtgctgggattacaggcgtgagccaccacgcccagcccaaaatctcataatgctttaagaaagtttatgaatttgtgttgggctacattcagagccgccctgggccacatgttggacatgcttggcttaagctttcacagtctcatagagtgtccaggtcagaattgcagattcccatcaggccttagcttagatagtaaaactaaatgaaacaggcaagcctcttccttaaacaaatgttagaataagagagaagaaattataaaatggaaagcgcctcaggctgggagacagaaggtccggcctctggtccgcatgtactcatctgttccctgggaaacctctgcccgccccttcccgcttaggatttcagacctaagtgtgggagtcgaatgagacaatgtttggtacatgaacttgaacagaattc

SEQ ID NO: 197375 - DNA, 1000 bp, Homo Sapiens
caagttgttgccactttatacaagaatggttttttcttcagtttctaacaatgtgttccttccatctgagacctcatcagaatggcctttaacatccatatttctgtcaatattctggtcacaaccacttagataaagtctaagaagactgaggtttcttaacagctctccttttcttctgagccctcaccagaatatcagaatatcgctttactgtccattccagcaaaacaggctttttttttcagcctcttcctccaaatccttccagactctgctcattacccagttccaaagccacttccacatttttaggtatttgttaaagcagcactccacttctcagtaccaatttctatcttagttcatttatgctgctataaaaaaaatcttaggttgggtggtttaggaacagaaatttagtgctcaacctttgagggtctgggaagttcaagattaaggcatgaacagattcagtgtctgatgttagctccttccctgcttcaaagatgatgccttcttattgtgtcctcatgtggtggaaagggcaaggcagctctgttatagcactgaccccattcattaggttgaaatccttatgacttaatcacttcctcaaaaggcgctacctcttaatactaccacattaggcattaggttccagcacatggtttttctgggggacatcaacatttagatcatagcaacaggatatatggagttttggcgagcatgttaggcagagggtagtgtgaatgatagtgactcattacatacagagaagtgcagtcctaaaagaaactagatgtacttagcatagatattaggaaagctttggaccattaattttacatattctgtgggatgagaagttcaaagaagttgaagttgacagcttaggtctgagaagaccccaactcaagccctgtaagacatgaagatttaattagaatatttacatgccaagttatctccaagaaatggcataaaaagagaattc

SEQ ID NO: 197376 - DNA, 1000 bp, Homo Sapiens
gtaatcatgttttctgaatctcattatttaaggttgccattctggcaaccacaaagggataaaaacagacctctaataatctctgtcacttttctgacagccagagccatggtaccagcatgaacagctttcattcatctgacttcaccagagccaatgggatctctggtaaggcccctctttgtctgaatcctcctagatttgcttgagctgcacacatatctaacttaacaaggttggaattgaagctctgctgtaaggtagttttatttgttattctctagagattcagccgattgcagctttgtggttttcacttttctctgaggttaaggttttgtttgagattactcatagttatcagaaccttttctcatgttcaaaattttggtcagggagacaacagtttccgaaaggaggaagtgaatctttatggcttatgcaaaaaaaaaaaaaaaaacctttaaaactagccagattctgaaactcagttcaattaatacatctaagctttttccatgaataaccagagttataaaaggctctatgaaaataagtcctgaaaaaagaggtgcctcttcctcccagccaaaggtaccttaggcaactaaggtctcttaggagtgttgaagtttattgcttattatttgaaacaggaattccttatgaacatacaaggaatcttccttaatccagtgggcacacataaaggtttatcacctgaagccttaagcacccaagtttcttgggatcactgagacacatagagtgaagaaatgactcaaggtgacaccttgagaagctattcccataagcaatacacctgattccaaacactttccactaggttttcaatcattcagaaagaaaaatgaaaattatggacaatcgtatctctaaaactgagtcttcctccttaaggagagatccaccattagaaataccagctgttgcaaacccccatatgttgttgattgccttcccaactgaaggtgaattc

SEQ ID NO: 197377 - DNA, 1000 bp, Homo Sapiens
tcaatagatgcacaaaacaggtctctggtaaaatttaacatcccttcatgttaaaaactctcagtaatctaggcattgatgggacataactcaaaataataagagctatttgtgacaaatgcatagccaatatcacattgaatgggcaaaagctggaagcattccctgtgaaaaaaggtacaagacaaggatgccctctctctacactcttattcaacatagtattggaagttaggactagtgcagtcaggcaagagaaagaaataaagggtattcaaataggaagataggaagtcaaattgtccctgtttgtaggtgacataatttttcatttagaaaaccccgtcatctcagcccccaaactccttaaactgataagcaaaatcagcaaagtctcagtatacaaaatcaatgtgcaaaaatcacaaggatacctttaccctaacaatagacaagcggagagccaaatcaagaatcaactcccattaacaattgctacaaagagaataaaatacctaggaatatagctaacaagggatgtgaataactgcttcaatgagaacaacaacccactgtgcaaggaaatgagagaggatgaaaacaaatggaaaacacttttcatcgtcacagacaggacaaatcaacattgtgaaaatggccatactgcccaaagtattttatagattcaatgctattcccatcaaactaccattgacattcttcgtagaattagaaaaaagctactttgaatttcatatgtaatcaaagaacaccctgtatagccaagacaatcctaagcaaaaaaacaaaattggagacatcgtgctacctgactttgaactgtaataaaaggcaacagcaaccaaacagcatggtacttgtaccaaagcaggtatatagaccgatggaacagaaaagacacctcaaaaataacaccacacatctgcaaccatctaatcttagacaaatctgacaaaaacaagcaatggggaaagaattc

SEQ ID NO: 197378 - DNA, 1000 bp, Homo Sapiens
acaggtgtgagccactgtgtcctgccccacacccctaattttttttaaaatttttagtagtgacgacgtctcactatgttgcctggactagtctctaacacattttttaatagtataataattcttaatattttggggtaacagaatcatttgagaatttgataaaaattaagaactctttccattttaagaattcatggggtcttcaactgaggtcttgcaaggcaagccggccatgccatgtttgtagattaatgaggctaggggccctaacttccctaagatctacttttctagctaccttctgccctgtgtctggcacctacatccttcatgattgttctttttgatccattctggattaaaaataaatatgaaaagcactcatgtataccaaattccacaattttgtatataattgtggaaggtttaagaacccacaaagccacgaatccatatgaatccaagttaagaccacagaaaaaacactctcctttggggggaaaaatctgcttcttaattacagaggcatcatgaaaaagaaaggggacatctgggctgcgtaatatatacattaaaagaccccttgaattacagtctcaaccaaagagattaatttgaccttctttttcacacaaaggagttgaattcagatctagatattttaaaattttatcaatttttctcttctatcaattttttctatttatcaagagaaaaatgctagacagggatgtatgtgcgtatacaggcatcagtttttcctggttccttgacatagccacgtcttatttaatttgaaataacaagtgcctagcacagtgcctgacccatgatatgaggttaacaaatttctaataaatgaaacgtagattttttattgaagtatattagagaactcaattttcagaaataaaaatggccaggtgcactggctcacgcctgtaatcccagcactttggaaggccaagatgggtggattgcttgagctcaggaattc

SEQ ID NO: 197379 - DNA, 1000 bp, Homo Sapiens
ataaattgtgagctttgcacttaatgtaagtaggtttgaaatttattcttttccatttttcccagtttatttttaagttaaaaagtgtgccaaaaatatgaatacaggcctcaggttttggtggatacaaatatacatatggcttcatctgaaatacagaggtaaggtgaatttaaggcatttaaaaacataacactttatagtaagatttcaagtcggcaacatagaaaatgctaccaaaaaagcaatacctccacaaagcagaaatttgctttatttatgaaatgcaggcacagaggaaatgaagcttacagaaacaataaaacagatgacacttaagacaaatactatatatttatataagatataaaaagagtccactattttgagtatacttcatgatgctttcctatgtaatgaatagtgcctcattgttgagtttaaataatcctggtagctatttgtctcattaaataatatattttctttcctaacacattcctagaaccccagtggggtatcaaacagaactgctcccttttgtaataattattcaaggctggaatcactaaaacagggcttattactctgagtgtaactgaatcaagtcacttggtcaggaggagagtcagaactgagactgagaacttagccatacccttctggctcaggaagaagaagagagttcttcgctagacatcgtggctcacgcctgtaatcgcagcactttgggaggctggggcaggagaatggcttgagttcaggagttcaagactagcctgggcaacatgggagaccccgtctttacaaaaaaattagctgggaatggtggcacacgcttgtggtcccagccactcaggaagctgaggtgggaggatcacttgagcccaggatgttgaggcttcagtgagctgtgattgcaccactgcactgaagcctgcgcaacagagcaagaccctgtctcaaagaaagaagagagttctcttagctgacagaattc

SEQ ID NO: 197380 - DNA, 1000 bp, Homo Sapiens
gggtcacatgaacttggagcactggtcctgtcaggcagcctagacaggggagccaaagtaaacaattcaaaattaccactattcatgagttcgctcatgaccacaaagaggcaagtgccagttcgttggttcaaaactgatattttagttaactgattggaggaagagtaggcagatttacattctacacagtctcaattattgtttacacgtgaatgtgagcagttatttaatctctctagttaactagtctttaaaaagaattggcgtgataccttccctgaactgtttcataggtgtttttgtgagaatgaatgaagtttctattataaaatagtagtgaattttcttttgcttttgtttattttctttgactgtgttttatcactttctctgaatgcgtttttcattcctcatttttggaatccttttttgtatgctcttttctctgttaatatgtgatgtgccctgtgcctactctttgtgaccatcttcatttcagatttcttccttcaagcattaccaaaaagatgtagaagaagaactttgtgaatagagagagaaacacttatttttctctttttcatagatgcctgctaacttatgcctcctcctcctctttccctgaaggagctttgggcatttttctgtatctcctactcaagagaatggaaagctccaatgccttgtattgccagacctgtttttaaaatatgccctattcttagggagtaactaaaactttatatatcttctgttttctccccttctaggcaaagtggttcaaaccacaaattacctaacaagtaaaagtggtcgtgtagcaatactagaggaatttttatcttgtttagtatagctaaaccatccttgattgggagtgttttccagtgagtttgccttgaatggctaaggagatcaataaagaaattatattttaatggaaggagactggttggtatgtctttaaccatttgtttgaatcacttgaaatgaattc

SEQ ID NO: 197381 - DNA, 1000 bp, Homo Sapiens
taataagatagtttacatttttttcatactggatcttcaaaatctattctattgttttcccatgctgagaaaaatgactgcctgcagtctctaagcttattcttgccctaacaattctcttcagctttggatctctgtggggttgctctaggttccacaagtcacacaagcagcatcttcactcagaagccaagcagcatgaaaatttgatccactggatgatcaaattcattctgggcccaatgttacattttattaacacactaaatgttgtcatgatatgcttcctgacaggagtttttaaagtgttagaagaactattaaccaaaacctctgctccaccccagctttacctgaagattaagtatggttagtcaaaacctgacagaaacaaccatcatcatatccaaaccaagtgaaaaattttatttcagtaaaaagtggtgggttttatcttattcataactgtcttagtccattcagggtgctatagcaaaataccataaactgggttatttataaattacagaaatgtatttctgcagttctcaaggctgagaagtccaagattaagatgctagcaaatttggtgtctggtgagatcaccaaattctgggttcatagatgatgctctttattctgtcctcgcatgatgtaagaggtgaggaatctatcttgggcctcttttataaggacactaattccattcatgaggactctgccatttataacctaatcacctcccaaaagcaccacctcctaataccatcactttgggggttgggatttcaacatatgaattttgggggtacaaaaatatcccgactatagccttctacccctggaaccccaaagttcattttattttcacgtgtgagagagatttattttatcccaatagccccgacagttttaagtgacaccagcatcaactcaaaaatttaaagtctcatataaatatcatctaaatctgatatgggtaatattcaagatagaattc

SEQ ID NO: 197382 - DNA, 1000 bp, Homo Sapiens
atgtgatgttttcatttagttgcctgtatgtctgtctggtctccagctcagcctggctccttgaggtaagaggcagtggctgttcacctttgcatcccagcacctggcatacaatagatgggatgaaatgttcaaactgagcctaagcttcagggtgcttatcaaagcagggaagatacacaagaggagatgattcaggtccagggcaggtcaggtatctaaacccagtctcttaggaagctggatcctccgaaccagggagaacaagctggatatgcactggatttcccagcagtactgatctagagactctcatagagtcccttttattccttggcctagggttacaactgcttatagcatctggaaagactcaacacctcaaaagagactttcagtagatacagcaaatacactcatggaattgataattaagcttcaatatcacaacacataagtaccatatttaaaatatatgtctatggaggaaaagctgacagaaaaaaacaaagatctctatatggacaatagatgcagaaaagaaaggaaataacaatcagagatcaatgaaataggaaacaaacatacagtagagaatcaacaaaaataaaagctggttctctgaaagtataattaaaatagacaaatttctagcatgcccaatcaggagcaaaaaagagaaggtctcaaaagagaatactacaaatgaaaagaagtttgtaactacagctagaatattttaaaaataagagttaacattaaaatatgctgataaatttaattgcttaaaatagacaatttcctagaacacttatcaaaacaaattcagaacagaaacgtgaatagacctatatccataaaagaaattgattattaaaagccatttaccaaaaacaaataaaaaacaaaaacatcaaaaacaaataagccaataaacactaccagacccagaaagttttatcagtacgttctaccaaatattaaagcaactgatagtccc

SEQ ID NO: 197383 - DNA, 1000 bp, Homo Sapiens
agctaacttaacctggaaataactgtaaaatttgtgatacttcaaccgatcaggtcaagacacttggttcttaacagtctgtgtaggatcaaagatatggctgctgtccaaaagagctgggatgctcacatcaaagttcagatccaacccctttcaaccttgctccttctcttcagcacttagatttaagttcttgttgaaaacttttaagtagagcagtgtgtgtgtgtgtgtgtgtgtgtgtgtgtgtgaattgcagccttagcccaaaccagctccttcgtgtcgtgaactggagagtggacgcgatttcccagctgagccagctcttgcctgtcaggtcgagctaggtgaatgtgctgagctgtcctaagagggtccttttcatgagcgttccaggtgcctttcagtccctgtggatccttgggctcatagctgcctcgttatggaaaacacttgtggccaagcgaatgctgaccacacggcctccagtttgaacaaggctgagacctgaccggctttctcatcaggaaaaaacaacattggattcatttctccatctctctctcacgtgtgatgctttccacccactgggttaagtttcttattgccttcttcatttttctttctcctctcccctcgccctcccctttctgtgtgagtttcaaaaggcaaatgtctggcgggagtcaataaaggaattgcttttacttgtttcaggtgctgacggcacagtgaggtttgttatgctggaagcttaaaccaacaaaagccagggaggactggacgctgtctgaaagtgaggacaggaattgttaattgctcataacatcctgtgtctaccaagagcaacagatacttgacttcttttttaaactgtctaaagttaacttactcacagaataccagccataaatactttcatgtctgactcacttaagctagagttgtaacttcacattaccatgtgcctttacattattgaagtttaaaggaattc

SEQ ID NO: 197384 - DNA, 1000 bp, Homo Sapiens
acaaagcatgcagtagcacttgtgaaacactacatgtgtttaagcataaaatgagttccccagcacaggtcaaaatagtgtttactgacaagactgcacgataacaaagcaagacatcaaaatgtttacttaccaattttcaccatatgtattcaactgaggactgaagagttatttttcattaaatgaatcccttccctttagaagttgttagaataacagctcagaatacatcctattcattcagcttagtctacattcgaaaaaactcaaacacctgttctgcggttaacctaacagtgagatttttgtttttatttatttatttttgctcctattacttactaaaaaaaatccaagctgatatgactggaatggtacttagaaaatatgaagctagtctgatatttcttttactccacagtagaattgtggtacgaaaaggaaccaagtaataatgtagcccaatatccccatgttagatacacacacacacacacacacacatacacacactcctgaggatcaaggagatgaaacaatttgcccacgattaacaagccagctctcttgactccctagaccagctgtcattcctctagcacccactgactccctttcacagaaatcaaaaggactatttattcctcctttcttccccataactgttatgcctgttttcctttccaatcatttgcaagagagaacaatgcatcttcccttgaaaagactctgattaggatgaccctcaaatagtgtgcttttggtaacatctattgtcatctgaaaagcaataaaaggatcccagatcccaataattaggatctctaaagaaggtcacttcccttttatcttaaccaaatgtgtatagtggtctctaagatacagtttcataaattagttataaatacatcctgaaagcatattcatcagtataaattttttacaaatggatctaaagcactttgactagtttcaactggaaaaatgttatgaattc

SEQ ID NO: 197385 - DNA, 1000 bp, Homo Sapiens
cactgagggcagaggcagtgaggccagctaaattgtagtttttttttgatgcttattttactataaattttgaacctgtgcaaataagtttatgtctcctgcacagccctggttatgctgctggcagtgtactctgagtgtgatctttcttagtcatgttacgggtaggggagagtgactgaacattcgttagggtggtgacataattaaacctgtagtttaattccctgcagtgtctaccagtgaatcctacctataataaatacagttagctaaagttaatttatggcttatttacattcagatgttttcattataatgtttctgttaaaaagtttttattttagttgttttctgtttcttttctcccttttgatccttgaaggtagattaagtaagagattaagaaagaaatctgataagtaaaacgagatagttgaggaaagaaaaggtaaagaagcagcatgaactcggtagcacggcactcaagtgaaggagggccgtgggtttcctggtgagagctgctcttccctgcatcaccacttggcgctggtgacctctgctctgaaaagcaggaagcaccctctcctcccattaccatggcttgtgttacctttttggattctaattacctctgcaagaaaggattttatatgtagcagataactggaagtgttaggcagaactctcttaattcattgttgagtgtacgttttcaagttaaacttttcctttgtagatctgagacagcgtcatgactagaaggcaacaaagcataaagtagaatacatctctgtgtggtcgttggtcaaatgtccatagctgttttcggcagggcctttatggggtctgctcttcatgcctccataggattttcctttatggagcagtacagtttctttggaacttcaaagggtcttattctctttgacttcaatatgcaaagtgtctcaaaagctgttatggggtaaaatcaacaatcaaaattcctctggaattc

SEQ ID NO: 197386 - DNA, 1000 bp, Homo Sapiens
actttgaagctcattcaagttgctgtcagaattcagttgtaaataatgtagttataggactgaggtcccttttttcctgctggctgtttaccgggcactgggcatcgttctcagtttctagaggccatcctgcattccttggtgaaagctgcctttctccatagtcaaagatagcactggctgtttgaatccttctcacaattcaaatctctctgattttcccttctttctcacctcctctgcctcttcttcaaagaattttatactttaaattttagtttagtttttacaaattagaccctgataaggttaatttaaaatacatctcagtaaagactataaaatttgtaaaccaaatatgatatttgaagaacaaagtattaaaatgaccaattaaaaaaatcaacaacttgaaccatattttatggagttaaaatctttaattatcttatttatggttagtcttttttctttttaaaattttttatgttaaaaatgcttatttataagggaattttttgggtgatagaaatattttgtatcatgactgtgatggtgaacttaaaagtttatgcatttgtcaaaccctataaaaactacaccacaaaaagtgaattttattatatgtatacttaaaatcaacaaaaaatctctatgtaggaggaacttaaaaggaaacacagactaaaaaataaacctatttttttcattataaaagattttttggggtaaaaaagagcaaagaaacctagctgagttataaatgaatgtaaccatcctgagagagatggaatagtaaagaactaacctactttgcaaaacagattttcagcaggattaaaacagaaaaaattgtccacaaatgcatgggttggcaattcacaaactatgtatatagtaaggtttaattaataagtaaatatagcttagattcaagagccagatttgtcactgtcagagaaagaagttacaaataaggaaagggagaaggatagaattc

SEQ ID NO: 197387 - DNA, 1000 bp, Homo Sapiens
cttctttctttataaattagcagcattaatttagacagactaatacactgaggaagagtagggtgaaggttagactttacatacatagtaccatgctgagtttggtttcaagggccaaactggtgaactcagaaagggaagcctgatgtagttggaaaagtcaaacctcagctccactactactagctatgaggctttgtgaaaataaattaaccactctgaacctcagcctctttatctgtggtggtaggctgaataatgactcctccaaagatgtccacatccaaatgttctgaaacttgtgaatatgtaaacttacatggtaaaattgactttgcagttgtgatttagttaaggatcttgagatgggggcagaattttggattgtctgggtgggcccaacctaaccctagagttgttgtaagagagaggcagatcagagtgagagtgaggaaagcaaaggctggagtgatgggaggaagggtcaccacctacggaatgttggggggcctctagaagctggaaaaggcaaggatacaattctcccctagggcctccagaagggaggcagctctgtctacaacttgattttagcccagtgagacctataaaatgcaaaataaaggtactcatctcataaggctgttgccacagattaaaggagacaatgtatctgaagcacttagcatagtgtctgccacacactaggtgctgggtaaaaggtagattattttatgctttttttttagaaattatacgatccgagccagggttggattccatctgacttaaagcccaaccactacattatagttaaaacaacttgtagtggttggaagtggatgcagttcttccaaagaatccgtggtaaaacattttaggattgctggaactcaaggagatgcttccaaattctttatctcagaaaacttttgggaccccagcatcccctttggataacctgttgcatcatcaggcctccagacatgaggctgaattc

SEQ ID NO: 197388 - DNA, 1000 bp, Homo Sapiens
taatattccattgtatgtatatatcacatttgctttatcattttttccatcactgaacatttaggttccatccacctcttggctattgtgaataatactgcaagcgacatagatgtgcaaatatctctgtgagatcttgttttcagttcttttggatatatatcaaggaatgggattgctggtcatatagttgctggtaattctatttttaattttttgaggaacctccattctgttttccatgggctctaccattttacattccacaaacagtgcacaagtgttttaatttctttatgtctttaccagcaagcacttgttatacagtctcccttctttcttttcatagtgggcatcctaatgggagtgaggtgatatctccttgtggttttcagttgcatttttctgatgattagtaatgcgaacatcttttcatgtgcttgttggccatttgtatatcacttttggagacatgtctgttcaagtactttgcccgttttttaattgggttatttgatttttgttgttgagttgagggaattctttatatattctagatattagtcccttctcagatgtattatatgagcatattttcttcaattccataagttgccttttcactatattgattgtatcttttggtgcacaaaagtttttaagtttgatataattccatttgtctacttttgctttttgttgcctatgcatttagtgtcataccaagaaatcattggaaatatgttttttcatttgtttaagcctgtaggaggaaatacggtttgagtgaactttaacatcttggaaaagtaagccttggtcaagcttacagacaagagactaggctggttattcatcctgtgaaacagccctacaaatttacctacaccatggaatccaagatcccactgataatgtgaacttactcctttttgtttgtcttctcccttctaatgttaatttttttaactgcaggaaaaataacaaaataacagaattc

SEQ ID NO: 197389 - DNA, 1000 bp, Homo Sapiens
ggacctccaggatgaagaccaaagtgactgtgcaatttctagtggaataatttacacttaagatcttatttatttatcaaaagactgctgtgaggtaggaattcttaacccccatttgcagaaacagactttgcctgacaccacagagctaggaaaaagtgggcataagatcctcatcaagtctgacttccaaaagaagattcaaaaagaaacctccttgctacccgccaaatctctgtagagccagccatgttcacacatgaaacaggacaatgacaatagcaccaggaatagctactcctggtcagatgccctcatgaggtcaactccgcgggatggggacaccgggccctgcttaggggaaaggaagggggtttgtagaggaagcccagccagccaagcaaccagagatgggaaaaacctattgggaagaacttgcttgctctagctgggctttgcaaagaacaggaaaagatgagtctgcacagacagaaatggtctagaatggctgaatgtttcatgtagaaattttattttatgattaatacactcgtgccatttcttggaaccacttgcttgtttaattctagtctatcaagtgataattttgttgatatttagaggctcctcagttaatttctgtgggatttttggttatatttaataaggaaaataatatgaaatgtctaagaaaaaaagaaacaaagtcaactattcctgagaatgtttaaatttattgaagtacacttgttaattgttagtatagaacctacatttcatgatagaaaaccttggacttgccagttgtagctgctggaatgaggtgtttgtccagtacatccagaacgtcgccacagattaactttagctcagtctcaacctgaaaaaataaaaataaatttaaaaaatcagatcgttgaagtctagaaattctgtaaattattacacattctatctacctctggttttgaggaagagagcttagtgttacagagaattc

SEQ ID NO: 197390 - DNA, 1000 bp, Homo Sapiens
gggaaatcccccaaccccttgtgcttcccaggtgaggcgatgccccgccctgcttcagatcgccctccatgggctgcacccactgtccagccagtcccagtgagatgaaccaggtacctcagttggaaatgcagaaatcacccatcttctgtgttgatcacactgggagctgcagaccagagctgttcctattcggccatcttggtaaagtcctattttttgttttttttttgagatagaatcttgctctgtcacccaggctggagtgcagtggcgcaatcttggctcactgcaacctccacctccagggttcatgtgattctcctgcctcagcctcccaagtagctgggattacaggcacccgccactacgcccagctaattttttgtattttttttttagtagagaaagagtttcaccatgttggccaggctggtctcaaattcctgaccttgtgatccgcccgcctcggcctcccaaagtgctgggattacaggtgtgagccactgcacctggcctcaattctgtttttatatattgtcatgtacaactggaaactaaaattttttttaaaaaactctatttacactaaagccaaaaaatgaaatacttggttataaatctaacaaaacatgtatagaatccatatgctgaaaacaaaatgctacctagtattcgataatagggtgactatagtctaataatttaattgcacatttaaaaataactaaaatagtataattggattgtttgtaacacaaaagataaatgcttgagggaatggataccctattttacatgatgtgattatcatgcattgcatccctgtatcaaaacatctcatgtaccacataaatatttacacctgctatgtacccacaaaaattaaaataattattttcaaaatatgctgatgaggagaataaaagctaaaataaacagggagacatatattcatggattggaagatgtcaattggtctgtaggtttagcagaattc

SEQ ID NO: 197391 - DNA, 1000 bp, Homo Sapiens
ggaagagagttatgagccaatgaaggcaggtggcctctggaagcccggaaaggcagggaagcagattctctcctggagcccccaggaggatcgaggcttgtgaccccttgaatttagcccagtgagactgatttgcacctctgacctccagaatgtaggatgatagctgtgtgttgctataagtcaccaggtttgtggcaatttgttacagcagcaataggaaactaatgctgctgaggcattctggggacacaggaggggagagttgtttacctgctggtggtccaaagatgattagtcagaaatccaggggggctcagtcaccttgcacacaggcctgtgtgaggtgaggggaacaggcgtggcttccacactgtttagatccaagggccccctctggtgagtgctggtgggtgggtacagtcatctgtatgtgaaactgtaactggatcgatcacaagaactaatgagtgcttactttttttgccagacgcgattctaacagtgtttcatatcaacttatttaagcctagcagtaaaccctggggaatgggtactacgtcttgtcctcattttgtacagctgacccttgaacagtacacggttaggggcactgactccctctgcagttgaaaatccacgtgtaacttttgactcctccaaaacgtaactactaatagcctcatattgactggaaatgtaaatagatgattaatacatcttttgtatatgcgttatatgctgtattcttaccataaagtaagctggaggaaagaaaatatcattaagaaaatcatagggaagagaaaatgtatttactattcattaagtggaggtggatcatcataaagatcttcatctttgtcgtcttcccactgagtgggctgaggaggaggaggaagaggaggacttagttttgctgtgtcagggtggcagagaaggaagaggtggaggaggtgggggaagagttggaggaggtggaagagggaggaggaggtgg

SEQ ID NO: 197392 - DNA, 1000 bp, Homo Sapiens
tttagctgattattttaacactagagagctaaatggcatgattgtattgctacctttcaattttgtttcagtattatgtataaatttttcctatggagaatgaagatttgaccctctttcctcctgtcaacatcatgcacacacacacacacacacacacacacacacacacacaccccaccccatatgaacccttcccatcttcccatcaccccatcctccaaatatggctatatagtaaatctggttgaatcaattatgcaacttctattattgtaatgatgtaaaagtattcagaggtgaactacatgtgttaatttttctttcctgcacaacattttgttttctctggagtgataaataccttgggtttttccacctaagtgttctacgtgctcataactgattcaatgcacaaatacctacccattgcctagctctcctctcaagaagtgaagatatatcatgcattgtatcaacttcaccattcctgaagaaagctcatctagaaccttctcacctgctcacatctggactgactgcctggtttgcctatgatctcattctactgtcattctggcatttattcatccccttggtttttctcctttgctggctctcctgtttcgtggatcccacatctttttccttagcttactccattttggtgtggcaatatcaagtagcttctgggaaataaatttgtggtggctttgatatctataaatgactactgtaaccacacactgggttaaaagtttgactaggtaaggaatttggtgggttgtaattttccctcagaattctgaaggtcatgctcactgccttagcttccagcgttgcttttgagaagtctggtattcaaattccagattccttgattttgacatgtttgttgctttggtttttgccattctggaatttctccctccatgttctgaagtttcacaatgatggtgtcttggtgtgagtgtgttttgatctactgtgctgggaattc

SEQ ID NO: 197393 - DNA, 1000 bp, Homo Sapiens
agcagaagtggaaggaagaaacagagtcaagagagagggcaggaatggtaactaaatggaatgagaagagtggatacggttgaagtttatactagttcctggggcaggtgcctagaaccattgaccataaatggaatggaggaaggaagatgagtaataaatttgattttagatgcatgatgcctgggatgtttaagggatgagtggatgaccacgatagccatcttcataccttctttggtcacatgtacctcctgaaaaaatcctggaaaactatgtacctcctgcatatatacatatatgttttaaatatatatataatatatatgtattttatatatatgtgtgtttttattttttatatatatatgtgtgtgtgtgtgtgtgtgtattttagaccaagtttcactcttgtcgcccaggctggagtgcaatgacacgatctctgcaatctccacctcccgagttcaagtgattctcccgcctcagcctcctgagtagctgggactacaggcacttgccgccatgcccggctaatttttctatttttagtagagacggggtttcaccatgttggccaggctggtctcaaactcctaacctcaggtgatccacccgccccagcctcccaaagttctgggattacttgagccaccacgcccggccataagcatacattttgattgagaatgtatctcttaatgagataggccttttgtttgtttgtttgtttaagagatgaggtctcgttatattgttcgggttagtctggaattcctggcctcaagtgatcctcccaccttaatcttctaaatagtgtggactacaggtccacacccagctaggacttttgttgttcacttagttgacatatctggatgaattgggtccatttatatttcttatttttatggatgtaagcactaagaaatattgctcacataaacatgtagatgggaatggaaggcattttttgtagctgtaacaattatttgaattc

SEQ ID NO: 197394 - DNA, 1000 bp, Homo Sapiens
aaatcagaaatgaaaaaggagacttacaatggacaccacagaaatacaaaagattattagagaccattatgaacaactatatgtcaacaattagaaaacctagaggaaagagataaattcctggacatatataacctcccaagattgaaccaggaagaaaaaaaatctgaacagagcaataacaaggaatgagattgtatcagtaataaagtctcccagtaaagaaaacctcaggattgcacgggttttctactgaattctaccaaacctttaaagaactaacatgaattcttctcagacaattccaaaagactgaagagaaaggaattctccctaactcattctgtgaggcaagcagtatcttgataccaaaaccagataaggacacaataacagcaaaaaagaaaactacaggccaatctccctgatgaacatagatgcagaatcctcagaaacaaaacacacacacagacacacaaactagcaatctgaatccaatcgcacatcaaaaagataatacaccataatcaagtgggatttatcccagggattcaaggatggttcaacatatacaaatcaataaatgtgatacatcacattaacagaaggaaggacaaaaaaatacatgatcatctcaatagatgcagaaaaagcatctgataaaattcaaaatctcttcatgataaaaaaaaaagctcatcacataatgtctagaaggaacataactcaatgaaggtcatatatgacaaacccacagccacctggggaaaagctaaacaccttctctcttagaactagaacaagacaaggatgcccactttcactattcttattcagcagagtaagaaaagtcctcaccagaacaattaggcaagtaaaagaaaaagggtatccaaattggaaaagagaatgtcatattgtcctttgcagatggcataatcttatacatagaaaaacctaaagattccaccaaaatcttttagaactggtaaaggaattc

SEQ ID NO: 197395 - DNA, 1000 bp, Homo Sapiens
aagacagcctcaaaaataaaagcattctgaaaacataccactcacggaccatgctgaaaaaaactacttaaaggaatattccatctgaccaagaaattcatcaaaatacataaatcaagaataaagaagatatgctataacagtaggaacaaggaatcatgaacccaggaaaatttacagttcagtttaaatgactcttctctatactctataatatagtaagaaaataatcgaatgtcaatgaaaaaaattctttaaagaatatacacatctttaaactactattaattttaaacaccagtttatgttgacaaaagctagaaagaaaaagcacattggccgggcgtggtggctcatgcttgtattcccagcactttgggaggccaaagcaggcagatcacctgaactgaggaggtcgagaccagcctggtcaacatggtgaaagctgtctctactaaaaatacaaaaaattagctgggcgtggtggcacatgactgtaatcccagctactggggaggctgaagcaggagaattacttgaacctgggaggtggaagttgcagtgagccaagattgctccattcgactccagcctaggcaacagagtgagactctgtctcaaaaaaaaagaaaagaaaaggcacatttaatttcttgtctttcacaggggtaaggtcaataaatactatatttataatgctagtgagaatttgaggctaaaaatattttaatgtaaccaatagtagaaatgaatgcataattatgaagtactagagggaaaaaaggacacaaagaaaaggaaatgacaaaaaaaattgtctcccaaaaacatgatgacaaaggtaacagaaagaaggccagacacatgcattattcccaaaaaaagaggacagactgaacagcctaactaaaagactaccagttgggtacaaatatcaaaaattcaatcataagctatttacagagggatgccccacagaaaattgatgaggggagaattc

SEQ ID NO: 197396 - DNA, 1000 bp, Homo Sapiens
aagctctgacacactatgtccccggagtctgtgtctaccttgccaggaggcagaattctgtcaggaaacatgcttcagctgtcatcagtggagacctcaggaaccagggaaagacaggctcaagctgccttgaaatctcgattaggcagggttggaaaaacagagtagtttaaaaaaaaatgggacagggcagtaaaaaaacttaggactagagatttttcctttccctccttcctgattctgtagcccacagtgtcccacgctgtatctgtcgacgagggggatatttatatctggctgcccacttgtgctttgctttagtgcctctgtttattgccagcaggcgctgggtgtctgcaaaagcctagaaagcccgaattatttctatggaattttctccacaggacacacataatatgactttggatgttccaaacatttatttttttatgctgctaaaaatgttaaggcctcccaaaatagtattgttattatcttcagtcatattgtattccatgtaacatatatgttacatatgttctatgtccatatatatgttctatgtgtgttttaattttgccattagattgaccactcagcaaactcagcgcatgccacttaataattaatacaaaaatcctgtggaatctttgtatgtttccatacatgttgctactgtggaaaattgatggacatattgaagtcagtgcttccaacgactgaaagaccagaaccgaaccagtttcccaagggattgcagcatggaatgctctcccaggcttgaagctgagtccctggtatggatctgatctgatagcaagacctcaccagcctccactgtctcagcagccttgacctgttttgtgcctgtggcaacaaaggtaaggtagtaatgaggggtgcaccgctgatgggaacaagaggctcacagagtcagggctcatggacactgggaagtagtgcaaagcccattgaaggctgcagtgttgcaatggaattc

SEQ ID NO: 197397 - DNA, 1000 bp, Homo Sapiens
acttttgtgagtttttgtcaaggttaatgagctgctcctcccaaaagcactccttggcttctgagcaaaaaaagccagacacaggccaggcacggtggctcacgcctgtaatcccagcactttgggaggccgaggcgggcaaatcacctgaggtcgggagtttgagaccagcttgaccaacatggagaaatcccatctctactaaaaatacaaaataagtcaggcgtggtggcacatgcgggtaatcccagctacttgggaggctgaggcaggagaatcgcatgaacctgggaggcggaggttgtgatgagccaagattgcgccattgcactccagcctgggcaacaacagtgaaactctgtctcaaaataaaaaaaagaaaaaaaaaagatctgtgcagtttactgtatgtaattatatcataaagccccatgatctttctaccactcgacataaccaccctgaggagtatgtgacctatgaaaaataccaactacaaagaacaaactacaaacgactacaaagactagtaaggactacagtaaaaaaaaaaaaaattatttttttgagacggagttttgctcttttgcccaggctggaatgaggtggtgctatctcggatcactgcaacctccacccactgggttcaagagattctcctgcctcagcctcccgagtagctgggattacaggtgcatgccaccatgcccagctaattttgtatttttagtagagatgggttttcgtcatgttggccaggctggtcttgaactcctgacctcaggtgatccacctgcctcagcctcccaaagtgctgggattgcaggcatgagccaccgcacccagcccagtaaagattttgaacaagatactctatattggtggaagcttccattctcagcatcttgttttgttattattattattattatttgagacatgctctcaccctgtcactgaggctagagtgtggtggcatgatcacggctcactgcagcct

SEQ ID NO: 197398 - DNA, 1000 bp, Homo Sapiens
gttaaagcaaaatatttaacaacattgttttacctctcaatttttttgagtttcactgccttgtcgtttacaaacaaatataaacgtaccttatgatagagttattctgtaaactccgtaatgcaagatttccaaaaaaaaaaacataatacaagagttgcaaatatacatattcgggaattcttgacacttttgtcatctagtttaaaaatcatctgagaaagaatgtaatgaattcatttaactgtgagttacattttaaatattttgtagagacacaaactctgaataattaactctgttactactcaataatttaagtggaatgacccttgacagtctgtttgtaataactaacagtgcattttaattattttttttaaattagaaatgacatctctagagttcaagattcttgggagcaaaattgaacttttaaaattggttagtatagagggttatttttcttaatgaaaataaaactgatttgcattttaaaaatctgggtacactttttaaaatgattatgtcagtaatttaacattaggcatatattagagagaattataccttttctttctatctcttcataccaatcttctggtatgttagaaactaggtagtataaaagctaaataattgtaagcctgaaaaatcgaagatttagtgattttaagaatctgaaatttctgtcaaaaaatgtaaagctaattttataaaaataaagttcagtttataagatagcaagaataagacctatcataaaatttacaagcagatttagtaattattaaatactagatttaataagcaggaaacttatcttccacgttcactggctgtttatcttatacttgaactcttccctcattttatccttttgaataatactgtactaaagtgaatctctgattaatatttaaatgtacatggggagaaatgggtaacctaatcagagaaaataattaacaaaccacctcattctcatatccctgaattc

SEQ ID NO: 197399 - DNA, 1000 bp, Homo Sapiens
gacagattaaaaaatgtaatcccagatacttgtccttggatagctgaaaggtcaataggaaagtctacagaatgactcaccttcataaacaacacattcatttagttcaaaagtcaaagtctaaagttagaaaacatctttggattcaataaattgtaattatcatataccatatactaataatataattatttaaagagtttattttcataaaatgactacagtattagaccttccatcgtctagtttagcaagtacaagttagcatatttttaggactgatatgtagtaactcagactttacagcaaccacatttggggaaactttcattttccaggctctattaagtcttaattttataatgatattagcagtgctaccctcaggaacgtcaggatgtgctgtggaaaggaattcactatcaggcatttagagtgataggagacattgatgagaaattacaccaaatgtctccataccatatttttattatttttaacgaacattctgtttaagccttctcatatgggacacattgtgtgcaagacaaacagtatttaaaaataattcaagtgcatcttaagtagaatgccccaaagcaaaatactgtatttccatttatgtcattttgcagcctggtgtagtctccattagacacaaaatctagcacttacctagatataacattagagactatgaggtcataaaagaagtaatttttaggtatggaattaaaaatcctactaaaaagaggtattctgcaagagacggtaccttttgaatatcaaggcgatgacaaagtccgggttcacttttactctccagtcacattccttcccaggaggatacggctgtgggtagttgggtgacaaaataacacctgctgggcccgtcagattccctccacaagcagctgtcacagaacaaaagttacagagaaaaagtaaggacagcgaagaacgcctgccagtcagtgtggaaggagacaccacagaattc

SEQ ID NO: 197400 - DNA, 1000 bp, Homo Sapiens
agtctcacaaagtttttgatttccaagtgcatataaaagttgtttacattatactatagtccattaagtgtgcaatagcactatgtcttaaaaaaatctacctactttaatgaaaaaatactttattgctaaaaaatgctacagaacatctggtggcagagttttgcctccattttgagggatgctgattgattagggtggtgtttgctggaggtgactggcaatttcttaacataagacaatgaagtttgtcacatttattaactcttcctttcacaaaaaatttctctgtagcatgcaatgctctttgatagcatttgacccacaaaaaaacttctttcaaaattggagtcaattttctcaagctctgctactgctttattgactaagtttacgtaatattctaaaccctttgtttgtcatttcaacaatgtccatagcatcttcaccaggtagatttcatttcaagaaaccactttctttgctcattcttaagaagcaactcttcatctattcaagttaaatcatgaggttgcagcaatttaataacatcttcaggcttccctcctaattctcttcctatttttccacatctgcagctacttcttccactaacatgtttcttgttttttctaacattggaagttttgagttttgactaagtttcttttagcacgcctctatattaaaaattttctaatgctttttatcattattaaactggggttatagttgggaaacgaagatcacagagtaaagtgccatttttatcacatatcaagggtacaaacaatatcacttatgactattgatattgaccatggtcctgactgaagtaatttttgtcagatgtctccactgtaaaattatgctgccccccacacacttttcatactgcagtcattggcaggaagtcactatgttagctcacacttaaggagtgggatgttatgctccccctttcttagggtgaaacatctacataatttatttggaattc

SEQ ID NO: 197401 - DNA, 1000 bp, Homo Sapiens
tcaaggttcatccatgttataacatgtgacaagattttcttcttttttaaggctgaataatattgcattgaatgtatatagcacattttatttatctgccagtggacatttgggtttgctttctcctcttggcaattgtaaatagtgctgatgtcaacatgagtgtgcaaacatctcctcaaaatcctgcttttaattcttttggatatatatccagaagtaggattcctggatcttgtggtagttctattttcaattgtttgaagaacctccatactgctttccatggtagttgcaccattttatggtctcacctcagctttttaaaacctgtttaattttgaatcctaaccaacctctggtaacagataccaaattacagctagataggaggactgagctctcttattctgcagccctgtagagtgaatgtggttaactgtatttattgtatattttcaaaaagctttctgaaagagaggattttgaatgtttacagcacaaagaaatgataaatgtttgagatgctggatatactaattatcctgatttgatcattgcacattgtatgcatatattgaaatatcactcagaatcccataaacatgtacaattgtcaactaaacataaaaagaaaaaaaattaaagaataatgcttgttaaagattttttgtagataccaagttttttaaaaagtttccttctattgctgttttgataaaaattttaaaatatctattgaattttattattttttgacatcccttggtcatggggtttctgtcttaaatctgttatatggtgagctgctttactggagtggactcaacgtggttattgtatattgtcttttttgtattttttattgatatagttgtacatatttttaggatacacatggtattttgatatctgtatacaaagtgtgatgaccaaatcaaggaatttgggatattcatcacctcaaacatttatctttttgttgagaacattagaattc

SEQ ID NO: 197402 - DNA, 1000 bp, Homo Sapiens
aaaatattgtttggctgtaaacaaatcctagtggggagtatttgtgagtgtctgtgtggatgaatgtgtatattcgtgtgtgtatctgtggacgtgtacatctgtatgttcatgaatttgtggggggtgtttctgagtgtgtgtgtatgtagaaaggaagatatggaaaaatgaatagaaaaggggtatgagagagggcaccttgtgaatgttaataaacaaacaaaaaagtaggaattcaattctaatacattgtgaggcaaaaagagcacacattgaagtaattcctttgaatgtgctgaaagccaaattctttattaaaataatgatcttttttcatctggagtttgggataacacatgatcatgtgtatgcatttcaccaatgaggtgagtcaacgtttgcctgtttctctgagcacctgcatttcttaatttctccttatgagtttcagttttcatcatctaggtgactatagttctgttctgtatcgtagcttctcggtgagacatgttcatgaaatatttagcagacagtttcttttgaaactttatccattctgattttcaatgttatgctttggagttgatacctactttggcgattgggttcctctttgagttgtcttcaccttcacgacaggctgctgcgaacttgatccattcacgtttctgccttcggattgaatgccatttgatggtgccatttttagtgttataatctcttaccttaaatgacagcaataaagaaatggtatatattaatttgaattcgtaattcaaattccactgagatttttggaagaggttataatctcagaaatagaggatgtttaattgggaaaattggtaattttggtaatctattaattttagcattatatgaacttgacttatgagaatacattttcttcagaaaacatattgttattctcaaattattttcttgtttaaaaatttggaaaaatggatttgttatatattacctggattcggaattc

SEQ ID NO: 197403 - DNA, 1000 bp, Homo Sapiens
aaaagcagtggcccttctaatcccagcactttgggaggccaaggcaggcagatcacctgaggttgggagttcaagaccagcctggtcaacatggcgaaaacccatctctcctaaaaatacaaaaattagctgggtatggtagcacaggcctgtaatcccagctactcaggaagctgaggcagaagaatcacttgaacctgggaggtggaggttgcaatgagccgagatcatgccactgcactccagcctgggcgacagagcaagactgtctcaaaaaaaaaaaaaaaaaaaaaaaaaaaaaggcagtggcctgggggtcagacaaatcccaacaatgcctcttactctatcgacatgaccttggatgagccttttaacttcctatgtgtaacctggaaatggcagaattgtagcagtgactttgtgcaactgtagcaaggccttattgagatgtgagaaagtgcttgacacagtgcctgacatcaatcaaatattaaatgatgggaagagtaataatgcttctgttagctgagggcttattgggtgccagacactgttctcagcacttgacacaaatgaattacatatggacatttaacctgattgttgtcctatgaagttgttattttgcccattttacagttgagaaaactgaggcctgggggcttatcccagagtcacccaggtagaaaggatttgcatccgggcagtctaggtcctaagcccatgcacatgccaattatttctgctgcttggtgagtgcttcagtgaaggaggaagtgagaggcagcagggagggggtttggcctcactgactttttcctccaggtgggatttcacacgtcgtgtgactcagatcttaagtatatagtatgaaaactctccatggaatttttttgcagctcacttattttagatttacaagatgaccagcaccagtctcctcctctccttctcctgtcagtggtaacaaacttaatgggcatttgacaaagaattc

SEQ ID NO: 197404 - DNA, 1000 bp, Homo Sapiens
ctgctggaaacgtcatttagaccgctaccatgctaatctttctagcgtaactgtgactttaccatcttcagctcaaaagttttcattgtactcacagtttattaaattgacaagagctattccttattctgggggttaaggttttcagactctacaaagtaagtgcctaactaaatacctggtaaataaatgaactaaatgaattaaatatactctaccttatctcttcttttccttctccctcagagaggaagataacactatgtgttagtcagatttcaggtcacccatagagcaagacaatttctttctaaagtttagggcagcggttcttacatctcagcaagcatcagaatcatggggaaggcttggcaagctgatgctgtgcttcacctccgaagtctcctttcagcaggtctggtcagagccagagagtgcatttctgacagttctcaggtgaccctttgataagcatggttctggggtcgtgctggctcaggtaggatgcagtcagcactcagtccagggcctggcagtaacctgggggaaagaggaaagtgaggaggggaaggacccacactcccaaatccccggatcccatggtcatcccagcatgcaggctccccacaacaactctagcattgtctcactctttagtaactgtaccactttggtgccctgaagttctcttatacatgctcacccatctccccttcactttggaaaattatacccattcttcaaaacctagctcaggcattcataaaacctttgcctactcttccaaatgaaggaagtaatttttccttcgttagcactttgtattttttatgtatattgtcttgtatgttaattaattccatacttgtatcttcttcctaagtcttgcatttcatgagatcaaattctgttatttactcagtgactgtattgcagtgtccatagagcaaagcattttgcccttagcagctactcaataattatcagtacagttgaattc

SEQ ID NO: 197405 - DNA, 1000 bp, Homo Sapiens
ttctcaaactttttggtttcaggatctctttacacttttaaaaataattgaggatttcattgagctttaggtaggatatatctatcaaattgttactgaaactctaggggtttggtataggtcccattgcttgcccctcagaaagctgatcactgagactacgagtattgccagggaacaaggctttaatcgggtgctgaagctgaggacatgggagatcagtcccaaattcatctcccgggactgactaaaattgggggtttctatagcagggaagaaacgtaaccatgtgtgggaaaacaggaattagggagggctaaggaaaaggaattggttagtaggaagcagatggttggacaggtaatcatgacaggtgagtgcacaaattttaagactgggggggtcgatttctatgtttattcaaagaaaccataaacatcagttctatgggacaagtggactactttcaaaatactttcaaaatgttactatatttgaatttaaaacagaaaatttaaacattaattcatttaaaataacaataatcagcctatagcatattaacacaaacagctttttttttttttttttttttggagacagagtctggctctgtcgctcgggctggaatgcagtggtgcaatctcgggtaactctacctcctcctcccgggttcaagcgattcttcttcctcagcctcctgagtagctgggattacaggcatgcaccaccacgcccagctaatttttgtatttttagtagagatggggttttgccatgttggtcaggctggtcttgaactcctgacctaaagtgatctgcccgcctgggcctcccaaagtgttaggattacaggcatgagccaccgtgcctggcctaaagagcatttttattaaaaatattttctaaaaccaaaataattagtgacaatagtagcattgttttacacttttgcatatctttttaatctctagcttagtaatagaagacagatgaattc

SEQ ID NO: 197406 - DNA, 1000 bp, Homo Sapiens
aataacaccacatatctacaaccacctgatcttcaacaaacctgacaaaaataagcaatggggaaaggattctctatttaataaatggtgctggaaaaactggctagccatatgcagaagacagagactggacctcttcctataccttatacaaaaagtaactcaatacggattagagacttaaatgtaaaacccaaaaaccacaataaccctagaagaaaacctgggcaataccattcaggacctaggcatcggcaaagacttcatgactaaaacaccaaaagcaatggcaacaaaagccaaacttgacaaatgggatctaatcaaacgaaagcgctttggcacagcaaaagaaaccatcatcagactgaacaggcaaccaacagaatgggagaaaatttctgcaatctatccatctgacaaaggtctactatccagaatctacaagggacttaaacaaatttacaagaaaaaacaaacaattccatcaaaaagtgggcaaaggatatgaacagacacttctcaaaagaagacatttatgcagccaacaaacatgaaaaaaagctcaacatcactgctcattagagaaatgcaaatcaaaaccacaatgagataccatctcatgccagttagaatggtgatcattaaaaagtcaagaaataacagatgctggagaggctgcggagaaataggaatgcttttacactgttggtgggaatgtaaattaattcaaccattgtggaagacagtgtggcagttcctcaaggatctagagccagaaataccatttaacccagcaatcccattactggttgtaaacccaaaggattataaatctttctgctataaagacacatgcacatgtatgttaactgcagcaccatttacaatagcaaagactaggaaccaacccaaatgcccatcaacgatacattggataaagaaaatgtggcacatatacgccatggaatactatgcaaccataaaaaataatgaattc

SEQ ID NO: 197407 - DNA, 1000 bp, Homo Sapiens
tcagatcatccacctaggtgatgagatgtatcccgggcatgtgggcacttcaaccagaggcctatccttgaggccagtaagttactgcacgtacattacaccagtatgatgctgtcattattaatcaccttcatctatgtcatttaaattgtatcaggatggtgttgtaggtcatgttggctgattttattttccaaagacaatgatgttggtatgagccatcccacaagctctctgtatcgtgtgatgctaaccttctctcaagaggtgggatctatgttccctcctgttatgagctgaattgtattcccccaaaattcatatgttgaagccctaacccccagtatctcagaatgtgactgcctttggagacagggtctctaaagagataagtaaggctaaatatggtccttaaggtaggccctaacccaatatgacagtgtccttattacaagaggagattagaacacagacagacacagagggatgaccacatgaagacacagggagaagacagcatccacaagccaaggagacaggcttcaggagaaaccaaccctgttgacacctttatctcagacttctactctcaaaactgtaagaaaattaatttctgttgtttaagccatccagtctatagtactttgtcatggcagccctagtacactgctgtacctctccctcgagcctgggcagaactttataagtatcttaactaacagaatgcagtggggatgatactgtataacttccaaagctaaatggggagttgtggaaaagccatagagtttacacctggttttctgtctctcatggatgcttgctggaaccccagctagctgacatcgagtgacagcacggggaagaactgaggcccccaagccaacagccagctccaatcaccagacacataacatgagtaaggctagagggtatgcaagcccccagcctcagtgtctttcagttgaattcccgtctgaattcccaacccactgaattc

SEQ ID NO: 197408 - DNA, 1000 bp, Homo Sapiens
ttttttctccagttaatttatttttcttgagatattttattatgtctgaggagtgaaagactatatcatatctcctttatattgttcaaggaagaatcattgtcacctctccccacctaaaaacgggcaaaaagacacctagttatatgtagtttgcctgagctttacttacatactccagattgaagccactgagctgtaatttcatattctttacagtcttttgcctttttgcttcccttttttttgagacagagtctcactttgtcacccaagctgaagtgaagtggggcaatttcagctcactgcaaccttcgcctcccgggttcaagcgattcttgcacctcagccttccaagtagctgagattacaggtgcatgccaccatgtctggctaattttttgtatttttagtagagacggggtttcatcatgttagccaggatggtcttgaactcctgacctcaagcaatctgcccgcctcagcctcccaaaatgctgggattacaggcgtgagccacggtgcccagccctttgctttcctttcttgcattgggtgtcatcccatcactaatttcagaactctaaaacccacctgcttgccacaaaatctgatgcttctttttgggaccatccaataaaacgtaatgggagatttcccaaattaccatgatattcaagctatctggatatatttaagtgaatataatcaaggaaaaaggaaagacagagattcagggaaaaaatagcaacttgcatctccataaccttcttaataaagagttaaaagcattgttttccaggatggcaagacaactacccccattaaaacagagcaatgcaatgatgtctggcatgtagtacatgctcagaaaaagttaatgctatcattgataatagtgtagcttacactgaccaaactcccaagtgatcctagaactaccagtctctgttgataggaaagagcgtgttggattgggaactagcaccaacatgaattc

SEQ ID NO: 197409 - DNA, 1000 bp, Homo Sapiens
cttaaaaatcataattcaggccaggggcagtggctcacgcctgtaatcccagcactttgggaggccgaagtgggcagatcacgaggtcaggagattaagactatcctggcaaacatggtgaaaccctgtctctatgaaaaatacaaaaattagctgggcatggtggtgcgcacctgtagtcccagctactctggaggctgaggcagcagaattgcttgaacctgggaggcagaggttccagtgagccgagattgcaccactgcattccagcctgggcaacaagagcaaaactccatctcaaaaaaacaaaaacataattcattaatgatatggaccatgaaccataatgggtcatgaaggtattcactttcatacatggtaagattaactttgagctttttgtatgaaaacatctactttatgaagttaaacaaatctggctaaaagcactgaattaaattttcacatttatgaaaattatcatagttaatcattaaaaaaaccctcactcaatccatgaaaacacccagaaaacaatactgaaaacttaggctcccaaggtcatcatatcacaaataaagctattattacctgtgcctcaattaagggcagtgccaaaaataaagaaaactgattactcattatggtcataaaacccatgccagtctgaagtgacacttggaccccagttactccacagagagctacaatgcacaagttaatggcaacaggattatatctgattcccttttcccccagtataagagcatctagggtctcactaaggtaacaggtaattgtgttcggctgtctctttctttggtcaccaacgcaaagacgatattcagcagaatttacaaagggctagtttatgaataggctcccacagaggttttcaaattgcttggtgcagctccttgaagggatagggatccaggagtgctaactgcgggggagcagtggagagtccatataaatatatatttatgtatatgaattc

SEQ ID NO: 197410 - DNA, 1000 bp, Homo Sapiens
atatatacaatataatacattgtgtctggcagggtcacaaagattcagaccgtatcagtacttatctttatcatatgagatacagataaatactgctatgatctgaatgtttgtgtccctcccaaatacatatgctgaaaccctgccccctaaggtgatggtattaggattgtgtggcctctgattagtgcttttctataaaagtttcagagtattctttagtctcttccaccatgtgagggcacagtgaaaggaaggacttctatggagcagaatgtgggcccttaccaacactgagtcttccattgccttgacctttaacttcccggccttcacaacagtgagaaataaatttctgtagtttataagccaatcagtctatggtgttttttttacagcaacccgaatggacaaagacaggtacctacagtgaactcagtattcagattcacaacagtgattaagaaaacattatcactcagagagtttgtaatgtgatagaaaagaagaatgtcaaacattttttaaagtaaaaagattatgaaataatgaaaacattcaggaaaatatgttgattcctagcaagaatatataatagtttttgtgagagaaggatcattggattctttcctgaaaaagttgcttttgagaagacacttgaaagataatagccattatccagcaaatatgtttgcaaggagaacaggatactcaaggaatagaaaacagcatatgcaaagttatagactatgatcaaaaacaattaaaaaaattaaaagacagtaaatatatccaaggtgggcagaacaaagaggatgtggggaagaggggctaagatgagactttacatacaggaagggccctaatgagccatgtgaaggaatcaaagaaagtggaatatttagaactaatgaaaagtccagtgaagggagaatattctggcttttcatatttcttacttgggcctgtaagactgtgtgagctgcttcttgctgaattc

SEQ ID NO: 197411 - DNA, 1000 bp, Homo Sapiens
ccgagggttaggtctgattccccagccaccccttggccagctgctagcctgccgccaggcaactctttcccatctccatcccttccttggctggggtcaggagaggaagaggagcccaggggtctctgaggcttgggtctgtccttttggagctccagggctccaggcgggattcaggaagccgaaggtcaaggaaaagcccctcgatagcctaaagggagagggcggggagggggaggaggtaaaggaggccaaaatgggaaggagataaagcctggagagggctcatctggaagcagggagtaggtgcgccccagcccgagcctcgtgttcctaccccaggtggtctcgagggggctatcgcgtggctcagggctgcatccacggcgcaccttgcgcccagctgtggggaaccaaagagtgattatatatatcaaagagtgattatatatatatatatatatgtgtgtgtgtgtgtgtgtgtgtgtgtgtgtgtgtgtgtgtgtgtgtattttttttttttccttcagtaaagcaacagagaggttactgggtcgggggattgcgatgtctttccccgctgtcctgactccaaaagtggcggcccatgctgtccttagcgctctccagggaaacgactcgggtctgcaggtgctggcccaagcgggctgtgccgctgggaggcgagggggccgaggcagccctcgggaccccaccactccacgaggccatgtccctggccaatgacacgctcccgcgccgggtggctaggtggggggtggggggtggggaagacttcgtgaaccgctgctgccgctctcctgtgtgcccatggccccctccccttctgctccccactctctgcccaatctgcctgaagctgtcagcctgccatctctggctgaatcccgttttcctcccccaaccccgagtccctcaaactctccacccgccagggctgcttgcgctcttggggagcggggctagaaggacccaagaa

SEQ ID NO: 197412 - DNA, 1000 bp, Homo Sapiens
atacatatgtaactaacctgtacaatgtgcacatgagtataataataaaagaaaaaaaaaaaataaaaaaagagagagaggtttcacagcaaaggccccaccctcaagcctggaaacctgcagccctaaatgagaacaggcattcctgtttttgcggccaaatgttgccttttccaagaccactctggcctgccatgcccctatcttgtgcccatataaaccccaagctccactggcagagcagcagagtggtgcagcagagaaatagagaagaggagaagcatctgaacatgaagaagagttcaagctgggagcagtggcacatgcctgtaattccagtactttgggaggccaaggtgggtggatcacttgaggtcaggagttcgagaccagcctaactaacatggtgaaaccatgtctctactaaaaatacaaaaattagccaggtgtggcggcaggcacctgtaatctcagctacttgggaggctgaggcaggagaatcacttgaatctgggaggtggaagttgcagtgagctgagatcacaccattgcactccaacctgagcgacaagagcaaaaactctatctcaaaaatataaaaaaaaaaaaaaaaaaaaaaaaaaaggagctcagctggggacagtcagagaggagatcatccacaagatggccagactccaagagaagataatcttcccacaccatcccctttccagctccccatccatcccactgagagccacctccatcactcagtaaaatccctgcattcaccatccttcaagtcggtgtgacctgattcttcctggatgctggacaaggacccaggcatcaagagagcagtgtgtaaaaggttgtcatactgccgtggggctggagccaaaaagcgcccaccctggctaacctgtgcggtgtcctctcataaagtgtttgcgcacatagcagccaagtaaatgagccacccgcttcatggggggtcccacaaagggacaagggaatt

SEQ ID NO: 197413 - DNA, 1000 bp, Homo Sapiens
agaatacccattgggtacagtgtacactgctggggtgatgggtacaccaaaatctcggaaatcaccatgtaacaaaacaccatctgttccccaaaatcctattgaaattaaaaattaataaaataaaaatactaaagcctgagtcccactgctcaaagactctagtgtaattcatctgaatgcagcctgggcattagcctcccaaggtgactttaatatgctacaaaggttgaaaactattgttctaaagacaaccttggcactacttacattttggttagataaatgttgctgttgggggctgtcctgtgcattatagaatgcttacttagcagcatccttgggttctacccactagacaccaccagccctccctcccattcccctttctaagctgtgacaactaaaaatgcctcccaacattgccaaatgtcccatgggggtggaggtagatatcgcctctggtagagaaccactgcttgtaaaggaaagagttcatagtaaatcaattttattatttttggtggttagaaaataattcctgtcaaataaaagcagtgcaaaacaggacctcatttgacactctactaagtaagacctgttgcaggaagtcagggaccctgaacagagggaccagctgaagccacggcagaagaacataaattgtgaagatttcatggacatttatcaattccccaatcaatactcttgtgatttcctatacctgtctttactttaatctcttaatcccatcatcttcataaactgaggaggatgtatgtcgcctcaggaccctgtggtgattgtgttaactgcacaaattgtttgtagagcatgtgtgtttgaacaatatcaaatctgggcaccttaagaacagggtaacagcgattttcagggaacaagggagataaccttaaagtctggctgcctgtgggctgggcaggacagagccatatttctcttattaccaaaaatgggtaagagaagtatcgctgaattc

SEQ ID NO: 197414 - DNA, 1000 bp, Homo Sapiens
agtaagactagaaaaaaaaattcattagttctttaagtgagaggagagcaagtgtagaaagttaagaggggaaagaagccgacaggacaactctctcagtggacattcagacagatcaactttgggaaattgttcatgtggaagttctggatctggaaattgattcccccaaagctatccatgcccacacatccatggaaagtctttgtaaactcttttgagataagcatactgcagtgtaaagaccattcctgtagctcattcttccatgacctttagatgtatccttcaaacttgtacctcatcattgcaccatgtacatcaatcacaaaaaatgttttgggcatttttccaagtattggagacacagcaaagaataaaagaaacaaaagtgctgccctccacactagtggagaagacagataataaagagttggaatttgattccattttacactgagcaaactaagaatgtgacagagagaaatagaaagctcaggctgttgctgctcctggaacacatgatcttgtagcccaccagggcaatgtactatggcctttgtcgtaagtttccccaggaccgagcagagtgacaggcacataataggctctcaaaacatatttgtctaattagtttagtgtcatttataaaatcataactttttaggcccagaagggaacttagtaatcacttgatcccatttctcttttacttagagaaaaaaaaaatgaagcctggaaagatgaagtggcttgccaaggtcaccaatctagtcagcattagatcctgtttgtagcaagtaaacaatctctagataccttgaatccagacaaattctgcacccatgatactttatcatagtcccagttgatagctgccactgagaaaatgtccctggcccatgcccatgtaacctcccaacaaagctttagtgtctatataaaaagtgaaataagaaaatacttctttttttccactattcatgaattccttggaatt

SEQ ID NO: 197415 - DNA, 1000 bp, Homo Sapiens
tttgtcaactaaaatctctaaggctccttttgctttttaagtaatagcagctgctaagccatgtctcacctactttagtcatgctaatagctctgttccaagcccaattttaaaagtagcaaagagctgaatcaaaggtacgaaatagaaatctttgaaagaaacaaggacattcaaagcctggggataacatgagctgatgccatacatgacaagatataactgacaggagatacatgttttatagggtacttgggtggagtcaggctttataggccaatacagatcagaaagcaggaagagtcactactgaataaagctagaactttaaaaagcctgctccctagaagaagggagccatgaaacttttgctaattggagcaaaagtcaacactaaagtttgccacctagccaggcctcagtgggaaaaaaaattcttgtgtgaaattgaaaccaagactgcactgacttaaataattcataattttaaaatggagacaatgtagcaataaagattataaatactaagtgattataatataaaagaagtttatttttaaaactaacaaataaaatttcttgaaataaaaactgtagtcaatacaattaaaaaatctatgcaaaaattcaactacagattagacacagctgaaagtaaaattaataaactggaagttgtatctgcgaaagtcatataaaatgtagcaaatcaaaataaaggcatattaaatattcaatgagtaatattcctatatatttttatatattctataaaagatacaatgtatgatggttaatttatggtgtctatttggctaggctacagtatttagttgcttggttaaacaccagtccagatattgctgtgaaggtattttttgggggggatctgattaacatttaaatcagtagactttgaataaaatagatcacccttggacctcattcaatcagttgaggccttaacagaaaagactgaggtcctccaaagaaggaattc

SEQ ID NO: 197416 - DNA, 1000 bp, Homo Sapiens
gaaacaacaagtgctggagaggatgtggagaaataggaacacttttacactgttggtgggagtgtaaattagttcaaccattgtggaagcagtgtggcaattcctcaaggatctagaaccagaaatgccatttgacccagcaatcctattactgggaatatacccaaaggattataaattattctagtataaagacacatgcacacacatgcatatatctattgcagtactattcacaatagcaaagacttggaaccaacccaaatgcccatcaatgatagagtggataaagaaaatgtggcaaatagacaccatggaatattatgcagccataaaaaaggtgagttcatgtcctttgccaggacatggatgaagctggaaaccatcattctcagcaaactaacacaggaacagtaaaccaaacactacatgttctccctcacaagtgggagttcaaaaatgagaacacatggacacagggaggggaacagcacacagtgaggcctgtcagggggttggggggctaggggagggatagcattaggagaactacctaatgtagttgacaggttgatgggtgcagcaaaccaccatggcacatgtatatctatgcaccacacctgcacattctgcacatgcattcccgaagttaaagtgtaataataataataataaaaggaatgggaaaaaaagatactgtcttttttagacaaacaaatgctgagggaatttgccacttccatgccagcactacaagaactgctaaaaggagttctaaatcttgacataaaacctaaaatacatcaaaatagaacctccttaaagcataactctctcaggggctagaaaacaataacacaatgaaggaaaccccaaggaattcagacaacaactagcactttgaatagaatagtacctcacatctcaataataacatggaatataaatggcataaatgctgcatttaaaagatacagaatggtagaatggataagaattc

SEQ ID NO: 197417 - DNA, 1000 bp, Homo Sapiens
agcacatccttggttaccgagaggagcaatggtgattttgctcatggaaccctctgaccatgctggaaggagggcatgagtcaggaggaccttgagatggcagctgggaagcagtggcagaagaacaggaatagagattgggtcgttacaccaacttagccaaaaccttttccaacggtgatatagtttaggtgtgtgtctcctccaaatctcattgaaatgtgacctccaatgttggaggtaagcctagtgagaggtgttttggtcatgggggaaaatcccttatatgaatgccttggtgctatccttgcaataatgagtgacttctctctctaccagttcacttgagatccggttgtttaaaagaatgtggcgcctctccactctgtctcttgctcctgctctagccatgaatattgctgctcctgcttgactttgtgccatgagtaaaaacgacctgaggtctcaccagaagccaagaagatgccagtgccatgcttcatgtacagcttgcagaactgtgagccaattaaacctcttttcttcataaattacccaatctcagggttttttttttttttttttttattaaaaagctagaatggactagcacagaaaattggtactgtggagtgaggcattgctataaggatatccagaaatgtggaagtggctttggaactgagtaacaggtagaatttggaagaatctggagggctcagaagaagacaacaagatgagggaaagtttagagcttcctagagacttgttaagtggttgtgaccaaaatgctgatagaaatatagacactgaatgccaggtttatgaggtctcagatcaaaatgagtaatttatttgggaacttgagtaaagatcacctatgttatgtcttaggaaagagcttggctgaattctgtccgtgttcatgtccttaagttcagacataataatgacgactcagggtatctggcagaataaatttttaagtagtaaagaattc

SEQ ID NO: 197418 - DNA, 1000 bp, Homo Sapiens
gtttaaccagagaatttagtctattcataattaatataatttccatgtaagtttgataactagtatcatactttgtgctttttatatgtcttgcctattctatatttctttttctcttcttttttcctttatttgggtttactgaacattttcaaattcattctctcctcatccacaatatagaatgtatttactctattattatcactttagttatctgataaattatgatacacaaatccccttaccaaaatgtaaaattaatcaatcatgtccttctcctcctaaactagagaagactctcagaatactgctatataactcactttcctggctgacatgtaactgttgtcatataatttaattcttattttacgctgggctacacaacaatttaaatactatttattctatatagttaatatttacttaaattttcccatatagtttctaaattttttaaatttttctttaatctaaaatctaccatttgagatttctttcattcttcctgagataccttgttttatgtttcttttagtgtgatctgctggtggaaaactttctgattttttcgttttttaatatgaaaatagttgtattttgctttatttcttgaaacatatatttaatgggtttagattctgcatttagagttagttttttgaaggtgtcactccactggcatagcccttctatttttgctgttgtaaaatcattcaaattttattatttgccagtaatctgtaaaatctccatccctccctctctcatccctaactttaattttttttttggttttgagtttatgtttatgcaatgttagtataatacagctggatgtggattatgaattttttatttagttacttaaattactgtggacttgatggctttatggaataatatcttttatgagttagtaaaattataagccactgtcttttcaaataataatttttggtctgattttctctctctctttcttcttccagaattc

SEQ ID NO: 197419 - DNA, 1000 bp, Homo Sapiens
tccacacttatgacctcactttacattaattacctttataaaggccctatcaccaaacagtcacattctgaagtactgagagttaagatgccaacgtatgaatttggaggtggggggcacaattcagtacataaaaggcattttgaagtgatagtggatgttatgtgtgtgtgtgtgtgtgtgtgtgtgtgtgtgtgtgtgtgtgtggatgcggtagagtgacagttaagattgagtgccaactagattggatggaagggtgcaaagtattatttctgggtgtgtctgtgagggtgttgccaaaggagattaacatttgagtcagtggactgggagaggcacacccaccctcaatctgggtgggcagcatctaatcagctgccagcacagctagaataaagcaggcagaagaaggtggaaggagccgacgtgctgagtcttccaggcttcatctttctcctgtgctggatgcttcctgccctcgaacatcagactccaaattcttcagcttttggactcttggatttacaccagtggtttgctagagcctctcggggcgttggccacagaccgaaggctgcactatcggcttccctacttttgaggttttgggactcagaatggcttccttgctcctcagcttgcagacagactattgtgggacgtcaacttgtgatggtgtgagtcaatgctccttaataaactccccttcatatatacacatctatcctattctggccctctagagaaccctgatacaggtggtggtgctgggaaggtgaaaattcctctttaaatcaaatttattttttttaaaaaagacactgagaatagattcaaaagttgcctgggcatgtgtaaagatcttgaaccacggcccatcatgatgggaagattgtgccagaggaaggaagtcttaggacccactgaaactctagtgctgcgggtttccaggagatgccttgtaaagacgtaaagaatcacctactcatttgaattc

SEQ ID NO: 197420 - DNA, 1000 bp, Homo Sapiens
gagatgccagtggcgggggagctaccaacaaggcgggaagggccaggtgccgtgtctcacgcctgtaatgccagcactttgggaggctgaggcaggcagatcgcctgaggtcaggagttcgagaccaacctgaccaacatggtgaaacctcatctctactaaaaatacaaaaattagccgggcatggtggcacaaacctgtaatctcagctactcaggaggctgaggcaggagaatcgcttgaacccaggaggcagagattgcagtaagccgagaatatgccactgcactccagcctgggtgacagagcaagactctgtctcaaaataaataaataataaataaaaccagaagtgggggaaggagctgcagggaggaagataagtggtgtcagaacaaatgccaccatttagaaacactggcccggcctgccctactctttttcttcccagaaatgaggaggaaaaacacaacagggaacaatggttaacaaacaacggttgaagatgcaaaacagtttgcatagtgtgctaacttttgacccccaagtgggagaattcagaaaacactcatggaaatgcatgtgtgtgaattaagattccctcgaggacattcagaaaataagccagcagccccctgtaagtggggaggggcaatattgggcagaggtggactccacgggacaccttgttagttagtttcatttctgagccatgggaatctattgtttattcaaaaaataattcaaaggccaggcatagtggctcacacctgtaatccccgcactttgggaggctgaggcgggcggatcatgaggtcaggagatcgaggccattctcgctaacatggtgaaaccctgtctctactaaaaatacaaaaaattagccagcgtggtggtgggcgcctgtagtcccagctactctggaggctgaggcaggagaatcacttgatcccaggaggcagaggttgcagtgagccgagattgtgccactgcactccag

SEQ ID NO: 197421 - DNA, 1000 bp, Homo Sapiens
tgaattttaaagcctgctttggtgctttctctgatgcagaatgtctttttatttgtatcttcttctgagatggagtttcgctgttgcatcccaagctagagtgcaatggcacgatctcggcttactgcaatctctacctcccaggttcaagcgattttcctgcctcagcctcccgagtaactgggattacaggtgcccgcctgccatcacacccggctaatttttttatttttggtagaaacagggttttgccatgttggccaggctggtctcgaactcctgatctcagttgatccacccaccttggcctcccaaagtgctgggattacgggcatgaactaccgtgcccagccagaatgccttattattttttttatgagtatcattgaataaatactttttttaagttattattttctttttagagatagggtcttgctacgttagccaggctggtctcaaacttctggcctcaagcagtcctcccaccttggccccccaacgtgctggaattataggcatgaataaataaacttcagtgctcataaagttaggtgttaagtgctttatcttctgagatagtatttatcttcattttaccttttctttttttttttgagacagagtcttgttctgtcacccaggctggagtgcagtggcgtgatcttggttcactgaaacctttgcctcctgggttcaaacgattcttatgcctcagcctcccaagtagctgggattacaggagagtgtcaccacgtctgtctaatttttgtgttcttaatagaggtgaggtttctcaccgtgttggccaggctggtttcaaactcctgacttcgagtgatccgcctgcctcagcctcccaaagtgcctggccatttatcttcattttaaagatgagaagactgagactcagaaaagtcaagtaacttatagagcataggaacataagtcatagagcagataaatggagccagagcccaaatttctgtactcaaagctt

SEQ ID NO: 197422 - DNA, 1000 bp, Homo Sapiens
ccagctactcaggaggctgaggcagaagaatcgcttgaacctgggaggcggaggttgcagtgagccgagattgcaccactgcactccagcctgggcaacagagcaagactccatctcaaaaaataagataaaataaaataaaataaaaaacagtacgcctaatgttagtgagaatgtggcatattaggaactctcatacactgctgttgggtatgtaaatcagtaaacagtttggcagaaggcagcaaagttaaatatatacatatgtaacaaatccactcctggagaaattcatgcatgtttacaccaggatacatatataagaaacctcgtagcaacactgtttgcaataactaaacaaagggaacatcaatagtggtggtaagtggtggtaaaatgcaccccctttccttttttttttctttgagatggagtctcactgtgtcactcagactggagtgcagtggtgcgaaatcagctcactgcaacctctgcctccacggttctagtgattctcctgcctcagccccccgagtacgtgggattacaggcatgtgccaccacggctggctaatttttgtatttttagtggagacgggtttccccatgttcgccaggctggtctcgaactcctgacctcgggatccacccatctcagcctcccaaagtgctgggattcaagcgtgagccaccctgcctggccgcgtaatgttttatttcttgaactggatgttcactttggatttttccgtaaacagtacattttcatttagttaacttctaagtatatttcacaataaaaaagtttttaaaatttcctggcattcctctcttgttcctctaaggcttccttgaaagtttccagttaccactctcacctggaaatcactacaaattagtttcgtaattgagatttcacaagatgctagatcaaaatgctttaccgatagcccaattttgaatatctaacacttctcttcttctctcattcctggaattc

SEQ ID NO: 197423 - DNA, 1000 bp, Homo Sapiens
aacgattaatatgaatatgttaaagttcacaggaaaagatagctatgatggttgaagagagggttattttagtaaagaaatgtaaactctaaaaaagaaccaaatggaaattctacaactaaatatatatatatatatgaactaaatatatatatatatatatatatatatatatatatatataaaattcattggatgagcttaatagcaaattggacaccacagaaaaagcatcaatgaacttaaagacaagccaatcaaaagtatccaaactgataaaaagagagaaaaaaattaatgaccacagtacagtgacctgtgggataacagcagctgtcctaagatttgtgtaattgcagtctcagaaagagaacaaatagcaccaattgtttttctacaggaagaaataatagtgaaaaatttaaaatgtaacaaaaaggatcaacctacagatttaaactaattttttttttttttttgagacagagtctcactctgtcagccaggctggagtgcagtggcgcaatctcagttcaatgcaacctccacctcccatgttcaagcgattctcctgtctgagcctcccaagtagctgggactacaggtgtgcgccaccatgtccagctaatttttgtatctctagtagagacggggtttcaccacgttggcaaggctggtctcgaactcctgacctcaagtgatctgcccaccttggcctcccaaagtgctgggattacagacatgagccaccgcacctggcagacctacagattttaaaaggtcgtcaaaccccaagtggggtaaatacaaagaaaaacacatctagacacatcacagtcaagttgttgaaccaaagataaaatgaaaatcttaaaagcagccagagaaaaaaggaacattacaatgataaaaatgatgcctaacttctctttaaaaacaatgcaaaccagaagacaataaaatgacatacatgaaaagaaaaccagaaaatatagaattc

SEQ ID NO: 197424 - DNA, 1000 bp, Homo Sapiens
gtgcttcctaacaattggaaattagatctggagctttcatcaggctcaggtttcattttctggaaagaccacctcatggatggtggtgtgttctatcagaaacgcatcatggcccattgtctctcttttgctgatattagcagccattaacggtcattgcctagaacttttatttcatcaagatgacatgctcatgatatcatttcttatttgtttgccaatatttctataaaaagaaatttctctcattaaatatttcattatcttaaaataatagagtttgtatgggaaagccaggacacatacttgattctttctctttatttaccaatttctagcatcctccaagcgagctttatcttctacgaaagatatcccacaacattcctatcttcatccctgtccgcaggacttaatcatacagccttccctcactgccagggggtctgggatcttcagctgggatttaacctgggcagccaggtgctcaggtaatttcccaattacattggagaaggggattgtgaaccctggtaactgcttcatttcctgttggcccatacctgtttgagggctgaagtggcttcattcatcttatcttgtatcccttgcactttctgatgcaaaaggctctactcagtgactgtgcagtgaacatatgaataaatggtgcagtcctcactgttcccatgctttccatgacccaggttcccagttcggccaagaacattgagctccttcctatatagcacatttgttccaagctgctgcttctcttctctctctttctcctattcttctctgaccttctcactcctcttcctcttcctctttctcctccttctcctcttccccttcccctccacttccaccttttccagttccttttccttcttttttttttttttttgagatggagtcttgctctgttgcccagactggagtgcagtggcaacatcttggctcactgcaacctccgcctcccaggttcagggaattc

SEQ ID NO: 197425 - DNA, 1000 bp, Homo Sapiens
ttacagatgaatagtctgaggcccagggagtggaagtgacaggcaatacagcattgtctatgcccacagtcagcagcaatccctgcacatggcagaatactgttatgatagccttctttcaatgtagggtttccctgtctaaacagctcctattccttcagctttttctcaagtgacatgatttcagaacttggccagcacatgcaagcctgctacacacacacgcgcacacacatgcatacacacacatacacacaccacttttatcaactgtgggatgctctactgtagcaaaataataatctctactttattttgtctctctctcttctcccttatccccttttcccttctggacttccgcctacctgaaggggggtaaatgaggcctcaggaatgcacttgctcaatattgttctctgaacttgatctgccagtgatgtattaattagctggggcactgcaccttaacgaacaggttacaggcagatcctggtgtgtgttaatgcttaaccagagatgttcagcagtggtctcatttgtggcctcaatgtaaagagagaactgttcttattgtatttttatagatgttttcttacttgtaagtgttgacgtattggtttcaatgccatatgtcagcatatttgctatatgttgtctcacatatgtttaaatttttgaataatagcactttctgtgtaagttataactcctaagcttcaatttatacatgtttttctcccatgcatgtgtaactgtgtatggcatagctttcactctgtcattacatgttttaaatttaccttaaaatcaatgaatgtcatgtattttgcattaatcgcagagcaatatgatactgctagctgtcatgacttattctctgttaaccatgatgaaaagcaccaagccactaccctgtccctacccctggtgtagcctggtgagaggtggccccatccaggctgagtcacagatgcaggttcaggatctcttagaattc

SEQ ID NO: 197426 - DNA, 1000 bp, Homo Sapiens
atacaatatacaaaataggtgaccatgaaatatgcttggtgggtcagctaatttccatatgtgctttgtgattggtttttaagtgaatttattgctatagagttccaaaacaaccctttaacatttatgttttctgcactttgtctcattattgaaaataacaagcgctatgtaaaagcgtaaagaatatactgaggtttacagcaaggataaccaccaaagaccgggagttagaaagctatggcctgtgggccaaatcttgctcaccacgtgcttttgtaaataaagttttattggaacatagctatgcccatttgctatgtattgtctatgtctgctttcacactgcaacatcagagttgagtaattatgatagagaccatatggcttaagatatttgctatctggtttttcactggaaatgttttccaacccatgctatagatattttcatggtatttatttactgactcgtttgttcattctttcagtggacaccaaccctgttaatgacgctggggaatgtaaagataagtacatcagtctctaatttccaagagcttataatgtaacagagacaagttatgtactcaaataacagagacaagtcatgtattcatctttacctctgaccaggcagaatgcagcacgtactacagacaagaaatagctaaattgctgtggtagtttagagatgatgagagcctccgacaaaggcagggaattgggaaatgcacaaagatattgcttccataactgtggcacacagtgatttcccaatagggaacttcatgagaaatcaggctaatttccttcatggaattttataaattgtagtatccaaaagagtggaagtgatttagaatattactttgtgtccagattcctttatctagaagcatatttcccctgtaactatggggatgatcatatttatagaaaatttttgaacatttgaaggaaggcttcctttatcagggtgggaagacagaaggaattc

SEQ ID NO: 197427 - DNA, 1000 bp, Homo Sapiens
ccctgggagccactgagttaagactgctatctctgtcatccttggcaactcacattttcccaaacacaaatacaagcccacacagtcatttacccactcttagctccacctctcatcccccacaatgttctggtccctttgaggcacactgaattttcccaggattcctcagtttgttggtacacaaaacgtctcagcacttaacagtattaagcagattgttctggctctctccattcacctgctaatgtgggactccctgcacaggtgtctgctctcagtgagtatatttctaggaacccacaggaaggtctcatatgaatcccagagaagtctgtcttgttaccacttaaggtaattggccatggtcaccaggcattggctgtctcccaccaagtttccaagtttccactttcccaccaggcattgtatccacagcctggcatcagagtctcccatgctctcactcactgttccacagaaaaccaccatgatgcccagagtccccatggaacccaagcaggggagaaatacatgcttcctccactctgtagaacgtttgtcatctgggctcccaaacaggactgcttgagcccctgtgagaacagctgcatcagctccccgccggcagcctccacttcacagctttcagatatggtccaggggctgggccagggagaaggctcctgctctctccctccatggctcgtcatatctgctccagacatctatgtacagacctcctcccccatgcagcaagttctccctgggggtgttgccagcacacaagctctgcagacacagtgagacactgttttccctttagagccagctggaatcctggctccaaatccgtgccacattttgcaattctcttggccagtggatgacagagactggcagaagccctcctatgatctcatagcccttccagggtgtccatccactgggttctcacagcattgcctggagagagccataattttattgcctggaattc

SEQ ID NO: 197428 - DNA, 1000 bp, Homo Sapiens
acacaaaatgagatatgttggtgaagaatcgaagtgtagtgaaccaaacggtaaaactgtaatgtgttgggaatctgagaaaaagtttacaaatagccctaaagaggcaaacatcaattgtgttgccaaactgtagtttgaagggaattcctggttttttcatacttactagaacccttcatggaatatctgtccccaccctcaccccacttttccctctcccctcccccacagcagaatgccttgagttccgtattctagttctgtgtgatctgatctttaccttcccttccttggatccctgtgcacctactggagccaggttactctgggtcctggacctgactgcctcattctggaggcttccagacagccacagttagtgcccaaacctgagaggatggcttcagatggaggtaagtctgcaggtggtgaggaggatttctggtacctgctcatatcctttgagacaagctctctgggctgacctaaaggaatgtgaggtgctacaccccgtcaaaggtatcacacttggggaggctagggaaggagattgtacctttaagactaggggctggggaaggaagaggacttccttaaggacagattaaggtgtctctgaggacacatgctgagtatagagaaaggatggcaattagcaacttgattctcttgaacaggggacacttccgcatgtgtttttgtggtgggagagaggatcaggggtatgtgtcttaggactggcacagagaggtttcaagggggaaggcccaagttcatctgtcttttttaggcaactggagcctgttctaggattttgccatgcttgagcttatgaggggaaggggatgtggaggatggaggatgggagggtaaggtgggaaggaccttagtgggaaaagataatctgtagttatctgttgcagagaaatgccttcctgaaaactaggctggaatgtattataaactgcctctgcttgggccgggtgcggtggctcat

SEQ ID NO: 197429 - DNA, 1000 bp, Homo Sapiens
attaactttcctcttgcactctgttttgcagacaaactaggcttctcactagttctccaacatcttactatttctctagcactcattgttttcttcccctggagttatcttctctgttattaaaattttcatggcttaaaatctactcatctttcaaggccagttctgctattttctgattccttcaaacaaaaatattttctctctcctttaaacctccatggaaattcctttgtttctctcttgtggttcttatcagttttgaccctatgttgtaattttggagtttatctcttatctgcttgaggacatcttatacattgcttatatttttcacagcagctagcattgtacattccatatacaacaagctgaaggtaagacctggagagttaattggcaatgttgcatatattatataggagactctatgagctaatctaaaataatcgaatgatatcttaagtatgaaatttgattggttcactgaaatttgcaaaagatatcaaatttattttatagaaattttatttatttagttagttaattatttgagacagggttttccctgtggcctaggctagagagcagtggtgctcaaacaattctcctgcctcagcctcccaagtagctgggactgcaggtgcacactaccacacctggctaatttttgtattttttgtagagacagggtcttgatacattccctaggcaggtcctgaactcctcctggcttcaagcaatcctcccactttagtctcccaaaattttgggattataggcatgagccactgtgcctggcctagaaattatttttaaacaaagcagagactcttagtaagtggttatattgtgggcaagttcctaagtttttgtgcactaagacaatgtactaataccttttcaggcataataaaaattaacttagctgagaaacatttctcagtttaatgtcaaatcagaagactaaattgaaatattttcttctgacagggaattc

SEQ ID NO: 197430 - DNA, 1000 bp, Homo Sapiens
aattcagcagattgatttctgcaaaatatcagagatcatgccgaagaaatgaaaagcaccattaaaaagcaattatgtacccaactggtgtagatttatgtgcattggaaatctactctttcatactttaaatgtattaatgtgggaaaaattgctttgagttacgtaagttttgaataatgcagtcttcaggaatgtattcattgtataaaataaactcatcctaaagatattagcatttacttctaggaactaaaatacccaatgcatttggtaactaaattgctcatgataatttataaattgaaagtttgatttatacatcagtctctaaggagcttatcatgcgtaacctctggggacactgaggaaaatgaatttttccagtttgtaagcctagggcctgcctttgcactgtgtcagcttagcatgtactagcatgtagcatatctgggtggacctcagttttctctttccatattgaccaaacttggacaagagccaaggctttctgagaggcaagcagaagatgtacagtggtatgcactacatggttagtaagaggagctaccacttattgggtggttttttttttttctatatcagacatgattctaagtactttatgtacattattttattgacctaaaaatctatgtgcatgaacaaatgaataatcgaaagcgcaggaatgttgactaacttgtccagattattaattaagatgtggcagagatgattgttccaatatctccaatttattttaagtatttccatatatactgtgtgacatcatatgtgttgctttcattaggccacaacccaggtggtcaattctctttttattttttgtatttagagacagggtctcactatgttgtccagactgtcctagagctcctggactcaagtgatcctcctgcctcatcctcccaagtagtgagattacaggcaaacgccactgtgccaggcccaggttgtcaattctaagcaagaattc

SEQ ID NO: 197431 - DNA, 1000 bp, Homo Sapiens
gttcatttgttttttttggataaagaaaaagtcagaaaagaataaagatggacaagaatggttcatctcctactttccaaaaaccaattttaaaatgtagtaataacatccacacttcattgggcatctactacatactgtgtagtttataagcattgtcttagatcctcataaaaacatgtatgcaggcattgttatcttcattttagagatgcagaaactgagaattaaagaggtttattaccttgcccaaagaagtcagtgacatagtaaacataccatttgtttcatttttaatttggacacaattttcctctcaaattatattgcaatgccaagcttaactggacagaccttagagaaagagtattactttttttttttttttttttttgagacagggtctcactctgttacctgggctggagtgcagtggtgcagtcttggctcactgcaacctccacctcctgagctgaagagatcctcctacttcagccctctcagtagctgggaccacaggtgcacaccactacacccaactaatttttgaatttttttgtagagatggggtttcagcatgttgcccaggctggtcttgaactcctgggctcaagcaatccacccacctcagcctcccaaagtgctgagattacaggtgtgagccaccatgactgaccgagaatcatcattttgatcttgcagaacagaagactgataatggtctaatgtaagtcttccagagactaactagattttaacatatacgcttatggacttaactcaaaggtgcaggtaagtactgtaggagttgcagacaaaacaaaaggcacattaggtgagcaggggggttgcagggacatatctgggattcttggtttctcatcctagagaagttgtgagaattcggtactgtgtttcctttcttaggcctcacagctggcagcccagactcttcctcacatagagtttctgtgtgaaaaacatcccattgggtgaattc

SEQ ID NO: 197432 - DNA, 1000 bp, Homo Sapiens
acatatgcttgaataagcttccaaatgattccaacttccaacccccagccccagacattcaggtaaccccttgctattcaatatagcaacaaataagtagaataaatacgattttcagtggcaccaaaaaatatataatacttaaaaataaatgtatgaaagatgtgtaagacttagtgaaagcacagcaaaaatattacagagtgaaattaaagaacttagtaagtggaagagatatgtcataaatgaggattggaagatgtcagttttttcttaaactattctatagattaaacataatcctggctggttgcagtggctcacgcctgtaatcccaacactttgggaggccaacgcaggtggatcacctgaggtcgggagtttgagaccagcctgaccaacatggagaaaccctgtctctactaaaaatacaaagttagccgggcgtggtggcacatgcctgtaatcccagctactcgggaggctgaggcaggagaatcacttgaacccgggaggtggaggttgcagtgagctgagatcatgccattgcactccagcctgggcaacaagagcaaaattctgtctcaaaaaaaaaaaaaaaaaaaaaacacataatcccagcagaatttttctgtaaaaatggacaacttttagaaatgcaaagtaccaaaaatagccaaaacattcttgaagaagaaagttggaagataggatctggtttcaagacgtacagaattacagattactataatagtcatgacagtgatatgctagtaaatgtttaacatccagctcagggatggggggctgatttgatgcttaaaagtttagcaatcagctctcatgagccagcttgagtcaggtccaaaattccacagacaggattgtattcatacaaggatagaaaatagatcaatggaacagaatagagaatccagaaatagacccacatatgcagtcaattgatcttctctaagatgccaaggcaattagagaattc

SEQ ID NO: 197433 - DNA, 1000 bp, Homo Sapiens
agatgatattagtatttcctataccacaaaaaaactagaattttctaagattgttacattagacagtgttagatgtccttcctttgcctaggaaagtacatttggatttattttgctgcagtaactatagtataacttcaaatataggatattggctgggcccggtggctcacacctgtaatcctagcactttgggaggccaaggcgggtggattacctgaggtcagcagttcaagaccagcctggccaactgggtgaaaccctgtctctactaaaaatacaaaaattagccaggcatggtggtggtgtgcgcctgtagtcccagctatttaggaagctgaggcaggagaattgcttgaaccctggaggcagatgctgcagtgagctgagatcgtgcgactgcactccagcctgggcgatagagtcagaccctgtctcaaaaaaaacaaaacaaaaaagcaaatataggatactttttaaactttgttctataacttaatgtatattaataaaattatcggccaggcatggtggctcatgcctgtaatctcagcactttgggaggctgaggtgggtggatcacctaaggtcagcagttcaagaccagtctggcccacatggtgaaacccccatctctactaaaaacaccaaaagtagccaggcatggtggcaggcacctgtaatcccagctacttagggggctgaggcaggagaatcgcttaaacccaggaggcggaggttgcagtgagccgagatggcaccattgcattccagcctgggggacaagagcgagacttcatttcaaaaataaataaataaataaataaataaataaataaaacaatctggactgtccacttaaatgaaatcctttgttacattaagacaattctgcacaattcatatttatgccaattctgatagaagcaaaaaagctgctgtacatgaaaagttacatcttctagccagcaaaacaaagtcattaacatataggaagctt

SEQ ID NO: 197434 - DNA, 1000 bp, Homo Sapiens
gaataaaaatgtaaatattaattaacttgggtctttgtacactgaacataaaactcatcctatacatgcttttgtaaattttcattgtgtggtatttattaagtatttggaaaagttcctcttaaaactttttctgattagcacatgagccatgatatagtaaccatccaagttattgtctaaaccctgacaattatgagagtgaaacagagctattaatagagtaagccaagaagcgtagagtgagtctgtcccaggcatatatggatatttggtcatcacagccacagctgttttgtaaatatatttacatcaccataaaattaccttccaggctctttcatctatggctacctcctccatgaattatgtttattttttgatatactctatcatatgaaatttcattagtctttgtgtttctattatcttacaacattccttttagtccactttgttactgttgcttagaaatcataatgcccatatttacagtacatcaaagatagttgtatttaatatatgttaaacattggactaggaactctttacctacatgtataatttcacagcaatattatgaaatagtcattactaaaaaaaaactgaggctttaaaaattatgtatattacctgaggatgtcttaccaatagaaggacccatactccaacttaggtctttttgagtatgtttctgtgttgcctgtcccattttttaaatccatcttaaattttagctttagctctggtgattaatcttttatattaataaccttaactttagtgttttacattcattttatctgttaaacaatcattccagaaagcaaatcatcttggagacagtagaatgacaaccatcctgtagagcttgttgtgttatttgattaaaaggactgtacaggcaaaatcaatgaccatctcatgcacttatccattcattcaattcattcaagcaacattccaaagcatagagatacattaattaactacagaattc

SEQ ID NO: 197435 - DNA, 1000 bp, Homo Sapiens
aaatatgtctatgggaaatctcaaaatatatgagacagaataatgtaaagaacctaaatttcccattacttagttttaacagttatcagctgattactgatcttgtttcaaccacatccccaccagcacctgccaccactttcttctctttcacagtattttggtgcaaaactcacacattgtatcattttataagtaaatacatatgaatttcagtatgtatatggctggtttttaaaaccatggatctgttcaaaattatctaggaagagagcaattagacatgagaagatggaagaggtttgagttttggaccatcccaaaatttaggggtcaggaagagactccagcaaagaccaaaaacagctgccaccaaaatagaaaattaaactagaggaatctgttatcttggaagccaagtgaaaatagtatttcttttgtgtcaaatgtttctgagaagtagaataagaaaggcacaaagaatttaccattgaattaaacaaggtagaaatcattgtttatctgacaagagtggtttccctaaaatgatacagacgaagtactgaaatgaatgggttaaggacagaatggcaaacaatgaagtttaggcagcaaatatacgtaactcttgagaagtgattcgttcaaaataggagcagagaaatggggcaggagtgagagagtcacttgaacatcaggccgaggaacaatttaaattttacatcatagaagatattgccacatgttaatattctgataaaaatctgctatagaggagaaagttgatgatgtgcaggagagagagtggacaagtgcaaagcgaaatccataagtaggtgaaaggcaaaggcctttagtgcacatgtgcaggggttgtctttagatagagcagtggcagttcatcaattttagcaggagaaaaggcagcatatattgatccaagtgcaggcaggttggtagatttgagggaagagaagtgagggttattccattcagaatt

SEQ ID NO: 197436 - DNA, 1000 bp, Homo Sapiens
tgctttctaactccctatcattcgcaggggtaaatccagactcctcagatggcatttgaagccccccacactctctccaggggcattctgtacctgtccctcacacaccctaagatccagccccttcctgcttcttggcctatcccgacctgccctgcattttatcacatctgtcacatcctgaagcagctgcaaggttgagaaaggctggatgctggtgatgactcaagactggagggagagggattaagcattgggcgcttcacccgcagaatagcagtcttggcattttgggggtcacctacctttttttagtgtctgttagaagccataggtccccttcctagaaaaatgaataccataatgtacctaagcacaaattttataccacattaatgtacctaaacacaaattttataccacatgtctgggaagttacagatctttcccttgcaatctgatatggtttggctgtgttccccccatcaaatctcatcttgaattatggtttctgtaatccccccgtgtcatgagagggaccaggtggagataactgaatcatgggggcagttcccccatgctgttcttgtgataatgagtgagctctcatgagagctgatggttttatagggagcttttctcccttttgctcggcccttctccttgttactgccacgtgaagagaaggatgtgtttgcttccctttctgccacaactgtaagtttcctgaggcctccccagccctgcagaactatgagtcaattaaacctctttcctttataaatgacccagtctcgggtatgcccttatagtggcatgagaacggactaatacacagtccatccatgaacccaggttttaaaagtcctgctccagagagcaagcaggaactgtggaagctggcctagccatgccttgctggtccttgtgctaccaacatccagcatggatctgaaactgagttggtgtccataagaacttgtggaactgagctgaattc

SEQ ID NO: 197437 - DNA, 1000 bp, Homo Sapiens
tgaattttcccatttctgttgcctctctctttgttctctctttaacctcaaacccctgttccttctcatcagctccaccatatcaactatcaacatgatgtggcgtgctcttgcttccagttaaacccgagaaaaagaaatcaggatttaaaattcttcttaacacatagtaaatacataaaatctacattcactgtttgtaatgtattatctgaccttctaaataaaatatagttgattcatttcatataatttggaatttaaaccaggaatatttatttaatggttagctcttggtcaggtgtggtagctcatggctttaattgcagcactttgggaggctgaagtggaaggatcacttgaacccaggagttaagaccagcttggacaacatggcaagatcccatctctacagaaattttaaaaattagccaaatatagtagcacgtgcctgtggtcctagctacttgggagggtgaggcgggatgattgcttgagcccaggagtttgaagctgcagttagccgtgtttgcaccactgcactccatcctcagcaactgagcaaaaccttgtctcaaaaaaaaaaaaaaaagttttaactcagatgttggccaagcgtggtggctcatggctgtaattcctgcattttgggaggtcaaggtgggaggactgcttgagcctgggagtttgagaccagcctgggcaacacagggagaccccatctctaccaaaaacaacaacaaaaatagcctggtgtggtggtgtaatgcctgtagtgccagctgttctggaggctgaggtgggaggatcacttgagcccaggagttcgaggctacagtgggatgtgatcacaccaccactccagcctgggtgacaaaatgacaccttgtctccaaaaaaaaaaacacctcagatgtcttcttaattaattttcactttaatgagcatgaaagttaagaagagttctcctattttgctatttttctgtaaagttgaattc

SEQ ID NO: 197438 - DNA, 1000 bp, Homo Sapiens
tgtttattgtcatagtattcttttcaaaaggccaaactgatgagttcctgatgaggtaacctctctaactgatgtcactcagtggcctcaaagagctttctagaaagagttgaaagtccttagcgcagtccacagtgtccttacctcacaagcatcctttactccagcccatgcatccctacaacagtgccttaatttttatttgccccccacctttgaccgtgctctcctagatttccacctctggctttccctccatctagagagcaacagttcatctttccatactcagcagctaaaacgtctattccgtcagaaagtcatccgtgattgaccagtctgatggctaagccccttttctttgttctcataacatcgtgtgcatgcctttcccatggcgtagatcactctgcattgtaagaacagatttatgcatgtaatatgtctcccccattgccagttcccaggctaagcaccataatgacacctggtatgacatttctcctgagcacctagcatggtgcctcaacataaaaagaactccataaataccaagcaaatcttttcatttaactaacaaaatatttaccaagtatacgccacatgccaggtagtatgctacatactagcaagcaacagcaaacaaaatgccatcaaagtagagagtggtgaaccacataaacatttttccaagctaaggggagagtgccatgaaggaaagaatagcgtgctatcaaagagtaaaaccagaggtctttgcttcaagcagagaatgaaggaaggcctccttgaagtgactcaaagatgagcaggaggtgaccagatgaaattagagagaatatcattctagaacaaaaagctttgtgtgaaggtcctaaggtaggtgagagcttgatgatgttgaaaacctgaaagagggttggtatgcagtgagcagaagggaagtagccagagatgaagctatgaaggtgatcctgaagggccttataggccaagacat

SEQ ID NO: 197439 - DNA, 1000 bp, Homo Sapiens
actaccacttgttgaaaagatcatcctttccccattgaattgcctttcctcttttgtcagtatcagttgactctatttgtatggtccactgttcacttttataatgacaattatatttttctttgtgccttaaaaaatgcttaattgagacgtagtcacataccttacaaatcgcccgtttagagtgcactgtttaatacagttttttagtaaccatctccacagtcaattatattaaaaagtcaactttttaatcttaccagaattctttaatttttcagttcccctcactgtggttaatatctctcgacttgacaccacttgcttaaggagaacttcagcttctccatccttccctaattgtttcttttcataattgcctgttttttgaatataatagtgtctctgttatttctaaagatactgattatatttagtatgttcttcttggtttttgttagcattagatatattgttgagtagttctttcatggtgttggttttcctggaatatttagtgatttgggattgtctgctcaacttgagtgtttgaggatattggtttgcttcttggtgaatatactgattatgggagcatacctctggtgacaggaaggagtaggaactgctgcctaatgtatagaggtatgccagtaagttctcttttgactgccaagttcccctgcctgctggggtggtggttaaaatccctccctccaccatgctctgagcttcagcttaggctgtgcttgcctacttctcagaaaaaggccactcagaagggtattgggattcacttgtgcaaagatcctgggtcaagttcgcctataatcttctggagatcccctcagggtcctctcccgtagtctagattctgagtttggagcacagcagaatcactcttaccttcatagagacctctactgggcatatctatgctaggttttctcagacttctcagtcactatgtctcattaactttttaatcttataagaattc

SEQ ID NO: 197440 - DNA, 1000 bp, Homo Sapiens
cccaagagttggagaccagcctgggcaagatggtgagacactgtctctattacaagaaaataataataatattagcaggcatggtggtacaccagctacttcggaagctgaagcaggaggatcacctgagcccaggaatttgtggtaggcagtgagctatgatcaggccactgcattccagcctgggccacagagcaagactctgtctcttatttaaaaaataaagctatatcccttagaccaagcttgtctaacgcatgtggcccaggatggctttgaatgcagcccaacacaaatttgtaaactttcttaaaacagtatgaattttttctttttttttttttttaagctcatcagctatcgttagtgtattttatgtgcggcccaaggtaattattcttccaacgtggctcagggaagccaaaagattggacacccccccaccttagacactgtgtgcctcacgaactggcaccaccataggggcctgtccatagctagtaagagtgaaatgcttcctgttgacatctgctgtagacctgaaggtatacaaagtgtcagagagtaaacagcacatttttgaaaaaacacttttgttttaattccatagagatgagccaagctgtggtagaggctgttgtttatcctactagccattcttcccttcttccttttactgatggaactctcccagttttgttttgttttttgtttttttgtttttttttttaattaccagcaaggttcagggttgcccaactacagactgtgtttcccagcatgccttacaccccatgtgactaatgttggccaatgagatgggatgtgagcaactgccaggtccagtcctttaagcaggaaatggttgccttccatttcctctcttccttcccacatctagagtgtggacttaaaattgctgggctagctttaataattcccagcagggcttcttaaccctggggtcctcagaccctcaaggagtccatgaatagaattc

SEQ ID NO: 197441 - DNA, 1000 bp, Homo Sapiens
gaatgaaggaactggagaagaatagactatcggaaagatggactagcagccatgctctgctgcttgcaagttttgcggctttggactgattcaatcacttcagcctcagtggctacatccacccaatggggaaggatgccccagggcgccactggagcggcagaatttgggaaacatcaccataacggcatgcagcttctaacctcacatattctcatgcttcctgagacacttggttaggctttcaaaataagttttaagaaaagttcattatatagtacaaatgactctggtccataagacttgcaaactaattctgtcctatggagggaagattatttcatccctcccatccccatgggagaaaaaacccaattttgtatgtatacatttatctctttttttcttctttttagagacaaggcctcatgctgttgcccaggctggagtacacaatggtatggtcatatctcactgcagcctcaaactcctgggctcaggcaatcctcccacctagctgggattataggcacatactaccactgctcccagcgtgcatgcctctcactatgttgctcaggctggtctcaaactgtgtgtgtgtgtgtgtgtgtgtgtgtgtgtatgtgtgtgtgtgtgtgtctctctctatgttgcccaggggtgtgtgtgtgtgtgtgtgtgcgcatgtgtctctctctctcactgtgttgcccaggctggtctcaaactcctgggctcaagagatcctcctgccgtgtgtgtgtgtaagtgtgtgtgtctctctctctctctctcactattgccgaggctggtctcaagctcctgggctcaagagatcctcctgccttgaactcccaaagtgctgggattccaggtgagagctactgcacccagcctatctcatcattcttactggacctatatatgtgtgggattttgaattctcctttgaactgattgtaacttcttgctagttctctcattaattaatgaattc

SEQ ID NO: 197442 - DNA, 1000 bp, Homo Sapiens
accccactgtcaatattagacagatccatgaggcagaaaattaacaaggatatccaggaattgaactcggctctgcaccaagcggacctaatagacatctacagaactctccaccccaaatcaacagaatatacattcttctcagcaccacatcacacttattccaaaattgaccacaaagttggaagtaaagaactcctcagcaaatgtaaaagaacaggaagtataacaaactgtctctcagacaacagtgcaatcaaactagaactcaggattaagaaactcactcaaaactgctcaactacatggaaactgagcaacctgctcctgaatgactactgggtacataacgaaatgaaggcagaaataaagatgttctttgaaaccaatgagaacaaagacacaacataccagaatctctggcacccatttaaagcagtgtgtagagggaaatttatagcactaaatgcccacaagagaaagcaggaaagatctaaaattgacaccctaacatcacaattaaaagaactagagaagcaagagaaaacacattcaaaagctagcagaaggcaagaaataactaagatcagagtagaactgaaggagatagagacacaaaaaacccttcaaaaaaatcaatgaatccaggagctggttttttgaaaagatcaacaaaagtgatagaccgctagcaagactaataaagaagaaaagagagaagaatcaaatagacgtaataaaaaaagataaaggggatatcattaatgatcccacagaaatattaactaccatcagagaatactacaaacacttctattcaaataaactagaaaatctagaagaaatggataaatttctggacacatacaccctccgaagactaaaccaggaagaagttgaatccctgaatagaccaataacagccactgaaattgaggcaataattaagagcctaccaaccaaaaaaagtccaggaccagacagattcacagctgaattc

SEQ ID NO: 197443 - DNA, 1000 bp, Homo Sapiens
attttctgagacatgactttgaatcttgcactcaaggctggtgggtcagagtgaaacacttagctagcgagggagcccagttccctcaccacagctatatctgaatgtaagcatgctgctcttactcatggcttttgtggtgagtattcacatgaagaaatttaaaactagaaaattcacatttaacagtgctaatatacatgaaaagaaagagatcagagatagttatggtcacatttcttataatagcaaactctggtatacgttgacctctgatgtgagtgaagatatcaggagtctattttcagggagaaacattaactctgtatacatctaactcagcctgctctgtacatggacctgtgtagctaaatgcaactagagcaaaccacacagccatactgatcagcctcactttaaattcaagacattaatctttaggagcccttagtggtacccagaaatcatactctgcttccctagtcctttcatcttcccattcttcacaccttgtcttccatcttcaaacactcaggacacccccccaacccatccccactcccagcgttgacctcacttcctattttgctaagaaatagaaggcataggaagcttcttctcatcctacgtagaaatgggtgcccatttcctcttcctttcacctattcctatggatgaactgtcctgcatctaggtagggttaagccttctgcttatgttctggctcctaaagtctctggggtacttgtggaaattgctgcagcagttctctcttctccttcttacagtatcaagtttcctttctctacagggtctttcccataggcacacagacacatttgccagagttgatcatgctctcctccttcaagcatggtcctcatctggtttccaggacactccctctcctggttttcctccttcctcactgtctgttcctctcactgttcaatgctggtgcctcctcctctccccaaccccagcccctggggaattcttg

SEQ ID NO: 197444 - DNA, 1000 bp, Homo Sapiens
ttctatttggccaaagtaagagtacattcaagggaattgtgagaggtaagagtggaaacagaggttggagctgtatttttatgctgtgattgaattacagtgtgtgataaatattgctcttatttgggtagattaccatttaacattttgaattaattggtaattggattaatcttaacttttaaaaaactaatctgagagtggtataaaggatagattacagaatggataaagggtgataaatcagttggctatggcaaaattgcaggaagaaactgaaataggccacagaaaactgaaactgacattttgagtagtatttcagaatcaagatctggattttggcaactgaatagatgcgtaggaatcaaagatgagtatactaaatgaacttaatctatgatttgtctgtcattttattgtgtaccattagtgtgtatgcatgtatgtatgtgccaggtagttaataggctgactgtgtctcttagctccactctgctgcctgggcctttgccatagtgctggagttccctcacttctcttttctgtaaccctattatattactgctgtctctcagctgtgtttcattcctcaagcagaaagaagatgggaggatcatatagtagttgactagaagctgtggagtttgagtgctgggattatatctagttccattacttatgaagattatatctagttccattacttcacctcatctataaaatggtttaccaatagtacctaccttacatggttttatgagtattaaattatgtatttctaaagacatttagaacaatacaaagaatatagtgtgggctcaataagtgacgatggtgttagttattagaaggccatcgagtgctggagaaaataattgaatatcattgatggaaataaaggaagttttccacgttaaaaagcttcggtttttggaaatgtgtgttttcagtatttctgagattaccaggtagaaattccagccagatgttggaattc

SEQ ID NO: 197445 - DNA, 1000 bp, Homo Sapiens
cagcttcctgggtgccaatgataatcgaccagatcagaatctctggaggtatggcccaggcaacttccttcctaagaagtaacttcaggtacttgagaagcatattaacttctgagggttattgctttcatgtatgaagctaataggaacctagaagaacctgtgctttgaaactttacatgcctatctgcaaagtctgtttttctctagagaaatgtcttttctatgcaaagtgtgcattcagtaccaccaattccctgcattttggtgctcagaccctcaaagacataattaaggggatttcttctttaaaagcctactgtgtggcatctcatacaattatatggcccttgctttttgttggtcttttttcaaatataacatgcagtgttgccaggaacaccatcatattaaaatataaaattaccttttgtgaaaaatggagtcagggcatacatctgggaatccaacaaactctaaactggctgtgtacaaaatttttttttttaagtttggaaactgatagctgcctgaaggttgcatatttaaagtcattttccctgcttccttcattttccccctgtggcaaagcaaagcagcacttcttatggggaaaaaaaaattgaaagaaagaaaagaaaacctaatattggcattctagtagtaaaataatggtaaagattgagcctggattttgtaatactttggatattggaatatcctaatttccagttggaaaaattagtatcaaatgtattttagatgaaaagttcagtgaatgctgacccatattttgagatataaacaaaaaacaattaaaagatagctattttaatgaaggaaaatataatatttaaataaagtgtttagacttcaaagtagagtgttgctcacgtaatagccagaatacctctgtgcatacatctcggaagaggctaaaatgccagatgtatttttgtgctaattttctcaccagcttctggagccagtagaggaattc

SEQ ID NO: 197446 - DNA, 1000 bp, Homo Sapiens
tgttgcccagactgttcttaaacttctggcctcaagtgatcctccttccttggtctcccaaagtgatggaattacaggcgtgagccactacaaccagttttgaatattttatgtggtaaataggatgcaaatactgccttgtttcaattggtttcctataagtttaagatacagatgtattgtctctgtgtaaatctgtacccaattgcctcagatttttgctggtgacaaagtcttacagtgctttaactaaaatagctcacctaaaactaggatcagaaaaatataggatagtaagccattttaaaagtaatggttacaatagagaccttgagttcctgaatgactgataaatataaaggaaatactgaaaatgaaatgacctataaccctacaagtgacactgcctagacacactttttaagtgtatgatgagggcaggaactgtatgagaaaggaaagcagtcagtttttcctttgaggtctaaaattatgctctcccactgcaaagtatgccatcactgtcacttggcttctcttttattctttcctcacctttatctctgggtttttctttttccttcattctcaataaaagtaggaagagaatggtatggtctctgtcatgtgaagagaaataataatttttaaagattagaaatataatctattgtttcaaaactaacagaagagaggaaaggaggctaaagagatacagaaggccaaaataaaggggtcaagtaggtgagagagacataaggggaaaaaaagatggtagaaatgggttcaaatatatcaataataacaataaatatcaacaaattttatcttcctgttaaaagacagactaaaatactggaaggaaaagaactataaagtataaaacatgattgaaagataaaaggatatctgaataaatgtatagtttatgttaatgggtcaatattaattaatgattatcagttcatctcctaaaaagtctataaatttaatggaattc

SEQ ID NO: 197447 - DNA, 1000 bp, Homo Sapiens
gaacaaatttttgacttcttgattagatgatgtctagaagtttctgcagctatagaacactgtaatggatcctagattctactaggagaatatataaaatcacacatatttctaatcatgtacatacatgaatatgcataattttgatatcttcaatctgtgatagctctgtttatacttaatgtgaaacaaagtagaaagatatttcccttacattaaaactcagggaaatatgaaatgaatttagagaacacaagattcaattatcttccaactttttccatcctaagtaacagcatcaccacccacttggctctctgcagttagaaatcttggcatcatctgctatacttcaatctccttcacctctgacatttcatcagtcactgagcccaacaaattttacctccaaactctctccctattctatttctaatttttaaaccctatgactcctgccctaattcaaacactcactgcctagatctcactcaacagactgaataaacccaactggagcagtgagtacctggggagaaggagaaaaattgtgaccaacctaggaggcatcaaagctggaactgagatacaagactctaagcaatgcttacccttccagtcttgtctcttgtatgctacctcaacgtactctacatttccaccttcagttgcgcagcagtactcaatattattagaactatccacatgacactctttgataggtttcacaaactgtaatatccttgactgcctagcaaattcctagatatctttcaaggcacagctcaactattttctcctctacaaaatcttctccaattatcgtaaaatgatgattaattactctgtgattgcatatttgtacacatttctcacataacactatcacaacatgttgagtgtctagtctatgagagaagagcctgtcattcatctttaattactgaattacacctgaaataaattatgtctaaaaatcagtctgtctggttttgaattc

SEQ ID NO: 197448 - DNA, 1000 bp, Homo Sapiens
gaatggggcaaagatagaaatagggagatcactttggaggtcattgcaataatccagtgggagatatgatgacttggactagagaattagcaatggaggtgttaagatacaatcaggctctggatatagtgtgtaggtagatttaatagaaattgctgttgaattgaagaatagtttacgagagaaatgagtcaagggtggaagcttcattaactaagagagggtaaatggggataatttggtctagttttgtataaattatggggaaagtcttggtctcatagtttagcattccatagtacgttctccatagtgtataagtgataggttttactaatttaataatttttttgtctcaaacttgtgacttagactttgataaacttctgtttatgatagatggatttttaattgattttattgtttgtattttataatggattttaaggcatattagtgaaaacacaacttaaaatttattttcttaccttactaacattccaaaaaaggaacatatactgtataatgtttttttgtctcactaatatattcgtatccctcttcccccttcttggcaaacttgtctgaaagtatactgttgcatgttatgtcatggatgtaccggagcatgtgtgtaaaatacatgtcataaatggaagcagctggtttcctatgcagttaagagaagaaatgcatacagctgagctcttcaaacttcagaactcattggattcagtttctatcctgtgtaagcatgctatgatttcaaatagtacaaatgtataacaagttaccttaatagcttaaaaaattattttgtttcgatagttgaactactaaatctgttttattctctttccctctgccttcagtccctacttacctatcctacctcttgaaaagaacattacacctatagtcttagttttaaattcgaatctgaaaaggccttggcaagagttgggaaaaagttatcatctcaaagggaaaagctgaattc

SEQ ID NO: 197449 - DNA, 1000 bp, Homo Sapiens
agcagaaagaatatgcccaacttaaagacacatttctcatcctcctttgcagctaagggtgaccattgagattgtgctggaattcactggccagggcaaccagaacaactctttacctgggctgactccactgggaggcatgacctcgtgcccttctctggctacctgcttggaacacatatgtaatggtcccaaattgaacaagatatgttaaaaaaaaaattaatgatgttgccagatgttttgacttcatgtctctcactaagtggggaaaggaatgagtttaaaatacctgagtccaaaaacaaaaggaaagacaaaaggagagcaggtgctttaatccagaaatcacggctagcattttctatggaattaaaggaaagagaacagcttaagaatttggataaatgtaaaattaacctttatcaagatttgagaaaactagaattttggcagcacactcccttcactgaataacaagatactcaaagtcaggaagattaaaaagttgagagctcttggcaagaagcttgtcagaggaatgggtccttgctatgaccctgtgggccaggtttttgaagcatcaatagcaacttcatgcaggaacctgtttcttaatctgagaccaatatggagagggcagaattgccctaggaagcaggcttcatgtgagtctctgtccatttgggctgctataataaaataccatagactgcatggcttataagcaacatttattgctcacagttctggaggctgggaagtctcagatcaaagtgccagcagattcggaatctggtgagggtcctattcctgatttatagaatggtgccttcctgctatgtcctcacatgatggaaggggcaaaattcccataggtttcttttattagggcatgaattccattcatgagggccccactttcatgatctaatcacctcccaaaggctctccctcttaaaaccatctctttgggggttgggtttcaacatatgaattc

SEQ ID NO: 197450 - DNA, 1000 bp, Homo Sapiens
ataaatctctctgtatttatatatgctttggagagccacagaatgatgttacaatatcgttaacattttctacctcagtattcttttacaagattttaatggcttcctaatgattaattaaatggtaatcatattaataagatcatagtattcaattgaatgatgttccatagtttacatatccattcctctactgttaacacctctaacaatttttttattgtggtagaatacatattaacaaaaaatttgccattaagtgtacaattcagaggcattatttacattcattatatggtgtagcataatcatgatctatttccagaacttttgcatcaccctaaacagaaactgtaaccaccagatcatataccatagttgttttaagttgttaagttttgtaatattcattattccaaatagccatagataactgataccaaagttagtaccatgagtagggtgctactgaagaaaatgtaaagcaagtgtcattgtttttaggactggacagtgagtgatgctagaaaagtgatgaggtggcaattaggactgttggtgtgagaaaataactttttttttttttttttttttttttttgagacagagtcttactctgtcacccaggctggagtgcagtggcacaatcttggctcactgcaagctctgcctcccaggttcatgtcattctcctgcctcagcctcccgatagctgagactacaggcatccgccaccacacccagctaattttttgtatttttagtagagatggggttttaccatgttagccaggatggtctcgatctcctaaactcatgatgtgcctgcttcagcctcccaaagtgctgggattacaggcgtgagccaccacgcatggctgagaaaataactttttgaggctggaaaagggtgacctgtgttatgtagtaggggaataactggcaaatatgtcacctgcagtaactggaagataggaaatgccatgttcctaatgaattc

SEQ ID NO: 197451 - DNA, 1000 bp, Homo Sapiens
ctcaccatgcctggcccaaagtgtcttaaactcaatcacaactccgcctttgactcaacagaccagccaatggtaacttcaatgcttttcaaggctgcactgactgactaggcatgtcttgaggacaggaggaaaacggactgaagtatatgtgaaataaatgtgtgaaaaccaattctacacagagccaataaaatgagttgtatggaaatttagaagatgaaatagcatttcaaggagggtcattttctgtacctgtctgaaacagcaattgctttaggtttattcacatttaattagaaatactagtcatttgcacattagattccaatctaacaatgggccaaactacatcttcatcaaatacaaggtaaaagtgaacacaagatttctaactagttcttgtgttatatttatcagactaagcctaataggaaaatactttcaaaatttcttaacacacacatttgcatttacagtctgacaatcaagtacaaggagttgtatcttctctcatttttaagttctagctccttatttccatgcctaaaactgagatgcttatcccttaaagtggacagatatcattaacttcattctttactaatttccactgttctaggctaccactaaggagtagcccaacttaaaatatgcatcaacctaaattagctaagaaaaataaatggtccacacaaaaatatcaatgacagattaacatgagcattttaaaataactacaaacacgaggaaacatacaaatttcaattatttctattgtgacaaagtcacagatatgtactaacacaatgtaatactccatggttctgtagtttgaagcctacatttgtagctgaaagaaattctaagttttagtttaagcttagtaaagattttccccctcaaaatggttccatagtttgaagcctacattcatagttgcaagaaactctaagttttagtttaagcttagtaaagattttccccttcacctgaattc

SEQ ID NO: 197452 - DNA, 1000 bp, Homo Sapiens
ctttgggaaccactacattagaaatctttgcactcaatacctggattccaaattaaatgcatctattaagcagtaaaatccaccagctgcagcacttctttatcatgaagctctaggataaatgtgtatattttgctgcttttcatagccaagaacaggagaggggacaatggaaatgacattatcccttaatcctttcacactaggcaatgaacttgatttcactttgggtttaaaagcaagctttggagcctagaataaattagatgaatttagatgaatttagaatcattatccataaaatctccaaaggattttagcaagccaagattgtaagattcagctgtatttgattctgccagtctggaatgctataatttttggtgatttatttataatatacattaaaatcaagacatattttaacagagcccattctttaacttagaatagataagatgttttagggaatggcatgtttcacagatacttggcttattttgaaagtactgtgtagatggtctctagagcacatgaaaatgttagttccttggtcttttccatataaaagcatgttttaaatttggtttttgcttttaagtgtttgctttgccagtgctatactgcacgtaggtacggttcttaattgtaagcaacagaactctacctagtttaagcaaaaaaaattcttaaatcatgctgtcttacagaatatgcaggatggccagatagtgggaaattttattagaccgttcttgcatcgctataaaaaaatacctgggactgggtaatttataaagaaaagaggtttaattggctcatggttctgcaggctttacaggaagcatagtgctggcatctgctcagcttcagagaggcctcaggaaacttacaatcatggcagaaggtgaaggggaagcaggtacatcacatggtgaaaataggagcaagaggcagaatggggaggtgccacacacttttaaatgaccagctcttgaga

SEQ ID NO: 197453 - DNA, 1000 bp, Homo Sapiens
aaaaagaaaagaaaagaaaagaaaagtttggaacaatgtgacacagaagcagatgttcttaaccttctctttgtctagctacagaacccaaaccaaggggaaggatctttaacaggaataatacatgttactgaaagggctctggcgcctttgggtatgctaaaatgtttggggccaaatgactcaggggaacttttttctttgctcatcctttcttggtttccagcactcataacagcccccctaaaaaaaaaaaaaaaaaaaaaaaaaaagcaaaacgttatcaccaccttgggaaatggtaaggacttaagagagagagtggttgaggggatgtaaatgtttccttctaggttgacagcctaacgcaccaggatagaaataaaggcagagactcaggacagaagttgaattcctaggaaatctgagcatgacggacaacgtatgtacaacaagtgatcctaatggtcttcgagaaaacaaaaggactactatactcctcactttgttagagttgaaaaccataaagctagagtgatggcagctcctgcgaactctgatgaaaccacaaaggaagtcattcggtcaagaaatgcattacgagccaccatgggacactaccacccttctgcttagcagagctcagagtaagggtcccttcctgtgtgaaaggcactgactgctacagcctccaggagtccttctcactgcatatgtgtgataaatgtgagattcattattttgttctttgtagaaaattaagtatgaaataatttcttactcttttttcaagttgtttcaaggatgcttctcaataaattcttttttaaaaaattgacgatttccccaagagtttctccactggttgcaaaccgtatatttaattttcttggaagcattttgatatatgataagggcacaagtttgataccagagaaggcaagatattagtttgagttgtgtcacttactatatttataactttggtccagttgaattc

SEQ ID NO: 197454 - DNA, 1000 bp, Homo Sapiens
tgcaatgatctaccttgtaataatcaggaacacacagttgttataatgcaagagagacgtgaagatttaagcagcttagtcttacttactctgacaatgagtgaatgaatggcttctagaagagtggaatccttcacaggggatgagagaggaacacagaagaattacaggtacacaaacagaagggagcacatttactcattcatttattatgacaaccccacaaagccattgttattacttttaaaacatctagactcacataattaatttaaattctgaatgttcaggaaagtattaaaaatctttgtgcctccgccttctcatctatgtaacttataaaagcagtagaaattagagtaaaattcagagcccagggcctgagacggacagatcacgaggtcgggagttcgagaccagcctggccaacatggtgaaacccccatctctactaaaaatacaaaacttagccaggtgtggtggcgcacgcctgtagtcccagctactcgggaggctgaggcaggagaatcacttgaacctgggaggtggagttgcagtgagctgatatcatgccactgcactccagcctcggcaacagagtgagaccactgcactccagcctgggtgacagagtgagactttgtctcaaacaacaacaacaaagacaaaaaataaaaaaaaaaaaaccagtggcttaagcaaaatggcttatttttctctcatttaaatgaattcgggtggtacacactctgaggttggtatgatggctctacaaagttgcctagttctttgccaagtttcttcaagttctctgttctgccagcccaaggttatgccctcatctgtgtggcctaaaatagttaccagtgctctagccactacattcaagctcaaggagacaggattgaagtaaatagggttgaagacaggattgagggctgcaaatagggttcttctctatcccttaagaagtcttctaggttggcccacctgacacttt

SEQ ID NO: 197455 - DNA, 1000 bp, Homo Sapiens
aaaacgttattgcctttccctctaccatgcaagttcattttttaaatatccccagtgaagatatcgggataagctattaaactaaatttagaccagcagaacatgaaggattactaggaaacagaaattccaagataaaaaaactagggctagacatggtctttgccatggttacttgcctacagaaataacaagaagcaaatagttctaaaacctaatatttaagggaaaatgtattgttaaataaatctcaaggctgactgatgatagcctgtgactatttaatgttaggagtatcctcaaatatctaaactcaacctaataggagatgagctagcaaaatgatgcaacctcccaaaaagaggatcttccccaatgaccatctcagatagggcagtggaggacatagagagcaaaagagtaactgctgaaagaacacataccactgccagccaacagtcctcattattcctgtctacagagtatgacagggatcagaaaccactgtgtccctttttttttttagacagagtttcgcttttgttgcccaggctggagtgcaatggtgccatctcagctcaccgcaacctccacctcccgatttaagcaattctcctgccccagcctcccgagtagctgggattacaggcatgtgccaccacacccagctaattttgtatttttagtagagacagtgtgtctccatattggtcaggctggtctcgaactcccaagctctggtgatccgcctacctcagcctcccaaagtgctgggattacaggagtgagccactgtgcccagcctgtgtcccctctttaattgggagtttttattgcagtgattttgacctttctttttcattgctttttgcatttttcatttctttttgcatttattttttcattgctttttgcatttctttttcattgctttttacatttattgctttttgcatttattaacatttgttgttagttgctagaccataaggaaggaatt

SEQ ID NO: 197456 - DNA, 1000 bp, Homo Sapiens
ggagtgacaagtattttacaaaatgagggagttggattagataactcactaaaggccctcctagttatcgaaggattctattattcacatcctttcttttagaacagcagtgtttgttttggtttcaataaggggagagggcatgggctcctgaagtggcagggaggaggggaagagatggagcagcgcaggcaggggcaagcggggactgtgagacaaataacacccatttcccagttttagttgtcaggcggctgctcttcactccccacttggattttgagcattttcacaaatcttcagaattagttcaaatcatcaactcgtacttggtagctttattcccttggctcttgaaagggaaagtaaatcaaagcttgtctgcccagaacctggcaggagcatttaataaagatgttcagcttggcgcagtggctcatgcctgtaatcccagcactttgggaggccgaggcgggcggatcacttgaggtcaggagtttcagaccagcctgaccaacatggtgaaaccccatctctactaaaactacaaaaattagccgggcatggtggcgggcacgtgtaatcccagctactcaggaggctgaggcaagagaattgcatgaacctgggaggtggaggttgcagtgagcccagatcatgccactgcactccagcctgggtgacaagagggagactgtctcaaaaaaaaaaaaaaaaaaaaaaaaagatggtcatggtcatcccagggtgggggcaggcttgaggactctgcggtggtctctcaggatctactccagatccaggctggcttccagaaatactgcaagtggtaagaatgccaagatttcccagctctgttgcagaatgaattagtggccctcaagtgaagtcactgcagaacaaaaggctataaaaagagagaaaagaatgagggggagatgttataggtgcaaactggcatggaaagccctgcaacgcaagcaagcaagatgtttgaatt

SEQ ID NO: 197457 - DNA, 1000 bp, Homo Sapiens
atgcaaattccagccaggtgcggtgactcccacctgtaatcccagcactttgggaggccgaggtgggcaagatcatctgagatcaggagttcaagaccagcctggccaatatggtgaaacctcatctctactaaaaatacaaaaattagccaggcgaggtagcgggcacctataatcccagctacttgggaggcagaggcaggagaatcgcttgaacccaggaggtagaggttgcagtgagctgagattgtgccactgcactccagcctgggaaacacagcaagactccatctcaaaaaaaaaaaaaaaaaaaggcaaattcccaggacaccctccagacctactatatcattatctctaggaggaaagcccagatagctatgctttaacaaaccctgcaagtgattctcaggcctgctgaagtttgagaagcaacaaaaacacttttctctcatttctatatgtctgctttcacaaacatacagccttctatgttcttatgaaaagatctcttggcctgttttattttctacattgtactcaactttactattctacttgacttctgagctctgagacacatatcctcacaatcatattgtttcttctctctctccctcttaaatttccttttaaaatatttcagacatactaaaaaatatagattataatttatcatgtgttatccatttttcttatttttattattccctttactttttactacaaaaacaaaacatatttcaacctattactttatctttgctattggatatgttgcctcaaaactgagttgttattatggtacagatctgaaatcttcaattttcttttaatttttctacacttttatttaaaaatgtttaactccttcattaacctagaatttattgtgatacacgttgggtaaacttaatttttccaaagtgttacctggctatcataagactattatgaaataattcctcattcccttgttttaaaacaatttattaagctt

SEQ ID NO: 197458 - DNA, 1000 bp, Homo Sapiens
ttagtataatgaaaacaaaccagttattaaattctatctagatactcttgccaaccaagcacttcgaatctcaaggcttgaatgaagaatagctttttttttctctgagacacggtcttactctgttgcccaagctggcgtgcagtggcaagatctcagctcactgcagcctggatttcccatgctcaggtgattctcccacctcagcctccttagcagctagaactacaagcgcagccaccatgcctggctaattctgtgtatttctggtagagatggggttttgccatgttgcccaggctagtcttgaactcctgagctcaagcgagacacccaccttgacctcccaaagtgttgggattacagacattagccaccacgcctggcctgtaaacaggaataactttcttgctgtgtgattcaatgttatttactgctttgttcatgtactgcctatgttgattatcaccagtggtatggatcctgcacattgggaaacactgcagtgttatttaattttgttcactgtgtttacagtgcagttttagtcacctgaaattctaagagaaaagatcaatatggttttgccaatcaaaggtcattaatacttggaatgaaagataacttatcctggtgatgaacacatgccttttgaaaagcatcagtatctccttaaaatgtataaactactgtaatcaatgaggaagactttttcttatcagatttattaaactcatttaccatacaaatagcattataacattaaagaaaattttttaaaaattctgtaccataaaacaattactggttccttcctacctgtttttaggtttgcagatgaataatgtgtggatttttggcagacacactgctgaaaatttttcactttgttgggtgagcatctcaccctatctccatttgtctccctgctcgtgagttctagagaagaccaccagtaagcaagtgaaattctttggccaagtcactgatatcagaattc

SEQ ID NO: 197459 - DNA, 1000 bp, Homo Sapiens
gatggcaccactgtattccagcttaggtgacagagtaagatcctgtctcaaaaaaaagaaaaaaaggaaaggaaaggaaaggaggaaggaaggaggaagaaaggaaggaaggaaggaaggaaggaaggaagaaaagctggatgcagtggctcacgcctataatcccagcactttgggaggccaagttgagtggatcacctgaggtcaggagttcgagaccagcctggccaacaaaatgaaaccccatctctactaaaaattcaaaaattagccaggcatggtggtgagcacctgtaatcccagctacttgggaggctgaggcaggggaattgcttgaacccaggagacagaggttgcagtgagccgagatcgctccactgcactccagcctgggtgacagagtgagactccgtttgaaaaaaaaaccaacagagagaaagaaagaaaaagaaagaaagaaagagagagagagagagagagaaagaaagaaagaaagaaaggaaggaaggaaggagggaaggaagggaaaggacaggaaagaaagaaagaaagaaagaaagaaagaaagaaagaaagaaagaaagaaagaaagaaagaaagaaagagaaagaaggaaggaaggaaggaaagaaagaaagaaaggtatttacttataacttatgcatatcctcccaaatactttaaatcatctctacattacacataatatctaatacaatgtagatgctatgtaaatagttatactgtattttggtatttgaattcttttttattcttgtattattttttaaatagttttgatcagcgactggttgaattcgtggatgcaaaacctgtggatacagagggacagaggcctactgtacatggcacatggtaggtattcaaagatatttggcaaataaatgaatcaattaattgatcagagtaacaacaataagttctttgaatccaacatttgcccaacactttttcctttcttcctcctggtcacaagctt

SEQ ID NO: 197460 - DNA, 1000 bp, Homo Sapiens
aaggaaacaccatcctcccggtatagaaggtccataccccagattttatgcaagtcactgcctcctagggtctgtttccccatcttccgaataaggagtttggacttgactgattgacaatcagtggcagatacttcattatcttggtcaattagagcccttaatacatttctgctctcaggcaatgagaggaaattagtctagacaagacagataaaagggaaaaggatggttggacttgatcagaattcctaagggaggttgtaacattgttttcctgaggatcttggtgatcagagcagaccctgctggtctgtgatggagcaatgaggagggtgaaccccaagctgagacttaaccccttcccatctgcccaccttcctttccccttcccaagaggctatggtgagcaaatggctttgattcagaggggcctgattcatcaagcctgatccaagctcgagggttctgatttgtcctgagcacacagtagagttccatccagtgggaatgggtgggatattatcctacctgcctgcctctcagccaggggcagtgctatagtgcaccagtcaggatggtggcaacccagaggtgtgcgcttcatgcagaatggacacaccaagtgttgtggacagctgcaaaaagcaccaccaaggctacacctttgatgggcattgtgtgagcaagacccggtggagaaggaaattgaagggaaagaaatttcacaggctgaacttttccccctgcaggggctctctgttcccattcagaggagtgctcaaactgtctctccacggcacttgggtcaaggccacaggctcttccaggactgtggaggagtcccatcttggtgggtcaaaggaaggcagctggtctggagaaggcacacccgatgttgacaagggggcactgaggacctgctggggcttcctagcatggctctggagtcaggaggaatgtgggttaatcccaggctccatttctggctgtgaagctt

SEQ ID NO: 197461 - DNA, 1000 bp, Homo Sapiens
gtgtgtgtgtgtaagatgagaacacttaagatctaccctctaaacaaatttcaggtataaaatacaatagtgttaactatagtcaccgtgctgtacattccatctccagaacttactcatcttgagtaaccggaaatttacactcatgaccagcatccccccatccccccacttctccctccctccagccctggaaaccaccattcgactctcttctatgagtctgactattttagattccacatataagtgagagcatgcagtatttatcttcctgtggctagcttatttcacttgcaaatggactttatgaagctagtattatcctgataccaaaaccagaagaagacagtacaacaaaactgtaaaacagcatctttcttgaatactgatgcagaaatcattaataaaacattactaatacatcaataatagatgaaaaaattatatgatggacaattgatgtctccagagatatgaggctggttcaatgtttgaaaaatcaatcaaagaacaaagtaggaagaattaatttatatgatttaataacttatacagctatagtaaacaagggtgtgtgatattagcagagtgcagaccaatggaacaaggtagagaacccatgacaagaaccacacaaatatgcccacctaatttgtcacaaaaatgcaaaagaaattcaacgcagaaaagatagcctcttcagagaagagcaactggacattcacaggcacatacacacaaaatgaaccttaacctaaacttcacaaaccttaatcacaatttaactcaaatgtaccagggacttaaatgcaaaatgtaaaactataaaactttaagaaaaatataggaaaaagtcagccgggcacagtggctcaagcctgtaatcccagcactttgggaggccgaggcaggtggatcacgaggtcaggaggtcaagaccatccaggctaacacggcgaaaccccgtctctactaaaaatacaaaaaattagccagg

SEQ ID NO: 197462 - DNA, 1000 bp, Homo Sapiens
gctgggaccacagggcgtgtgccaccgtgcccagctaatttttaatttttttgtagaaatgggggcctcgttatgtttcccaggctggtctcaaactcaagcgatcctcccgcctcatcctcccaaagtgctgggattacaggcacgagctactgtgcccggctgttgcaattttattttattttatttatttatttgagacagagtcttgctctgtcatccaggctggagtgcaatggcgtgatcttggctcactgcaacctctgcctcccaggttcaagcgattctcctgactcagactcctgattagctgggactacaggcactcaccaccacacccagctaatttttgtatttttagtagagacagggtttcaccatgttggtcaggctggtctcgatctcctgatctcaggtgatccacccacctcggccttccaaagtgctgggattacaggcatgagccactgtgcccggctgttgcaattttcaacaggatgatcaggaaaggccatctcccctggagaagatgacatttcagcaaacccctgtgaatttgagagaggagcacgcaggtgttcagttcaggagagttagaagagcatcctgggcagggtcacagcccgtgcaaaggccctggggctggaccgtgcctatatgtttgaataacggtggcagctgcatcgaggaagcgggttgtgagctggtgaggagagtgggaggaggtgagagcagggaggtgccgggaacagactgtgcaggactcgccttgtactttaaacacacaactgctccccaaatggggccgcccctctgcccagccttcactcccagaagccactagggggcgttctggggcagggtcggccaaccatggtcaggcccccgcctgcctttgtacagctggtgagctaagaatggtgtttacatttttaaaggactgaagagaagaagagaaaagagaacaggccacagaacccgtctgcggcccgcaaagctt

SEQ ID NO: 197463 - DNA, 1000 bp, Homo Sapiens
gaggagaaacacattcatggattcctgcagcagaaggcaggctctgaaaagtactaagcacagttccatccacagggctgctggagtacagaggatagggagatgacttctccccctcaggagatggggagctctgagagcttcatggagagactcattcatctgccacttgtttggggagctcctactctatgccagacactgaaagtgctcagggacaatggagaggggcattctaagctgaggcaggtgtctgtgcagagtggccacatccagcagctgtgtgctggaggggagggctgtgggctagaaaggtgatggggtggggaaggcaaatcttagtagagttttcatgcaaagaattggatggggaaaagctgagctggagactgtgacacacaggaaacagtgtgtgatattaggagtattgaaattgctcccaaggtgggacccaacagcaattcagctctcatgttgacatctgagagcaagatctggaagcagttgggtgttctttcttgtatcaactccagtcttccaaattctaaaatcaaagtttgcatttggaggtttatccaaacctctgtggaacctatttatgctttcagccggtagctccttttacaggctcttgagtgttgtggttcagagtccaggccctggagctgaactgtcagagttcaatgcttgctattagccgtgtggccctagacaagctactttacctctccgtgccttggcttctttatttttaaaatgagtataattatacctcctctgtagggttgttgtgaggattgaatgagatcatgcatggagagtgctccaaacaggtacatcctaaatactcatgagaagatggctgctggaagtagtaatagtaacaccggcttgagacatttactccttactgtgtagaaacgaccttctgtctctgtcatcaacttctagtacactccagagatcagtcccaagatctgccattgtatgagcaaagctt

SEQ ID NO: 197464 - DNA, 1000 bp, Homo Sapiens
aaatgacctaaaactctacctttctgtgcaacacataccatgttctttacagagttaacattctaatataaaacataattgtttaacgagttttagttataggtgggggataataaaactcccattttcctttcctaccacagtgcccaaacactgtcttctttattccattactccagggtgaaactgtagtggtgaaaaggtaccctgaccagtctgctgacagatcactctcatggccaagagtggaatttcttaaagtagatataataataagagttttggaaataatgtatttgaaaatatgaaagttgcccagaaacatgagattattcccggcagcctaaaaaaaagaaacagaattggcctttgtgttaccactgtgcaaaaccatggtcagccgccaaagaactcagctgaagatggtaagaagaaatcgacaaagaaaattttaataagggattttaaaaaaaaggaagaaaagaaaaataaaaacctgttcaatctcctgccttccacctgcactgatccccacaagagaaggagtagatgatactgaaacaaagtgatttcactgccagttcatagttctggggaaagatgagttagaaaggatcacctgaattggaggtagagtcatctgtagatttcaaatatctgcttcacttttgttccatgttactgtaaataattatcaagtgacagtaaagatttataaaagcatttaaaacaatgaataaggagagttggtggagttataaggtggttttcttggttcatgaacttgtttgcaaaagacgcatggccttatacttaaacatgatataaaggtccaacaaagctattacaatctaataataaaattatacaatgtttctttcctctatagctaatgcaggctttacttaaaaacaaacaaacaaacaaacaaaaaaaaacagtatcagtttccaaaaggaacttaccttccattcttgtcagacattcaggaaccaagctt

SEQ ID NO: 197465 - DNA, 1000 bp, Homo Sapiens
atgtgcagaagtccacgcattaaaaaagttttccataaactcctatggaataaaaacaaccctggatcgacagggtttattcttcaatattaaaaataaattatattgatgacattgttaatgaaaatttacaagccacaaattatgatttcagaggaggtgatttacaacctttttgccttggactcatgaattttactgagttgtgactataattatagctgcagaataatgcagcttatcctattagagcattttatacatgttaaaagacaaaaatctgtaatccaccaataagaattttagaggatatatcaatataaaatatccctctatgatgtaagttataatgattacaaaaccaaaccaaaccttattgggtcacagttctgaataagattgcatatccgtaatatcctcctatggcactcaagaaaaaactaggacttgaattttattgtaagtatagggaactttgggtaaattaaatcagttacaccttaggtagtatttgctacctacaaatcaattcagctacattaagtaaaaggaatgtgaatatgatacaaataacagccttgactgacttttccatttccaactctttcttaggatagttattaaaggagcctacttctcagcaagaaagtaaggaatcttagatccttaagatcattaagttatggtaaaggtttggttaattatttcatggagatagaaagtaacagatgtcctattttaaagtagctaagtgtaagaaatgcttaagatatacctataccagaaagagtttgagaaattaggagtatagaaagaacaattgaaactaatatcaattgcttttctctttccaaactaagatatctggcatatatgttggtatggtaaaaatttcacacaattaataaatatttatccatcgagccagacactgacactgtggatatacctgcaaacaacaacaatgacaaaaacataaaattctgacctcatgaagctt

SEQ ID NO: 197466 - DNA, 1000 bp, Homo Sapiens
ttgaattaactgacactaagtttagtatatttaagagctcagtaatgggctgggcgcagtggctcacgcctgtaatcccagcactttgggaggccaaggtgggcagatcacctgaggtcaggagttcaagaccagcctggctaacatggtgaaagcccgtctctattaaaaatacaaaaaattagctgggtgtggtggcaggtgcctgtaattccagctactcgggaggctgaggcaggagaaacgcttgaacccaggaggcggaggttgcagtgagctgagatagcaccactgcactccagcctgggcgacaagagcaaaactctgtctcaaaaaaaaaaaaaaaaaaaaaagctcagtaacatgagacaaaggcatctacaagacatggctttggagacaaagaataaattgataaattggaaggaaaagaatataacaattcctcagtcctttctggagtccacattctagtggctttcagctctacactgtatcaggcctcctacaaggcttaccaggcagactgggcagaaattattgacccccattcaacagctggggaaggtcatgcctcagagaggtgaacctacttcagctgaagttacccagccaggtggtggcaaagcatgtccaaagaaagttagggaccagagacgtcagatccaacccctccctcttgcaggggatggggtaggggtggtaatctgcagactctgaactaagtgttctagctcatttcaaactcagaataaccatttgaggtaaacagtagccatagccacaaaaaaagtagacacatgatttgcccatcatccaccttccccctctaacccaattgtccctgggcagaccgtgcagagtaccaccccattcgtcctcaaggactccctgcctggggtcaactcatgagaaactgtccacccgcagattgactgggacagaaaaaaccctagacttttaatttccttatttcacagttggagacaatccaaagctt

SEQ ID NO: 197467 - DNA, 1000 bp, Homo Sapiens
gtgaaaccctgtctctactaaaaatacaaaaaaaattagcctggtgtggtggcgggtgcctgtagtcccagctacctgggaggctgaggtgggagaatggtgtgaaccagggaggcggagcttgcagtgagccgagttggcaccactgcactccagcctgggtgacagagcaagactctgtctcaaaaaaaaaaagaattaccacagatgaatggataagcaaaatgtggtatacacatataatgggattttttcagccttaaaaaagaaattctgacacattctacaacatgaatgaactctgaagacatgctaagtgaaacaagctaattacaaaaggacaaatactgttatggctccacgtacattaagtacccacagtagtcaaattcatagacagaaagtaaaatgatagttgtcagaggctgagggaaggaggaataagtttttgtttaatgggtacagtttctgaagatggtaacaattgcccaacaatgtgaatgtacttaatgtgactgaactgcacatttgaaaataattaaaatggggccaggcgcagtggctcacgcctgtaataccagcacttagggaggctgaggtgggtggatcacttgaggccaggagttggagattagtctggccaatatggtgaaactctgtctctaccaaaaatacaaaaattagccaggcgtggtggcgggcgtctgtaatcccagctactggggaggctgaggctggagaattgcttgaatccaggaggcaaaggttgcagtgacctgagatcacgccacagcactccaggctgggcaacagagcgagactccgtctcaaaaaaaaaaaaaaaaaccacaaaaacaaaacaaaacaaaacgggttaatggcctctctgtagtcactgaatcccaatagaccatacctgggttcagtaatttatatttctaaaaagatcccaagacttagaaatcactgatgtatatcatcaaacacattggtcaagctt

SEQ ID NO: 197468 - DNA, 1000 bp, Homo Sapiens
ttaaaatgcaatttaacaaatgtaaaaaacaacaaactgatggcatgaaaaatatcacctgaagtgcatcccattatctgaatgttagccaaaacaaatcaacatgtctttcagcacatgttaagggttaaagattatttaaaacataatgtattcttttgaaaattataattgattttacagttcaactttacaaaatgtatgtggaaataatcatttcataacttttaaatctgaagatgcaaaacagcctgcagaatatttagtgggttgcaagggactatgagctccttagatgactgagcaaaactggaccagataatggcaatggcccaaataaagaagctgaaagagcagaagcaagaaaggatatgaaaagataatcatagaatttgttggctgattgactgcaaataactaaggaatgatgaaagaaaaaaactgggagaatggtgttgccaaagacaaaaactgggatttcagaaaagagaataaatttagttttagataaggtgattttaatataatgttggagcaggtcagtggaaattcccaagtgccattcataccagccatacagtcagagttcataaaaagaggttatcactcaggtaaagtctgctaatagggattctattttataaaataaaatttgaataaaagatgcttgaagttatgagagtaggtaaacccttcaaaggagaagctttaaatagagaagatcttggcaaaaatgaatagaggtgattatcaaaggcggagaagaaaaaattcactgagatttcaataaatctagtttgatacagagttgcaggaatcaactaaattttttgtctaaaatgcacattcactagacagcaagttgctgtgtctgaattctgcacacatctttccaataattattttttcttatcctttcattgcgttcctttcaattacatgcttattttgatatttcagcatttgggggtctccctttgtaggagaacaataaaagctt

SEQ ID NO: 197469 - DNA, 1000 bp, Homo Sapiens
tttaaaagatatgcaatcttttttcctcttaaaaattttggaagggaattttatataaaggtaatatattaaatcgtaaaaattccaacattacagggaagtataaaatgtaaaataagaatctctcaaccttagtccttctacccaatttcttgtgtatccttctagaaaatagtttgtattgactaacatataaagtatgttatatgtgttgactaacctacaaccttaaaatttttatttatgagatcacactttgtatgctcatttgcatgttgctggttctcagtattttcaaaagctttgcatagaaacacatctaggacaagcttattctttttaatgactacagagtattcctttttgtgaatgttcataaaaattagattacattctttattttactgttacaagactgaagtctgtttttcaaatatacctaattcagctaatcaatttttctatttttaaaatgaataagaatattgccaaatattacaaacaaatacttttaaactaataacttccatgaaaatggtttgttctcaaacataaatcagtcagagaaacttagaattttctgtattttactgtgtatgatggatgagaaatactctggataacagggaatccatggtcataaggtactttttatcatgtggaacacttaacttgggtttcctgaaagattatatcatgctgtccttaaatgtccaatacatacttacaaattttgctgttaactcaaggcttctaatttaataattgagacaagtgtacctgcttctgtttttgaattttacttgtacttatttaattttagttgtctttgacattactatcacttcctctcatcctagcctcttgatttcttatctcctaggaaacttaccacccagcacagtgcactgcatgtaagaacttgattaatcttactagggtgctatttgaattagaaattgtggctggaaattgtgattgttcttttttaaccttacaa

SEQ ID NO: 197470 - DNA, 1000 bp, Homo Sapiens
ttactagaccacagtgttattaagggcaagatacagggacacataagaataatgccaacacttcactgaagagtcatggccaatttccagatctgagcctgtcctttgacccagaacctgttgactggagaggctggtttgaggaaggagcctgctatactatggcaagtgcatatgataacagttcccccagtctttactcaaagggatctgtggccacttacttgggtaactgttcaatgggaaaaagggcaatcctagatatttccaggactcttgggcatagtccaatctccactggtattcaggaagttttgtttcatccaggccccttgctgaagtgggagcttatgaagagtaagaaataagaagtccagacctagttgatttcacaagggattctttggctccatggatccacctggtggtcatttattcagtctctggatgtataattgaaatccgtagtagtcagcagaatcttctcattagttccttggtttgtagggccaaccagtatggtctgtagtgaagagggctacatagaagcctctgaaactttcttaccatggccaagagaataaattaaaaaaaaaaatcacatccaggggaatggccaagaaatctggcactctaaacatgctcaacactacaagtggtccccatcatgtccccatttaattatctctctgtcccccttcagaaccaggggtcctgataattgacagtggatctccatgaagtcaagtaattacttaatatatctattaccactaccaaatgtccaacctgccagcaacagaaaccaacactgagctcttcaacaaacacagtccccagaggagactaaccagccacttgctagcaacttgatcacatcagattcctttcaatctggaaatggcagtaattgattttgactggaattgacacatattccagagatggctttacctttcctacccacagggactcaggcagcatgaccacctgtaagctt

SEQ ID NO: 197471 - DNA, 1000 bp, Homo Sapiens
ggtttatttacatttggatgagggaggtagaataagtcacatgaaaacaaaataaaatgaaacatggaagagggaaagggagacaaggatggtccaggcctgggatggacagactttacagtaaccagtttaggagctgagagagctacttcaggcacctgtaaggcagaaatattgagaaagaaagggaatgagggttttaagaagtgttcctacgggttgtgaattggactgctttgacattctttgagacccaacagtatagattcaaattctcttcaataatttttggatgcgtgtctctgtgaatgtgacctaggtgtctgagctgaaccagatgggattctggggtggttttgttttgctttgttttcaactattttatttttaattctggtaagaaatacataacataaaatgtgccatcttactcatttgtaagtgcacagtgcagtggtgttgagtatatttacattgttgtgcaaccaatagccagaatttttcatcttgcaaaactaaaaccttatacctattaaatacaacatcccatttaccccatccccagcccctggcaactaccattctactttctgtttctatcaatgtgaccactttagatattttatataaatgaagtcatatagtatttgtcttcctacgactggtttatttcacttagcataatgtcctcagaatgtctttccttttggagactgaataatattccattgtgtgtatatatggggtcctggtatatattggttccattaaaaagggctttacatttatatcaagtagtaaaataaatcaacttagtccttaatttctccttgtcaagtccctagctgctgcgccaatgaccctaagaattaaaatgccataccatatataatttattcacctttgaagaggccagtcagctatataatggatctctaacaagcatattttaagattaaaataaatcactgaaagtactctcaataaaaatataaagctt

SEQ ID NO: 197472 - DNA, 1000 bp, Homo Sapiens
aaagtcttataagagaaacccacagataacatcatatcgaatgagtaaaggtcaaaagactttcctctaagaactggaacaagacaaggacatctactttttacactcttgttatagcatagtatttggatgaaaatagacacatagaccaatggaacagaatagagaacccagttataaatccacatactttcaggcaactgattttagaaaatgcaccaagaacatattttgagaaaaggacatcctcttcaataaatagtgttgggaaaactgaatatccatatgcagaagaatgaaactacacccttatctctcactatatataaaaattaactcaaaatgcattaaatttaaatgtaagacccaaaactatgaaactactagaagaaaacagaggagaaacacttcaggacattggtctcagcaaagattttatgactaaaacttcaaaaacacaggcagcaaaagaaaaaatatacaaataggactatattgagctgcaaagcttctgcccagcaaagaaaacaataaagagacaacttgtaaaatgtgagaaaatatttccaaattattcatcatacaagagactaatattcagaataaacaaggaattcaaacaactcaacagcaaataacagaatccaattaaaaagtgggcaaaagaactgaatagacatttctcaaaagaagacctacaaatggccaagatacataaaaaaatgctcagcatcactaatcatcagagaaatgcaaagcaaagccacaatgagatatcatcttatcccaattagaatggttattatcaaaaagacaaaaaaaaaatgctggtgaggatagggagaaaagggattcttacacactgttgctaggagtgtaaattagtatagccattatggaaaacagtatggatgttcctcaaaaaaacaaaaatagaactaacatgcaattcagaaattctactactgggtatttatccaaaggaaaggaaatcagtgta

SEQ ID NO: 197473 - DNA, 1000 bp, Homo Sapiens
cttctcatggactacatatcttccccgatttgtttactcctcctcaacagttgaatggctctgttttccatcaacgatgacagcttttaatcacagatctcaagcccattatgaacattaattaatgtctgacatcgcttaatgaggtaggtaaaaactattactgtttcatagatgggaaaatcaggtttaggcaagtttggtggcttgttcttaggcaacccaagaaattgtggctcatttccaaaatccaatgcttattctcctcacaggcaaatgatgtttttttttctttcacagtataccaatctgttgcaaaacctattttgcaaaaaatagattattgatataggcgtggaaataatctttcttaaggcagaaacatttgatggtatcaatattcatactgcttcaacccaacaatgtattggttgggttttctctgaaaaataatagatgtcttggttggagggaaaaagcccctgctcaaataaaccattaaaaccactatccattgttttgaatacaataaaagtcgattttaaaagaagagaaaaaacccactacccattttgaaataaagcagttagtttcttcttgtatttagaaactctacccagtaagagtcggagaggaacaaagtgaacattagttatcaaaatgcattgacttaccttttgctcttaagacaccacacacagtcggtaagtacttttgtctttttgtggtaactttgttttctatggactcatgttgctttgatcaatggtatttgtgtgcctcgtcttaatctaacttttttgttgtttgaccagtccatctggcttgacaggctaatgtgaaaaatttgaaaattgtttgtgatttgtctttttaaatagcatttgctcttctcttgttgttttgctaaatcctcacttgcctggcaaataaggcaaacagaaggaatatgatttggaatagttgaataaataaatatttgagagagaaaggaaagctt

SEQ ID NO: 197474 - DNA, 1000 bp, Homo Sapiens
cagatgccctgtcctcaagggcctactgtctcatctaattttaagccataaaaagcagccagccatggtcatgtcctcgggtaattttgaacttgttaaattcaattagtttaggctgatgatgccaggatgagctagccagacctccgcttcccttggactgccaattaaagatttcactcgtaagcagcccctctgatagagaaaagacagaggctgaaaatggagatgaagcttaaagacattagatctgtgccaaaccctatgggagagaacaggctctaagaacccccgccctagagggatggttggcgttctcgctgctcttctggctctgtcgtggcccatccacactccactgcttctgtagtaagaccatatggcacagagtttttatagtctataaaaattagaaccatagaaatgagttggactgtgctacctgcggttacttatgcccaaaagccactaggtttgacacaagacaggaaatttcgcgtttttaatggagttgttctgccaccttgtggtaaatgtttaaaactgcagttggcgatttatccattatttctgcatttgagtcagatttcattttttaatattctttcagaaatttgttccaaccttaccttgtagaggaagctaatgacaaaatatccattatacaccttttaaaagtttgatttcaagtgatcctgccctttacctgggtttattaatgtattaatctttcaaaatgccttattaagcaaaaaattttgcagatagcttaatccaaagaagaacccagacacttaacctcaattatctacctgtagctgaattggagtggaagagggagactttaggggtaggagccacccaactttgcgttcaagattaaattattactgtccaattcactctctcttttctattaacacagttggacaccacaaacttcacacttaaaagtgatgaaaagcaggaacattttaagaagcaatacattagaaagctt

SEQ ID NO: 197475 - DNA, 1000 bp, Homo Sapiens
gtgaaaccctgtctctaaaaaatcaaaacagaacaaaaaccaaatgtgttcccttcagacatggaaaacacaaagtggggtatactgcctgccttctgtgcttcctctgatccacctagactgtggcttccacccactctcaaaagacatcagggaggggaaaagatgaaaagaaaaacccactagaaagctagtgacagacatcactcagccccacacctttgggggggaaactttaaaaaacataaaacaaaccacaaagtcttctttattcctgcctgaagctgaagacacaaatgctattgtattgctggtgttctagcatcccattcaatcattgcaacaccatccacgatatttcccaagatgacttcattgtgttctgcagggtagtaactgccgcttccaactacttctgccccatgtggatagttccactggaagacaaagaatctgttctgctctgatatttggaagaaaaacatttaaataagccttgttaactcagcaggagggcactgctttcctttcaaaatgtagggttcaaatccgatgaaggggtggcagtgtgctttcttcgtgggaggggcccaactctaagaagaaaactggagccttaagagaaaaagttggctgggcgtggtgactcacacctgtaatcccaagactttgggaggctgagaccagactgggcaacacagcaaaaccccatctctacaaaaacacaaaaatcagtcaggcgtggtggtgtgcacctctagtcccagctacttgggaagctgaggtggggggatggcttgagcccgaggtcaaagcttcagtgagccaagattgttccactgcactccagccttggtaaaaagagtgacaccctgtctcaaaaaaaaggaacaaaggcaagaaaaacgaagaaagaaaaaagttgtgtgaggaacaaatgataaacccacatttcttacagctagccctctgtatccatgggttctctatctgtgaattc

SEQ ID NO: 197476 - DNA, 1000 bp, Homo Sapiens
tcacacctgtgatcccagtgctttgggaggctagggtgggaggatcacttgagctgaggagttaagagaccagcctgggcaacgtagaaagacctcatctctaaaaaaaaaaaaaaaaaaaaaaaaaaggcagaggggaggggggcgggcgtggtgtctcacgcctgtaacccctgcactttgggaggccaaggcaggcaaatcacctgaggtcgggagtttgagaccagcctgaccaacatggagaagccccgtctctactaaaaatacaaaaaattagccaggcatgatggcacatgcctataatcccagctactcgggaggctgaggcaggagaatcacttgaacccaggaggcaaagtttgccgagatggagccattgcactccagcctgggcaacaagagggaaactccacccaaaaaaaaaaaaaaggcgagggggaggagggagacttaaaaaaatgaaaaataaaaaaagttttttttggccaggcactgtggctcacgcctgtaatcccagtactttggaaggccgaggtgagcggattgcctgaggtcaggagttcgagaccagtctggccaacatggtgaaaccccgtgtctactacaaatagaaaacaaattcgcctgatgtgttagtgcaggcctgtagtcccaggtactcaggaggctgagacgggagaatcgcttgaacccgggaggcagaggttgcagtgagccgagattgcaccactgcactccagccaggtagacagagcaaggctccgtctcaaaaataaataaataaataaataaataaataaataatgtttttgagatagtctcaaaagggtgttcaggcccttatgtgttccccccactcacacacacacacacacacacacacacacacacacacacacacaggatctgggctgacctggactccactgaatccacagaatacagcatcggcaacattgacccagcagtctctctgctttgtgtgttggggaacccc

SEQ ID NO: 197477 - DNA, 1000 bp, Homo Sapiens
agctcctctcacctacttaagcacattgttccagcaattcctttttctctattcatcttcaaatttccctttctactgaatctttaacatcagcctgccaacatatatccatctttctgaaactttgtcagttatgactttctccttcagttaccacccatttctttccttcttttttttttttttttttgagacaaagtttcactcttgttgcccaggctggagtgccatggcaccatctcagctcaccgcaacctccacctcccaggttcaagcgattctcctgcctcagcctcctgagtagctgggattacaggcatgcgcaactacgcccggttaattttttgtgtttttagtagagacggggtttctgcatgttggtctgactggtctcgaactcccgacctcaggtgatccgcccacctcggtctccaaagtgctgggattacaggcgtgagtcaccgtgcccaggtctctccttctcttatagctaaactttttgaaagagttgtctatgctttctattacttccacccacccccgcctataaataatgacatcatacaacttatgtattaacaagatcactttggctgctccattgagaacagactaaaaagaacaagagtagaggtagagagagaagttaggagagtaccacagtaacacaggtgagagatgatggtacagaacataatggaagcagtggtgatagtaaaaagttctctgggccgagtgcgatggctcatgcctgtaatcccagcctttggtaggccgaggcaggcggatcacaaggtcaagagatagagaccatcctggccaacatggtgaaaccctgtcactactaaaaatacaaaaattagctgggcatggtggcacgtgcctgtactcaggaggctgagtcaagagaatcgcttgaagcagggagaggcataggttgcagagagttgagattgtgccactgcactccagcctgggtgacagagtgagactccatctc

SEQ ID NO: 197478 - DNA, 1000 bp, Homo Sapiens
gctgtagaaatgggatctgagcaaatgcttttctcatgaacacatgggctctgctaaaccaaggttccaagtcaatccagcccatccttcaacatctgtagagaatattatggaccagagggaattgagggagacacttacttagaagctcacagatcaccattttttcagatgatatgaggaaagaaaatggaataggctacttgaactaaattttcatgttagggtaaggaaaaaaggtccttgatatctttatcaagtacacactgaaacaacctaaaattatatatcacgtagtagaaaacgttttcgatatatgataaagactagaaagcacacagacctcaatgtaaactgaacacaatctcatagagaaacaattttaaaatggttaaaaaatatagatctaatgaaatcttgggtcaaaggagaaatatttgaaaatataccatactttgaaaacaatgaggccaggcatggtgacacgcctataatcccagcactttgggaggccagggcatgatcacaaggttaggagttcgagaccagcctggccaacatggagaaaccatgtctctactaaaaatacaaaaattagcaggaaatggttgtgcacacctgtcgccccagctactctggaggctgaggcaggagaatcccttaaccccaggagatgaaggttgcagtgagacgagatcatgccactgcacaccagcctgggtgacagagtctcaataaataaaaatatatatctaaacattagccaggcctggtggggcgtgcctgtggtcccagggaatccagaggctgaggtgggaaaatcacttgagcccaggaggttgccgctgcactgagctgtgatcctgccactgcactccagcctggacagcagtaagagtgtctcaaaaaaacagaaattaaaggcccggcagctgctcatgcctgtaatcccagcaccttgggaggctgaggtgggaggatcacctgaggtcaggaattc

SEQ ID NO: 197479 - DNA, 1000 bp, Homo Sapiens
gctccggcgacgggccaccggggggcggcgggctgggcgggagcccgtgctccagcaggaaggcgtccaggtctacgtactccacatcgccgaacggcagcgtgcgctcccacagcagtggcgccaacagacccggggcgggcaccggccccgggcgcccccgcggggaccctccgcccaccactgccccagccggggcatccgccgggcccgcagtctccaggcctggcccaggggttgtggctgcaggcagggccgccttgcgctccttttccttcaggagacctgcgggccgggaaagacgggttgggatgagggtgaggtgggggagatagagatggagaagagaccccgagtccgagaggcacagggcggagatccagagaaagaggggacggggggtcggagaggagagacgggagaaaaagggacggagacgcagagtgggagagagacccagaaagaatggagacgggggtggcagagacaggtggacagattcacagagatggggacagaatgccgggaaggaatagacacacagaaagacagcgaaccagagaaagagagacggaagttcaggaataggggggcagggacagggtaggtggagggttgggcaggtgagagaaaaaatgacagctctgtaatttcactgtaattacccaacccccatcccctgcgcgctgtacccccttcccctcccccaccatctgtaaggggcaggaaggggctctattcctggggcacatccctcatccctagactccatgtgaccccatgacgccccgcccaagcccgtgtcaccaccgtgtgagcacccgacacaccccctccctgggaccccaggggtccagactcccggaccaaaaggaagaggaggctggggcctacactcttgtgaactaagcggggaggacgttggggacgttggtgcctgggtccttagggtggacgggcttcagagccggcgcttttgggtcctgggcgctaagggatc

SEQ ID NO: 197480 - DNA, 1000 bp, Homo Sapiens
tatgaatcatggaaggtggaagcaacccctatgtccatcaacagaggagtggattatcaaaacacggtccgtccacacaatggaatattcctcagccacagagaggaatgaagcgctgccacacgcaactacatggatgaacctcggaaacaggatgctgagtgaaagaagccaggcatgaagaccatgtactgtcagctgccattggtataaatgtctaaaaaaggcaaacccatacagacagaaagcagactcgtggttacacagagctggagatgggaacaggaaatgatagagacgttctaaaattgggattgtggtaatgggtgcacaactccacaaattcacgaaaaagtactgaaaaagtacacttaggatgacttgattttgaggtacatacatcatacctcaatcaagttctttttaaaaaggcccgtaaggtgatcaacattatttccattttaaaggtgaggaaacaaaggctggaaattacaatgcttgtccgaagtcagacaaccagaaggtccagttgatgccaaagctggcgtcttgaaagagccaccatctccttttggggtgatgaaaaagttttggaaccagacagaggtagggcttgcacaacactgtgaatgttctgaaagccactgaattgtacactttaaaatggttcaggccaggtgcggtggctcacgcccgtcatcccagcactttggaggccgaggcaggcagatcacctgaggtcaggagttcgagaccagcctggccaacatggcggaaccccatctctactaaaactacaaaaatcagccgggcgtggtggcgggcgcctgcaatcccagctactggggaggctgaggcaggagaatcgcttgaacccgggaggcggacgttgcagtgagccaagatcgcgccactgcactccagcctgggcgacagggtgagatctgtctcaaaataaataaataaacataaaaaggttcattttatgttaaatgaattc

SEQ ID NO: 197481 - DNA, 1000 bp, Homo Sapiens
tttttctacacagaaggcatcagcgagtgacagtattctcacagccatcagtttttttttttttttttttagctgtacctacgcttttctaacaagtcacaagggagcgtcaggagggcagagggccgggagcagggctgccagggatattcctgtgatgagggacgtggcgacatcagcggtgatggcagccactggccatgtgtcactctgcacacttgaaacgtggccaatgcaatggaggaactcagttaatttgattttaatttaaacagccccacgtgggccgggcatggtggctcatgcctgtaatcccagcactttgggaggctgagaagggtggatcacttgaggtcaggaatttgagaccaacctggctaacacagcaaaactccatttctacttaaaatacaaaaattagctgggcatggtggcgcacgtctgaaatcccagctgctcgggaggctgaggcaggagaattgcttgaactcgggaggtggaagttgcagtaagccgagatcgcaccactgcactccagcctgggcgacaaagggagactctatcttaaataaataaataaatggccccacatgactggggactgagctgctggctaaaagcagggtctctggaacaggtggcctgggtcagatgctggttctaccactgagcagcagtgtggctgcgccaactccccatctccaaaatggggtcatgatggaagcttgctcagagctctgtggccagaagttcaggagatgatggttggggtcacaccttggtaagatgacgaaaccgaggcctcagaaagtctgcaagggcccatgtctaggaggacctgggcatgttctgctggggtcctgtgcctgagttgagtgctcccatctgtgtccccatcacccccaccaatcccactgggctcacgttaatgaatcaggttatctgccgctcccgcaacgccgagccctgcaggaaagcccccgtttttctcatggaattc

SEQ ID NO: 197482 - DNA, 1000 bp, Homo Sapiens
gaagaataagagataatttcaggccttggagagcaccagggaagggagtgagggaaactggagactctcactagggtaggttggggtaacagagtcttcactgagtttgacttatcttacacttcccatgttgatgaaatacatattccgaggtctcaagccctctgattcatttgatacaagactcttctcgtatcttccaggaaccttttgtaccctatacttttgagctttaaagttattatggacatgctattgtcatggtagtatagttctagactcccagctatgaagattcaagggatagttgatgttttatttttttccagatccaggttagcaccaaccacgtatcctcatggtgggattattgattaccactctcagatgagagtctgatcctagaggacagaatttgcatctagatctaggatcaccttgagattactgtcctcctatcttctctggccttgtctacttgttgtcatcaatatctttttggaaaatacttagttctcaaatgttgcacattaaggggaaaatgtcaaaagaggtagaccgttttccccttcctgcttactgcattcttccttctttcctctctccattcttgtctttcttctttctttttttcctgcccttccaaaataatgatattagttatggtttccctatagttaatgctataatgtgtggtttagacgaggggaatgatgtcaagtttatcagcaatgaaataatttttaggaaaatatttctgactcatctgatagaaatttaagagcaagtgacaagataccatcttctcaatattgtgaaatcttccttaggtcctgcatagttagtatgaaatcaaatactgactaggatagattttggtggtcacgactcctttgtcatttgtgggtgtaggttggaggtgcaggataagtgaggcttctggatttctgaaagacttcttttctaatctcataaggaatctcaaaggtacacagaattc

SEQ ID NO: 197483 - DNA, 1000 bp, Homo Sapiens
tatcaactgtctccaaaattatctcattatgcagaaagtagtttttttcattcatacagtttcagtagtcgcctccctaactgcaaaagcaatctcatttagttgcatagctcctaaaagcagctgagttagaagtatgtgtgttacacccccacataggtgtgatttgtggggcagttcaacacaaatataacaatgtatttttgtgaatgagttgccatgttaaatgcatcctctagaaaaatagtgttatagtgttacgatttgctttttaaggttgatactgtgggttattttgttaacagcctgatgtttgggacctatttttctcaaaataaacaagtctttattaaaccagaaatttgggggaaaaaaacagtgtcttccctacatttcctaccttaacacgtaagttattctcctctcagttttgattcaccagaggattgaatcatatatcctgaagaatcaaaaccgaataatatatctgttaaggcaatgcaggttgtacactaaaatttcacatgcttagaataatatattttttgctcacatccccatcgtctgtgaactttttttttttgagatggagtctcgctctgtctcccaggctggagtgcagtggcactaggtctagttgaatctgctcaacctgttaatcagtgtcaggtgccagattccaattcactatcagtgtgcctgtatgactcttctttccatagtcattgaattaaattattacttatttgaatgttatataatacagctcatacatttcaaatgaaaccaccaggtaaaatgagttgtggcttagtataaagaagctgttagcaacttagtattatatatagatggatgcggctcaacaagaatttagacaaaaataatgaactataatgtgttgccatgacttagtctctaatgagcttataaataaatccatatttcagcacacatatagttttgttcagtacctctaaaggtggtaaatcaagaattc

SEQ ID NO: 197484 - DNA, 1000 bp, Homo Sapiens
gatgcggggacaaaagtttacacctctcttaatgagtacagccttatggacacaagacagtctggatcataacaggccactaagtaggctgtacagtcagatgcagcaggttctcaggagccagtcagccttgctgagcactggtagtggtatctactgcagtggtactctgaaacagcagtaccagaaggtactagagggagaaagcagaggcagagagtgtgcaagggccaccatcagaaatgatccaggcctcttggactgaatcctaataattcattcagtcattcagtaaatgtttgaattcctgctatatcaggccctgttctgatagctgggaatatagtcaacagtagacctcatccctgcttccatggaacacatattgagagagcttatattataattgggcccacagataaaccacttcattaaatactaagagaaagcttcactaaattagtctattatgcaaataattttaaagacaatttaagttttacttcaaacataattcagtctgggttaatattcgtatgcatttgcattctctgtccacagtaactcctgccttcaggaggcattctagaaggattcagctcttaaactgtgtgctgtggtggttacctacctgttcacaatgcttttgatgttgttccagtaaaagagtgatctgtagcgttttgttttcctcagtattaagcagacattaattgtcttcatttccattggcagagcttttatctcagttatcaggagtgagacgttctgcaggaggacagcttaattcctctggcccttccgcttctcagttacaacaactgcagatgcagctgcagctagaacggcagcatgcccaggcagcacggcaacaactggagaccgcacgcaacgcaacccggcgtactaacacaagcagtgtcaccactacaatcacacaatccacagcaacaaccaacatagctaatacagaaagcagtcagcagactctacagaattc

SEQ ID NO: 197485 - DNA, 1000 bp, Homo Sapiens
aattccagagctttttttttttttttttttgagacagagttttgctcttgttgcccaggctggagtgcagtggtaccatcttggctcgctgcaacctccgcctcccagcttcaagcaattctcctgcccctgcctcccgagggtggggagggattacaggcacccgccaccacatgaagctaattttcagatttttggtagagacagggtttcaccctgttggccaggccagtctcgaactcctgacctcaagtgatccacccgcctcggcctccccaagtgctgggattacaggtgtgaaccactgcacctggccagcaccatcttattaatacattcccaccagcgaggtctgcggttccagtttctcgccatccccgctgacactcgatgttttttctttggtggatgctcacatgcttctgcatgagcctttttccctcctttccccacgcctcagttctggagtcaccgtctctctgaagtctctcctgaccccatccaagtcggcctcccctctgctctccttgccccgctgccttctgggatggattactgctcagtatctgccacggtatctccggcttcctgagggctggtgtttggtaactttcttatgcatctctgtctccagcacctgggcctgtgttcgacggctcagtagacactagagtgcagggatggagatgacacaccacccagcatggctcagagtgaagtgatttcccccttccacatcctcatctgcctccaccccatgaaagtatttatagacagggaatcgtgggagtggagaactacgtacgtagcagggttgagtagagaaagatgggaaatgtccacagacgtcttttctttgctcccctttgcggtggggattctggagatgtcagggactgtggggattggctgcttggtaggcagacatgaatgatggggtatcaggactagattcagctgccctgaaagtgacagagccccacaatagtggcttgaattc

SEQ ID NO: 197486 - DNA, 1000 bp, Homo Sapiens
cttgagcccaggagtttgaggctacattgggccatgatcacaccactgcactccagcctgggcaacagaataaaaccttgtctctaaaaaatataaataaataaaaataaaaatttaaaaagtttttgttggataccagccacctataaggtgttccatatatgcaaagcctgtcagaatggccctaacacaaatgtctcccattttcccgaaattgctaaagcatttattgtctctatcaacaattctctagtcctcttccaaagtctttgtttgggatgtgtacatctttcttccagtttggttgtcatctgaaagaaagaaatccttgcctcttacttctagatttgcatgttacttaataaattctggttggcaagacttactgggacaaaactgatagtgacagctcagctggagaaaggctcttccaattaaaagttctgcagtgccttctgtcttggatcctatacaaataagtaactgtctttgtgttctcacggtgaatggctctgaaccagggctatgtaagagatggggacccttttgtctacccagctccttggctgacccccagcagacagggacacaatgctgaaagtgcttgccgaatgagactgggaatgtgggtggagtccctccaatcaggaataatggaaaactgaattgccaaaagaaattttatcctaataaaatgaagcacatgatttaccttccaggtccttcaactattctatgggaacccgggcattttcccatgacagtatttttatccctgatgggggagcagaaagtgagcagacagttcaagcaatgtcacaggacaacatcctgggcaaagtcaaaactcttcaggtaagacagcttgagagtggaattacgagccataggaggggcccagttatgaagggaagtgggaaaagtcccgagcttggccttgagtaatggattgggaggtccagaggtcactcctggtgagaattattgctttcttgaattc

SEQ ID NO: 197487 - DNA, 1000 bp, Homo Sapiens
cgtttaatggaacactggtttctcaaacaatgtttcaaaaaaaattattacagtagaataaatttggaagtcattgagttaaataaagtaaaatatgtttatttgctagagaacttcttagagcctttaatataaaaatgcttagtgtgaattgataagagggtatataacactttttaaagttctttgactatagatatttttttttctggcacaactagaattgttagcgatcggagaatactttaaggaaactgttagtttatgaagcttgttcgtaggttcctcatgactccaccattcaaatgttccttgaagatatcataaagggctgggtgcagtggctcacgcctgtaatcccaacacttgggaggccgaggtgggtgaatgatgaggtcaggagttcgagaccagcctggccagcatggtgagaccccgtctctactaaaaatacaaaaattagcctggtatagtggtgtgcacctgtaatcccagctactagagaggctaaggcaggagaatcaactgaacccaggaggcggaggttgcagtgagcccagatcatgccactgcactccagcctgggagacagagcaagactccatctcaaaacaaacaaacaaacaaaaaacaactacaaaaaaaaaaaaaacataaagaaccaaatccaatccaagaccattcagattccagataaaaaagctgcaggaaggtgtcttgtgtctatggtttctggacaaaaattctctgaaatggaatttgaagaaaagagacattattccagtgaacagcttacaagccaagaagatggagctatcagtgaaaaagaataatgcagtccctggaagtccaagccagagcaatcagacgagagaaaatacagggaatccaaatcagtaaagaggaagatgaactgtctctgtatgccagtgatatgatcgtatacctagaaaaccctaaccactcatccaaaaaactcctggaactgataggtgaattc

SEQ ID NO: 197488 - DNA, 1000 bp, Homo Sapiens
ctatatgctattatcttgagctaatactattttacctattttacagataagagaacaggggcatcaaagaattaaataacttgcccaagtttatgcaggtaagaagtgttaaagccagaaaatctgatacctacctaagcatactcttaaccactatgtatacagaaagatcgaggttaggaaataaaaaaatgacgttgagtttggcaacttaattatggaagtgaaaggcagactgatagtagtaacatttttgctaacagcgcaaaattacaatatcaagcacaaaagattcatcaggtcattctctcaccaaactcaagtgccaaaataagatgtgcaacaactgtaccttaaaatccttaggctggagactttctcagcatttcacagaatgttttggtgaacaggtgttacataaattgggggttaggggtagggtgaggaattttaaccctagttcaagaacgtaatcaacagaatcagctgttttagaaaacttcaccctcttttaaaaagaaaggctgtattcttctcttctccaatgatgagtttaaatattcaaacacctttgaagtaattctagcctagctgtgcatctaaccaaatgagttgataccttccccagcctacttttcataaacatctcccaatgatttttacattcaataatatagtcccagggatcagaagctgtgtgaggggtttgcttgctctagggagagtcttcaagcaattgctgtcaacagacacagatgcttccctttcttcatatgatgaagatcagggatccaaacttattagcagagctaaagacgcaccattcatccccatcggaatggcaggttttgcagcaattgttgcacagggattgtacaaattgaagagcagaggaaatactaaaatgtcccttcatctgatccacatgcatgtggcagcccaaggttttcttgtaggagcaatgaccgttgatatgggctagtccatgtttcaggaattc

SEQ ID NO: 197489 - DNA, 1000 bp, Homo Sapiens
gacaggcagtttgcaaaggaaatcaggtggggtgtggggccacctggatcagggcacagcaggggattagaagcatctagaggatattgtcaagagagttcagaatgagaggaagaaaacttgatccatccattggcaaggagaagacaagaggagctgggtcttggtcccttctgaggcttgggttggtaaggacttgcaggtattgcatggacctcctgccagagaatgggtctaccagaaagaagttcaagtacttggtggaaagctctggcccctccaggagagtgagttgagtctttggacacagagacttcctttctttgcatgcattggcagggtcgtcctatgacctgaaccactgggttcttgtcctgggccctgtgatttccaaggccctactctagccctcctctagttttgtctttcctcatggacttcagcccatctttcactgggctgaaggatgttcccacctggagccaacacctaccacccttttctagaccaccgtgctctgtcatgttgtatacccaagacccagaatttgtggctcaaatggtctcatacccattccagagcttttgctgacctctttcaggggtgtgtcctctcaatggtagaccgtgctactggagtgtgcatctgggctggagacatggctgtttgagggccggggtgtcacttaaaatggtaagataatgactccctggctttaaaaccacagccacatgtctgtggccctgcatggtatagggtggaccatgggggcaggaagagaagtgtgggccacgggcctacaaccttccttgttccttctccccaggccctgcaattctcagggataggccaatggtttggtccttggagcagctgtaattgtgctgcctactccagtagccaggaaatgcatctgatctctctccattttctgtttgaaatggaaattgcttcatttgtcagtttgtcagactcccaagtaattacccttacagaattc

SEQ ID NO: 197490 - DNA, 1000 bp, Homo Sapiens
taaagtgtacattttaacagtttttaatcacccccaaaggagaccttgtaccattaagcagtcactcctcattcccccctcctcccagatgctagtaaccaccattctgtttcctgttgctatgaattgactacttaagtgccagtagcctatcatttttgagtatgtaaatctgcaaggtgcattacacactttaatcctaacaaaactacaaattaagtgctattattcttactttatagtctagaaaatgaaaaagttttagtagatacaaagttacatctgaaagtaattaattgctacgtattttcatatctgttatattcaagttagatatgaatgagaataatttcttctatagaaaagatttttcatatattggattattgttaagtagtagtggtgttggtggattcccaaacatccaaataatggagttcaataaatactggttgaatgactaagtgaatggtgtgatagaataccttcttaaataaaagaggcccaagacaatatgaaggagaaatagaagaagaaattgaaggagaatatgcaaaagctcatggtaacactctccaggtagagaaagtttttgcctggttcttctatcagcagcacaaaattacagagaccacatactatgagccacactgtattaaaaaaatagatacacttcttgtataaacacaagatatccaaagaaattggaagaaaaaaggacttaattgtaagaaaaacaacattctattctggaatactactgacaaatttaattgaatcctggaggaaataggatattttaaaataggttaaaatgttaaatagaacattaagtagtggattatagttagcacataaacaagtaagagaaactgagtatggaagaataagtgaagctcttgtcagcacttacaaaaggatggacaatcgctggttagagaaaaacacaagctttgtgctcacacttcaactttttttttttttaacaaaaagacaaagt

SEQ ID NO: 197491 - DNA, 1000 bp, Homo Sapiens
aattaacatttattgttccaatattcttattgaggcaaaaatcaaacactgataatcaatgtgaaaccatttcctcctttttaaagaataacagcttttaaaagtaggtgccctgttccttatattagtagtgagtataagtcacagatcacagaattgtaaagcaccatagaggcattagaccaatacaccaattttacaaatgtagcagctgagactctggaacagcaggtaacttgcccgaagtcatactggtcattagtggtccaacacaaataagaatctagatcttctcactttcagcctaggaatataatacataaaaattgtacttatattcatattcaatgaattgtctctgtatgatgtgataatattcaacttatctacacagtgctttaaggcactcatatgttagttaacacataccagttttgttctaacattctgagcacaaagaagtaattgaagaaatgcatgtatcataaagctatggaaaagattttctaagtattaaaaaaccctatatatatgttcaaatgaataattttccaagtataatacaactgctatattgcaaagaaggtttaaaaaattccctttccccttctaactgcttcagaaccagagatctgtttctacaaagtaggtacccacttgtagatttaagcataaaacatgttcatagctccctctcatgaccattgaatactatacaagcctccttttattctcgctgttgtattcaactaacagctcactggctaagttttaattgcttccaatgaggtcagcaaaggtatttatcgaaaagccctgaataaaaggctcacacacacacacaagcacacacgcgctcacacacagagagaaaatccttctgcctgttgatttatggaaacaattatgattctgctggagaacttttcagctgagaaatagtttgtagctacagtagaaaggctcaagttgcaccaggcagacaacagacatggaattc

SEQ ID NO: 197492 - DNA, 1000 bp, Homo Sapiens
gtattctttactagctatggcatttggcagtgtactgatctcttcatagaagacaaatcacagtggctgcacagatcactattcctccagcagcccagtctgccatcccaccaggtcagcctacgcccagccttgctaatatcttgctaatcttggaggaaaatttcttttcctctttgatccacatagtctgaagttgggataccattctcctacttgacctcactgctctgggcagaatgaacagccaagaggtgaacacctgacctaagcccatgtggggactgcacctcgctgaccactgtctttggaattggcatgtgatctaagccagaacaatcagaacctagtcctacaattgttttcaaactggcaatggcaggggaggtgaaagaatattttcctttccagttgtggagctaaggcatgagcttggacagtgtcctcaaccataaaactgactcaagaagaaacgttttgtaggaagaaatattttatagcagaaaagaagccagcaggaatagtagagacttcagcaagactatcattcattgcaggaagatgatctcattcctcagactccagtgagtcactccacaggcacttagaaaaattacaaatttactaaaattcaactccatcataaccaagcaggcataatagtgatacttgggatccttatgtaaactgaatcagagtgattatgtaatttatcataccaaccggaacacttccgagagtgaagggatccttatgccaggacagaagacgcaaatcagcctgttctgggaaaaccgtgatggatggttacctcttcctgaaaacacaaacaaacacgttttgtgcagtatgcagtcactagttcctcgcccatctcactcatccatgaaaatctctgctctaagatgaactaaccatagaaaaggaattgcaattatcttaaatcaaaaactaaaacctgtacacacatattcctagaaacttcctactagcccagaac

SEQ ID NO: 197493 - DNA, 1000 bp, Homo Sapiens
aattaagatagaggaaatccattgattcaatatatctattaataggtcaaataaaaaaaaaaaaaaacccaaggctaggcatggtggctcatgcctataataatcccaacattttggaggcgaaagcaggagaattgcttgagcctaggagtctgaaaccgacctaggcaacatagggtccctgtctctaagaaaaacaaaatttcaccaggtgtggtagtgtgcactttgagccatgatcgtaccactgcactccagcctgggcaacagagggagacccagtctcaaaagccggaaaaaaaaaaaaaaaaaaaagaaagaaagaaaaagaaactgaagaatatccccaaaatggaaagatatcctgtgctcacggtttggaagaattaatattgtcaaaatgtccatgctatccagtctaaaaatttaattcactctttgtcaaaatcccaatgtcatttttcacagaaatagaaaaaacaatcctaaaatttttataaaaccacaaaagtttgtatgaaacccaaatagccaaaacaatcttaagcaagaagaacaaagatggaggcattgtgttacctgatttcaaaatatactacaaagcaactgtaattaaaacagcacagtactggcataaaaacagacatgtagaccaatggaacagaataaagtgcccagaaataaatccaggcatttacagtgaactgatcttcaacaaagttgtcaagaacacacaatggggaaaggccagtctgttcaataaatggttttaggacaaccagatatccatatacagaagaatgaaactgaactcttatctcacactatatttaaaaaatcaactcaatatggtttaaaaccttaaatataacacctgaaatgtaaaactaccaaaagaaaatgcacgaggaaagctctctggcatcagactaggcaatgactttttgaatattatcccagaagcacaggcaacaaaaatgaaaataggcaaatggaattc

SEQ ID NO: 197494 - DNA, 1000 bp, Homo Sapiens
ggggagagacgctggggcatgatctggaagaaagacgtctcaggattcgaagggaatgcagctaaggtggcggcggaggttcgcctaggactggggaggcgtccctaggctcagaagttggcccggccggagcggagatttaaaggttggagcgcagaggctcttaaagaggccgagtcgaattcccactcggcgtccaccttaaagccagctccccggcaccacggatctgacccgggtaagtgctgggccgcgggagaggctgcggcgccgaccccagcccctggcgctctagcgcgccctgccgggcccaggggactcggcgcgggtgggctggacttcgtaggcgcgcgtcctgggggccggggtgcacgcgggggcgacagggtcgaggcacccggcccgggctccccactggcgcgcccgcagcggcgctctatttttagcaggcgctgtggcaatataaggaatgcgcggcgcgctaggcgctcggggcgcacgctggcggcgcggtcgctttaaggaggcgccggggcggggacggaccggagtggccggctggcggggagccgtcagtccggcggccgcggggcccggcgggcgcgacgctgcctcctcaccggcgcaggctaggagggggcggcctgagtgccgtagccgagccggggctggagcgcgcggtgagtggtcgggcggccttggaggggagggggcccggccgcgccgcctctcgccccggccgtcgctttgttccggggcgggaggtgtggccgccctccgggctcggccgcgctctccgcttgcggggtgcgccctgggaccggctgtgcgtggcgttttgcccccatcgcgggctcccgcgtaacggtgtgcgttcgtgaaatcggccacgaccaagaccccagtggggagggcctgcgcgccgctcagagagaccctttcatggtaattacagttccttggctgcctgggcgagaacccggtggatagatgggcggca

SEQ ID NO: 197495 - DNA, 1000 bp, Homo Sapiens
gcccagagagcagagctggagcagaactccctccagcctggcacccaggagggccatgtgggaataggtcccagcccagcctggggtggcctcatcttcatgtcgtgcacggagccggcaaacagatcacctttctttaacctgccactgaggaaagtgctgccagggccctggagaccgccctaaaagctggcgctgaggggctgagctataaatagccctgctggtctcccaaagcaacaagcacacaaaccaaaaaaggcccatcaccaaaacaaatgtgctttcctggcccccgccaagggagctggccgctgccttggggagtctgctctcacttctccaggaagaaagaagtacagtcccctgcactctccacatttatggggggactccgacagagtccacggcaggggcccctaaaccaagccagggactcagccaggcctcctctgcaggaatttcaggcctctacatcacacactcattcagtccacgctacagtgatgaataagcaggctgttccaccctcagggaacttacggtctaggggtataagggtgtcaacaaggaccgttacagcttgcatttctcacctgctcaccacgccacatgtaaaatctgatctgaccttctctgcatcttctcaggtgaggacagctattatttccactctacagataaggaaactgtggctcaggcaggtgacatgcccagaaagtggggacagatcttgaagccatatctgttcaatgtcagaggcagagctcagaaccactgccctgtcttgggaaagatggggaattgtgtgattatgagtgtcagtggagccagtaccctggggagccagggagtgcaatcagggaccgacataggcctaaggggtctggagctacctctccaattccctctgtccctgcaaaatcctactctttggccacacaccagtctccatcagtccccaaacatcctgcacttcctcacattgcagaattccgcg

SEQ ID NO: 197496 - DNA, 1000 bp, Homo Sapiens
ggttcaagcaattctcctgcctcagcctcctgagtagctgggattacaggtgtgcgccaccaaaccggctaatttttgtatttttagtagatatgggatttctccatgttggccaggctggtctcgaactcctgacctcgtgatccacctgccttggcctcccaaagtgccgggattacaggcatgagccactgtgccaggccacattcctccatcttactcgtctccacccatcctttactactgctctgcaggcagcttctctcatctttagctctttcttctagtacttaccccatgtttctaaataatctttactgttgatcagtttttcagttttagatgtctgaggacttcttgcttgggcgatgagaatttagttctctatacctccttcagaagcacccacacccagggacacattagcttcccctttctgcagcctccctgtgtggcttgaataccttttgggttaagtctgtgtaagatttgttactgccatgttcacagctgagtcgccttgtatactctgatcacattttctttcttgtaaaacttcattttccttaaagttcatcattactttgtttttcctttggttttcctggtacctttcactaattaatccccaaactgcgagagctgtaaaatccttctcaatactgtcaaaataaggaatctgtttcttttttttctctcttggaggtatacgtcctcagccctctgttgtcctgctctggtctggactgcctgccgtcaggccagctggcagctgtctctctggagcctccttcacatttctcccggattgagtcttctgctacctatactctgtgtcttctcatgttcttcttccttggtttactctcacattttggtggaatactttttctagtagcttcttgagaaagggtacatggagaaactttttttggtaaacatgtgtctgagattgcctttattttacctttaaccttgattacaagcttggttggttttg

SEQ ID NO: 197497 - DNA, 1000 bp, Homo Sapiens
ggttaagtgattgtccaagatcacacagctagtaagaaccagatttcagacttgggcagtctggctccagagtctgtgttcttattctctactctaagctgcctttctgatattatatattacatattacatataaagaaaatatatcatgaatgtataatgcagatcacatattaaaaaatcaattgtcttttatattatgtgaattatataccttctgtatggaatgttaaatgcctaccctgtcagtacatagagggctgtctcactttttaaacatctgtttaaacatctgtgtagtactctgttatgccagtgttgtgtaatttatctaaccagtctcctattgatgaacattttggttgtttccaaaccttttgctataataacaatgataacaacatagaatacagtaattatgtacttatatataacataattaaaatataatttataattagaataaaataatgtcataaaataaatgcaataaatatccagtacatgtttatttcttgcgtgtgcagtctatctgtgaaataaatacccggaagtggaattactgaatcaaaggccatgtgcatttgtaattttgatagattgtgccaagttgcatttcaaaggacttgtacccttcaccatctccaccagctatagagcacattgtctatttcaccatggccacactcccatagtgctctgtcataagactcatgcccttaaccactgcaccataccgtctcccgaggacaaattagtgggaaagctgcgtgaatccagtgaaaactaagttatgtaagaaaaggtcagaaacttgaccttgagtcaaatgtctggccagaagtacgagaaaccagaagcaaaacagaaggtatttgataatgacactcaagggaaattttatcaagacttttatgccaatgactcagtcctcgttctggggagcctgggtttctaaactgttctcttcccttgttgagaaaggaaggtagttgaattc

SEQ ID NO: 197498 - DNA, 1000 bp, Homo Sapiens
tacaatcagaacttggggctttttacaattttccttacaaccaaagacaactatcccatcttcattctaaatcagttcaaaagataactacaaatcctacaactacccttaaacatgaaaaatcctaaattatacactaaagcttttatataaacattttcttcttcagtgactaatactaactggaaaaaaaatcctgcctgagggagttagggggatgcagacccattacccattctgcccagtgtaagcctccatgttacaatatgagcagaattatgtagtttctgcagctataactgattcaggttctctaggcagcctgagaaatcccctgttgcttcagatggatctataagccttcaaatgttccactgcacatggttttgaattaccgtttttcattactgatgtgctttctactggaccctgctgtgagataaagtggaattatagcagcattactagctaaaaaatgattgagagatatacaaggttgtaatatacttcttgaacttgcaggcaatgagacatctttgaatcttaatgcaagagacgaaagaatgaaaaaataaggtgcagcttatctgcagatcacacagatgaagaataccttgctaatgtctgtgagcagctaaatcctacattaaatactcaagattagggaactgaagcacagggatgatagtgataatgtctgcagtcaaacaatatttcttatataacagatgaacacaaagaaaggtgacttcagggaatgctatcctaaaaggtaaattcagttaacatgaagagccaagggtgaggtcaaggacaagtctgctaccaaacaaagaggaaaaagaggctgactgttttaaaggaagaaagaattatgttcaaggaaggatgatcagaaggatagaatgagacctgagcatagaaaagttgcctgttgtaccaaaaatgtgaccttcacaacaacgtttaacaatgaaaattaatagctgtgatagaattc

SEQ ID NO: 197499 - DNA, 1000 bp, Homo Sapiens
tataatcccagcactttgggaagccaaggtgggaggattgcttgagcccaggagtttgagaccagcctaggaaacatagtgagacccccatctcttcaagaaaattaaaaaattagccagatgtggtggtgtgtacctatagccctagctacaagggagactgagatgggaggatcacttgagcctgggaggttgaggccacagtgacctctgatcatgccactgcactcccacctaggctacacagcaagaccctgtctcaaaaaaaagacatagatatagatacacatacacacatacataaaaaaaaataaggccatagggctgagtagaataggatacgtgatatgatttggatatctgtccccttcaaatctcatgttgaaatgtaattctcagtgttggaggtgtggcctagtgtgaggtgtttggatcatgggatagatccatcatgaatggttagcaccatccccttggtgatgagtgaattctggctccggtagttcatgtgagatctggttaagagtacggcacctctgtcctcactctctcttgtttccactctcacatgtaacattctggctcccggtcaccttctgtcatgactgtaagctttctgaggtctcaccagaagcagaggccagcaccatgcttcctgtaaagcctgtaaaactgtgagccagttagatttcctttctttataattttcccagcttcaagtatttctttgtagtaatgcaaaaatggactaacaataggatagggcaagattgaaaagaaaaaaaagagcagccaatctggagaaggtgtcacactgaactactgcatctaatttcacttattccaaaaaccccacaaaaattcagtaaagtgctttatttttattaaaaaaaaccttataagtacagagaagataagacaatggtgtcaaattttggaagcttgggaagcagatgaacaagtagtaattgacttagcatactcagaaaatgtggaattc

SEQ ID NO: 197500 - DNA, 1000 bp, Homo Sapiens
ctgggctcaagcaatcctcccacttcagcctccccagtagctgggaccacaagcatgagccaccgtgcccagctaatttttgtatttttttgtggagacaaggtctcaccatgttgcccaggctggtcttgaactcctgagctcaagtgatccacccaccttggcctctcagtgttgggattacaggcgtgagccactgcgcccagccacagtcacacacgtaaatcagactgtccacatagcaaaccatcctgccatccctgtcatcaaactcctgacagggagcgggggcagtctagagcagtggttttcaactgggaatgaatttgccgcccgcccccccccaccgcaggggacatttggcaatgcctagagaaatttctggttgtcacaactggaggaggggtgctcccagcatttggtgggcagaggccaaggatgcttctaaatgtctgccacaatgcacaggagaggcctcacaacaaggaagtacctggcctaaaacgttagtagcaccaaggctgaggaacttggcctagaatatagacccccgtcatcaggcactatctggtatattaagcacatctgcagagcatcccagtgtatggggctgggtggcctggacttactattcctaaaatctgatgctggggatgccacaagaaccaaggggtcgtactgggtccctgggggctgaaactcgggcctccccataggacacagcccaagagtgggccacagaaactttaagactgagctatagaggcgagtctccacagagatgtataattagaacagagccgggctagcagggagcgccttctggccaaaaatggcaaaagtgcgaagtgtcccagcagagccaggccaagcccactggtacagtcaccccccctcagggccccctccctatagctctccctcctccccgcaggctccctgagccatcactgcctcctccgtcccagagcctcgtcctcccctgctggcactggaattc

SEQ ID NO: 197501 - DNA, 1000 bp, Homo Sapiens
cacaggaaggggaacatcacactctggggactgttgtggggtggggggaggggggagggatagcattgggagatatacctaatgctagatgacgagttagtgggtgcagcgcagcagcatggcacatgtatacatatgtaactaacctgcacattgtgcacatgtaccctaaaacttaaagtataataataataaattaattaatttttaaaaaaaagaaagaaaatctggcattcatgtgacttcaatagcacatgagtagctgaggctcaaaaaaggaagtggattcctgggcgtgcatggcccttttgttcaaatcaggacaagaaacagaaatgagtgaacaattctttaaaacccctacagaaaaggaaaatggctttcccttgaccaatttccaatgattaacactgtgcttttgcattaaatgggaataggtaaagctctgaggacctaaggacccgtgagataacagcagcagattttagccaaaaccacagaatgcctccctgtaatatattataccttcaaatctctgcatcctataatttcaaataaaaactcttaatgtcttaagttttaaatgtcatatttttcattaacattgaaagatacattttaagaaggcaaaagagcacagtggctagaagttcaggcccacctgctcaattatggatttaatttttcaccataaacaggaaaaaaatgcatcaattactattatcatatggtataggaatttccataagtatttttaataaaaagaagggaaagtgtttcctctccttaaacatgacctttccggaacagtttaagccatttaacatgggagcaggaaaatacatcagcttaatctttcctagcttccactactctgtttataatctaaaaccactttttaaaaacgtataggtcactgcttatattaaagtaacaaaatatgaaattaaatagttcttatcaatagtgatctcctattgtattgtcagagatggaattc

SEQ ID NO: 197502 - DNA, 1000 bp, Homo Sapiens
ttcagagtcataacttctggtgccatgagcatccttatactcaaacatgcatattgcttaaatattaatagcagacatggcttatgttggcaaactaatctctcccctcttctaaattctcccaacccctgaatgcacccacattcacctactaactcatgttttcccagaagtcatggttttggtggctaatgaaaccaaagctgacttgaatataggaagaaagaggtgtctttgggtggtttgttttgagaagaggtataaaagtccctgacaaaaagtagttttcctcactgttaatgtcagttgttagagcagagctttctggtcattgttcaacaaaaagtattgacaggccaagatagtgctctttatattctgagcagccttatctatttaccctaccatagtgtaaaaatacagttttttatgtgtgcttgatgtggaaagtgttgagcaacactgtcttaaagtggtcttgtagggcccaaggtctcagagatcatttagggtcacaaaaaaaggttgggagttactttttaattccaattgctaataggagttctttttaatgtacatggcttagtgctagtttaaaattattgattttgataatgaaaaggttgttaatttgttattaagtacctcatatatagggctcatttttcagcttttgcatataataacagtaggctctctgtatctccggattctgtatcagcaaattcaacaaactacgtatcaaaaattcaatcaactacatatcaaaaaaaagtatacaggaggatgtacataggttatatgcaggtaatacgccattttatataagggacttgagcattgttggattttgttatctgctgggggtcctggaaccaacttcccatctccccccgcccccccaaggatttcaagggacagttgtattacaagtcttcaagcacctctgtgaagtatgtaggacacataacatctgtgttagattagagaactaaagctt

SEQ ID NO: 197503 - DNA, 1000 bp, Homo Sapiens
taaagattgttgtcctctcacatgagcatggcccactgttgaggatttgaatcttatatctagaggcagtcaaaagttgcaatgttgactctcattcatgaattcgttatgcatggattttgtgacccttaaaccataatttagcacacgtgtcaggctgtgacttttctaaggggacacaatgcccagaaaacattgagaagctgctgcacagatccagttcacagttgaggttgtgacttgtctactttacccatcatacaagacatgtggactctcatacctagaaccagaacatgtgagggattggtaatttcatccctgtattttttgaaggtctgattgtgacatacacctctgccaaacacctgatttgactctcctgcctggcttggttcacgggtagaattgtgatatattgctggacccagcacccaggtgagatgactctattctcaagccttggtgcctcttacaggaggcactgtgacatatcgctgggatttgcagtcaggtaatgtaaattttctctcctaccttggtgctgccaataaggggcattgtgtcatattgctcattttaacacccaggtgatgtgactcttctgcctgggtccagcctaaaggggggattgtgacatctctctgcactcatcacccaggtaatgtactctcatctcttgcctggtttctgttcacaggagggaaggtgacatatctctgagctcagcacctagctaatgtgacacttctcttcttcctaggttctgcccacaagggagattgttacatatatgctgggcccagctttaagatgttactcattagccttgtccctgccttcagaaggcattgtgacctattgtgggacccaggaccaaggtgatgtcactttcttgccttgactctgtcaagaggaaacatcgtgacgtatctctgggtccataaaatatttgatgtatctttctgttcttaccagggttttgcttatagaaaagctt

SEQ ID NO: 197504 - DNA, 1000 bp, Homo Sapiens
ctttggggtcagctacaagagagttgttttccttgggtgatgtcatatttcctttctcatgtttcttgtgttcctgtgtttatgtctgcaaatctagtggaataatcacctcttacaaactttacagagtggctttcatacaaaaagactttcatctgcatgctggttttggtgtgccagttgtgaaggctgtggtggctctggttctcagtacatgcagaggtatagactttgtgcagcttcttcagctgcaatcaatgtcagtgaagactgtgggtgcctcagtggcctaggctgtaggaatttgtggcagtgatgggggcagcacagattgttagggtctttggtggcaagaccttttggggtcctcctattctagttttccccacaatgggcagacttagccaagagagttcctcttggtgttaggtctgacatggcctacaagcagtttcagcaacagtgggttccagggttcaggtgctcagagtagctgtgtagttggggccctagcctcaaggatcttgcaagcctattgtggcacctgggtcttgggtgtaggctccccctctgagttagggttgaatgcagattgccagagtctgtgattccgagaaccccagcccccagcagtttgagccagggtgtcaggctgtagttgtgattaggaccttgggaggtagggcacaacactggcctggctctagggaagaagagatgctctggagatttgggcctggggagcagggtacagctgcaactcaagaattagagccagtagggcatagcggcaactcatgtcccacatgataatgcattgttagaggtgagtctggactttgggatggtaggactcagcagtaactcagactctgaggccaggtgaaagtggcagcaaaagtctggaatggtggagcacagttgttgcttgggccctgggtggcagtgactctattccttaaggaggaggtgtctcagcagctcagactctaggaagctt

SEQ ID NO: 197505 - DNA, 1000 bp, Homo Sapiens
atccctggagtgaaactctgtgaaagcattgtatatggagaagtcagcatgggtcagtcatcccttaatagacacatcaaagatcacagtggacatgaaccaaaggaatatcaggaatatggagagaagccagatacacgtaaccagtgttggaaacccttcagttctcaccactcctttcgaacacatgagataattcacactggagagaaactctatgattgtaaggaatgtggaaaaaccttcttttctctcaaaagaattagaagacacatcatcacacacagtggatatacaccatataaatgtaaggtgtgtgggaaagcttttgattatcccagtagatttcgaacacatgaaagaagtcacactggagagaaaccctatgaatgtcaggaatgtggaaaagccttcacttgtatcacaagtgttcgaagacacatgataaagcacactggagatggaccttataaatgtaaggtatgtgggaaaccctttcattctctgagttcatttcaagtgcatgaaagaattcacactggagaaaaaccctttaaatgtaagcaatgtggtaaagccttcagttgttccccaaccttacgaatacatgaaagaacccatactggagagaaaccttatgaatgcaagcagtgtgggaaggccttcagttatctcccctcccttcgactacatgaaagaattcacactggtgagaaacccttcgtatgtaaacaatgtggtaaagcctttagatctgccagtacctttcaaatacatgaaaggactcacactggagaaaaaccttatgaatgtaaggaatgtggggaagcattcagttgtatcccaagtatgcgaagacacatgataaaacatactggagaaggaccttataaatgtaaggtatgtgggaaaccctttcattctctgagtccatttcgaatacatgaaagaactcacactggagagaaaccttatgtatgtaaacattgtggtaaagctt

SEQ ID NO: 197506 - DNA, 1000 bp, Homo Sapiens
gggagctctgagatgttgacgagggatcaacacctgtgacaggaaaagagcagaggtgggaactattcacctgtgatgtgggtctgatcaggcctggcttgtcagaatttttgtgtgttgtgctggaatggctgtcataaccccatctctctcagtccccagagcaaagtaccccaggaagggcacaaccttgggagagggggctctgcagctgaggttgaccctgaaggagccaatagctacaggctgtgtgctgactacacagtgcacatttggacagcaggcccttccttgaagggagactagatgggcagtggtgccagctagggacctgtaggcaggaaaggcaggtgacagtttggtctcctggaggaatggtcccattttgggggctcagcatgagtcattgtatctggctagttggatgtttggcagtggaagttagcttaattatatagcttagccttgataagcgggatccatgctgttgggctcatgtgaagcctcctctctgctactgtggtcacttcattcatgtgcccctcctgttgctctggggtggctaaggacagagggtggctgacaccaactgccccagtcattttgtctgcttggtaccttggtacctcttccatggtggctgctgtctgatggacctccatgtgtgagatagagctcgtcatgctcccttccatttgtgcaccttcaagtctctaccccaagaccttctcatccatcatcttccaatcttttttcttctaggcccctgaccagcaagcatggtcacttgcttctgaccaggagtccatctatattctaacttcaggccacttctctttccacacaaagtggatgaccaggtacactgcctgaaactccacccgctgggagagatttccccacagcgctatctctcagagccatcccagagtgaggctgtagtgccatctgttttcggttcagccactcttgccaactgacccatttgtaaaccaagctt

SEQ ID NO: 197507 - DNA, 1000 bp, Homo Sapiens
gaataaagggcacgaaggccaggccagggcctgggcctcttgtgctaagagggcagggggcctacggtgctattgctttaggggcccaccacgggcaggggcctgctcccagctgccacgctctatcatatggagcgaggtgttggggaaggcggggcaggcagcctgttgcaggcaggggaaggagaagagactgaggggctgtgacctctcctgaggcccccagcctgagactgtgcaactccaggtggaagtagagctggtccctcagctggggggcagtgctgtccagtggaggggagggctttcacgcccacccaccccctggccctgccagctggtagtccatcagcacaatgaaggagacttggagaagaggaagaataacactgttgcttcctgttcaagctgtgtccagcttttcccctggggctccaggaccttccctacctccaccaccaaaccaagggatttatagcaaaggctaagcctgcagtttactcggggggttcagggagccgaaaggcttaaatagtttaagtaggtgatgggaagatgagattacctcatttagggctcaggcagactcacctcacatactccctgctccctgtggtagagacacctgagagaaaggggaggggtcaacaatgagagaccaggagtaggtcctatcagtgccccccagagtagagagcaataagagcccagcccagtgcagtcccggctgtgttttcctacctggtgatcagaagtgtctggtttgcttggctgcccatttgcctcttgagtgggcagccctgggcttgggcccctccctccggccctcagtgttggctctgcagaagctctggggttcccttcaagtgcacgaggggttaggctgctgtccctgagtcctccattctgtactggggggctggctaggacctggggctgtggcctctcagggggcagcctctccatggcaggcatccctgccttgggctgccctccccca

SEQ ID NO: 197508 - DNA, 1000 bp, Homo Sapiens
ttaaaatcattttacgtacattgactaatctgtaaaaattatactcaaggtggaaaaatcaataatgataaaactaagaacttctttgctctgaaattcattgaagacatgggaaggggttaaagttatcacagttacagcagtgcagggtattcaagacttatttaacaggtaggtcataaacaaatcatctggataatttgtccagatataatttgtccaaataatagtcattcaaatattgtttgtaacacttaaatgcgaaattgagatattttaaatgatgatgtataagttcttatacaaatcctcactggactgtagttctgatgggttgcaaaaacaaatctatctataaacaattatctagagataactaggatgtttcacttcaattcatagcaattagaggaaatgtatttaaatgcaaaggatctgtttttttaaaggaagcatcagataatagagaagagccagtatgcaatatataagaagaaattattacttactaacaggaaagcatttttaagaggactgaaaaaccctgtgaagtagaggaaattaggagatataattcaggtatacttttaaagggacttttgtaaaagtatttaaagagaaaatagcttagttaccacagatgaataaagaattggcttaggttctagaaacccactatatctaaattcatttatagttgaaaattcaatgatctacaattctttgatcttcagggctgttttctaactccaggattcaaagaaatggaaggggttagtaaaaatatctgtgagcagagacatgcaaaaaaatgaggtcaccaaaagatcaatgatgaattataccttattttaactttgtttaaaataatttgtaaaaagagttacacagcaaaagcaacaatctctacatttatgttaaatccctgaacataaacaactttaatgaaatgtttttagggaaaaataattctaaatatgtgattaagaaggaagaattc

SEQ ID NO: 197509 - DNA, 1000 bp, Homo Sapiens
actaatgctaataatgagcccaaggggagcaacatcagcattgacacgggacttgtttgaaacacccatccatggaccctttccaaacctacagaatcacattacataaagtgggaccaacgttaccaagtgatttttgagctcattaaaggttgagaggcaatgcttagctaagtggttatcagcctagacttctcattagcattacatggccaatttgcagaaatctctttacttgtaccctttccacaggttctgtttattgttctaggtgaaagtattcatgttgttttaattgtgtctcatgtgactctaaggtgaggccagaatcaagtgtgtggggttcaagatacattcatgagagttaagttccacctttgcactaaaaggtagtcacagggaccgttctgtttggttttgatagggagaggtcagtgtcacccatatttccattactgtagcagaaattgctggtgtttgtggcaaaagcaggcacctgaagacagaaatagagaaacatatttttatattcattgagcagttcattgttcctgaatctctgctgttataaaggacagaaatgggtgtgctttttctgcagttcttagttcttttttctgtgggtgtgagactagcaggtaaacaggtggtgctgacgccttttaaggaattttttcaagacacaggtgtaacttctccagagaatgtcatctgaaaagcatttccaaagaagacaaaagaggaaaaatggctttttttttttttttcagctaaacatgtgtcagatgaagagctgtgtccactctgcctcctggagtgcgatgcatttagtccttgcaaacatttacttctctacttgtgtttctttcccctaatgagtttaactactataaaaaattcttgtggtagtcaagggtctctgcaaagtatctctctcctatatcccagagccttctctacactctctaaatcatggcttcttatacgccatgcagaattc

SEQ ID NO: 197510 - DNA, 1000 bp, Homo Sapiens
ttttctgattaaaaaggtaatacaggctcattatataaaatgtgggaaattttaaaatgcacaaaaataatctgtcttatcacaatatggagatgattctttttgcttatctcattccagtctcttccatgtatacaagatttatacagtgtaatatataaagattgtggttctgttctttcacttcttctatcatcagctgtttttcccatattgcattatattttatataatataatgcataattttataatatatataaatacaatacaattccttttttgtttacactataaatattggtaaacagcaactggataaaaaaaatctatgtgcatctgtcttctcatagaatcacttcttgaattactgggttaaataaacattataaccatatttgggattcttgatgtatgttgtttaattactttttaaatggttacaacaacttataattacaccagccaggttatcacaatgaccttttcctacattctcatcatcatcagacattttttttctcccatctttgccaattttatgggagggaaacaacttttttttttcttttgaacttatttacattggcaaaacgctggtacgtttacaggcaggaagattaaaaaaaaaaatcagtacgacccttatctacaactgttttctccataaatagtttttcagattacttcaacagaatttaccataaaggaataatcagaacgtgcatatatgcttttaaaacctcttacatgtgaatttctaagtattttgtatatgatgtcttaaatgaccttttggttaaaagtatcttcccaatttctaacactccaaaaaaaggaaatgaagggttgcaagtgttcctcttcttcaacatagcagaacatgaataaagaattttaaggaggcagaggcctaaaggtttgcaattaactggattctgcaggtgtagatctataaatagttatacttttttctttgtatgccagatttcaaagaattc

SEQ ID NO: 197511 - DNA, 1000 bp, Homo Sapiens
aacaaggatggtaacaggctgtgggtttccaaaaaaacaatgatttaaatgtcgaaaaattatgagagatccttggaaaaatgaatgatgctctctaatgtttgccaagaactttctgctagaaaatcatagacaaagtgaaggctgttgtatcatgctatcgtataattttagtttaaaaattatgccaaaaaatccacatgagatttatttttattcattctaagaatgagcacatagttgcaattataatctgtgttctactggatgagatgaaatgttatttttataatttatagcttcatttttcattaaaagaaaaaagcctcacttgaaattttaatccatcttaaatggcttgactttaattgctctattccagcctcagaaaccagaccctcaagtccatgctcttaaccactgcactatttctgtcccaaagaaggacttccctttgtttccattacctctaagtcacccaaaacaagttacatgccctttgtgaggccaaggcaccctggaatgtcttttgttgttgttgttgttgttgaggagacagagtttcactcttgttgcccaggttggagtgcagtggcgcaatctcggctcactgcaaactccgcctcccgggttcaagcgcttctcctgcctcagtctcccaagtagctgggattacaggcacgcgccaccacacgcagctaatttttgtatttttagtagagacggggtttcaccatcttagccaggctggtcttgaactcctgacctcctgatccacccacctcagcctcccatagtgctaggattacaggcatgagccaccacgcccggccctgtgatatcaattattaaagtgcactatgaaaagttaccagtccagccctgatcctgatcacaggtgatgttgggaggttactttggagacagacagagagataaaacagggcattttcttcacatgcacatcctggcacatggaagctgggtggtaaaagaattc

SEQ ID NO: 197512 - DNA, 1000 bp, Homo Sapiens
aatgtgatggtcttaggaggcagggccttagggaggtgattaggtcatgagagtaaaaccctcatgaatggtactagtgctcttataaaagggatcccagagagctttctcactctcttcctgccatataaagatataagaagacagtggtctgaaacctggccttgggtttcagaacccaaccatactggcaccctgatctcagacttccaacctccagaattgtgagaaatgcatttctgttgtttataagctacccaatctatggtactttattacagcagcccatgtcagccatattctattggttgaagtagtcacaaaggtccacccaagttttcagggaagagacaaagaccccccactcaataggtagagcatcaacatcacattgcaagaagaatacattgaatgggagaaactatcttgggtattcatagaaaatataatttgccacactctgcttaccttgtaccatactacactataccacactggtactatactacgggacaagcagtatattctgatatattgtagtctactgttttttatgctgatgattaccactgaactgtgttaacaatctagtggctccccatcctcagtttgaaaaacactgtcctgtacaattgtaaattgagacaatagtaaaaaatttcccttctacactggcagaatgctttaagaaaataaatacagggattactgaaatagatcagaaagattaaagtaaaaataactgagcaaaatgaagtttgccacttttactttctaatacctgtttataagagcaatgtttggcaatctcagatgagttcattttataactgagtcaaaatcttaacatacatcattgcttaggccaaaataaaacctctaattattatggcaaaccatgatacctctatacttttttttatatataaaatgcctttttcaagtcaattgtagaaaatgtgcataaccaactgattgtaacacaatcctttaacttgat

SEQ ID NO: 197513 - DNA, 1000 bp, Homo Sapiens
aagattgcaccactacactccagcctgggcaacagagcaagactgtgtctcaaaaaaaaagaaagaaaatgaatgaggtagatccatatgagttaatagatggatgcattaaagatacataaaaagtaagtaaagttcagaatattgcatgtacaatacattccatgtattaaaaaggatacacacacacatgtgtatgtatacatatatatttgtgtttatttgtacatgtatacatatgcctaaaagatttatagaaaaatacacaagaaaatggtctctgaaaggtggcagggaaatacttttaattgtatatatttttaaattattattttcacccccgtgtatgtgtgtgtgtgtgtgtgtgtgtatatatatatatcacttattataaaatcttataattaacatgagaattaggaacacacataattacaattctattaataccctgtttttaggaaggctttataaatagtttacaataggataaggtctgtgttaatgatcaaatactgtgaggagcacagagaggtatctctctataatcacaaacaaatttaaaaccagagagaaaaagcacaagtgtgagtaaaagtgtggcatcctgttaagcaacaaagtaaagcttagtttcttttttcacattcccaagggaacacactagttggtgacagcccagagaaatgagacaaatgtctgaccaggcctcacacctctctgcagatcttcagccacagaattaaatccccacgtcctttatatacaggagcaatcctatcagaatagatattaagatattattatgtaggagaaatgtatttttgaaggaaaaatactggactaaatgaggtcctcttgagaacatatgaaaatcagagcctcagtctacttattgaacttgccatgtgccttgcacacagggcaataaacatctgctgtctgatcaaggtcaggtttaccatgataagcaaacttccttccaacattatcggaattc

SEQ ID NO: 197514 - DNA, 1000 bp, Homo Sapiens
caacctccacctcccgggttcaagtgattctcctgcctcagcctcctgagtggctgggattacaggtgcccaccaccacacctggctaacttttacatttttagtagagacagggtttcaccatgttgggcagtccggtcttaaactcttgacctcaagtgatctgccctcctcggcttcacaaagtgctgggattacaggcgtgagccactgcacctggccagtagaaaatctttatggctttgaaacagacaaacatttcttagaaagaacacaaaaagcatgaatcataaaagaaaaaaatgacaaattagactttatcaaaatttaaaaatgtctgccctttcaaagacattggtaagaaaatgaaatggcaagccaccgactgaggaaaaaaatatttgaaatatacatatacagatatatctgccaaaatacttgtatccagaatatataaagaacttttactactcaataataataagaaagacaacctactttaagagttggttttctgaaaaaaaaataataataacaaaatagatagactgctagctagactaataaagaagaaaagagagaaaatccaaataaacacaattaggaattacaaaggagaaaatgtaggagaaatggataaattcctggacacatataccctcctaagactgaaccaagaagaaattgaatccctgaaaagactaataacgagctccaaaattgaatgagtagtaaaaagcctaccaaccaaaaatagcccaggaccagacagattcacatcccagttttaccagatgtacaaaggagagctgataccatttctactgacactatttcaaaaaattgaggaggaaagactcctccctaactcattctataatgccagcatcatcctgatgccaaaacctggcagagacacaaaaaagagaaaatttcaagccagtatcctcgatgaacattgatgcaaaaatcctcaacaaaatactggcagactgaattc

SEQ ID NO: 197515 - DNA, 1000 bp, Homo Sapiens
ggcagaatggggtcaaggacctgcttaaagaagcagtctggctgccccttggcagagcaggtgtgctgtcctgggggaaacgcccctcatccagaccaccgggactctccagagccagcaggctgaaaaggctaagtcagctgaactgcagagatggcagcgccccaccccccagggagagatcagagttctgtgagttctgtatgtataactctggttggagttgctgaaattcctgcagggaggccctgcccagtgaggagggatggaccggagtcccacttaaagaaatagtctggccacaatctggcatagtggagtcccacttaaagaagcagtctggccacaatctggcatagcagctgtgctgtcttgtagggaactcctcccagtctggactgcccggactccctggagcaggcaggctagacctgctgacttgaactgcagagatggcagctctcccaggggccgtctcaggcagtctccagccttctgctgttggccggctggaattccaagccagtggttcttaacttgtgagttgccctgggagtggggtctataaaatgacactgcttgaatccctggattcagcctccttcctaggggaatgcatggatggatttcctgccttgctggaattcccagggccagagtatgcaaaactcctgtgtctctgtgcgtgcccgagtggctgcttcaccgagactccacacagctctgtgcttcggacccaaggccctggtggtaggactcacaaggggaatctcctgatccacaggttgcaaagatctgtgggaaaaacctggttttccctggcagggtcacacagtcacacatagcctcccttgcctgggggtgggggctccctggctttttgctgctcctgggtgggccatcacctcaccctgcttttccttgccctccgtggtggagctgtctgcctagtccctcccaaagcaagaaactgaatacgtcagttgaaagtgctgaattc

SEQ ID NO: 197516 - DNA, 1000 bp, Homo Sapiens
caaataccacaagctggcagagcgtgggtggtgctgggagaaggcgcagaagtgttcctggtagacggcccccatgggacctttcaaagggagtgtgctcctggggcctggaagtcactgtcagcctcagcctcacagtccacagagagggaacccaggcttgaagctgctcttatgaagcattctgtttggggcccaaaaagcacatactcatcccagtgaaaaatcacctgcaaaaaaaaaaaaaaaagctgtacaaataggcggtccctttcagcggcctgacctcaagagcagagaaactccccagtactgtcttgcctcttccattagcttgtattctctctaatgtgaacatgctggtgctgggtgatctatgagcaagcaccctaaattaaataatctcttagtataaattattttatcaaccctctgctgggagcaatgttggcattttggagagaggagaaagagcatgaacgtattgatcagactggctggggaagagaccaggaggagagaacagacagttgttaagcagctgctgtgtgttgggtcgggcttcttcacggactcttcatatacgtgtctaatttagtgtttcccaaagagagtgctgataaaactagtcttgcaagagacaagtctccacacttttttgctcacttacctcacaaaagaattttgaggagtcacatacccttttacacatttttaagttaacatctgagatttttcattacaagtctaaagattccttttttaatcataggagtggcaaagatcaaatatttgataacttggaatcaggtgggggtagatcacaattgacataaatatttcataatatgacttgataaaatgttttaactagcttgttgaataagaggaccaaatctaaaataaacgatgtagaatttttacccaagggttttccttaatgtatcttaaaaaatttggtagtctcagaaaacttcccagttataggctaaagaatatg

SEQ ID NO: 197517 - DNA, 1000 bp, Homo Sapiens
ttgtggcactatagctgcctttgagtaggaactattttttaaaatattatttttaattttggtgtaatacatataaaatttgccatcttgatggtttttaagagtacagttcaagcctgggcatggtggctcacgcctgtaatcccagcactttgagaggccgaggtgggcagatcacttgagcccaggaattcaagtccagcttggccaacgtgatgaatccccacctctactaaaaatacaaacattagctgggcctggttgcatgcacctgtggtcccagctactcagaaggtggggatgggaggattgcttgaatccagggagtggaggttgcagtgagccaagattgccccactgcactttaacctggatgacagatcgagaccctgtctcagaaaaagaaaaaaaaaaaagagtacagttcagcagtgttaaatacattcatattgctgtgtaatcagtctccaggcctctttcatcttgcaatctgaaactttgtacctataagcaacagctacccattttcctctcctccagcccctggcatcctccattctactttctttctctatgaatgtgactactctaggttctgtatctaagtggaatcataccgtatttgtctttttgtgactggcttatttcactaagcgtagtgtccttaaggttcatccatgttgtagcatgggtcagaatttctcctttttaagggtgaattatattctgtggtaatgaatataccacattttgtctatccatttaggtactattttttaacctccatgttatagaagaacagcaaccagagacttcaaagggttaattaagtaagtggcccaaagtcacatagtcagtagtggagactaattttacctaagaatggcatgtgatcaggagtaagcagatattggattctaattggcaagagtgtgacaaatcagggtgcttctcaactggatggtgacacctccttacaccttgctatggcatttcaata

SEQ ID NO: 197518 - DNA, 1000 bp, Homo Sapiens
gggaagaggaaagatgagaagaaagaacagaagggagatgggagaagaatggaggaagagaaagacaaacagaaggagtgagtgtgaaagaagaagggctgtgttgtttatgagcagcatatcaataggtaggaactggaaagaaagttggccacaagaagttccccatggcagcaggggatggtaggctctaggacagagcagtcccatcctgaggtttaaggtgtgtgctaggctgggcggcatacctacttctctgctcccacaatcacctcctccactactttacagtgaagatgctgtttgcttgctctctaaagccaacccttccatctgctctgctattgcagtaattttagtgctgactattcctcctttttgtgtatttaacatttcccatttgggtcctttctattaactttcaaataggagctaagcaatttgggaggccaaggcaggcagatcatgaggtcaggagattgagaacatcctggctaatacggtgaaaccccatctctactaaaaatacaaaaaattagccaggcatggtggtacgcacctgtagtcccagctactcagaggctgaggcaggagaatcacttgaacctgggagatggaggttgcactgagccaagatcatgccactgcaccccagcctgggtgacagagtgatacttcatctcaaaaaacaaaaaacactccaatctttaaaaagttccttcaacttcactctttccctgccatccctttatcttcctcctctccttcatagttaaggatctcaaaagcactatgttattttttctttttccatgttctccctacacattcatctcacaacttacttcaatctgactttcatctccaccacaccatcaaaaacagccctggctatgtaggctattaatgacctgaagacgctaaatccaataggaattattcagggctcactttatttatttgaccctcaagcatttggcttattgatcagctcctcctt

SEQ ID NO: 197519 - DNA, 1000 bp, Homo Sapiens
tttttttttgtagatgaccctcttggtatcttatttttggactagtatccatttaggctttgggcttgtacttaagagcaagtatattttaggttaacaatttatatcttctgtgggtaacttacctttaagaaaaggatgtatatttcacatatatttttgaaatttgagcttttttggacagataattataattcttgtaaactcaggagattgctatggatctttagtaacagaaattgtaaatataaacttaagcaataaatgatgcatttttcaaccattgttcctgctcctagaatttttaagtaagctacatacacacaattcaaatattaagacatttgcaattatagctatttatgaaacaatttgcaggattctaaaaccactactagccattagtgatagatactattttatagtagaaattcagagtggtggagctgtttatgacgctaggaaatgtttgtgctttttaaattttacggtaaaataaaaaccattagtatggcataaatttattggaaagtagattaaaatagaactactaataggtgtaataatttcatagttcagtcattttacagctatcaagtggctattatatatgagtcagtctgctgtatgctggttttgcgaagcattggagacagagttttctgaatattcacttaaatagaagataagacaaggaagaattataaaaataaagacaaatatgtaattttctagttatcgctatgatgcatacaattttccttaagatatatgctatagtaaagcagtgattaagcttgagtcttatagtcagagaggcttaagtatgtattctggggctgggtgcggtggctcactcttgtaatcccagcactttgggaggccgaggtgggtggattacgaggtcaggagatcgagaccatgctggctaacacggggaaaccccgtctctactaaaaaatacaaaaaattagctgggcgtggtggcgggcacctgagg

SEQ ID NO: 197520 - DNA, 1000 bp, Homo Sapiens
ccttgagttaatttcctgctctatagtacacggctaagttgcttgcctttgacatggttggctcaagctgaggcagggctggaggcgaagcccatcagcattcccttttcaaagtctcaaggactggctgccctcccataaattccaggactggtgaccagaccttattcgctgtccaaatgatgaaatccttagctttcttcatctacagagcaaattcacaacaggcagatgtcacatacaataggactataaaaataatacagctgcatgacactttctaatttgttcctttttgtcttcatggcagccccggtacccgtgtagtcaaagagaggtaggactgtgaggaaaaggtactgcgagccaggaacgacatgtctcattccaaaccttggttgtggcatattttgtggccttgggcaagtcacccaatctgtctgctccttctttccaaaatgtgaaacaaactgaaaaggggctgggagaatgcattagtttggtggaagggtctgggccacttgtttccatcagtgcaataatgacctctttctatttacaagaatggctgctctcctcatttcacttttggtagtcaagtggatttgcaagtaaatgggagctctggtgacaatctgtggagcattctaaaagcccctggtttgcattatccagagaaaatgtcagggattcttgacagtgttccttaaaggggctttcaacaggactcacttcaagactcccatgaagcaagttttacacagaaatgaaattatgctccattcctgttgaaaattaaggcaacaggaaatttgtgctttgaagtgtggccttgaactttatatgttcatttatctcaaatgactgactgttgcctagtgcattgctctgtgatccatttaaatgcttaacaaacattggtggccaggtagatggatgaatggggggctaaatcatagttagtaaaaagtcaccaattgttaagttttcccctagctct

SEQ ID NO: 197521 - DNA, 1000 bp, Homo Sapiens
tctccgtttttctgtgcttcctggaaatcatgctggaagcaaccagatttgaggcgcagcatgaaacatctgtcctgttttggcttctcattgagatgttcattcagcttttgcatacagcaccttgctgccttgagacaaaattttaaaaacaaaaaagcattgccaggctttttaagctattgtgcagggttgctattaggaactcactgcacttagactctccagcccacccaggaatataggtctgacccttaaggatagtaaataagggagtgaaatccaagaaaggctgacactccctgtgcagttatttttcaacccagaggctgcttctgcatatgatatcgcttatgtaacttttctttgcaaggactcctctggtgccccaatctagcctccacacccatccctccccatatcatcagcacaatgacatttttgctgctccacccagctgcgaatttgccaacagtttaaggatgtggacattgagtaaacaaagacacaaaattgaagttggcttttgtgcaactagcttttaggagttgcagttctgttctttcaggtttaaagtttcagtgcagtagaataagactgcccaaacaatattgcaaagctgcttaggaatttccatcactaaaaatagtattatgttactttgggataaaagatttttaatttatagtgtagctcccatgtaaggatatgtatattaacctagaacaaccttgctagtttccatacgccagacttaaaaataaatttatgattaaaacctttttaagaattccaacaatactgagtgaccatcaattctttagaaaatgggaactaattaatggaaattttcttcaaagaatctgacctattaaacatgatattaaatattcatctattttaaaagctgcaaatgtcaatgaaaaaaataaagctgtcaaatgctaggagcatttcattaagaaagcagcttcaaacattgatgagagttttataaagt

SEQ ID NO: 197522 - DNA, 1000 bp, Homo Sapiens
tgcaaagaacttgaactctacagtccacatagcctcacactggtcccctacattgacaacagtatgctgatcagatctgatgagcaggaagtagttgagtcagtgcagttggcattaaacctggcagatggcagtctggcagggtccagtctggcagggtccagtctggatacaaaacagcgccggttgccagatgcagtggctaatgcctgtaatcccagcactttggaaggctaaggcaggaggattgcttgagctcaggagttcaagaccagcctcagcaacatagcaggaccttgtctctactaaacattaaaaaaaaaaaaaattagctgggcatggcacatgcctatagtcacagttactcggaaggctgaggtgggaggatcacttgagcctgggagttcgagactacagtgagctatgatcacgctgctggactccagcctgggtgacagggcaagaccctgtctgaaaaacaaaaacaaaaccctggctgggcacggtggctcgcgcctctaataccagcactttgggaggctgaggtgggtggatcacctggccaacacagtgaaaccccatctctactaaaaatacaaaaattagccagactcagcggcacgcacctttaatcccagctactcaggaagctgaggcacaagaatcgcttgaacccaggaggcagaggttgcagtgagccaagatcgtgccactgcactccagcctgggcgacagcgagactctgtcacaaaaacaaaaacaaaaataaaaacaaaacaaaacccagctccatttacttgaatagaatcatatcagttatttgaatagagagtatttagtataaagaattgttaactaaatgtaaagttgttaaccagctaacttaaggggtaaaaagaaaactaagaggtcatggcagtagcaacggcagaaagcagctaccacacttagtccttaagggacaagtagaagagtttgaaagatgaaaacttagaagctt

SEQ ID NO: 197523 - DNA, 1000 bp, Homo Sapiens; identical to SEQ ID NO: 115005

SEQ ID NO: 197524 - DNA, 1000 bp, Homo Sapiens
cactgcaggaggccttggttgttcttcccctgcccccgagctagagagagggggcatatggaggcagccactgtttccttgctggagtctctctgcttctattttctatctctccctgatccatccgagttacttgagtggcttctcaactcccaaaccagcaggagagccaggtcacagccttcatccccaggctggagggaggtgagaatgaaagggcctgctggaggaaggaggggctgcagtgacagcgacgaaggtagggctgcacagtcttccattatggaaatagttctgcactcttcgctacttgtagctgagctcctgcagcacctcactgggataattgtagaaacttaggatgccttcagagtggcttattttttccttccagaatgcttagagggtggtggaaaaaataaaacaagatttttatgggaaataaatttgagatgcatgagtggcctttaaagctttagtaagtggagaacaggcagctctgaaacaagacccaagtgaatcagaaggacagccaccctaaagggacctccccaaagcggccccaacctggcgctggaaagacggggaggctctcagcatccaggcagctgccaggatcaactcagtcatcctcttgtttccgaatagagctgccacgtgatcttcctccaccctctgagccattctcaggaagagaaggagggaggtctgggatctcaacagggcatagaggctgagagggacaaggatacttctgtctgctttctgatgccaaccactgggaggtggtacctgaccttggtgctcactggtagctaaatgccctcacgtttcaggtctgtgtggcacgtggatggcttttgttgccaccttgagcacacggccctccagtctatgtgtgtgacccttctctgccctccacctccaccagcatcgggcgtggtgtgtggcatacagcaggtactcagctgggtgggagcattatgtagagcaggaattc

SEQ ID NO: 197525 - DNA, 1000 bp, Homo Sapiens
attctccctgctatggtttgaatgtgtcccccaaaaatacatgttggaaacttcatccccaaggcaacagcactgagaggtggggccatatgggggttgtttgagtcacaagggctccaccctcacgaagggattaatgctgatgcaactttgagcctgtgctctctcttgccgtgtgactgacaccttccaccatgtcatgacacgtcaagaaggaccctcgatcttggacttcccagcctctggaaccatgagccaaataaacattgactatttcttaattacccagcctgtggtgttctgctattgtgttgcaaaatggactcagacactcccttacattgtcactgaaggcatcttttcccctttattaggttgaatttgtaaactcctggaagatggggaccataacccattcatctttctatttcccacacttctgtttagacaccagaggaattatgacattttaatatatccaaaagcccccaggagaacacgcaaatgcccagccctgtgctgatcattcagattctgcacgttggaggcaaggccccagctccccaagccatgtgcaatggctggtcctcagagcacatgtcaaggaatagcagcgtggtggataagaagcacgtggtgaaaatgaaccaagaaagaagatgatggggtgagaaagatccacggtcactcacttgtgaagtcagggtgtctctggaactcaagcttcatgaacttgacatgcttctgtcttcctaccccattttaaacatatggttaaaaatagcaggtcactgtggtgatcctggggtgggggaggaccaaggcctggactaccatggtatgtggggtgcagagagcaggcacctggccacaggctggaggaaggagaaggagaaaggaaatggcaagtctgggaaacgctactgctgcacagtttagtgcaagcttagagtggagagcaacatccagctaccacctcagcttctgtaggtcagaattc

SEQ ID NO: 197526 - DNA, 1000 bp, Homo Sapiens
gaatcttaaaaagttgatctcatagaactagggaggaggagggttgttaccaaaggctgggatagttaggggggaaaaggtgttaggagatgttggtcacagtttacataattacagtttaatagggagaataaatttcaagagacctactgtacagcaaggcaactgtagttaatgtcatattgtattcttgaaacatgtaaggacaatggatgttgtattctcaccataaaaatgataactatgtaaagtaatgcacttgttaattaggtagatttaaccattgtaaatgcatatatatttcaaaacatcatattgtacatgataaaagcatatgatgttatctgtcaattaaaaaattttagaagaatgttatgcttggataatatgacttttatctacatagagcatttcatgttttcaaaacatttccatatctaacgtttcattgtattattgccacagacctatgcagtaggtagaaccttatttgtccttatttgacaggtaaggaaacaaaagtataaagaggttagatgcctgccaagttcatatgagagattaaagtaggactcaggtccactgactatcagcctgcaataaaacactttttaaaccttcttttatttgaaacacattcatattcattcattcataatctctgtctctctctctctctctatgtctgtgtctctctctgtctggatcttcctatctctctttttctcactgtttcttctctctttttctgtctctttctcatatctttggccattttaacgtttaaactcacctgaataaagagtcaacaaatccactgcaatagttatcagcagggaattgtggccatttcacaataattctatagttcaaaattctgtcatagttcattcatagatcccctttctgatctagttcattctctacattacagaagtttgagcatgctttatgggttttacagaaggataatctcaatacagaaacacgtcttgaattc

SEQ ID NO: 197527 - DNA, 1000 bp, Homo Sapiens
tcatcctcaccagcatttgttattttttgtctttttgataatagccattctaacaggtatgaggtaatatctcgctgtggtcttgatttgtatttccatgatgattggtgatgctaatcattatttgtcaaatatctactggccatttgcatgtctttattaggttgagttatattcctgctatacctaattgattgaaagtttttatcatgatgggatgttgaatttatgaaatgctatttctgcatctattgtaatggtcatatgttttttgtacctgattgtgttaacgtaccacatttattgatttgcatattataaaccatctgatataggttggatatttgtccccccaatctcatattaaaatgtaattcctaatgttggaggtggggcctggtgaaaggtgattagatcatagatgtggattcctcattgactggtgctatccttgtaattgtgaatgagttctcatgagatttggttgtttccaagtgtgtggcacctcccactcactctcttgttcttgctttcaccatgtgatgtgtctgttcccacttcgtctaccaccatgagtaaatattccctgaggcttccccagaagctgagcagatgttggaaccaggcttatacaccctgtagggccaattaaatcttttttaaaaaataaattacgcagtctcaggtgttggtttgtagcaacgcaagaagagcctaacacatcatcctcaaattcctatgatgaatcacacttgatcatagtaagtgatcttttaatgtgttgatggattcagtttgctagcattttgctcaggatttttgcctctatgtttcagagatactaacctgtagttttcttttattgttgtgtcattatctggttttggtgtcaaggtaatgcttgcctgatagcctgagttagacatattccttcttcttcaatttaacatagtagttttagaagaattagtattagttatttgatagtttggtagaattc

SEQ ID NO: 197528 - DNA, 1000 bp, Homo Sapiens
caacatagttggaccccatctctccaattattttcttaaaattagccaggcatggtggcacacacttgtattcccagctattcgggaggctaaggtgggaggatcgcttgcacctgggaggttgaggctgcagtgagctacgatcatgcaactgcactccggtctgggtaacagagtaagaccctgtctaaaaataaaatttttaagaaagtaaaatgagaattcataaactatgaattctagatgtggttctacaagaaaaactctagaatgtcagtctgtaggcatgctcaaaggttttgaccctatttttttttttttttttttgagacagagtcttgctcttattgcctaggctggagtgcagtggcaccatcacagctcactgcaacctccacttcccaggttcaagcaattctcgtgtctcagcttcccgagtagctgagactacaggcgtgcacaaccatgcctggctaatttttgtatttttagtagagatggggttttgccatgttggccaggctgattttgaactcctggcctcaagtgattttgaactgcccacctctgcctcccaaagtgctgagattacaggtgtgagccccccacccagctgaccctattttaaatattagcaaatgatgtatctttatatattaaaataaaatgtttagattatgaaagctattttttgttcccttaatttaatcatcactctgatttatttatcaactactattccttttcctcatctgtaaattgaggggatttgcatagaaatactagataatcttttaaattttttcttaaagcttaaacatgttataaaactgatgattcattttttttccacattctaagattaatactgttagattttattataaattaataaagttcctcttttaacatgtaaaataatgcctgacatttcttttaggtagttctgattttttattatgagtgtagccttaactgtagtgcctttgaagctgaattc

SEQ ID NO: 197529 - DNA, 1000 bp, Homo Sapiens
agtgtctctccgtgtcgctaagacatgacagcacattggtaaattggggttccgggagttggaatccctccggctttttttgtttttttggtcggggtgggaggacagggtctcactctgtcgcccaggctggagtgcatggcacaatcatggctcaccgcagccttaaactcctgagctcaagtgatcctcccacctcagcctcccgagcagctgggactataggcatgcaccaccatgcctggctaattttttttatttgttctagagatgatctcgcccaggctggcctcaagcaatcctgcctcgacttcccaaagtgccaaaattatacacaggaaccactgtgcccagcccggtggcttttaacactcagattactttcctgcctcttatgccccagccccagggctttggtgggtagccacctgctaaggagggccagcagcttccttttctacataagactgttggaaagatcagcctgttcctcacctgacaagtctgtacagtttctcttcttaatctggttcctaatttcaattgtagccgaaatctgccttcctcccacctcagaatgatgacgggtaaggtggcattggcagcagggaatgtgtgtgcttcacaccctgatgcctctctctggtctgagaacataaaagaagggaactggcgtctgatttgagtgtttagaattttgaactgaaactactttcagtccagttgaatgagaagttattttaagagtgatgcagaaacttcccagccagtgagtccaataaaatatctttttttacttttaataaagtaaattggcaaccccaaaaaatcctttggtaagcatgaacaggaactgccttctggcaccacagctgctgctaaggaatccagcttgattgccgccttgttttttttttttcttacattcccaaacgtgactatttcctttcagaattccgttgatgcagcaaagccgctgctgcggaaggcgatccagatc

SEQ ID NO: 197530 - DNA, 1000 bp, Homo Sapiens
aatcattggtatatctaataaaagtgggcaccatgcaaagtctaatggaaccctcttctccagcctaagtatgcttgagagcctcatgtaaacagaagaaatgtgtctggtgaagtgagaatggggaagtttttgttccttgaagggagaaactgaccaacagtaggaggcagctacctggtgccatggcatctgagttaaggccatcatccagtcctctcagctccagcatcagtgccttcaaatatgactttaagagttcttcctctgcccggaaggatctcagaagatccccctaggcccaaaccaacgtattagcaacgtcgttctttttttaaaccactgtgtaaaatccatattttagactagtggaaatggtaggggaatgggcattgctgtagcaaatagcaagagtgaaagcaacttattcttgggtgggacgaacccaaggaaaagaataggaaaaagttctagaaacagaaagattggtgaggggaacttggcttagagtcggaaagacaccaaaatttggaaggaagttaaaaaacgaggaagggagagaagaaggaagttactagttctgagacatgttctccagcttctaggccgcctctgagagacatggtcaggcccttttttctggggagtaggagaaacgcagaaattccattcaaaccctggttcatttaacaaatacttatttagcaactaatggttccaatcatttttcctggtgctggggattcagcagtgaagaagcagaaactggtttaaagcaatttgatatctacagtcatctactaatgagtgaggtgtgatgtgagttcagcccctgtgcccacaacggaatggccccatctacttcctaactactatataattttaactacctgcaaatgaccaacagccttcacctccctagtagatcaggagccctttatttactcttttattcgtagagatggggtctcactatgttgaccaggttggtcttgaattc

SEQ ID NO: 197531 - DNA, 1000 bp, Homo Sapiens
tacaggcgtgagccatcacccctggccaattactattttaataataaaatgatatactaatattaattctttaagctttttctgtgccttttatattaccaaagaattaactgtactagcagccttaattcacaaagaaagacttacatggccatgtgattgaccacatcacagactcctaaggctgatcccgcccctaaaagtctgtgattcatccagacttgtgccctgtgatgcatccagtctctcaaacacatctggctcttttatgtcttgagatggcagtcagaattgcacatgaagttgaaggcatactgccatggcttttcataaaagcaagagaagtatacagactttttctgtgcacttcctgatgctgccccactcccaggctgtttggcctgaagttttagggaaaatctatgtttttcaacctcagcacacactggtggttggcttcctgggttgcagctgacagccagcattccatcggtgcagttttactaccttactgcaaaggcattgccagagacatagtcattttggagcaatatgctgctttcctgctcgtttgtacaggactctgaggagcttcccattatccatcctcatgcacttgtctttctgcttcctagacacttaacagattttattggctgtttgtaaatcaaactggtcccaactaatgacaattcctgatgagcatagctcctaaatttttccatttgggatgtatcagcttttctctactccttgcttcctgtgttaatgccagtgccttttttcacaatgaaatagggaccctggtcccatgttttgctcaaaatatgggctgataaccagaggaatatatgctacctaactgtggttggctaactagccaacagaagacgcttttcactttgggtttcataaaataattttgtgcagaataatctcacagtctctataatttatttaaacaaatcttcagaaacataatttttttgttagagaattc

SEQ ID NO: 197532 - DNA, 1000 bp, Homo Sapiens
tcctgagaactcattcactaacatgagaacagcatggaggtaaccacccccatgattcaatcacctcccaatgggccccttccacgacatttggggattatgggagctacaattcaagatgagatttaggtggggacacagccaaactatatcaggcactgattcttggattctttaatctcacattatttctatgttaaaaaaaaatggtattaaggatgctgtctatatttcatagattccttgatgttaaagatattaaaacctacttaacattattctacttcaagaaatattaaaataattaaaataatatttaacataattttatgaagggtcataagaataacaaatggtgattatttgataaccaaatattaaagggaaagtattagtctcattttccagattaagaaatgaaactagttgcttgccaattgcatgtagctaaccaatgtcagatctgggtcaaatctagtttatctcactttcagtgttgggctctggaatgttctacaagatcagagctttaacaggagtcaatctaagaactggtggactctatgatgcattatcaaaagcctttagactaaagctaaagtgacctatccagctccacacatgcatttagtataaaatagggtcaaggaatgttagaatgggaaagagcattagagaaggtggttcagctctctcgttttaagataagaaatgtgttttgtgaggtttttatgctccagctgcatcctggctctagtttcttcttcaagttgaagaagaactattccctaactcagtgttctgtaagtcattaaagcctaaatttgcttgacatgattatttgaattatgcctcattggcattaaaataataaaaagtccagtcttctgctttctaagtcaggttttctagtagcaatctcaaaatcttgccacttctgccactttgctacccagccattgaaaaacataaacttctgaattataaaaataaagaattc

SEQ ID NO: 197533 - DNA, 1000 bp, Homo Sapiens
gcccggccccagggctccacggctccacgggcggggccctaacattccagagggcagaacctctgacctctgacccccaaccctagccacctggggccagcccacgacagtcgcggtcaccgcccctccagctggagcgtccccctaggagcccggggaggggcggcccgcccgcgaaccctcgagcgaggccaggtcgccgtaccgccatgagcccgcgcggctccctagccagaccgcggccccctcgtccaggccccggtacctcagcgcccaggctccgccgcgaccggcgaccggcgactcgcgacccgcgacccgcgacccgcagctgccaccgcgcctgcggattggctacgaacatcagcagggcccccctgggggcgggactggggaggcagccaatgaagtcagcgctgggcgggcactggagcgagcctggctgcgcggagagctcatcccgggaccacagggcccggggcggggctcggggcggggctcggggcggggctcgacagggttccacaccccggaagtggccctcgccccgcccacccgcctaccaggtctacccgcgcgggccctggcttgttttcgcgtctgttcggagtaataaggcacctcagctcctccctcccaaagtgcttggctttctgctgagccgcagctttctcgcccgtaaagaggcctttgaccccacttgtgggtaatgatctgtagctgtgactcggggtggattccagtagcgtggggtcccctgagccctcctgcggggaagggctgggcgcagatgggcgaggggtctttctgcggcgggatctgcgctcctgggcctttgagggccgcaccaggggaggcattgccccaccccgagaagaaaacagaaatccacgagtgtaaaacatggatgcggacaacagggaccaagaaaacttaagtcgtgtttatcaaatgtcaggtggccgaggatttcttaagatgaaaagtggtggaagaattc

SEQ ID NO: 197534 - DNA, 1000 bp, Homo Sapiens
tgggctctgtgggggtgggatccgctgagctagaccacttggctccctggcttcagccccatttccaggggagcgtatggttctctctagctggcatttcaggcaccactggggtacgaaaaaaattcctgcagctagctcaatgtctgcccaaacggccgcccagttttgtgcttgaaatccagggccctggtggcataggcccccaagggaatcttttgatctgcgggttgtgaagaccttgggaaaagtgtagtatcagggccagagtgcaccattcctcacgacacaatccctcacggcttccttggctaggggagggagttcctcaaccccttgtacttccccggtgaggcaacaccccaccctgcttctgcttgccctccatgggctgcacacattgtctaaccagtcccagtgagatgagccaggtacatcctttggaaatgcagaaaacacccgccttctgcattgaactccctgggagctgcagaccagagctgttcctgttcggccatcttgccagccacccccatgtttgtcttttttaactgctgttgctttaaagtttgttttgtctgatataagaatagctattcctgctcacttttggtgtccgttcatgtgaaatgtctttttccatctttttaccttaagtttttgtgagtccttatgtgctaggtgagtctcccaaaggcagcagatggttggttggtgagttcttatctatccttcagttctgtatcttttaaggggagcatttaggctatttacattcaatgttagcatggagatgtgaggtatcattccattcatcgtgctatttgttgcctgtatacctttgttttttgttttttgctttttaaattgattgttttataggtcctgtgagatttatactttaaagaggttctcttttgatgtgtttctaggatttgtttcaagatttaaagctctttttttgcagttcttgtggtggtggcttggtagtggtgaattc

SEQ ID NO: 197535 - DNA, 1000 bp, Homo Sapiens
tatttagttggaaccaaaacacagataaagatggctcattgaaacgtatcaatcgtaggatatcctagggaatctgtgaaaagtgctgagggagctgttccacttaataagatgaattttccattttcggcacataccacatatgggagtctactctggctacttattttctttctttctctgatcggttgtaaattaccatccacctccacagcctaaaaacaccagagtaattgatgcttgtaaagccgcagggtgaggggtattcctgcactgagtgattactgatggggaagggtggtgatactgtgccatctcattttattttattctttttatttatttgtttatttatttatttgacagaatctcgctcttgttgcccaggctggagtgaagtggcgtgatctcagctcactgcaacctccgcctcccgggttcaagtgattctcctgcctcagcctcccgagtagctgggattaccggcgcccgccatcacgcccagctaatttttgtatttttagtaaggacggaattttgccatgttggccaggcttgtcttgaactcctgacctaaggtgattcgcccaccctggcctcccaaagtgctgggattacaggcatgaaccactgtgcccggcctattctatttatttttaagatcttgggcaacatgctcattttagagaatttgctttcaagtcatgtaatttatgattgaaccttgggtaagaatctcttgctcatggaaacctaactcagctggtggttttcttcctgctactttgcagcccaagttcagaagtagatttttaatgatagaagtcaccataggaagacactctcctttgcactaactgggggttctcagtcctgcctgtacatcagaacctcttgtggaatttttacaaactctctaggtgcctggacccagcccctgaagatacagagtggttctgggatgaggcaaggggaagaatctatcatttaaaatgaattc

SEQ ID NO: 197536 - DNA, 1000 bp, Homo Sapiens
tgttttgtctgggatagtaatatagccatatgaagttttttatttggtgatttcctttcaaactatctgagtctttatgtttaaagagagtcccttctaaaacacatgaatttgtatcttgctttttaaaaatccagtttgataatctcttttaattggagtgtttaatccatttacatttagtgtaattattgatatggttgttttctgacttttgttgtttctggtgagaagtcagccaacactctcattgtttccctgtgaggaatatgtcttttttctctatttttcaggctttctttttacatttgattttcagcaatttgagtaagatgtacctatgtatggtgtttgggtatttattttgcttgggttcattgagctttttgagtctgtatgttactggttttgatcaaatgtaacaaatgttttgggttaatatttttccaagtgttttttttttgcccctctctcttttcttctaggatgtcaattttacctgttattgttgttttgttcatttttttttctcctaaaattttcccctttgtgctttagtttgggtgatttctcttgacccttagtcttagtctagtgaggtcttaagtcttttgagtgttagtctagtgaggtggctataaaacaaaatacaggttttaaacaacaaaaatttatttctcagttctggtggctgggaaatccaagagcaaggtgctggaagatttggtgtcatagatggtgccttcttgtggtgttcttacatggtggatgggcaaggcagctctctagggcctcttttataagcacactaatgccattcattttatcatcttcaaaaggctctccacctcaaatatcatcacattggggaataggtttcaacgtatgaattttgaggtaacccagacatttaatctattgcacctatcttcatgttcaccaatcctacttttgttgctcttttctgccttgttttcttttatattttgtctggaattta

SEQ ID NO: 197537 - DNA, 1000 bp, Homo Sapiens
acatttgacatcacaacattttcacctcagaaaataattttcttctttttcaggtttctatatgcaacacttaagaaattaattctttccttccatttctttggctaaaccatggaatcattcttgactccttttctcacacccatatccaatccatcagcaaatccttcatgtctatcttcaaaatatccataattcaaccacttcttataggtcttgtctaaattatcattctctctagttggattattataataatctcctaactggcttttcaatttctgttcttgcttcccttctccaacacagagtttattctcaatacagtagccagagtgatcctttaaaaatataagtcagatcatgtcatttccagcttacagccctgcaatagctccctatctcattcagaagctcctgcaacgcactccacggtctaggccctccactgcctctctgctcttgtcctgtagcacccacctactgtgcactctcatcagccacactagcctccttcctgctccctgaacccactaggcacactgattattataaacctcagggcttctacaattgctgttctatctgaaattctcttcttctagataccacgactcactccatcttcaaaccttagcttaaatatcatgttttcaggtaaaacttttcctaaccatccatctgaaaactcccccatgttatctaaaccacactactcctattcccttctccagctttatttttatccatagctcttaccactttgttatatttacttgttactagtcttccctgagcagaaattaagctccatgaagatagagatttttttttccccgttttggacactgttatattcaaatgcctaggatagtacctggcacacaatagacacccaatattttgttggatggttaagtaaataagaacttttaaatgaaggcaccatattaagatgcaaaattttcaaaggaaataaagatgtcttcagaaagaattc

SEQ ID NO: 197538 - DNA, 1000 bp, Homo Sapiens
gtaaatgagaagacacaaatatcctcttaagaagtttgtctgcagaaagaaggaaagatttggaacgaaccttgagaagagacaggctttcttaaggaagggcagagttgggccaatttaaccaaacctcaaggggttagaaggctaaaggattcaagttcaccatttactgagcagttcatcggtggggaatgtaggcatctggctgggtagtgagggttggggataagacggaaggagggggatttgactgaatgaaggctgaccccctactgccacctctcccttttcttacccagaattggagctggccattagaatcactctttacgcagtgatcttcctgatgagcgttggaggaaatatgctcatcatcgtggtcctgggactgagccgccgcctgaggactgtcaccaatgccttcctcctctcactggcagtcagcgacctcctgctggctgtggcttgcatgcccttcaccctcctgcccaatctcatgggcacattcatctttggcaccgtcatctgcaaggcggtttcctacctcatgggtgggtgagacaaccaccccacccccacttgccactctccccgcctaaagctcttgtggatgtaggggtcttccccggttggcagggaggggtgtgaggaagtcccactgatgcttgtgtagtgcaagtttcctaggtgactccttcctttctcttcccttgtttaggggtgtctgtgagtgtgtccacgctaagcctcgtggccatcgcactggagcggtacagcgccatctgccgaccactgcaggcacgagtgtggcagacgcgctcccacgcggctcgcgtgattgtagccacgtggctgctgtccggactactcatggtgccctaccccgtgtacactgtcgtgcaaccagtggggcctcgtgtgctgcagtgcgtgcatcgctggcccagtgcgcgggtccgccagacctggtgagcttgcccataaactatcctaggaattc

SEQ ID NO: 197539 - DNA, 1000 bp, Homo Sapiens
caccagtaccaacctgtcctgattattgtagctttatagtgagtcttcactggtgttttggttcatttacatttaatgtaattactgttattttaggacttaaatctaccattttattttttgtttatttttatttttgtttctcttttttaattctttccctataggttacttgaacattttttaaaattccatttttatttatctgtggtatgtttagtcccagatgaagaaatcgctttttaaaattaatttttgatacataatagttgcacttatctgtggggtacatgtgatattttgatcatgtatacgatatgtaatgatcaaatcagggtgtgcaggatatccatcgccttaagcacttactgtttctttgagctaagaacatttcaaatctgttcttctagctattttgaaatatacaacatattattaactatagtcaccttactgtgctattgaacagtagagcttattctttctatctaatggtatgtttgtacccatcaaccatctcttcatacccttctccacttttcccagcctctggaactatcatactactctctacatccatgatattaacatttttagcatccatatatgagtaagaacatgtgatatttatctttctcaccctggcttatttcatttaacataatgattatccatgttgctgcaaataataagattacattctttttatggctaaatggcatttcattgtgtatatatatatcacattttctttatccatttatctgttgatgaacacttaggttgaatctatatctcagctattatgaatagtgctgcaataaacgtgggggtacagttatccctttgacatactgatttcctttcctttgataaatatccagtagcgagattgctggatcatatgtagttctatttttagtttttttgagaaacctccatattgttttccatagtaactgtacgaatttgcattcccaccaacagtgtataagaattc

SEQ ID NO: 197540 - DNA, 1000 bp, Homo Sapiens
ctctatgcaaaatgtaaaaattagctgggtatggtggcgcatgcctgtagtcccagctacttgggaggctgaggtagggggatcactggagtctgggaggttgaggctgcatatgagctgtgatcatgccactgtaccccagcctgagcaaccaagcgagaccctgtctctggggagggggttgaggaggaattgagggtgtaggaaggaaaggctaaagaatcttcaaaaggctgggcctggtgccttacgcctgtaatcccagcactttgggaggctgagacgggcagatcacgtgaggtcaggagttcgagaccagcctggccaacatggtgaaatcctgtctctactaaaaatacaaaaattagccaggcatggtggcaggtgcctgtaatcccagctactcgggaggctgaggcaggagaatcacttgaaccctggaggcggaggttgcagtgagcctagattgtgcctactgcactccagcctgggtgatagagcaagactcagtctcgaaaaaaaaaaaaaaaaaatcttcaaaaatacagtaaatatccagtattcattttaagctacatggtttaaaattaagccagaaaatattcggatctttttgtgctttcaatgactcatttcaaaacaagttttttaaaaattataaatatatagactcttagtaaatatccctgttttcctcacctttttatatggtactcattttccttagttgcttttctcctcctaccatttgggtttctttttttttttttctttctttctttctttcccctctgttcggaagtgataccatttgtcgtaggaaggtaatccctggctgtgtttgtcatcaagagtgtcactagccatctggatgtgacccactaagatgtttaaaccgttagattgtattttatgggcagtgtattgaacttaaatgctttaacaatttcacttagtttcaaatcttgacatgctattttcacgccctttcttggaattc

SEQ ID NO: 197541 - DNA, 1000 bp, Homo Sapiens
tggtatctgggtggctcagaaaaaccacccactacccctgactgtgtttctgtaggggaagcctgtctgatgaattacgttttggtttattccttcaattcccccaagttagtcatttctgcctgccttgtaatggttggtaaatgaaagcgtacttgtatttcttgaaagatttatcacatttcacgcttccacgtagtaaggcttccgaagtcaccttttctcttagtatcagccttgagaattgacatgaaaacagaagcacaattttcaagtttctgagtaatttctcccccgtggacgtaatctggcattggataatgtgtataaagaagagtagtgatttcagatcctcagcattagagcaattttttaaaatttacctttctttagctttttcatttcatgtaagtacaaaatacaagtaatagcttgacgagcctggcttggaaccttaccagaaatgaatagtatgcttttctcaattttctattatggagtcacgtagccttgtaacttaaatgaccctctagttgcagtccttgctgcactgtctccatgaataaataggatgtgttccatcagtaccttcatcatctgaaattcctcaatagatgttatgatgcaattctgggaccttaggcaggaggttaagggaggaagggagacaccaccaatctacttctgcaggatgctgctatgaaaatggccctgagtaacagctgcacattttcacagatccccctgaaacagaaaatattcttcctgagtttgggtattgaattactgtgggtttttaaatgagagtataccgagtcacctaaccctgatcccatagctgccactgagccacccctctgtccacactgggaagggtgttagcgcaaagccaccacagctaggaggatggctaactgacggcacctatcccaggtttcttggctcctgggctccttagactcctagctttcaaacctcaaggtcatgtcaaaaagaattc

SEQ ID NO: 197542 - DNA, 1000 bp, Homo Sapiens
actgcaccgggtgacagagtgagactgtctctaaaaaaattttttttaattaaaatacagtcatttctcattattcacagtagttaagctctctacaaagttgtggcaaacactaaataagtaaatatggaatccatggttagaggaaatacagggttagattcctgccagcctctggtcacattattttcttcaaccaatcaaaagtaacttgtttgcatttgtctaaagactttctttttgagacagagtctcgctctatggcccaggatggagtgcaatggcatgatcttggctcactgcaacccaacctccacctcctgggttcaaacaattctcctgcctcagcctcccgagtagctgggattacaggtgcatgccaccatgtccagcaaatttttttggggggggggggcggggggggctgaggggatatttttagcagagatgaggtttcgtcatgttgaagctggtctcaaactcctgacaagtgatccacccaactcagcctcccaaagtgctgggattacacgaatgagccaccatgcctggcctcttatttactatatattgttgattaatatcaaactcacagccaaaagcactataacacatgcctgaacaaattttctccaaaaggcacagcacagccttcacgtatacaaaggaacactagacagcacataagttaaacagtgaaattaccaacaaaaagcacaaaaaagcgaaataatgtggcacaaaatagacctcaaaaagtcttgtttgacctcagctgggagtgtgtgcatagaatgacaaattcttcactgctctttaagtgtgcaaacgtcaaaaaaaaaaaaaaaaaaaaaaaaaaagcactgcgagtatcaattttagggttacaaacaaatgttacgaagacgtgaattcacaaatatggaactcatgaataatgaagccggaccatagaaacaatcaaggtaacctaaactaattgttataaagaaatgaattc

SEQ ID NO: 197543 - DNA, 1000 bp, Homo Sapiens
atacatatgtaacaaacctgcacattgtgcacatgtaccctaaaacttaaagtataataataaaataaaatttaaaaaaaaggataatgtccaaaaaaagatcaatgctaattaaaatagtaacatcattaacacttaaaagagtactacttcaaaggtactactacacttaacatatttttattctttgataaaaacatgttaagtgtagtagtaccttgctttttgttttcctgtttttgttttttctttcagaatgctgccatcttctggtcaaattatatcacttcacaaacacaagactcgaaataggaggccaatagatttacacaaatttcccttttatcattaggcgccacctattcaagatttgtgcctccaatgttccaaaacaagagacctttaaagtactgttaaaaaaaatttcagaggttaaatccacagaagacgtttcatgacttgtaatgttatgaaaatatagacgtttcagggcttgtaacgttatgaaaatgtgtatcgcacagtaaatgcacaggaaagtatagataagggaatatttgactttgttctaggtctataaaaattgatgtcttaggataaggaagcagttttgacatatatttgctgttttcatttctacaaactttaattttcaaggttactcaccttgaaagagtatgtttatagtagtttataaaagccgttattgaataactgtcctccttacaacaaagcagacacttgtggctggcaaatttcttcttgtcacagaattgttcatatttgtgaccatctttagattatttatcaaaggatatgtaatttaaagggctagtttttatatacatatgcatgattacttccaaattccacacttctacactcattccttttcattcactcattcattgaacaaacattggaaatcttatgcgtcagtctttatgctaaccactaaattcaaacagaaataagatgctgcccttggacttgagaattc

SEQ ID NO: 197544 - DNA, 1000 bp, Homo Sapiens
cccacaatgggatgcagcagtttgctctaagaaaaaaccatacaggtaactaattgtacaaaaatgtgaatgtgggcctaaatcaacactgcctctacttgccacccacttcagcaatttgtttgactcctatgagcctcaattttgtcatatatcagacaggcacaatgatacctactgaatcattacagggtttacagattagagagaagggacaacatacatccactctgaaagcagattaagtccctgatttgaaaagcaatgttaggacaaatgacatggccacacagagctgaagtgtatgcacagaagggacactgctgcttgaaatactgtccacacaaaggggaatctccctcggcagccttgagagccttggctacccctgcaccgccctttcagacttgggctcatatcggctgttgggaagaaatgatattaataatctatccatttccatttaaagaaatgctaaggttccctaatatttaatagcctttcaaaaagtagtgacaattatattccatattaccaaatagtgagatattggtttttattttcagaaatataaagtgattataatatggaacatccactttgccagtagctacatgagcttggagaggtccatgtaggagtacaagtcacaagaaacacaagacactgcttcttctttagttttatgctcttctctccctcaggtcaatttctcatctattggaggatacatgggtatcctcagtgaactcccaatccatctcctcccgactcccacgtggcagccttcctctttccttctgcagctactgggatgcctgacacctactaccatgcttgaggatatccactctccaaagccacttcagcttctcaagccatccaggccccaaggcacataccacatcaaagctgcatcttgccaaaattgtcacagtctcaagcgttcatcatgtcacccctccaccagagatctctcctactgaagtggagagaattc

SEQ ID NO: 197545 - DNA, 1000 bp, Homo Sapiens
atgcacctcagacagtgcaaggtgcttcctttgatctatcatgtcagcagtgggagaggtccttagcctaacagaggtctgactaaaagaacagccttcaaagtgagtgtcattttcagaaataaccatgctctgccagatctgtatggggttttttaatcgcatgctgctgacagaacgtttcttgtcatttttgtttttctgcgtcccattatcctctttttctttctcctttgaagtatttacagacagtctcaatctctacaactgggttttgaggaggattctgcagcagtttacaacatacctaacaacagagcaagatcctaaaaaacaacaacaaaaaaaaagaaaaagaaaaagaaaaacgctgtggcatagtcccaattcttgctctctcattgcctcccacctgctctccattatccaatatatttgttttcgggtcatgctgatttagatagccatctctagctttaattcagatggcgtaactgatccgaccacatgttacatactaaatgatctagaagaccacgctgcggttctcagttcatctttcagtaagcatgttttgacattgagtcaaataatcctatgaaaatcctttcataaggattatttgtcataacgatagtgttatcttttgttgtttgcagctgaatgttttgatcattgtttaattgggatagacatattgtcacattacagatcattttacataaaaagaaaccacagaaatctatcagcaatattaatccctaattaaaatgcattgacatcatacttaatgtatgaaaagagctgaattaagcctttttaaattagaaaattcactttaggcagaaatagtggctggaaacatagacatttttctcttctagtggacaacgatgagtataattttactggtatgacagctacaagaacattctgtgcctttgattcagctctgtactgctcttcctatgaccttgagaactcacttgtataagaattc

SEQ ID NO: 197546 - DNA, 1000 bp, Homo Sapiens
aagagcctgtacagagtctaggcagcatgaaggaaagtgtggcacaatcatggagtgtgcatttctgggtaaatcctgggaacagtgaggcgttgggaaagatcttggtaagatccagctcacagggacctttgcttgctatgctgatgggtttggactgaattaaagcttttgaagaggcatggaaaatatttttaaaagccactgatgtgttcagtttttcattagcagagcatcactatggtggccatttgtaggaaaaattagacaaagcagtgtgatacgatagagatgctcttgaggctgctgcagcaatttggatgaggaactatggcagtccaagccaaccggaagcagatgtgacagccaaagaattattgaaagaactgaggaaaaacgtgggagagtgaaatagagactatctgccaatgatcttagtaggatgactaggagattctactgagaggcagtggagattctgaaggaaagataacattagtcttggctctgttggttttgattttcctccaggatatccaggtagagatgcacagcgggcgctggatgtttggatcttcagaatggggccaacctgtactactgctaagcccaattctcttctggataattatcttccaaagcataaacaattattggagaacaatgtgggctttatgtcattctccgttattcctattgccatcctttctttttctaggtcaccaaaataaaactctggagatgtatcaaataattgaatcaaaatactcacacatctgcataattttttttcctttccaaaagcactgcctagtacagtctctggtacatagtcagactcagagaaattgtgtggaatatgtgcatgcgtgcataaatggataaaggaaaaacaggcacaacgatgccaataagggctccccatggacctggaatgggatgcacctttgcctgcatcagccaacgtgctcatgccttgagcagattctgtagagaattc

SEQ ID NO: 197547 - DNA, 1000 bp, Homo Sapiens
ctggaacctccgccttctgggttcaaacatttctcctgcctcagcctcctgagtagctgggattacagacacttgccaccacgcctggctaatttttatgtttttagtagagacagggtttcactatgttggccaggctgatctcgaactcctgacctcaggtgatgcacctgcctcggcctcccagagtgctgggattacaggcatgagccaccgcacccgacccacttcatttttttaaatgcactttttccatattttaacatctttcaaatcaggatatgtgttattgaaggtgtgtcattgtttaattggcagcagtttttctttcctagtgacacataaaatgatgatgcatcttacaattgatggcgtgtcttagattcagaggagagtagtatatttgtggttaattttcccatacctcaccaattttgggacagacaagggtaatatttggctatgaaccactggaacctaatttctcatgtcctcttctcccttttcccccatggtttctgggtgtttctgctgctttacttacagtacttaacattctgcagttattttccattttgtagttatctcaatctgtagctgccattttccctaccacttgggaaagcaggccagtatggccatgatggttttataagccagtggtgtcatacctttagcaagtgttctgtcctaaatactagtgtttcttaacaaatttgttaatactttgtcttcatttataggtgaatgcagcctcatgtgattatagctttctggattgtgtgacctctaaaaggtcatactagttcttcatatttacaaacaaaatgtgaattttcatttatctttacatgcagctctttaaatcattttctttcagctcttccatgtctacatttgggaaacttagaactagttttttagaatcacgacttcaggatttttcctgccctgtctaatgaactgttgttctgggaagaatgcaactaagggtgaattc

SEQ ID NO: 197548 - DNA, 1000 bp, Homo Sapiens
ctttactcttgtgtcatagttgaaattgggtttctctcaattcctgcctgaggtggtatttagcatgtagggggctacttttttcctttattatcaaagttagtttggatagaatcaggatataccattggacagagggtaacgagcatacacattgggaagacaagcatgtgaaatgagaggaggtaaacattttcatcgagctccagatagggtttggcaaatctggtctagttctaagttgtaatgggctacatagaatctaatttctccgttgtaaacatttgtagagaaaaattgtagagaaaataaattgacagttatttgggggatgtttaagaaaatcctaaatgctgaagagacccaagcagaagtaagccagttgagttacttggctccctaacaggttgccagcaatcaccaaatgttatcacagaagtattcaggactttagactgtagtaaagaaataataataattatcaaactccactggtttgttggacttgtatatagctacacatattgtttcaaacatgtagcaaagctatgactttgttaacagtaagcatttaatatgctagtatggttttatattctcttcttttctttgggactgagatctttgggatctaacttgacgtcctgcaaagcatttctatccaggtttttaatatcagacttcagcttcttgggagatatgatatcatctccctttgaaaagtggtaatttttaaatacgctttctgtacaaatgtgctgtctggatttattgcttagctgcctaacctcaaacattaatgttactttgctattcatatatttgcatgtttccttcagtgacttgttaaaggaactttaaaaagaaggatgtgaagattatcaatatatttactaaatgtgtccttttgggtcttctatcttgaattgtagaattagctgcatatcacccaacacctcctttgagcccagaactgcccggcagttgccggaaggaattc

SEQ ID NO: 197549 - DNA, 1000 bp, Homo Sapiens
tatgatggacatttgtgttgtttccatttttggctattatgaataatgctgcttgaatattatgcacacttctgtggacataggctttcatttctcttgggtagatacctcgaagtagaattgctggaccatatagtaaatgtatgttaaacataagatgccatcaaactgtccaaagaagctataccattttgaattcccacaatgctccatgaccttgcaacacttgatattgtcaatctttttaatatttgctattctagtgcatgtactatggcttctcagtgtggctgtaatttgcatttccctaatgcttaatgattttgaactccattgtacatgcatttatatattctttatggagtccctgttcaaattatctacattatgagtgtttattcaaatcatacatcttttttgtggtttgttttatagcccagcatatggttatcctggtgatatcccatgtgacttcaaaagaatgtctattcttgcctctattgtggaacagtagtccaatttccccttggtggtcaggatccatcacttcagcctagactgtaactccctttttggcctgttgattcagaggcaccaggagcccaaagtggccaggtggcagtcttaacttccagttcaacagaattattgttatcttctggtgggagccctcctccctctggaactatcacctctaagccagaagagcataaagcaaggggaagaggaagcaaatattttgctagtgggtcactaggggtaatagtgaatgctgcccctcccatctgtaccccttgattcctggacctgtaaattctggctatgagagaaacagcaccatatattggacactgatttaaaacatgtagagccttctggagacacttgctaggtattaacacatagctggcactgtaactgaatcttcaaaatgccatttcaccatttatcaagccagctgcttcaagatagtggggaacatggtaagaccaatgaattc

SEQ ID NO: 197550 - DNA, 1000 bp, Homo Sapiens
aggttaccagccctggacctggagaagcctgtagcacaggctgaaggggtacataggaaaagtgaaatctcactgtaggtttctgtggtagatgcagagagggaggccagaggaggggaaccaaggggtgcgggggatggatgcagcgggccttatggagaggtggagctttggctctgttttgaagggcaagctagattgaaaaaagtccggggaggagtgaaagaagattttcgggacttgagaacatagaggtgaggtgtaaacaaagtgggcctagcagcagtcccataggagcaaaatcttcatcgaaaggagtcacgggcaagaactgtggtgggatctgctggcgtctgatgattctagtccatcagcaaactttttctgtagaggaccagatgctaaatatttttggcttcgtaggccatgtggtctctgtcacagctactccactctgctgtggtaacatgcaagcagccatagataatatggaaatgaatgggtgtggcagtgttccagtaaaactttatttacagaagcaggtggtgggctggatttggcctgcgggatgtagtttgccaactccttttctagaccctaaatgcccggctaaggcacatagactttatcctgaaggcagtgggaagccattgaagttattttggataaagaagtgaagtggcagaagtgatgtttacattttaggaacattcatctgatagctggacaagaggcatgggccccttttggaaggcagcagcagtcatccaggcatgaggtcttgcggtgaacagtagtgaaaatggaagcaaaggatcaatggaggagatactgcaaagggagaaccaatagcgttttcagtcttcttagacttaagaggcaggagtcaaagaggatgaaagtttaagcttgcttgtttacggtggtatctttgacagaaatgtagatgttgggggtggaaaggatagctgatgcatctggttttagatatgttgaattc

SEQ ID NO: 197551 - DNA, 1000 bp, Homo Sapiens
tgggcttatttcttggactgtgactcagttccaatttcgcatggtttcaaagaggagaaggtgaaaagatacatgtttacttctggcgttataaatttgcaaaaaaaagtcacgtagagcacatacacataattattttatattttcacaaacctttattcaaacccaagggaaaaatatttacattcatgtttgccagattattggagactgagagtatattacacttaatgagaattactaatacatattttataagttccatagctacttgtaacacagtagtacctcttctttttgctgtttatttccacagagaagattaaattatactctctctttcctttttttttttttttttttgggatggagtcttgctctgttgcccaggctggagtgcagtggcgtgatctcagctcactgcaacatccacctcccgggttcaagcgaatctcctgcctcagccttctgagtagctggtattagaggcacccgccaccatgcctggctaatttttctatttttagtagagatgagggtttcaccatcttggccaggctggtctcgaactcctgacctctagtgatccaccagccttggcctcgcaaagtgctgggattacaggcatgagccaccgcgcccgacctaaattatactcttaagaacagatctccttatgtggttagatgcaaaatatctcccatactcagtctgggatataatgaactaggcttgaacttcagaaaactaatcacagttaattaagagttggggcctttatgaggtgattaagccaggggggctcctctcttgtgaatgggattaggtagccttttataggggtttggagggggaatttctccctttcaccccctgccttccgccatgtgaggactcagcattccccccactcctgaggaggtagcacaaggcaccatctgggagtggagagcagccctcaccagacaccaaacctgctgccacctccgtcttggaattc

SEQ ID NO: 197552 - DNA, 1000 bp, Homo Sapiens
atgcacgtgtaatcccagctactcagaaggctgaagcagaagaatcacttgaacccgggaggcagaggttgcagtgagccgaggtcacaccactgcactccagcctgggcagcagagtgaggttccgtctcaaaaaaaaaaaaaggaagctgttatagtagtccagatgaggcataaagaaatggcatatatattgtccctggtaggactgttctttggcagctcactcttgctgtatcttagaagaaaacttttgtccagctcattcgcaagaggtcagatgcgagtaaatgagaatttgtcagtgaaatgcaggaaagaaccacctccacctctgcctgcctcccatacttcagctccccagcctctaatttgcaatgcctgccctgccaagtacccaaccctgtagttcagcactgctattaataacagtgttatggaaagccctactctaatatgaacagtatggtccattttagtggccccagtaccatggtctttcccaaatataaaaacattattttattgaaggtcagtatgtacagtttaagttgtctgtctgcttacctttttctcataaatgaaagataaaaatgattgaaccaaatgtagaataggctcttaatcccttctaaatcagccccagatttagcactgtacttagatgtagtctgtaaaatcaaagaagcaaagttggagggtcagttaatccggcgttgtggaagggattcccacaatgagtgtaagtttggattagaacataaatttgggccgggcgcagtggctcatgcctgtaatcccagcactttgggaggctgaggtaggcagatcacgaggtcaggagatcgagaccatcctggcaaacactgtgaaaccccgtctctactaaaaatacaaaaaaaaattagccgggcatggtggcgggcgcctgtagtcccagctactcgggaggctaaggcaggagaatggcatgaaccagaggggcggagcttgcagtgag

SEQ ID NO: 197553 - DNA, 1000 bp, Homo Sapiens
tctataggggactgaaaagcaaaagattcattggcttcttaaaataggagttttagattagaaactatacatggctaaataaattaaaccatcagaaatgaattgtttttagtggaaaagagcaaaaggcacaaggcctgggtctcactttgctatgtatttcttcctcccctaaagcttccttaaatatagcaaacagttttacttatgtgcaaaagcaaagactaagatattcatctgaaaatgaaaatggcagctttcgagctgcttgacaaattaacaaaaatgttgagaagaagacagaaaaccgaattttggcttacttcagataatagaggagaaagtcttattcagggtgaatccaatgggtttggcttgaaattgtccctgctatgggcagtgaccctgagggattctaaactccttcatgggcacccttgatctacatcccaaacatcttagatgaattcctgatggtctggtggcatttggtaagcatggtctactgcatgagttctggatggactgaaataatcagtttccccaacgttcttggtgggttcagagttaaagtcaggcttttggaaaacactgggcatctgactgaaagcctttttgctagaaggaagcctgcctcttacccacagcagttgaagtgctctacttgctaacagacagtcaatggcattgcaatactcgtgctccccgactatcagaaacaaatgcccacagcagaggaaggactgcagtcggctgcaccgagtgacccctccaccctgcttaagtgccattactcttcttgtactgaaagctttcttcctcataaaattgcctcatgccattaaaattcacttaactttctaaccctcttataattttagtgcacaaatatttctataaagttctgaatttcatgtttattttctgcaattgcacttccaagtgtctttccttaagttccatctgaatggccaaactgaagtagagagctgtggaattc

SEQ ID NO: 197554 - DNA, 1000 bp, Homo Sapiens
ctcacagcagccatctcttagattgaacaaagtaggatgcttttacctagttttcagcttagccttgtgctaggcaacctgtgaagtggctctgatggagagagctggtgtaattagcagcacagggcacgtttccagaaacagcctggatggagaaacagagggcacccttgcacacctgtcacaccttcagcctctgctcaaaagtgtccaccttctttgtccacagtagctacagaagtgaaaatgtttgcctcggcatcctctccatcaccgtcaccatcacctagcccccaaacggggatcacagtgctctatccacccctgagagcaactgtgtgcagtcaccagcaaggatggttctgccagagtgacgggcactgcctgtgaccatacagtggcagcagtcaagaaacaagcccttctgctcaatacttcatcttttcctgtgtgctgagaattaagtacctcttagctagttagaaaaactagcagttattattgatgaaatgtgtaagacagacattttgttaggggcagaggagaaaatagtagaaatgtccagtcgttgaggactgtctgtaaaaccattcaaatcaaaccacttcaagaaggataaagcactgtgctgatgtaagggatggtcattagataagaggagtattacatcttatgctctgtgaaggaaagggtataggtcttatatttttttttaatccaatgataacaactgcaaacatttacttaatgtgtgctaggcaccatatggagtgctctatgttggattatctcatttcatcctcacaattttatgaggaatatatcattattatcaacccattcaatggatgaggaaaccgaggcatacagctggcaagtggcaaagccaaagttagaacccaaaagtctgacaccaaaactcaacctgccccctctgacacagaaactttcatggagctcagtgagaactttaggaccagtgtaggcactctctgaattc

SEQ ID NO: 197555 - DNA, 1000 bp, Homo Sapiens
caccctaaaaagctcctcttcagtatgggattctggaactggatcattaaccagtcagatggcaataaggactcctttgcaggcatccagtgtggtgtgtggaaacttttaatttactgagcatctaaattcttgagattttcacttggtggactgggtgtggtacaggaccagcaatgctaaaaaccaaggccaggagtgaatgataaggaaggcaaagctgcaaagagggtttaacatgcagctttaacaggtcttttaggctcaagtcagatccctgttagagaaggagtgggactgtgagatatgagctggggatatttgggtggatacatctgagaacattgaacttccagcttcccctgaaccctcctggctgacaatagcagcctcttcccccttgttagagtagatcagcctctccttgcctctcttatgcagaaacctctcttgtggtagatgccttgcaagatgatacttgtccagcttcaagatctgcccctacctatatctagattaataacttgggtcaggccacatgcagtggctcatgcctgtaatcccagcactttgggaggccaaggtgggtagatcatctgaggtcaggagttcgagaccagcctggccaatatggtgaaaccctgtctctactaaaaatacaaaaaaaaattagccgggcattgtggtgggcgcctgtaatcccagctactcaggaggctgaggcaggagaattgcttgaacccaggaggcggaggttgcagtgagccaagatcgtgccattgcactccagcctgggtgacaagagcaaaacttcatctcaaaaaaacaaaacaaaacaaaacaaaacaaaaaagaactcaggtcaggtcttagcatagctcaagagagggagtataatccctgttaagggaggaaatagcttattcactgaaagagttgcaggaggacctggctactgcatggcagctggaactgggaaatatgtataagaatggaattc

SEQ ID NO: 197556 - DNA, 1000 bp, Homo Sapiens
agaggattgcctgagtcttcttatgggcctggcctgggtgtgatattgatcactcctgtccagaaatcagttccatagttcaactgattttaaggccagagggaaatgtggtctgtgtttctagagggaaaataaaataggacttggtaactacacagtaattctctgccataagtttctgttgtattttcacatagaattggatagaggacaagcagctgacatctggaaggacaagagcagttgagttcctaaatgttcaatgagaactgctgaatcagaacccctgagtgagggaaggtaatgagcccttttaaactagcatgctgtgtgattctgtacacacactgaagattgggatctattggcctagaagttatcagggcccaagccaactaagcgtaactagttgaagatgaagatgttcatgctaattctgaacctttaggcccccataacttatacccaacctgatctatagtcataaaagcaaggtagtacctctgcctctgctgagggattctacttcagaacccaggataggatgaggtgaattaggcagccagggttgaaaatctaaggagggatcctcttaagttcattcaagagcagacttggtatatgaaacattacaagaaccttgcaggaactgagagtgagtgtccccttaaattttttgttctaggtaacacttgcctatcttcatatccaatccagtcctcctgactttgctcccaagagttatcttctgctcatgatatcattcattcaaacatgaaaatttattaaacagattatctacttatttatctatctatttccaaaaaaaaatcagtagctagtgtgatctagtaatagaatacaagtttaaagctgtatctgtgtgtttcctttacagatttctatggctatatttataatgccatttgatgggaatgtatgaatatgtattgacaactttgtagttgccattaaatatctatattgtactgaagaattc

SEQ ID NO: 197557 - DNA, 1000 bp, Homo Sapiens
gtaagctgctgcctgagcgtggctgccagcagctccactgtctcactctgtagaccagtgcacactaggacagcccggaggggaaaaacctggggaccctggaaggggagtattttggaagatttttctccatcctagccaatctccaccattctgtgttgggatgaagtcagcaaggcatcatttgggtaggaggggatacttagacttatttacaaggttgacttatcctggaggaaaaacagtggcttacggagtgacctgacttgcttcacttttaaagactgtatagaaatgaacactcacaacctatcttttggaaacttgttcttttgacgtggaatcatgtgcatgtttcttgacttatgtcataaaaggtaatagaatggtctcactttttggtaatctaagcatttaggaatatgaaatttatcttgcataagaaaagatgttaacacattgaatttccaagttattcaactagagtaatttttgctaaaattttgtaaatgctatcagaaatctcatgaatatagtttacaattaagagttctatttctgctaatgactgtgaaaagaaaattatagaccaatgtttctaaggaacataaatgcaagaatcctaaataaaatattagaaaactgaatccagcaatctacaaaaaggacagtacattatgaccaagcagggtttatactaggaaggcaaagttggtttaatatttaaatataaatcaatgtagattactttgttaacagcataaaggagaattatctgatcatggctgtagatacagaaaaagcattcattaaagtttaatactcattcatgataaaaacttgcagtatactaggagtaaaaaggcattttcttaatcgatgaaggatcttgatctaaaatacccctacatctgatatcatgtttaatggtgaaatattgaacatcttcccccagagattgagaccaaagtgaaggtatccattctcattacttgaattc

SEQ ID NO: 197558 - DNA, 1000 bp, Homo Sapiens
agtccagtgagtttgtggttctccctgaacccatgtccatgtggacaaactttgttgtgggtcaccaataaaaccagctcaggttctccttccatcttgcgtttttgtcctgagagcttcactttggtccacggggagtgctttctctggttttctgcctactgaggggcacagattgtctggtctgtgttaggaggtgcccaactgtacggttggggacctgagacacaaagtgcacaagaattatactcctactgatggtcaacagctctcatggggtcttctaagtctaaataccctcctcatctaggagaaactgcttcttatttgtacaacactagctcatgcacctaccttcctaccttcctaatggcataactccaaggatgatctgggcctttactggctattttggggtacatttgacttgaacaaaattgttcatttgacatgcaccttagaaaagtaggaataagatttctcaggatgaatggggctgccgttttttgttggtaggcagaggcctccaaatgaaattctgatcaaaaattgcttcattaaaagattctttgcccaaaaccaatgggaaatttgacacacttaaacaacaacaaactagactcatttccctagtaaatgcttctttttcttgtcttccagatgcctccgtgtatccagctctctcttttcccccttatccttctattaggttggtgcaagagtaattgcaatttttgccatgactttcaataatctctctcctatacttcagtcaactgctcacttctcttcccccttttcagacccccaccctttgcccaataactctcctaaactccaaaattccagttgcctctgaatatccatccctctctttaagccaggtatgcagacatctgtagaatttaaaccttggatccaagctgaattaagagttatacttaaaggtttccctaaacccagcaagactagcaaaaattcacaaaagaatttagaattc

SEQ ID NO: 197559 - DNA, 1000 bp, Homo Sapiens
ccccacccagggttcattttccctgctaaatcccctgatagaacttggccgggcactgccctgtctgaggctgccacgccgaagcaggccctgcagataagtgggttaccggagaaggccagctcgggtgtcccaggccccagagggtcacccctggctggctggcagctcacccccagcacctcctcctcctccttccccggagccaggcaggcaggagacagcagatccttccccccagctctgtgagcggccggcccccagccgccgcggggaatctgagctatgctaagcggctccagatcgcagcatctctgccctgcccgggcacggccggcccagacagggcgcctctacctgccgtggctgccgctggaaagctggcaccgcctgggctgatggaaaaaatctccctgcgggttatgtaactgctcaccgccctgtccctggctccccagggaggctcccagccactaccaagagagagcagtggcccctgggcaggaaggagaccacagagggtcactctttcaaaaggaagaaaatagtgttgcgttatctgaggtcctcctctggaaccagcctgtgcatggcgccaaggtgtttcctgaaaatgcttaaggagctcagaggcctgccccagtattatagcaagaagagagctaaacctagcgggagggagtggccacagaggaggaagagggcaggacagctttgttactgtttttcttttcttttctttttggcaaattattattgcagtaaaatataccataaaattcaccatctgaactagttttaagtgcacagttcagcagtaccccgcatacctacaatgttggacaatgcccatgaccatcccccggcaccccaccaaaccctctcatcaccccaaacaaaagccatgtacccaccataactcccctacagcaataactcccctacagcaataactcccctacagcaatgcctcccctccatcttccatctccatgaattc

SEQ ID NO: 197560 - DNA, 1000 bp, Homo Sapiens
cagtaaaggttcctcacacagatttatctcaaacctcctttccaaatttatcatccagtactttccctatacagcaaccttccaacctagccagggctttcttctctttagccagtaatgcacatctaaaacattatgcctgccaatcacaattcctgatacgtcttcatggttatcaagtcctaaccacctttctttcaaggtctatccatcaaatatcccatgaaatctcccctgaccactggggaccagctcatagtctcctcataggtggtgagttctcacttttatagggttccaacagaaagcactatgaatacaatattgtttaactatttgtgttttgcctatttaacaaagaaaatgcaaaatgactaattcctaacttgatagcagtttaaagctagaaatgtccccacaatacaaattaccttcaatgtaacatataatctcaacattacataacacattcctaaccaccaatccaaacaaaatagaaaagaaaaaggtataataaaacactaactttttaaaaatcacctcaacttgtctccgactatattaacttgatttgggagtttaggaatggggaaaaaaaaaaaaaaagaacaaactgacctttaactggatacaatataaatcttatatagtcacctacttgcagatatctctgtatgtctgaattgctgtatccatgtaatgagcaggatatggcctaggtgctcctggttgaagaaaagcagacactgctgccatttcctaaaataaaagacatagtttacatatttcaaaagaagaaacagtcttacagtttagatgggaaactaaaagttggaatgaaatttgctgttttttttttaactggatacacatgtataaacttcatagcctaatgcagacttgaaaaacacatttgtagcccagtcactcttcagagaagatgggtgatctgactctggaaggactgaagtcagagaggtcaaaagagcacctagaattc

SEQ ID NO: 197561 - DNA, 1000 bp, Homo Sapiens
gctcccactattctaccacttcataatacttgtctgccctgaacacgcccaggtgcatccacacctctgaacagacaagtttctttctttcttttttttttagacagagtcttgctctgtcatccccacccctgctaggctggagtgcagtggcgcaatctcagccatctcccaggttcaaatgactctcctgccttagcttcccaggtagctgggattacaggtgggcaccaccatgcctggctaattaccatatatatttttttgagacggagtttcacttttgtcacccaggctggagtgcaatggcttgatctcagctcactgcaacctccacctcccaggttcaagcaattctcctgcctcagcctcctgagtagctggggttacaggtaactgccaccttgccaggctaattttttttttttttggtatttttagtagagacagggttttagcatgttggccaggctggtctcgaactcctgacctcaagtgatccgcccactttggcctcccaaagtgctgggattacaggtgtgagccaccacacccagcctgaacaggcaagtttcttccgccccaaatgccatctcccctctctgcctggagaacttttcttcattcttcaagacccagctaaaatagcccttttctgtcttcctctgggaaatcctgtccttctgcagcacttggtatattccccatctcttttccatcctgctgtcagttcctgcacacctgtctgctcagggccctgggaggtcctaacaggttgaggctagattctgactgcagaacagttggtgctcactaactctttgccagatggagctgagatgacgctgacaactttgggctggtggcccaggtgcagtttgtccttggctctcttgctccctgcctaatctatataccttacgacaatgctgcaccaaaaatgtttatgcaaattagtcaatgtgccagattaacttggtcaaagtttgctcttcatgta

SEQ ID NO: 197562 - DNA, 1000 bp, Homo Sapiens
aactctacactttaccttcccgctttctaacttcttgttgtttgtctttatgtcttattgtactatgtcttgaaaagttgtagttatttttgattgattcatcatttagtctttctgcttaagaatagtttacatgccataattatagtgttataatgtttatgtttttccatgtgcttcctattagcagtgagttttgtatctttagatgatttcttcttgctcattaatgtccttttctttcagactgaagaactccctttaacatttcttataagacaggtctggtgttgatgaaattactcagcttttgtttgtctggagatgtctttatttctccttcatccttggaggatatttttgccagttatactcttctaggataaaaggtttttttttcttcagcaatttaaatatgtcatgccattctctcctggcctgtaaggtttccagtgaaaagtctgctgccagacatattgcaactccattgtatgctatttgtttctttttccttgctgctttaagatcctttctttatccttgatctttgagagtttgattatgagacaccttgaggtagtctgctttgggttaaatctgcgtggtgttctataacttacttgtacttgaatgttggtatctttctataggtttgggaaattctttaatattattcctttggataaactttcttaccctatctctttctctgtgtcctctttaaggtcaacttttagatttgtctttctgaggctattttctagatcatatgtgtgtgcttcattgttttttattcttttttcttttggttcctctgacggtatattttcaaataggctgtcttcaagctcactaatacttccttatgcttgattgagtctattattaagtgactctcaggcattcttcagtatgtcaactgcatttttcaactccagaattttggcttaattctttttaattatttcaatttcttttttaaatgtgcctgatagaattc

SEQ ID NO: 197563 - DNA, 1000 bp, Homo Sapiens
acatcacttaggtgagaaataaaatttaacctcaaaaaaaaagctaatccagtacattaacttacacaatgccgtccacagttaattgggtcagaaggtgctttaatatgtcatgcttaaatttatagcacactttttcctgtacgttaaatgaggggactgaattagctggctttaaagatgccttccaattctaacagtctacaattcaacctgaaggggagtaaaagagaaaataaaatatacagtcaatcctcattattcacatatgctgtatctgcatattcacctggtggctgacatttatttgtatcccccaaactaacacctgcggcactttggtgtcatgtgtagatgtgtgcagagtggtaacataatgagtcccccaacgagcacactcccagctgaggtcaaacaaggcaacaccgcctgttggtgcagctctcatgccataaataagtgtccatttctggccaggtgtggtggctcacggctgcaatcccagcactttgagaggctgaggtgggtgaatcacttgaggtcaggagttcgagaccagcctggccaacatggtgaaagcccgtctctactaaaaatacaaaattagccaggtgtgatggcatgtgcctatcatcccaactactcaggaggctgaggcaagaccactgcttgaacctgggaggtggaggttgcagtgagccgagatcgcgccactgcactccagcctgggtaacagagtgagactccatctcaaataaaaacaagtgtctgtttcacagtgtatttagtgccacatttttcacatttttgtgctgttttttgttttttagagacagggtctcactctgtcacccaggctggggtgcagtggtgcaatcctagctcactggagccttgacctcctgggctcaagcgatcctcccacctcagcctcccgagtagctaggactgtaggtgcaaaccaccatgcctggctctgtgcttttctgttggtgaattc

SEQ ID NO: 197564 - DNA, 1000 bp, Homo Sapiens
actaaagagagttcttcaggcaaaaggaaattattatagatagaagcacagaaatgcaggaaagattgaagtgcaataaacaaggtaaatctaagtgaatattgactgcccaaaacaatactacttcatgggatttaaaatgcgtttctcattatctcaaaaggtatagctggcacagtgggacacacctgtgcttccaacataatgaaaccttgtctcaaaaaaaaaaggtataaatcatattaaagtggtctagtgtccttaacattgtctgagaagtgatggcactaatttagagtagtttttgctcagtcaggaaggcatattatctataggataaatcactaaaaggcttaataaaagaatgtgtacctgggaataaatagaatactagaaaggaatatagaagaataaagaatagtagattaaaccaaatatggcaggaaaagaggaaaaaggaaactagaacatgcagattaaatactaaacatgcagatttgaactcaaacatcagcaatcattttaaattaacagtctttgatatatttttattaaaaattatcagattagattaaaaaactatattccacttataagagatacatctaaaatatatgggtaccaaatattgtaagtaaaggactaaaagaagactatccatgcaacactaaccaaaagaaagtagcatgcctgtattaataacagacgtactcttcaggcaggaaatattactagagagaaggaggaaatctcatagtgctagaagagtccactaggaagtatttgtctgcacctaataactgaaataaatgcaatattgacagaatgaaaaggaaaaatagaaaaattcacagttgtatgcctctctatagaacaagcaggtaaagagcagtgaggatagagatttaagcatctcatttaacaaacactgcaactgttaggatgcattattttcatgtattgggccataacacaagtctcaagaaatttcgaagaattc

SEQ ID NO: 197565 - DNA, 1000 bp, Homo Sapiens
agggagactattttagtctaatagacttcagagtcatgacaaccaaatgaaatgggctggccttgtctgggtcctatttaaaccaattgtaaagcagacatctttacattaagcagggaaatctgaccacgaacatggcaatagataatgattacttcagttaagtataataacagtactgtagtagtatttttaaagatccttatcacttaaaaacatgtactgaaatatgtataagtgaaataatctaacggttggacttgctttaaatactctagtcatctcttcccacaaaaaaaaaaaaaaaaatccaggagattgcaatataatagtcgttgaagctggttaacaggtactgagattcatcatactattctctacttttgtgtatgcttaagaatttctattaataaaagtttaaggtctttaattcaataaaaattgtaagaaaaaatgaagggactacaaatagtgtgtgaggtctttgcaattatattagctagtgcttaaaacactagatgaagggcatattttcatgatcaaccatttaataattaactatcttaattaaattttcacgattaagtatttaaattaatgacattctccaaacaccatacatgtcaagacacagtccaactaacgcaaatcctgataagctcttccatcccaggaaaaaaaagtatccacaaacacaatcacatacctaaataataaatgtttggtgccacccagccaccatagggtaactcttgcaaatgatttgaggcttcatggtttcccccaatgaagagcgtgagaactggagcctttttctctccagagtaatacctagaacataagagcaaagtcagttaccacaattaggcatagcagaaaagcaaataagttccgaaaaaaaaaaagaaactgagttcatcataaaaagttaaaaagctctttcaaaaggaattgcctggggctgggcgcggtggctccctcctgtaatcccagcactttt

SEQ ID NO: 197566 - DNA, 1000 bp, Homo Sapiens
gggcctcgggccccgccggctcgcgcgtcccgccgtccgcccaccggagctgggccgggccgccgcgcttgcttctgcccgccgcaccggggccggccctgggcctccgcggatgccgagccttgcaccggagggcgggcctcgctggctgttttccctcattgcctggctctgcgcggtagaggtcgcgagtggcgaaggctaggacgcattttgtcgaactgcgaggcgcggctggtgaggcgggtgggtatgagagctgcttatgtttttaaggctttcctgtcgctggagtgaaaaagaaaaatctttttttttttttgctatttcccgagggttctcctcctccccggccctcttaagccgaagcctcctggaacagaattgctgtactggcatctatctccaagtggtccgcgaacgcttctgcgccggcgatggtttctgttcctcagcaatagttccttgaggcatttttaaatgcacaaacgcatacccatcttaggtgttctcgagggacacggattccctaagcaaacgtccttagggtcctgagttcagcagcaaactttcggggaatcatttccgtgaaaacaatttatttgtagtacatcgagtgcatactgtcttaacataaggatgtgtatgagcttgaggcgcattttcatttagtggcgggcgggtgcatttcagtaggcgggccgcagagcttgtttggggattgcatttttctgctaaatgtgttagctttaatcatgtttcagtcactgttaatgtgcatgcatgttaaggttttaggttttttcccctgtgcagtcggatttttttctgtttaatattaatccaataaagacaagtgcagagataaagtattattgttttgcagtgatactacaatagcggacctagaggagcgcacataaattctaacttaagtgaatggtattttcaggccagacctagtttctatttctgttacttaggacacttaataagaatt

SEQ ID NO: 197567 - DNA, 1000 bp, Homo Sapiens
gtggagtagtggtcctctaactttttttatttcaggaccccctttacactgttattttataatatgcatatcattatacaatatttatttatatttatttatttatttattttgagacagagtctcgctctgtcgcccaggctggagtgcagtggcgcaatctcggctcactgcaagctctgcctcccgggttcacgccattctcctgcctcagcctcccgagtagctgggactacaggcgcctgccaccacacctggctaattttttttttttttgtatttttaataaagacggggtttcaccatgttagccagaatggtctcaatctcctgacctcattatccgcctgcctcagcctcccaaagtgctgggattacaggtgtgagccaccgtgcctggcctattatacaatatttaaaagagatcatattcattaatctcatcactaaagtatttaagtacatggaagctatcaagctcagaatgggaaatataagttttccaaaattcttggcagggcacagtagctcatgcctgtaatcccaacactttgagaggctgaggcgggcggatcatctgaggtcaggagttcgagagcagcctggctaatatgacaaaaccctgtctctactaaaaatacaaaaattagctgggcgtggtggcaggcgcctgtaatcctagctacccgggaggctgaggcagggagaactgcttgaacccacgaggcggaggttgcagtgagtggagattgcgccactgcactccagcctgggtgacagagcgagactccaacccaattaaaaaatatatatatatgtatatatatatatattttatagaattttggaaaatttattttatattatatatatattattattattatataaaataaataagttttcaaaaattctaattttctatatatattagatatatatattatatattagatatatatatatctattagatatatatattattatatatatctatt

SEQ ID NO: 197568 - DNA, 1000 bp, Homo Sapiens
tgattgctgctttgtgatacacttgcatatacataagatgggaaatagaaaagaataaaacgggcacagtatccctgaagtttcacattccgagacacgttaaaaatatttgctctttagaaatttgtttcaattgagaaactgtggtatacacacccaatgaagcattattcagcctaaaaaggaataaacaaaatcctctccactgcagacaaaatggatgagattgcaggtctgtatattaagtgaaataagccaggcagagagtgacaaatatttcatatcctcacttctatgtaggaacaaaaaagaaaatcttggccaggtgtggtggctcaggcctgtaatcccagcactgtgggaggccgagtcacacggatcacttgaggccaggagttcgagacccacctggccaacatggtgaaaccccgactctactgaaaacacaaacaattagccgggcgtggtgacccatgcctgtagtctcagctactcggagggctgaggcccaagaagcacttgaactcgggaggcggaggttgcagtgagcccggattgtgcctgtatactccaacctgggcaacagaaagagactccatcacacacctacacacaaaaggaatctcaggaaggtggaaagtataaaggtggttagcagacgctaggaagaaaacgggtgggatggggaatgaagagaagtggataatggggtcccaaaatacagaaagatggaataagtgagttctagtgtttgatagtacagtatgaaaattttagttcacaagaatttctggcatatttccagatgctttggtaagaagcttcctaactttctcattatgctggtttttcagctattctctttctgctctcgaaatcatgctggatttttcgtttttggttttttgttttgagacagagttttgctcttgtttgcccaggctggagtgtaatggtgcaatcttggctcactgcaacctctgcctcctgggttcaagct

SEQ ID NO: 197569 - DNA, 1000 bp, Homo Sapiens
ctccttgctattcctaacatgaacatttgcaatgctattctctctgcctgaaatgcttttatgctgtatatctgcatggcttagaacctctatccttcctcaagtcttatgttcaaatgtcactttctcagtggggcctcccttaatgaccccaaccccttgagcactcactttctaattaaatgatttattatgtttattatctactctctgtttccctctactagaatgtagctctgtaagagctggaggtattttctgtttggtttccaattcctagaatagtgactggcatatagtagataagtgttcattgaatgaatgaatgaatgaagaataaaccacacccagttttctttggttgaaagaaaacaaattgttgctttagaagattatatcctctatcaaatttcatatttcttaagtattatttggcaaggctaacaacctataatgactggatgaatagctgtgaaaagatctcaggcaagggctaataggctcattctttaaaataaaacattttttttggcatgcaggacaaaaaattcacattaaaaaccaacaaatatttatatataatgtctttcagaggctgaagtataaaaccattggtcatcagaatctgataatactgtctctaagttcttataaaaaccaaaagtatcccttttgttcaaaaaagctaaatgctggaaatcccaaaagaaaaatactgtctactaagctaatactacaaaagtacaggcataacatcttccacgtaaaatagaaggctatgtggcaatctaatgatgcaagattcagaaaagatcagggtgacatgttaaactgagagaccattttaggtatgctcttggggttcattatgactgcaccctataatccagtttacatccatgttttacgtagaaatgcatctcttttgagggatgacataaaaagtgtagtgattataccatttttataaaatgtcccaggtatctacaaatatgaattc

SEQ ID NO: 197570 - DNA, 1000 bp, Homo Sapiens
agccatttaagattttgtttatatggtgaatctgttctaaggacagctttaaaacacaagcagaaaggcaaaggttcaaaaacgccttcagataatttttcagctagatgtttcaacagtaatttaaactttttatttttaaaatttaatgattctgaggtacatgctaagataaattatttcattatgctatttcaaaattcattttattttactttgtaattatcttgacatataggaatatgtaacaaaaattatacaagtcattcttatatgcttatactactttattcctaccagtaacttaaattgagaataaaataaactcagccaattcagtgagctgtttcagtgcattttatataaagttatatttgtgcatagtgtaatatactatcttttgaaacatttgataatcaatgttttgagaaagacagatggacagatacacatgcttacgtacccctgtgctagagaaggtgatgaatttgccatgctatcactatatcagtataatcaaaagtatattttgaaggacattttaattcaagatcttcatggaaagaagggaagccatggctaaacacccttaggacactctctgtactgtctccagtgccccctttcctcagtctattaagggcttggaaagtcctgcagtgaagaaaactgaattttggttagcacagaattctttatttttgaaacggagtcttgctctgttgcctaggctggagtacagtggcgtgatctcggctcaccgcaacctccaactcccgggttcaagcaattctcctgcctcagcctcccaagtagctgggattacaggtgcataccaccacgcccggctaattttttgtattttttagtacagacggggtgtcactatgttggccaggctggtctccaactcctgacctcaggtgatctgcctgccttggcctcccaaagtgctgggattacaggcgtgagccactgcatttagcctatcacagaattc

SEQ ID NO: 197571 - DNA, 1000 bp, Homo Sapiens
ttttatatgttgctttttgtatctgcaaactttatgaaacttatcagtcctaaaagttttttgtgatatctttagttttttctcgaaataaggtaatgttatctgcaaggaaggacagtgtgacttcttcttttccaatgtgagtgttccttatttctttctctggtctaactgctctggctaggacctccagttgaataaaactggcaaaaatgggcacccttgtcttgttccagatattcaaggaaagactttcaatttttgtccattcagtatgatgttagctgtgggtttgtcatacattgcctttattgtttgaggtgtgttccttctatacccagtttgttaagagtctttatcatgaagggatgttgaattttattcagtgctttttcagtatctattgaactgaactatggtttttgtctttgattctgtcaatgtggtatatcatgtttattggtttgcatatattgaaccatctttgcttccctgggatcaatctcacttgatcttttacatattaattattaatttaataagtaattattattgaagagactgtctaataatattaatattaataaatttaatatttatttttaatttaatttagtttgttagtattttgttgaggattgttgactatgtttctcaggggtactagaatatagttttcttttgttattgtgtcttcattaggttttggtatcagggtaaagctggcctcacagaagaagcagtaccttcttattaattttctggaataggtctgaatagaattggtattatttctttacaagcttggtagaatatagcagtgaaggcatctggtcctgggcttttctttattggcagactttttattatggctttaatcttgttacttgttattggtctgtttaagttttctatttcttcatgatttgatcctggtagtttgtatgtgtccaggaatatatatatatattcctaagttgtccaatttgttagcatgctg

SEQ ID NO: 197572 - DNA, 1000 bp, Homo Sapiens
cagattaccataaactatttattttcccaaaatgatgactcagaaattttaaagaagcaaaaaccctttgtaatcattttgattgtagttaatatgctcatacagagaacctcttctgcaatattaatttccacaacttttcctccacttgtttgaaccttcagctttccttatttaactcaaaagaattctttaaccctaggcaaaagtttacatttctatgcattcttataaccttttgcatgaaaacacattttactgttcttataccccttgcatgcaaatctatttttggtagtttcaattacgtattatactagaaactcctaacaatttttaactttaaggtaaaacttggtaagttgctttaattgtgtgctaactgccatcaaggtttgccttcttaggtaagggcctggttagttttatatgttcccaatccttaccagttgtgaagccagcaagtcaaatagttctcaaaacccaaaaagcagtttgtaaccttaaaacacttagcaaaccttgcatctaacctgcattttaccaataatctttatggctgtttttatttctcaaagattaaattcacatgaactgaaaggtactacagcttttatattccctttaaaaaacatttgatccaagtgcttgtttttctttagaccaaattaattagagttctttttaaagacatcaaacacagtacacacacatacaggcagaaaaaatcccagttgctgggtggggctctttaagagacagggctgggaaaacatgcagatattgaaccagagagagagctcatcccataaggcaggattactaaacaaagcattgtcaagcagttgaaggccatgccctcaggaagtaaaacaagatagaggcttgcagcacaaaccatacagacatgccaagcacaccagattggccacagcccaagactagtcccacaaatccttttccacaattaaatctttacagagaatataaacaggaattc

SEQ ID NO: 197573 - DNA, 1000 bp, Homo Sapiens
ttcatgttttgcaagaatacaaattatagaatttacattgcattggtttcctagggctgttaggaactaccactaattgggtggcttaaaacaaaataaattattctctcatagttctggaggcctgaagtccaaaactgaggtgtcgacatggttggttccttctgggcctccgaggaagaatctgttcaatgcctgtctcgtagcttctgatggtgctggcaattcttggtcttccttggcttgtagatgcatcactcccgtctctgcttctgtcttccttctctgtgtgcccatgcctctctttgcatttacatttctgtcttcttatagggacaccagtcacattggatttaaggcctgccctactctagcgtgacttgacttcaacttgattatatctgcaaagactctatttctctgtttcacaggctctgggtagacatgaattttgggggaacacaattcagctggatacatagagcaaacatacgagaatggctggccacatgggggagggaatgggaatgtgagatgggatacacaggcataaacaaacaatggccaagcaagaggtgggcctggacagagccggcagtggtgtgtacacactaagagccacacaaggaaacttctccgtatccattttggctctagattcaggaaaacagaagcaagaaaatcaaaacaaaaaacagtaataaaaacaacaaaacctcacctggctcttttttttttttttttttttttttttggcgttgtggcacatgcctgtagtcccagctactcgggaggttgagacaggagaattgcttgaacccaggaggcagaggttgcagtgagtcgagatcacgccattgccctccaacttgggcaacagagcaagactctgtctcaaaaaaaaaaaaaaaagaaaaaaagaaaagtctcctgaggattctgacccacaatctgactttcacatgcgtttgaggatagaatttacactacccaagaattc

SEQ ID NO: 197574 - DNA, 1000 bp, Homo Sapiens
ctaattgttttaaatatgtgttccattgtttccaagggtctaagtggggtcgaaatggagttattcttaaggaactatgataatcctggcttaacacattgatgtctagtccacccatgggtccaggcacaatacggacaaaataaatgtttgggagaggaaaaatcattataaaatgatggtgcctgccaggcaggtaaacaaacctcacataccagctgattggatgaaggaagtgtgattatatgagcctcacggtttttgttttgattttgttaacacaggctgacaggagtcacagtcttctcagtgaaatgcagtgaactgtagatatatatgcttggggcaactctgggaagagtctgatatcatcaacacaaatgcgtcactccagaaaacacaaatgtgtacattgccttttaaaggtgggtcaaaggcaccatccttggcacgtttatacaacattagttccagttatatagtttacagtagtgaaaaaagtaacacaattaacctgaaaaggttaatggtttttatttttccactcataatttgaaacactcatctccctcgtagaaatcatggcaataaagagttagtagaaaatctgaagttatagctcaaaagttcaataagcttctaagagcacttaatgctcaaacagcctaaaagtgtttttatggagatcaatggtcaattcactcctcagccgcattttttttctatgaagtgcaatggttgtatatttcaccataatatttaagacacaaagatattggctaaaatctgtacactgaaaaagtctttcaatgctcagtgtaccttgtaggtgaaagtcaatgtaggtggttataaagggagttggatctttggtgtctcttataggtccgatgctgagtaaaacaaattttaaattaatactgcaaatttcaaaaaggcacatatttaagagagaagagagaggtggctaccctccagaggtactcacttacaggaattc

SEQ ID NO: 197575 - DNA, 1000 bp, Homo Sapiens
tttggcactggctctgaggacaggcagccttgataggagtcctggttccaccatttactagctggataatgttaggcaagttattttacctctctctacttcagttttctcatctgaaaaatgaggacaataatagcacttactttgtaaggctgttggaggatttaaagagtcatacatgtaaagctgtcagcatggagcctgacacatagtgagctctgtgtcaggccagctcatattcctgttattattgttacccgtatcactctaacttccttgaggtggcaaattctactttgaacaattgctcccacgggagagttgactccttgtactgtcactggaggtggagagaatattaagaagttgtacataactgatgatttttataagaaattcaattgtttttgtttaatatagaatcattaaggttctgaagaggtcacttacacttgactgcactttatgggagaaattatgtgttacagcaccatttctaaatctgaacaattgctaagagcttaggacatcctttctaagaatattaaggttctacctcattccactctaaggtcaagggggtcagggctggcagtcatactcctttcctgtaggcaagaacttcatgggaagagggacaaaacagtattatcagagactggctacagtagccccttgggatcctctgagctcaaggggtcagactataggccagaagaaagatacaggcatctggcaaggaatgactaaaaaagagggtattacgtttccttctagattattctattcagttaaaaatggaagtatctgtggcagacagtattcaggaacaaagactgaatggctggctagattctctcgtgctctagttatcaggaatatgaacatataataaagaggaaaattgttacagaggagctagcagttcctacagccttgctcatttttcaggtatatgagtaaggaacacagaggccagggctcttctttcaatgaattc

SEQ ID NO: 197576 - DNA, 1000 bp, Homo Sapiens
aaataatgtcagttcataaaataatcttcagacattcttatttataaatgccatcatcaatagagttttcatttttcctttgctcaacaaaaagctatcaagtatcttgagtagctgttttttgttttttgttttaatagttatgacagggaccagcacggtggctcaagcctgtaatcccagcactttgggaggctgaggtgggcagatcgcctgaggtcgggagttcgagaccagcctggccaacatggagaaaccctgtctctactaaaaatacaaaatttagccagatttggtgttgcatgcctgtcatcccagctacttgggaggctaaggcaggagaactgcttgaacccggtaggcggaggttgaaatgagctgagattgtgccattgcactccagcctgggcgacagagcaagacatcccagctacttgggagtctgtggcaggagaattgcttgactcgggaggcaaagattgcagtaagctgagatcacaccactgcactccagcctgggagtcggagggagactctgtcccagatttaaaaaaaaaaaaaaaaaaaggctatggtaatgacctgtctccctcttgcttaagttttttctttctttctttctttctttctttctttctttctttctttctttctttctttctttctttcttttttaatctatctttctttctttctctctctctctctctctttatatttttattttccagagtctccaacccaggttggagtgcagtggtgtgattatagctcactgcagcctcaacctcctgggatcgggatcaagggatgctcccacctcagcttcccgaggagctggaactacaggtgcacaccaccatgcccagctaattttttattttttatagagacgggggtctccctatgttgcccaggctagtcttcaactcctgggctcaagcaatcctccagcctcagcttcccaaagcgttgggattacagatgtaaaccactgcac

SEQ ID NO: 197577 - DNA, 1000 bp, Homo Sapiens
gtgggagaatcacttgaacccaggaggcggaggttgcaatgagccgaaattgtgcctctgcactccagcctgggcgacagagtgagaccccgtctcaaaaaataaacagacaccaaaacccaccctgagatatgtttttttttttttccgtaatactgcaaagaagagttgtggttttttattcatgtggtgtgatttgtgttgaatgaagtattaagaagtgttatatcttttctgtgtcgtcttcaagattagattgtggaagaggcatgggggctatggttctcagctgactctgcaatatggttcccctctttatggatggggattagaggtgcaggtagtggaactgaagatactcttggtaagatgtgacactgtgcatttagtgaactttcatgtcagaaattgtactaccaactctagaagttttcttttgatagaaaattgtagctcagtcacagcccagagagttatatctaaagcttagtatttgcactttaatttcatcaacaggcagggacaaaagacctttcacttaggatatcctggatttgtggtttcagatatttgctgtgtgtgccagcttgcactcctccctcaaacagaagacactttattaaaaaattttaagtgaattccaaaaaaatcataatcaccttaatattcatcggtagcgtatggctccagactgattttattaggtaacaaaggttgccaggtaggaagcagagcagccgctagggagacccacccctcttcctaccaaaaaaatctttccagcccactaattagagctaactgaatcctcccttgaactgtaacactccctcctctgcccccccgctactttgagagggccaagtttttatcagtcattcacaatgcagtattgtaaaggaactgccatcacttatttttaaaaccagacacagaacccaccaaattttagcagaagagaactctggaaggagagcatcttagagggaaggggggaatt

SEQ ID NO: 197578 - DNA, 1000 bp, Homo Sapiens
taaacaacccaaatgtccatcaattggtgaatggaaaaacaaaacatggtatatctaaactattgaatattattcagcaacaaaaaggcataaagtactgaaatatgctataacagggatccccaaccagtctgtggcctgttaggaactgggacacacagcagaagatgagtggtgggcaagtgagtgaatgttcatctgtattcacagccactccccatggctctcattaccacctgagctccgcctcctgtcagatcagtcacagcagtagattctcataagagcatgaaccctattgtgaactgtacatctgaaggatcttggttgcatgctctttatgagaatctaatgcctgatgatctgtcactgtctcccatcacccccagatgggaccacctagtagcaggcaaatgagctcaaggctcccactgattctacattgtggtgagttgtataattatttcattatatattacaatgtaataataatacaaataaagtgcaaaataaatgtaatgcacttgaatcatcccgaaaccaccaccccatcatccgtggaaaatttgtcttccatgaaactggtccctggtgccgaaaaggttggagactgctgtgctacaacatggatgaacctaaaaaccacaatgctgctgggaggaatggcacatgctcatagtcccagttactccagaggctgaggcgggaggattgctgggcaacatagtcaccccaactccaaaaacccaaaaaaacaaagcccaaaccattatgctaagtgaaagcagccagtcaaaaaagattacatattgtataacctcacttatataaaacgtccagaacaggcaaacctatagagatgaaaagtaaatttgtatttgctaagggctgggagcagggaggtttgggggagaatgaatgactgctcatgggtacggggtttctttgggggatgataaaattgttcaaaaattagattatggtgacgattgcagaattc

SEQ ID NO: 197579 - DNA, 1000 bp, Homo Sapiens
ataatgactttgacatttccacaaatgtataaaattttatacaattcctttaagagatatgtttcaatggtattatttattcatggtagaaaatccaaaaagtacagtaaaagcaaacagaataaagaattaataatactactaatagatgatgttttggtttatgtaatttcagaagtacgctatacacatacactattttttacttatcagactcttgaaggaggcttataattatgagtagctggattgaatgttgaggcaaaagtttgtcctacattttgggtaggttctttaatcattatattaattttagagaactcgctgtggcaaaaatcatccactggttaatccactacctttacagagaccctttactcttattgtcttcaaaatatagactcttaaagctaataatgcttttcttagccactgttttgatcaacgaagtagaaaaagaaatatgctttgattttatgaaaaaatgccccttattgttttttctgccttgaatatggatgtggtatcatgaggtctgaaataaagcaaatgctatgcatggtcaggtagaaaaataatacagctgggttgttagtggtatcattgagcagctgaagcaattgcagtaaacctttatctctggacttcttgttaagtaagtaaagtattcactatttttattggcatctgttatttggccattttcttgtttgtggttagaaacaatatttacctaatatgagtcattacttggaaataggatgctacaaataatagaccctaaaatatgtgtttgaccgattgaaggagatagaaaagtgcgctgagcagccacaggaattcaaagctcaaaatggtagcaaggaaaagttaatggcagtttctaaagcctttcctcaagtctcatttctgatttgactcttgggaaattttcttgtgacattaactcaaggaattgttgatagattacacagagttgatccaaggtatgtgagaattc

SEQ ID NO: 197580 - DNA, 1000 bp, Homo Sapiens
gaggctttcttgagcctaggagttcaagaccaacctgggcattatggcaaaatcccgtctctacaagaaaaattacctgggcatggtgtcacatgcctgtagtccctgccacttgggaggctgaggtgggaggttgaggctgcagtgagtcctgaccccaccactgcactccagcctggatgacagagtgagacccaatctccaaaggaagaaaaaaaaaaaaaaaaaaaaccaatgaacaagaaagacatggttcttcaaagattttagagtgtagtggggagaaatgcaggcacagatttcaaaatgaagtggtaattactgggcatttggagtacctagagaagagctgcgtagcccaagaaaaccatggcaagcccccacaataggcagaggagcccctaaaggagagactgagatggaatggccagaggaggagaaccaagagactgtagaaacatggagctcaaaggaatagaaacgaaatttcaagaaagacttcagtggtcagatgaaacaggaatgatgaagggatacgagcccaggtgcctagtggtgttcagcacagagaagacaggccgtgagtatgtgttgacctacctggaagatcatgtagccacattccagcatcttacaaagaagaaaacttcttgcgagaaagatgatttgccctaacccacatagttcttagctacagtcttagatttattgatacctcacctaggacactaacaaagaaaaccaaagccataaaagtgtaaacaaatggtaggtagcacaacatttcattatgtaaaaagttatgctgacattgacaactaggaagggatattaacatgtatggcatacactttttgttccaaacatcatgctaagcacttccacttatgttacctggttctgcccctgaatgaaccctaagaaataggtattctcctttttatagaagagacacttgtgacactagcggcctaatgtgacagagacacatgaggaattc

SEQ ID NO: 197581 - DNA, 1000 bp, Homo Sapiens
gttcataatttccatgtcaaaaagaatgtttgtaagtgaaaactggtatgcgtttctaagcagattgttaataagaaagtgaatattagaaaaatccattcacctctctgtgtccagaaaatattagatatggccatttagccctatgtgctagcttcaacaggggtgttttgtgaaagcatgtgattatcttcttgatagctattctgtaaatttagagagttccttgcccccaattttatgtcctttaattagtacatatggtgctataattgatttatttatcacaccccttaaaatcttttctggctgggtgtggtggttcacaactgtaatcccggcactttaggaggctgaggcaggaggatgacttgaagccaggagatggagaccagcctgaggaacaaagcaagacaccatctctacaaaactttaaaaaatgatctggccatggcagagtgtgcctgtagtcccagctgtttgggaggctgagacaagagaattacttagcctaggagttcaaggctgcggggagtcatgatcacgtcactgcactctggcctgggcaaccgagtgagcccctgtctcattaaaaacaaaccaaaaaacaactccccattaaagctaaccttcttctctgaagagaagcaaaatagtacagggtcacttggcccactgtggcacatgtatcatggcttctcccttctgggcctacagcagacatcactgatcaataaagaaactcttattctcagaatttttcacaacccagtgtttcaagcagctaccaccaatctatatgtttggcaagtaaaatgaaacttgcgtgttaccctgtttatagtgaaaggaagagtacctggaaagttaataggatttctttactctcaacttcttgagaaatcttagccatgttgcacaacccatccaagactgacttttcatgtctataaagcaagagaattacggtggctctgtggcaggtcaacttgggtgggct

SEQ ID NO: 197582 - DNA, 1000 bp, Homo Sapiens
aagcggagctgagcgcgaaaggccgaggcactttcgggaattcacagtctgcagcattggtacggaaatggccagggagggtgcgatcccatctgtcccctcgggctcctctcatgggtcccagggtccctgacgccctgtttcatcctcctgagtccacatgcctctagccccgggatcagagattccttgatgtccgacgttttcctcttttctttgtatgggttgtcagtctgtcactctctgctttgtcagctcccttagtccctgtcatttctcagaagacgcgtgtgcaggctgaccacgttcattttgcagggactgcaaatgccgtggctggcgccgtaaaatacagtgaaagcgcgggaggcttttactacgtggagagtggcaagttgttctccgtaaccagaaacaggttcattcattggtaagtgttgtggttcgccaaactcccctggaaggtagggtttggtgtataaattttcgtcgctgtacccaaagtgctattctagaagcggtaattgacacttagggaaagagaaagattgttttttcagttcgtatcagaatcgggaaaactgagacacagagttctagaagagatacctctccccctccccccccccacccccacacacacatacaccaagcaacaccagaagcagaggaaatgtagcttaggggaataaagcccataagaccaattttaaacatgaacccgttatgtttttatagtgctttacagcttccttcattgtacaaatacgttcgagcttcaatatgtcaggcattgtgctaggtaccaggacgaaatgaacaaaactgcaattttcatcatgcaagacgttgtagcaatgtcagaatagatgtagacccacttttcatggggaaattttttggaggaaaacttgccctagaggaaaaatatacgggttatgagaggctaataagaggaccaaatataattagtggggcagggaaaggctttaaggaattc

SEQ ID NO: 197583 - DNA, 1000 bp, Homo Sapiens
gattgtaatggtatcttctctcagaggaaagttatgttaactaaatgagataatgcattatcaagcacgtaatagtacctgggaaataaaaagcacttaataaatggtagctgttgctatttttcctagattttctatatgatgggaaacactgaactgtcctttaccagaagtacaagatttgctgaaataaactgtcaatccacccagtctgaaagtccagaatgctttattttctgtgcttaggaacattatgcagtttatcttataaaaacaacatgacccggtttctaaacacactgctattggcattccgaaaatggggtaacgattctagaataaatactgaatataaatgagaagggagaaaaaagaatttgcaggagtgggtcaagattatggctttgaagaaatgatgcccatttttaactaacatcacaaccaataatctatagtgggtactggattaatcaaatctccactatttaaacaaacatcagtctagtattattattcctgttccctgtcttccaaatagtagctgcgaagcaatgaaactattgcctagaatagcaacactgaattcctgggaaagatattttcagcaacagcaaataatgggtaaatttaataaggcttccattaaagcctgctccataattacacagtattttaaaatagtacctttattttggtattgaaagtcatgcagattgctgaattatctgcacagtctaaaatttcccttttagatatgacatcaaaataatgttaaaacagtcatagaaaataccagtttcccattcagcgtagttccttataggcagcataagctctcgggtctcccagattgtttgctacacagggaaatctaatgtgctctataaattctattaatatgcatcttttctagtgcagtaatgaaaatgttaacactttgattcagtcttgacttcaaattccactagtacagtgactaatcttctaatttgaaagaatt

SEQ ID NO: 197584 - DNA, 1000 bp, Homo Sapiens
gccattcccatttccaggacctttatggcttggccgttgcctgcttggatatttaaaaaaatactttaatgtgtattatgatttttgttttttcttatttgaacaatgttgacaatagtgaaattcccacattaggttggcccatcattaggttgataggagttagccaatacaatgaaatggaacatcatcaccctttctattgctagaagtaatgtgttaaggtgtcatctttacaggtccatgggttgatgagtttcattttgttcagacgtaaagaaacaaatagcttctgggtacggtggctcacgcctgtaatcacagcactttgggaggccaaggctggcggatcatgaggtcaggagatcgagaccatcctggctaacacggtgaaaccccatctctactgaaaatgcaaaaaaattagccaggcgtggtggcgggcgcctgtagtcccagctacttgtgaggctgaggcaggagaatggcgtgaacccaggaggtggagcttgcagtgagccgagatcgtgccactgtgctccagcctgggcaacagagcaagactccatctcaaaaaaaaggaaacaaatatcacagctcagcctgggcaacatggcaaaaccctgtctatacaaaaattagctggacgtggtggtatgtgcctgtgatcccagttactcgagaggctaaggcacgagaaccgcttgagcctggaggcggaggttgcggtgagccaagatcacaccactgtacttcaacctgggccacagagggagaccctgtttaaaaaaaaaaaaaaaaatcaagtgtttattcattttttcctttaggaacctactagttaagacaggtgagactgacatgtacaaatatgaagaaaatatataggtaactaaataaacattgaatgaaggtaaaatcaacattaagtttgtatacaagtaaaaagtatttgtggagtagtgaatgcaagattaacaattggagtttgaagttgggc

SEQ ID NO: 197585 - DNA, 1000 bp, Homo Sapiens
atggtcatcgtattctttttacaaagtaactttgaatttgttaacattaaagttggatttttttttttttttaccattgaaagtaaaaaattctatactaccaaaaaaatagctattgtcttgtttttccccaagaaacttaatatgactattgataaatacaataaaacagattactgaaggaatgtttctgcaaaatggtgctatgtcatgagacagggactctatagttaaataaatttgggggactgttggattctattttttttttttttaaagacagggtatcactcccattacctaggtggccgtgcagtggtgcaatcatggctcattgtagcctcatcctcctgggctcaagcaatactcccaccccattttttgattttttgtagagacaaggtctcactatgttgcctaggctggtgttgaactcctgggctcaagtgatccacccacttaggccttgcaaagtgctaagattacaggcgtgagccactgcatacggcctgttgcttttttttttttttttttttgagacggagtctcgctctgttgccaggctggagtgcagtggcgcaatcttggctcactgcaacctccgcttcctgggttcaagcgattctcctgcctcagcctcctgagtagctgggattacaggcatgcgccaccacacctggctaatttttgtatttttagtacagacgaggtttcaccatgatggtcaggctagtctcgaactcctgacctcaagtgatctgcccgccttggcctcccaaagtgctgggattacaggtgtgagccaccgtgcccggcccagttgcattctttatatccctcttggaggttagtgatacatttttaaaattctgctataaaggaaccagtttacttttgttttgtcctactgtttcaccagctatttgagcatagaacatattttgttattataacttagttgttaacaaatgctagtttgggaaaagctgctccagaggat

SEQ ID NO: 197586 - DNA, 1000 bp, Homo Sapiens
cctccgggaaggaagtcagctctgattttatcaagtgcctgatacaagagataaaaattcaaagcttctttaggctgggatttccaaaggcctgggtcagggccttaacacccttgaacctcctcccctttgctccatcatagtgtctgcacatagaagatgcagaatgcattgaggggtttttttgtttggtttggtttggtttggtttagtttggtttggtgtggtttggtgtggtttggttcggttttaataataggaaatgtctggggaaagggatgaaagcctgtagagaaaatagttgtctgttatccatactaggtacatagtgaaaagccatgagataacgtgttatatgtggaaaacttcaagtctctaggaagtgtctaaagaaggattgagtgatgtgtcatgatttctaatgacagttggtcagataatgatttatttcaattgtagattttaatatgtctctgtaagactcttctcccaaccggagtaacactagaaggcctttaaggttccttataactctgggattttatggttgttcaaggcctgataattaatgtgaagtttacagtgatgtttaatgaaagcgaatatgttttaaattccatctacaaattatataaatattaaaacaaataccaagatagaagacttaaagacagtcatatcaaaaattatattaaatgcaaatggctaagcattctagttaaaaagcagagatcatcaagtggatttaaaaaaataaattacatgttgatgacaagaaacatatttcaattacgtctaagtttgaaaatatgttacgcaaacactaagcattagaaagctggtgtggctatattaatatcatataaagtagactttaaaaaaacagtattggcagacataaagaagaacatttcttactgctaagagaatcaactcttcaagatcaaatgaaagctctcactgaagcaagatgactgagtgggaactcttcagtgaattc

SEQ ID NO: 197587 - DNA, 1000 bp, Homo Sapiens
aaaatcagatattaaaatggggacagtaataccaatgattcagaaataaaaaggattctaagagaataataagaacaattatatgtcaacaaattaaataacctagaagaaatggacaaattcccagaaacacacaagtcacctaaactaactgaaaaagaaaatttcagcagaactattataagtagagtaattcagaaagtattaaaaaaagaaaagaaaagaaaagaaagacacccttcaatgaaaataagttcaggcccagatgtctttcctggtgaattctatcaaacatttaaagaattaacaccagtctttctcaaacttttctaaaacacaaaaaaggagagaacacttcctaactcattctatgaggccagcatttctgtgataccaaagccagataaggatatcacaaagaaaagaaatgtacacaccaatttctcttatgaatatggttgcaaaaatcctcaacaaaatactaacaaaccaaatccaacaacacattaaaaggattatacaccacgaccaggtagtacttattccaggaatgcaaaagtggttcaacataagaaaatcaatcaatgtaatatgtcacattaataggaaaaaaaccaggtgatcatctcaattgagacagaaaaggcatttgacaaaagtcagcatcgtttcaccataaaaactcttagcaaaccagtaatagatggaacatcctcaccatgataaagggcatctgtaaagaagccacagctataatcatggtcaatggtgaaagactgaaagctttccccctgaaattaggaacgagacaagaatatgtgctttcatcactgctattcaacagtgtgctgcaagttcaattagacaagaaaaagaaagaaaaggcatccaagttggaaaggaggacgtaaagctatctctattcacatatgacatatagctatatagagaaaatcccaaataatctgtgaaaaagctactagagctaatagatgaattc

SEQ ID NO: 197588 - DNA, 1000 bp, Homo Sapiens
ttctacattgagttatttatatttataggtcgtataaacctagtgctagatatgacctagtactgcaggattatacgtacacagagtactatagtgaatatagtatatggaaacctacagtacaaggtcactatggtgatatatatatagtatatatagtgatatacatatagtgatatatacagattatatagtaccataggtcactatagcgataggtttctatgacctataaatactagatatgacctagtactgtgggattatatgtatatatagtactataatgcatatagtacatgtaaacctacagtactaggtcactatggtgatatatatatagtacatatatatagtgatatacatatagcgatatatacagattatatagtaccataggtcactatagcgataggtttctatgacctataaatactagatatgacctagtactgtaggattatatgtacatatagtactatagcgaatatagtacatgtaaacctacagtactaggtcactatggtgatatatatagtatataaagtgatatacatataacgatatatacagattatatagtaccataggtcactatagcgataggtttctatgacctataaatactagatatgactagatggaactggtgatataaacctatcactagatatgagtatcaagctagtattgctctggtttgctttcccttttttatgatgtatataaattgcatttaatcatgtaaagtcctcatggtgcccagcatagagtaggtccacataaataaattgttaatgactgctttgcttcactgactagtagtagttttagctaaagaaacaatacccacatattgtgattagaacttaggggtttttttcatgcaaaaatcacacatttattaaacatattattaactgaaaaacaacataccagtttattttcaagtgctcttcatccaacaccttggacaaaaccgtcagctcaaagtgaattc

SEQ ID NO: 197589 - DNA, 1000 bp, Homo Sapiens
ctatattatatctcacgtccacattattaccagtgaaatacacgttattatgtaggcagtggaggttgcacatatcatttacaaaataaggctcttcctgtagaagtcacacctgtcttccatagcaactggtttcacaagtctatctaggtgtttgtctcctcctctaatttcaatctaaagcccttctgatctggacgccctatctccaggacacgaatattaatcttgaccctcttgagggacattccttccctagtcatgtgtcagtttgctgtttcacagaatgttgatgtttcgtgttgttgaagtgttccaatatttggagaccccgatcgtcagaaatttcttctttatgtctaacaaattgctcctgctttaattttgaaatgggcactccaggaagggagagttccacacatctccctgatccccagctcccaccccccaccccccataatcttacagtgaagaatagagatccatgaagcccattccttctttcatggcaccctgccctggagtctgattctcccatgtttacagaacaacaccaatcatgggtgacttggacactccattttatgtttttatttttatttttcacaaatttgtgtatcatactcatgcagggtccatgctaatcttctctgtatcattccaatttttgtatatgtgctgctgaagtgagcactattttattctttttaaatctaatgagataaggtttattttgtttcctcgtgtaatttcaaaagaattactagtttatcaaattttaagcaacatattgttaggaaaataatgtgaaaagtgtctttctctttgccacatcaaataagaagaagggatagattttttaaaaatcaataacttctgaaaacttacagaggaaagtctgaacaaattcactttagatgacgaagtctttgaagaatgaggggactgctctcaagatgacagtgtgaagaacatgatataaatggatgaaatggaattc

SEQ ID NO: 197590 - DNA, 1000 bp, Homo Sapiens
gtgggtcaggcccctccttgctccatctgcctctgccgcagcctgtgccatccggtttgccagcccagcccagcaggctgggaccccaggctgtgccagccctggccccgctgggggtgggagtgggccatggcctggggtccttgaggggttctcttgctttgttttatttttctttatctcttctttgctttctgagccctggtctttcccagcccttgtggctctgactctgtcctgcgccagcctctctagctgtctcacccgtccctgcatctctgccaccacctgccctgggtcttctgccagctctgggctcagggagcatcaggccctgtcagcctcagctcctgcacacacccctctccgccccctgggctgaaggctggcagccccagcatctggaggggctggctctctgctccggctgccctgggccgagggtcctcctccttgtccccagcctgtcttcccctgttcccctctccccagtggctagagtcctcttcccacccctctgcatcctcccagcccaggacagcttgctgccctccaggccttggctggaggctcacaatgaagctgcctccccccacagactgggaggtggagaatcaccatggcaaccaagaaagcctccccttcctcccctcctctccccttcctcccctcctctccccttcctcccctcctctccccttcctcccctcctctccccttcctctcccagcttcacagaaggggctagagctctgggggtgcggggcagtccaagccctcagagatacaggatggagaatggcagaggaacaggagtagctgatgggacatttgtgagagaaatgggccagtcatgggaccataattcttgaggaactcggtcccactgattatgtgactagtgtggtcccagccaccagctgagttcctatggctctgactcatctgggcaccttgctaaatgcagagcttcagcctccatcctagacctactgaattc

SEQ ID NO: 197591 - DNA, 1000 bp, Homo Sapiens
gcaatctgctttcttaatttacatacattaaagtttgtgtaccctctactccttactgaaggaaaacaggaaagtcaaccttccactgaaagagaagcagccgtccactgggttcagacactgggaaggccactgaaaggctcgtgtacatcaagatttctcatgagtggttaggggatgttgatcactcttagggataaactgtaatcaaagatcagtatgtgaagccgggaacaatagcatatattaacagtaatacgtgttattacagtcatattctagttccttaatttatacagtatgttattaaacagatatatcatagcataatggtatcacaaaagactactttttcccttaaaactcctaggtgcacttttgtatgtatttttttattagctatctgacagcctggggaaagacacaaaaaggcgataggtgcccatgacaactggtgatcaaaaagcccaacaaaagctgggcgtggtggctcacacctgtaataccagacacttgggaggccaaggtgggaggaccacttgaggccaggagtttgagatcagcctaggcaacacagagagacccccatccctaaaaacactaaaaaaaattaaaaatttaaactcaatataactgaaactagatggtaaatcaatgaggaaatggctaagtttacaaaagtctgactgacaaacctcagagacgcacccctctctttaaaaaggatgcactttgacattttaaaatatctatgtgcatagttattaaagagcttttatatgggccccttaactaacagcagagaaccgcagggacaggccagctttgctgagacagatacacaggctttatttgtttgcaaagaaacacaactgaactcaactgtaaagacaacaaagctcaaacagcctcagtcctcactagggtttcatgccagcccaaccccatacgtttgtaaagcattacagtaactttggagagtaggactaaagtagtctag

SEQ ID NO: 197592 - DNA, 1000 bp, Homo Sapiens
tgatttgatatatgccacaaatggctaaattaatttggcttcagataaactatgctatatatgcaagtttattttgccaacggccccagagtataaaatcagctcctacacatttcttcataataaatggaaaatatttcatctttgttttggtggaatatttttatactatttgtataatattctctagaaaagtcttgttttatactttacatataaacaaatgctaacaggaatgatcccataatcgaaagaaaaaaaaggaaaagtctgtaacttctgaaaatttcatcattagaaaagtttgacagtaataagctgaagactaaaaacaagcattttcttgttcatttaaacaaatatattcacttacctattttttatacattctctttcatcaaaaaacatcctaaaaggggaggaaatttaactttcataaatacattaagttgtacataatttgccaccaattactaaaattcaaagtgctgagaagttattaagcatcgtatgcaactctaccaaaagatctctcatgagaaagcatagctttaccaaagaactatgaaatcatagttcatttttaccaaaaaaggtgaagttatgaagttatattataaaatatggagatacagaccattttttaattaccaaaaatttgaaaacctagttcatctagggcaattctctctgaaacttttacatctgcaaaatgtaaagattctcttaaaatccaaaattgcatgattctatattattctgcaataagcaacgtagcgttaggacaaattaaataaagtaagccaatgatatttgcaaggaatatgaacagagacctttaaaaagcccaacagaatataccttccctcataaaagctggtaaagtagtatttctgaaaaaaaaaaaaattatgtgacccttttagaacttcagtgattctataaatataagatcattaataaaactatgaattacgccactaaagagaaaaaggaattc

SEQ ID NO: 197593 - DNA, 1000 bp, Homo Sapiens
ggctgggcgcggtggctcacgcctgtaaaccccagcatcttgtgaggccgaggtgggcagaccacctgagcttgggagtttgagaccagcctgaccaacatggagaaaccccgtctctaataaaaatacaaaactagctggatgtggtggcgcatgcctataatcccagctgctcgggaggctgaggcaggagaatcgcttgaactcgggaggcagaggttgcggtgagccgagatcacaccattgcactccagcctgagcaacaagagcgaaactctgtctcaaaaaaaaaaaaagaaaaagaaaagaaagaaagaaagtacatcctcacaaactcattactgagctttttttttttttgaaccagagtctcactctgtcacccaggctggagggcagtggggtgatctcagctcaatgcaacctccgcctcctgggttccagtgatcctcctgcctcagcctcctaagtagctgggattacaggcgtgcgccaccacgcccagctaattttttttgtatttttggtagaaacagtgtttcaccatgttggccaggctggtcttgaactcctgacctctggtgatctgcctaccttggcctcccaaagtgctgggattacaggcatgagccaccgtgcctggccattactcagctttaataaccatcaaccttttgtctgatttctttcatctgtccccactccctgttaaatttttttgttggaacattttaaagtaaaactcagaaaccatgtcatttcactccaggtacttaagaaaaagtcacagtaaccacaatgctgttattacattaacagtaaatccttaatttcatctaagaccctgtccatattcagattttctgagggtccttttaaaatttaattaagaataaattaaaacttttgacaaaaaatgagaagtttctaaaaatgcaatctcctttcattatcatcgaaactgaagaaaatcttatagtgcattaacatgcaggaattc

SEQ ID NO: 197594 - DNA, 1000 bp, Homo Sapiens
aacttaaagtataataaaaaagtaagtaaaaataaataaagacaactctggctgtttcatttaaaataacacaggtgtgggagccgaggcagatggatcacttgaggtgaggagctcgagactggcccggccaacacggtgaaaccccatctctactaaaaatacaaaaaattagcagggcgtggtggcacgcgcctgtaatcctagctactcaggagtctgaggaaggagaatcgcttgaacctgggaggtgtaggttgcaatggtctgagatcatgccactgcactccagcctgggcaacagagcgatattctgtttcaaaaacaaaaaacaaacaacaacaacaacaataatacacaggtaagaaagcaagggctgcagctattgcaatagtacacttggaaataatgacattcaggggaaaggttgtggaggtttataggaacatttatttatttaacactaatttttcagtatatacctataactgcatgatccctctatatcaagggatgggatataattgagggcattatatttattctctaaccccacaaacatattttagtaggaaagaaaatattttaagcaagtaaaaccattgcataaaatagttaaaatgtgtgattcattttattatggcaataataaagtgtactgaggaagactggtcaagaagcaactatggagtcagggaaatattttattaagggaataataaagtgtactgatgaagactggtcaagaagcagctacggagtcaggagaacattccaggcagaagaagcagcatgtgcagagaccctgtgccaaatgagcttggcacattctagaactcctggagagatgatagtaaggcagagtgagactagatcttagtgagtgagattaaagggcaggtactgaggtgaaaggcaggtgggtaccaaatcacgtgggtcttttaagccatggtaaggggtttgctctaaacacaattgaaaccattcctaggaattc

SEQ ID NO: 197595 - DNA, 1000 bp, Homo Sapiens
ggaagattatcggcattataagacaaccttgctcacggtgaagttccgccccacaccttcttgcagtttgccaccatctcccccagagctcagaggaaacttgtcccaagccaactgtctgttctttgggctatttaagttcccctaaaattatttacaatccttcaaattggctatatttctgccatcttcctctccctcatgaagagggcatataagcctcaaccatctagctttgctctgagtctcatattttatatagtttctatgcttatgaatgttaataaatttgtataccctttctcctcttaatctgtcaattgtcattcatttcagtgaaacttcagagagggtagatgagaggctttccctccatctctatagttctatgatttcttgtacattttacccgtgtgcaaatgaaagtaaaatgctatagtgttttacatagcaagctaagcgtcattggtaaatgttactaatcatggggtatagaacttaaatagttcctagatttattgcccaggcactatacacaatcccctgctccatcccttgttaatataatctatcaagttgaatgaaataaatcgtattaatcaagcagtaggagttgtacataaaaccaatggtttcatcataaaaacacatatacataagaaaaaatttcttgttgttatttgggagtgggagttgattataaaatatagcctggagggcctaggtaaactcaatatggtcaatgttaactctctaaaatatacattgacctcctatttgttgtaaaatgctgtttatcatttaggggtctaccagagagtcttaattatcactttcttaacctctacaatggagaggattttaataattttgactataggctactgagagcttttttaacataataactcaaaagatgatatgtgaagagaattttagtagcaatgtgcttcattatggctttttgaaaccctgcagcacaaagtactacaaagaattc

SEQ ID NO: 197596 - DNA, 1000 bp, Homo Sapiens
aacttactaaaacatgacattgtgaaatttgggctgatgcaggaggctcttgttccttcattttccttaccatatagtattcctcatataatgatgataataatcatgctaccatggatttatcagttcttttattgatgaacatttaggctgtctcctatcatttattctttgaaataatgctgatatattcttgtatctattggtcaggatggtctagttacaccattgtttctctaaccccaaagtcttagtaacctagaaatgacaaaggttcattttctccttgctaatgttacatatccaatgtgagtcagctggtttctctttctctgtatttttcacttaggaaccccagctgtcaaagcctccaccatcagaagttttgctgcctgctatagcagagaggaaagaaatatgatgaattgcacgctggctctttattaaagaacatgggaaagtacaattctatcaccggctgacaaggaagagaacctgatatagctgaaaagctctgactactactgcattgtacatatctccttatgtggtggcactagaatttctctagtgtatatgtccagaagtagaattgtgaggttaaacgatgtgagcaggttcagttttgccaaattgttctctaaagttacaatcccgtgagtatcacatgagagttcccagctatttctctatatctttgtgaagaattactccatgtttgtccacttaatgagtaggcaattgtacctcactgctgctttattttcattttcgcagagggcatcttttcatatatttaactgccatcagtttttttacttttgtaaatagtccattcatttgtaccaatcatctttctttggggttatctgtattttccttgggttggagcatttctctagtgttttcttttttttttttttttttttttttggaaaagggccaccagcccttgcagaatcttgtgtttctctaagtaaagataccagttctagaattc

SEQ ID NO: 197597 - DNA, 1000 bp, Homo Sapiens
gcctccatcacacaccgggatggagatgattgccgctatgctccaagctacctagtgtattccaaggggttccctaggatgaggagaagggatgaaaagttcgtaaacacccactgtgtagagtgttttatggtgttgcatttgggaaagggtagctggtagaacataggcaccataaaataaaatacgatgcataaacacacgcttatccattcattcaacaaacaagcactgagtcttgggccagaaggtactgcgctcgaagctgggagtacagtgttgggtgaaaaacagtcttgccatctactgagaaagagctcaaagtagagagcagctgtgctacagagtgattaatgcccactgtaagaacacgcagaaggggcctcacagatacgggaaggcttcatagcagaagagtgccttctgagcaaagtcccaggggctttgggcctagggagcagcgtgggaaaacctagggcagggtctgagggagaaaatgacagatttacaaactccagtctcagaatagagggcgggcaggcctggggaggggaggagaggaagtggtggcggatgacatgaagatacaaagatacagaaagtcccagtcatgaaggccttctctgccatgttaggacatttgggctttatttttggggcaatagggtagccttgggagagctaggaaaaaaaaaaacaaatataacaggtctattaatttcccaagggaactatgatagcaacttagactaagacagtggctatggaatctcagggaaatgctggttttgaggaaaagcaatagtgagacagggcttggtggctggtcagatgtagggtgagggctgagtgggaatcaaaagttcctggtttgcttaggtttcttgggaccggtttctggcttgatcacagttgtgctgttcactaacaccgggattccagaaggaggggcacgctgaaggcagatggatcctggcaagcaagagagaatgaagaattc

SEQ ID NO: 197598 - DNA, 1000 bp, Homo Sapiens
acagcactactgggacaaacaggctgcctctccacgtgtccatgtgcaggataactctaacctgaatgtacaagtgctcatcagtcataagctatgaaaaaagtgaagtacctggacataaggcaatagggaatagtggggactgtagccaattgaagattgcatgctctcgcctaaaagtattcgcattcagtttttttaacactatgctaaccaaacaaagcacatttgggagatggatttctttcgtgggctcctttttgcaagttctatttccaggcagctgttatgaatgcgctacaatgtttcacaaccaggggaatttatcagaattatgcctaagggcctttgaaaaacttcagttattcccatctcttctcagacctcctgaatctgaatttctaaagtttcgggggacctgccccgaaaatcacgtaggttcttttctattttcctaagtgtcggctggcttgagaaataaagggacagagtacaaaagagagaaattttaatttctgggcgtccgggggagacatcacacgttggtaggatccatgatgccccacaagccacaaaaccaagcaagtttttattagggattttcaaaaggggagggagtgtgcgaataggtgtgggtgacagacatcaagtacctaacagggtaatagaatatcacaaggcaagtggaggcagggcgagatcaaaggaccacaggaccgaggtgaaattaaaattgctaatggagtttcgggcaccattgtcattgataacatctcatcaggagacagggttttgagatcaaccggtctgaccaaaatttattaggcgggaatttcgtcttcctaataagcctgggagcgctatgggagactggagtctatctcacctctgcaatctcgaccataagagacaggtacgccccaggagggccagttcagagacctacccctaggtgcgcattctctttctcagggacgttccatgctgagaaaaagaattc

SEQ ID NO: 197599 - DNA, 1000 bp, Homo Sapiens
tcaggaacttaattcctaactgatccacatgatgaatgctggtcaagatgcatcctttccctaactctgtgggactgcatgctctttgggtccatgctgtctccagtctggctaagttctagttaaaacagggaggaaatagactctgcatcagtttctaggggtagattgatgccataatggaccaggtttaactttagttgagacttttaggagaaatcttcctgcctgttgtttgtcaataatactgactggtctttgtgagccgaaagaataaatccttattcaaggaagtcttcatgttatctacaacttatgaatctgccgttcagccttactttcttctaatatcaaggtgtgagatgaggttaaaattaaaggcatgaagaaaagtgagtaatcaggaaaaaaagaggttttcttgtggatttttccatttttactagaattttttttttttttgagatggagtttcactctgtcacccagcctgcagtgcagtggctcagtcttggcactcactgcaaactccgcctcccaggttcaagcaattctcctgcctcagcctcccgaatagctgggattacaggcgacagccaccatgcctggctaatttttgtatttttagtagagacagggtttcaccatattggtcagactggtctcgaactcctgacctcaggtgatccacgtgcctcagcctcccaaagtgctgggattacaggcatgagccaccatgcctggcctactagaaatatttttaaaagttatattctcataaacaattaaaatttcattccttcatttaaaaatgttttgtaaggaagaataaagacaagaatgtgtaataatatattttagatatgcagaaagtctacttaatttttaggttagacaattttatacaaagcaggcccctttttgaattggtattgtttcgtttatttaaagaattatatggatcaaaagagggcaattaagaattatgaattatgaattc

SEQ ID NO: 197600 - DNA, 1000 bp, Homo Sapiens
aattaaaaataggaaaagagctggaaactaatcaataactttgcttgctctgaaatccttctcaaatgaaggtaaagttccatcagggacaatactaattttttttaatacacatgaaagcagtttatcaacctcaaagcaccccacaattgttagatatgatcattagtatatttaatgggaatggacaaatgtgattcatatgttaaatagcgtctgtgtgatattttttaccaggtttgtcattaacttaaaaaaataaaattatattgatagcatttcagaatatttacacagtgatttggaacaaaaagggtaagaagttaaatcaataagcaaaattacatctttgtcacctagcttctgttaggcaacacacctgcaaaatctcaatgatcttcagcttggtgtccatcacagtcacatcctcgtgctcggtggggctcccttgcttgctcgggtggatgctgggtggcacatccggcacgctcatggggaagatggagcctctactgagtaccatctgggtcatcatctctcccaccccatgaatggttctcatcacattgtttcctggcatgagaaaatgccgtaagtcaacacacacaacccctggagatcatgtaactataaaactcagttagtcacaaccacactgaaaagcagccaggaaaaggattcaggataagacagaatagcataagcattgtttgggctctttctttacagataaaattaagatattgcagacatgtttcaaaatgacaacttttaaaaatggaaattttcctttttcagaaaatgctttcaaatcatgtaacaaaggtgagcaggttgctctaacatccaaatcaggtccttctgtaacacagtatgtcctactaactgtcataccaataggcccttgcttttacaataatgcaaaagaagattactaatcgccaagataaagtgagttgcaagtggggatacaaagactgcctaaaaacatttagatatt

SEQ ID NO: 197601 - DNA, 1000 bp, Homo Sapiens
gaactaaatgtgtaagaaacaaactgaaaaagtatcctgaagcaaaacaggcaaacattagttaagaaccactgaaacaatagattaggtcatgcttaccttcctacacattgtaaaaagaatttctaaatgttttgcatttgatagtaaggtatctgtatctattgtcacataattatgcaggagaggcatcatgtctgaaaaaaaatcaaaatcccaatgagacttgagtgacagaaatagaaataaattattcccactgaaaccatatttctgtagcacccacacattagtatcttcccatgcaaccacaaaaggctagaaatgaaagtaataagtctgatgtgtatttatagatggggaaaatgtggagcagaaagactaagatgctcatcatttatgaagtaattgtgctgaattttttccctttctccactgcacactcatccctatctgacatactttatattttcttgctcatttgtctgcgtgattccctaccctcccatcatccccattagaatgtaagcttcaaaagggcaaagcctgtttattttgctcactgctggattgctgagattagaatagggcttggaatatagttggtgtccataaaatacttattaaattaatatatggatatatgctctggtcataaactaacttaagactcaataagaaatacagcctacctcctctgcctatatacctagggctgaaaaacactgctacaatagccccagcttttatgtgaccgggaaataaaaacattttctgatcaatattggaatcatatgtgtttttatttcaggtgtcaacaggaagaagtatctagacacagaaaagcaaaaattttatatggtcaaagccatacctgtaaagtattcaaagcaatcctgctgaaacacttcatatagtatacctagaagctgccacatttgaggggaaatactgtggcaggttaaactgtatgccagggaaagaatttcttcatagaatt

SEQ ID NO: 197602 - DNA, 1000 bp, Homo Sapiens
ttgtttctcttgaaaatgttatttgattgtcttgttggaagcaagggtctcctgcatttgcattcactctaaacaaaaagttccagagggattagtgaaaagcttggctatgtgtactatatgaataaaatgttgagcaagtgcttcttggctgtatttccaagcaaagcaactcaatatattaccattttggagatgagactgcttcaaatgagattacctctgcattgaatctcggttgctgttggaggttatttatcctttcaaatgaccaacatatttgcaagaccctctagagtgattgactttctattgcgcgcttgctgttttcttatttgtagtaagaaaagactttaataatcacagctggagcagaagcactttcagtcttaggaggacttaagactccttgaactttattttggagtttagttcattttttgtttgttcctgaatttgtgatatagaggtttcaaaggctctgccaatcctggctttagtattttagggacaaataatttacacttgatatctttggggtataaatttgagggaataagcaatacaggagctatttgcccagtattcctttagataagtaattggtcacagcaatggagcagtttcaaagagatctctctgtaggctcagcatgctgtccccattctgccacacctttctctgcatcagtctttatttctacagctgacactggaaaagactctggaaggtctgtctcctaaccgaaatatgctcttggtatttccttgcagaatgccttgctttactgcctcttttaacagaccctttctgtgagcaaatggcatctacttccatagaagtgtctgcaaagtggggaatgaatgtggcttgtcagcacgtcttggggtcagaagattagagtgagatcttcccaggattattagaattccatctgtaatactgcctgctatggagggcaaatgagcacccttgaaagggacagtaattgaatgaattc

SEQ ID NO: 197603 - DNA, 1000 bp, Homo Sapiens
atatatatatacatatttttttttttttgagatagggtctcactggagactggagtgcagtggcacgatctcggcccactgcaacctccactgcacagattcaagtgattctcctgcttcagcctccccagtagctgggattataggtgtgtgccaccatgcctgactaatttttgtatttttagtagagacagggttttaccatgttggccacgctggtctcgaactcctgacctcaaatgatccacccaccttagcctcccaaagtgctaggattataggcgtgagccaccgtgcccggctgctaagagtatattcacttgtttaataagctgccacaatgttttccatagtagctgtagcatcgggtacattcccaccagtaaggtatgagagattcggttcctcttctacagcatttggtgctgtcactattttttattttagctgttctaataggtgtgtagtgatatcttattgtagtcttaatctgcatttccctaatggctaatgatgttgaacatcttttaatgtgtttatttgccatctgcatttctttttttttttttaggggacaggctctctctatgttacccaggctggagtgcagtagcaccatcatagctcactgcagcctggagttcctgggctcaagtattcctccagcctctgccttccaaagtgctgggactatagggatgtgccaccatgcccagccattgacattgttactatgttatgtcttcaaatctctgatcatgaaatagctctctatttccatcttgttttcctttcttccattagcattttatagttttcagcatgccagtcctgtaaatgttttgctagatttaaaactatgtatttctccctttttattttgaattattgttaatggtattgtatttttaaatttggtttccacgtgtccattgttagtatacagaaatacaattgatcgctgcatgttgattttgtagcctgtaactctatggaattc

SEQ ID NO: 197604 - DNA, 1000 bp, Homo Sapiens
ctgcatatctttatggtactagttgctataagatataggagaaaataaatatatcatttagaaggaaaacatacttaaaatcttcagagaatttcctagaaatttaccttctcctggttgtcacctctggtttaagcgcctaacatttttgaatttgtttagggaacatctcaccatccttttcatgcatgctgtttaatttcacactacattgacctagatgtggaactgttttaatttcccacaaagcaatcagtcccctggatatctatacacaaaaaagatttgactgcaaatttgggatgtcagggaatttgcatggccacaacacaaacaacctgaaaatgcaagtcgagatatttctgctatgaaagtcactcggccatttgcacaactagaatttcagtcttctaccatgttatgttcaactctctcctcactcccttttctctttcttcttgtgcttcactaccaagttcttcttcatttcaaattcacagtagcttttcatcttggcttttgccaatctgtgtattcagaatgtcttccttcacccctaattggctggtcaaagtgttttccttaaaaaggctataacctccttaagaggaattctggaatcaaccattaaagttataaaatattttaccctgatatattaataattcccaaagctatcaaagtagtggagaaagtggtaaactctcgcattacttctcagctgtagagtcaatttacactgcttctagaaatttaacaacatttattaaaaataataacgttcatatgtttttgccctggaattccactccacagaacttcacatacttcatagtaaatactcaatatatgatagctatcattattggttattattccaaggtaactaaatttatacctgttaaatgcacaaattgttctttgcaacattatatattatagaaaaatttggaaacggtatgtacaattggtgaacagctaaattgaatactaatatttg

SEQ ID NO: 197605 - DNA, 1000 bp, Homo Sapiens
caaaactaaaggcactcaggaaacataataatcttcttgccctggctctgcctctccctgcgtgcaacctcaggcaaagcactgctctctggacttcggtgtccttatctgtataataaatgagtcagaatccaaatgatcttcacagagtagtcactcccagagggtcctgtatttccagggggtgaggaacacttttacccgtagttcactggacgttacaaacagcaattctttacttccagttttgacagtttcagtgttaactaatcactccagtattccttgcacaaatgcacacgtacattccatttgctttgatctcaaacttaagttttttatgaatgaaggctacagctggacaccaaaagattataccattaatttttaagtatgcctcagagggtctaatgggctatgacccacaatggtcatatcagcggcattccacttcctcttgagccactggccaagctggtattgaggtgcatgtcccagtttatctccagccctcctaatctcagactttctgcacctatgctaatacttgaaccaactcttcttttttttaattgaatccaatgcaatgtacctgggaaccctgcttcaaaatctgatgccaaatctaaaacactggacaaaatccaggtttttattcattttctgatgggcactagctgctaattaagcatccaaacaatgttctaaaaaggaagaaaaatcataaaatatggacttaacattaatcacacagacatacatgtaatatacgttacctttatagcaggaaccaataaaagaatacaatataaaacacatatttgtactagataattttgtataaatattttaaaggtttcttagctcagggattagagcactggttttataaaagagcaggtcacatattcaaatttcacgaagactttcctgatgtctttcaaagaagtataacacacatattaagaatctggactcaggagccacattatctgaattc

SEQ ID NO: 197606 - DNA, 1000 bp, Homo Sapiens
agaaatgcaacaacacagatgggtctcagcaatgtattaagtaaagacaacaagtccctaaaattacctaaagtgtgatcaccttttatataaattttaaaacaactagaatggaatagacacatgtatttatgagtatgtataggtgaaataaagttatataaaaaggaaaggtgggggtgacggacatgagactcaggacaatagtatgatgggggggcagggatgagatgagggaagagccctacactttacaggtaagttattgtcaaagtctgagattttgttttaaatttgaggtcatgagtattcattacatgattcaaatatgaaatttttagtatgtgtataaaccaagaatccttaattaattaatccttaatttaattttgtgaagcagaggaccagtgacgacaattccttcttggtcaggatgctgtgcggatgcagaatgaacagcccagctcttacagaactccacagcacacagcaggcccacagtaatagggcggtggttgttatgtgtatatgtggctcaaaaacagcttgaagtaggctaaagaaaataaaatcatttcactccaaccccctctgccttgtggcttcactgattttaagaataaatacaacctttccattcttgaggggcccatgcttttaaaaattgcctagctcttgtctgatagataagacctactcacttccaaatctcagcagatttgttttgaacagcgagctctttaaggtactgggatgtctcgcactatcctttgcttcataaggagctctcacagtttgatctctggccctgtccttttgaaccatttcacttggtctggacctcaggttaaaagaaaaactggctttccacagagagtgagggtaccttgttgacacggctcttctacctggccataagttagagtttttttttttctttttctttcctcctgtgcaacacaaggaacagagaagtcatttaagccatatgaattccgcg

SEQ ID NO: 197607 - DNA, 1000 bp, Homo Sapiens
atgcttaactgtactcagacactaaattcagcactgagttttctgacatccaaagataagagggaaacaaaagaagttacaaagctttctatttctgataagagaaaaaaatagtatttttcttattgtccttatacatacataataatacatatatatgtccttatgtgtacctatatataacatactattatatacattaagtattataatgcccaactcatccttatacatacctaaaataaaaccacaaattctaaaaattaatcttagctggacatggtggttcccacttgtagctgtagcagctaaggaagctgaggcaggagaatcgcttgagcccaggttacagtgaactgtgatcacagcactgcactccagcctgtgcaacagagcaagaccctgtctcttaaaaaaaaaaaaaaaaaacttgttttattgaagagagatgtttttggacaatatcttagtatgctgtgttttgacagttttgtcctgtttttatatatgttagaattagaatgggtcccagtcagaagctacttggaatatataggaaatatatgacatgccgtgctgacttacagtgtgtatattttttacagtacactcctgatcatgtagttggacctggagcagacattgatcccactcaaataacctttcccggatgcatttgtgtcaaaactccctgcctccctggcacttgctcctgtctccgccatggagagaactatgatgataactcatgccttagagatataggatctggaggaaagtatgcagagcctgtttttgaatgcaatgtcctgtgccgatgcagtgaccactgcagaaacagagtggtccagaaaggtctacagttccacttccaagtgttcaagacgcataaaaaaggctggggacttcgtaccttggaatttataccgaaaggaaggtttgtctgtgaatatgctggtgaggttttaggattctctgaagttcagagaagaattccgcg

SEQ ID NO: 197608 - DNA, 1000 bp, Homo Sapiens
ctataaagttattcttttaccctttgtaattatctcgtgagggaaatgctttgagactatgtaaatatcctgttactcctcaaactttcacctactggttttaagagtcattgaatattcttgtctggattagttattattatgatgtttgccaaataatgatttgataatttcatcttcctttctatatttattagttggactttgactataagaaagagttttccattttcatttgtttgttttttgtttatctatggactcatggattcttataacactttattcaatacattataatcctttattataattatttattttggttcaccagttgtctcagatttggctattgggagttccttcaagctggcacctgtgtccttttgacctgtccctttgtccatcattatttgagcactcaaagaaattcactcataagaatttatagaagttaggcaactaagctataggaagcagaccctgagaaaaggatccaaatacgagtatttggatttgggaggtaattctgggagccatggggaaggaaatgaggcagtgaaatgggaaagggaaggaaatcaggaaagggtatttattgagcaagtaaccaatatgaacagctagggctaaatttcacttggagaccgtgaaaaccgcagaacatatgcttcagttacacacttaaagaatgaggaaactagaatattcatacattgtggtaagcagaataatgtccaccacccaccaaaagatgtccatgccgtaatctccagaacctgtggatatattaccttacgaggccaaaggaactttgctgacaagattaagttaaggacattgatactgagatggtgagattagattggattagccgggtgggcccaatgtaatcacaagggtccttaaaacagggaggcagaagagtcagagtcagggaaggaaatgtgaccgaggaagcagaggtcagagcaatatggagccacagaccacagaattc

SEQ ID NO: 197609 - DNA, 1000 bp, Homo Sapiens
cagttgtggtggctcacacctgtaatcccagcactttgggagactgagggaggtggatagctagaagtcaggagttcaagatcagccaggccaacatggcgaaaccctgtctctactaaaaacacaaaaattagctgggagtggtggtacgtgcctgtagtcccagctacccagcaggctgaggcatgagaatttcttgaacccaggaggcagaggttgcaccactgagctaacaccactgcactccagcctgggtgacagaatgagactctgtctcaaaaaacaaagaaacaacaaaaaaacacaacttatgagttgtggtgaaaggagtgctaaggaggaaatttatagctataaacacattaaaaaaagaaacacctcaattcaacaacataagtttacacattaagaaactagaaaaagaagaataaaactaaacccaaagttagcagaaggaaggaaacaatagagatcagggcagagataaatggaaaagagaatagaaaaacaataaaaaacaaaaccaaaagttggttcttcaaaaagattaataaaactgacaagactaaggaaaagggaaacaatctaaattacttaaaacagaaatgtatttgagaatatctttatatatttctgtctgtctgtctgtctgtctgtctgcctgtctatgttttagagacaaggtctagctccattgccctggcaacaatcagatgcaaccacaatcagtggcacaatcggctcactgcagccttgaattcctgggctcgccactatgccagctctttttttttttttttttaagagacaggatcttgccatgttatccaggctgatcttgaactcctggcctcaaggaattttcccacctcggcctcccaaattgttggattacaggcatgacccaccattcccagcctagaaaggattataaaagattactataaataattgtgtgctcataaattggataacccagatgaaatagatgaattccgcg

SEQ ID NO: 197610 - DNA, 1000 bp, Homo Sapiens
tgtctgggaagactcaaacagatgagggctgaaacagctgggaatccttgggcatctctccctctcaatagttttttcatttttgttgttgtgtgctctttgtatgactgtaccacaatttatttatccaatctacaattgatgggcatttggatagtttccaccttggggcaattacaaatagtgctgctataaacactcttgtacctgtcttttggtatacatatgtatacttttcttggatatatacctaggaatggaattactcaggcattgggtatgtaaatacgaccaatttttctaagtgattgtaccaatttacatctccacaagcactgtatgagagttccagatgcttctcatcctcagcaatagttggcattatctttttttttttaattttagttatttgggcatgtttagcagcatttttattttcctgatgggttgagtagcttttctttcttttcttcttcttcaattttttttttttttggccatatggatatcttctattgtgaagtatctattcttgtttctttttttttgtccattgctctttctttttttttttttttttttttttttttttagacagagtctggctctgtcctgaggctggatggagtgcagtggtgcgatcttggctcacctctgcctacctggttcaagtgattctcatgcctcagccacccaagtagctgggattacaggtgtgcatcaccatgcccagctaatctttgtatttttagtagagatgggattttgctatgttggccaggctggtctcgaactcctggcctcaagtgatccacctgccttggcctcccaaagtgctgggattacaggcatgagccactgtgcccagcctgtatgctttttcttattgacttaaaggagttattcaaataatcaggttaaaagtccttctgttacttattgagattttatatatatatgtatatattctcctacttttgtgggtattgtttttctctaa

SEQ ID NO: 197611 - DNA, 1000 bp, Homo Sapiens
agttttgattgaatatgaatgggaatctgtattttaataaaaatctctaatttattgaagaagtcagatcaacaattatttaaggtccacacttaggaatagctggtctgaaacattcaaattaatgatcatgtctttttattttacttatttgttgatatatttatacactcatttggtttattatttgggtttattcattcaagtaatgttacaggctaaatgtttatgtccctccaaaattctcatgttgaaatcctaaccccagtgtgactgtatttggagatggggcctcaaaggaagtaatgaatgttacatgaggtcataagggtggagccctcatcctacagggttagtttacttacagaaagagacagtaaagagcttgctcactccctctcttctcactcacacacgctggaggaagggccacatgagaacaaagtgagaaggttgccttttgctacccagaaagagaacattcaccagaaatcaactatgctgccaccttgatcttgaacttctagcctccaaactgttagaaaatacctttccattgcttaactcattcagtcagatgtataccacattttgttagggtggcctgagcaaactaatataagtaacaaattcagtagtaatttctttctattattatttttttttaattaccctatttatattaaagcatcttatttccaaaaaaaaaaaaatacatttttccttcatttggtggtctggaaagatgaaacatatgaaacaaaataaaataaaataaaatggaaaaaaaatgtgtctgtcagatgttaggcaagaaaatggaatcattaatcacaatgggaattagagatttgttatatgaattaggccttattcatatgtagggagattttgaaagaaaattgaaatgggaacatcagcaaatcagagaaagactcactaaccagttcttgtataatattgctgcatgaataagacctcagaggaaagtacgagaatt

SEQ ID NO: 197612 - DNA, 1000 bp, Homo Sapiens
tctgtaaccttgctaaagttacttatcagttaaagtttctcttttgaagatttcttagaatttttacatagataataatgccacttgccactaaaaacaattttacttattttcttcatcttaacacactggacctccagtaaaacgttagaaagaagtggttagaatggacatcttgtcctattcttgactttacaggaaattggtccttcttttactattaagtatgttgtttgcagtaagattttttatatgcctttatcataaggttgaggatgtttcctgttatccttgtttgttgaacatttctattaaaactggatgtttgtgaaaaaaatattcttggtcagatagtggaaggtggaaaaaaaactggatgttgaatattgataatgtggtaaattacattgcaaactaactttgtatttctaaaataaatcccatttggtcatgagtattatccttcttatacgctgtcagattctatctcatgtttttttttttttttttttttttttgagatggagtctggctctgttgccaggctggagtgcagtggctggatctctgctcactgcaacctctgcctctgagggttcaagcgattctcctgcctcagcctcctgagaagctgggactacaggtgcccaccaccacgccctgctaatttttggtatttttagtggagacgagatttaatcttgttagccaggacagtcttgatctcctgacctcatgatctacccacctcagcctcccaaagtgctgggattacaggcatgagccaccgtgcccggcctcatgttatttccttaggagtttttgcatctacttttaggaggagtatcagtcagtaattttcatttcttttaatgccatgtcaaatttgggtctctggaatatgctagtctaataaaatgttgggaagcaatttcctttcttctgttttctgaaagtttgtgtaagattggcattatttcttaaatgtttgctagaattc

SEQ ID NO: 197613 - DNA, 1000 bp, Homo Sapiens
tctactaaaaatacaaatattagctggcgtggtggcacatgcctgtggtcctagctatttaggaggctgaggtggatggatcacttaagccctagtggtccaggctacagtgagccatgatgacggccactgcactgtagcctgtctcaaaaataacaaatttttttttgagacggagttttgctcttgttgcccaggctggagtccaatggcataatctcggcccaccacaacctcagcctcctgggttcaagcgattctcctgcctcagcctcccgagtagcaaaaataacaaattttttaaaagcaacttcaaatggagagatctagcagttaccaccttacccaagtacataaatgatcaaactgcatcactcatagtaggacaactttgcaccgtgtggtccttggaaaaatgcaacaagtacaccacatcatctattaaatattcttgccaaaagtgcttaatcttaatctaatcaagtcattagatctgatttgcaatttataggaaatttaatacaacaaaaggagatattttgcaaacccacaacattccacaagacagctagctggtcttgtcaaaaaagcaatggaaaaaaaaaaaagaaaaaaattggccaggtgcagtggctcacacctgtaatcccagtaatttgggaggccgaggcggacggattacttgaggtcaggagctcaagaccagcctgaccaacatggagaaaccccacctctactaaaaatgcaaaattagccaggcgtggtggcgcatgcctgtaatcccagctactcgggaggctgaggcagaaaaatcacttgagcccaggaggcggagtttacggtaagccaagactgcgccactgcactccagcgtgggcaacaagaacaaaacaccgtctcaaaaaaaaaaaaaaaaaaattagttgaacatggtagtatgcatctgtagtcccagctactcaagaggctaaggcgagaggatcacttgagccgaggaatt

SEQ ID NO: 197614 - DNA, 1000 bp, Homo Sapiens
gatataggcacatggaagtcactatggaaaggaagacaaataaaacaaagtagtctatgactttcattatttgtttgtgaaaaataacaataatagattttattttatcttgaaggagggccatatggatcaaattgttggtgagtttatttctcttgagtaaatcagttggggtggaaatgtcagaacatacagcatcacaaaagagcacggatgggcatatctgttgtatctatcacttgggctatatacctcctttgaaaagtgcccttccctgccaatagaggcagatttcctcatagcctgctagttgttctgagtgggaatcgggtgctatgttggcatgtgcaaagttcatgcactggaaatgtaatccccaacgcaacaatatttggagatgggaactttaagaggtaattaaggccgggcgtggtggctcacgcctgtaatcccagcactttgggaggccgaggcgggtggatcatgaggtcaggagattgagaccatcctgactaacatggtgaaaccccgtctctactaaaaatacaaaaaattagctgggcgcggtggcgggcgcctgtagtcccagctactcgggaggctgaggcaggagaatggcatgaacccaggaggcggggcttgcagcgagctgagatcacgccactgaactccagcctgcgctacagagcgagattctgtctcaaaaaaaaaaaaaaaaaaaaaaaagaggtaattaggtcatgaaggctctgccttcatgaatgaatcaatgtcattatcacaggagtgagttagttatcaaggaagtgggctcctgataagttcagtttccttcttctcttggtctagtgtgcttgcttccaccttccccacttctgccatgggatgaccttcatgagatacagcaccatgttcttggacttcccagcctccagaaacgtgagccaaataaacttcttttctttgtaaattatcctggtatttaaatattctggaattc

SEQ ID NO: 197615 - DNA, 1000 bp, Homo Sapiens
ttgtaggaaacccagaacttcaccttgtagaatttagaaaggtagctcaagtattatcattattcaataatttcttattttcagtgaatttactgcattctttatatttttcttgtgcttctttgcatatattgcccctcttattaatacggatgcccagggcaacataatttcaaaagtttaagtttcatcatttaaaagttttagccttgaaatatcttctattctattctttcaggtgggtttatagaagctgtcaaatcacacagacatatgcacacacacacacacacacagaaacacatacacacacacacacacacacagagagagaatgaactaacttcaatagacctggctgttcatttaggccaccttagcaatgaaagtgaattgctgcatgaatgatttggcagtgacaaccagtgtcatgtcatgccaacagctgaaacaaacaggttaattggatgggattctagctcagcactatggttttatagtttgacaaaatattaattgtacctttgtagagagctttgtatatattttcttaatcaagtaaaggaaagaatgattgagatttccattcctttagcaggttctccatcatatcactaaaggctgtgagagtttctaatggccgagattcctgaaatattaggattcactgccacagatgcctttggaagtacctatctcaaactcttcctttttatttgaaatttccattgtacgttttaaattacagcatagcaccacagtggcaaatggaaggccatggttcttggaaaaaaaataataaaaagaaagggccacaaggtcaaaagatatttttctggagaatcttgcaatataccaagtgatgccttgggaaaaaaagcaaagctgtttaaaaagacagcagctgctataatgctgcttcattacagacccagtggagcagaagcaatgcatccattttgcctttttcttcattgatgatatcaatggagcattaatg

SEQ ID NO: 197616 - DNA, 1000 bp, Homo Sapiens
aatctgtgaagcatgttaaaaatactttagtctgatggtcaaaagtaagtgctaaactgactacttcataaaatttacctaattacaggccctatccaagatctttgtttcattagcactcttaaaaaaaaaaaaagtagagaaactggagttttacagagtcaagcataagttgagtgatttgagtaactttgaaaatgatgcgaatttgagctaaagcccagaaaatgagattcttggcagaagaaactactcattctttgttatcaggtatctttaaaatttcactgatactaaaatgtaaatgtcacagtaagttatgctacacaacctacacctacaacttaatttaaaatagctagaaatgagaaatactctatttcttgaaaagttcatttaaaaagcctcttgaattagagtttaacaagtagcagaacacaaggagactccagatacaatagttagaacatgccaagaacacagtttctcatagattagttataaccaccacatccaggaattgttcatgagttagcttttcttttaaaattctctgcaccttaactttttaggagccaaatgggaaactagagaagaaccgtcctacatgaagtcaaaaccattaattttgattcaataagaactaaaaatttctataattaacagaaaatggaagaattctaagtatttaatttatttaaagtaaatattacaatgccattaaataggatcccaaaacagctccatcagttaattctctgcataactgtcacccataaaatttccaataagccacattctttaccaaattcttaaaatgtttatatctttcccaccccctcattaaacaagggttcggaaaataagacacacagctcacaaccagtctgacacagagcttacaatctgacagccactgatcactctttccacctccctttattcaatcatttatttcttcgaatccagtagctaattaattcccattctaactgaattc

SEQ ID NO: 197617 - DNA, 1000 bp, Homo Sapiens
cttgtcatgttcttccttctgcctgaaagttctcccccctcttcttggtcaagttaactcctttatcatctttcaggttttgactcaaatgtcacttctttggggagcccacatttaaacaccagtgatctgtaatttaaaaggccaaccttttcccacaagccatgttgtctcttctttaaacactccgcatataaactgacaaaagaaatctaaaacatatcaagagtatctgattgagattgcccttaaaaaaatgaagaaaattgattcttattatctggcgagtctgagactggccccaggcatcaggcatttcctaacaatgacaccatgaaatagcccactctgaacatcaccattcaatttcccctatacgccttacacttctactgtatctcatatgacatggagcttggtactgaatacttaacaaaatttttaagtatacttattattggttgactaattggccagtaagtttcacttgggacatctttttttgaaaacagtttggcagtttctcaaacaattaagcctacaactattatataacccagcaatgtcacttctggacatttatcccagagaaatgaagatttatgttcacataataacctgtacaaaaatgtttatagcagctttattcatgatagtcaaaacttagaaactaccaagatatccttcaacgagtaaatggctaaacaaactttggcacatccataccacagaatatatcaaaaataaaaagaaaccaaccacattgacacacacagcaacctggaagaatctccagagaagtatgccgaggaaaaaagccaatccttaaaggctctatgctttatgattcatttgtataacattcctgaaatgacaaaacgacagaaatggaaaacagactagtggttgccagggtttagggaaagcatggaggtggaggggagtgatgtagtgtagtggacaaaaggggagatacttgtggtaaggaaaacactctttc

SEQ ID NO: 197618 - DNA, 1000 bp, Homo Sapiens
cctgtggacatggtatcataaccaccatcctcaacttacagatgggaaaggcaagacttaaggaagtcaaagaactggctgctattacacagttcagaggtggcagagccatggggtcagtcttgtgccaaagcacaaactatgtcccttctgccctttggtcttctcagggctgattagaaaacgagaaggtagatttccaactttttgcagcatgactttacctggtctccttaatagtgccgtgctgcgagtttctgttgtttctgttttcatccaaataaagcataagagaagttccagcctcctaaagcataacatcacatcttaagggccaaatttgatagtaaaatatattgttctattcagtctccatatcaaatttcttacagaagatggatgtcatttgtgctgccttttgtaggcacaagttgcaactgcttttcagcaatcatttcttataacagtgcagaacaattccagccagcccaggcgaggtttttttcctaattctgtaataatccattattttatatttattccatcagtttcaacagttcacaagaacatctataatcttagatccagtaatcaactgttcctgaattgccccgtcctaaatttaggcctcacacttggtaatttagctagagagtttcattggtgagtgccactctttcacggttgaggcaaagtgctactatttgggctgtatttaattcttattatttagcaagttgaactgtataccacggagtttaataatgcagggtgtaattgctctaatgctatgaaggcacatggctgctgacttcctcagtcttcactaggtctcgctggcaaatgagatgttgctgctcagtgaggcttctctgcttcaatattttaagaaaacaaatatcgttgcagtgtggcatttgtagaagaatctgttaaagggctgaagtagtcacaagccagagctactcataactgcgaatattcattaattgaggaattc

SEQ ID NO: 197619 - DNA, 1000 bp, Homo Sapiens
ggtggacaggaatgaggacatgatgaaccaagagatggatgaaacatgtggggaagcagcaacatcctacctcagaaactgccttgggaaagggttatataatctatgcaggtgcatgaaaatgccatggaacccgcaatcagatggcctgtgaaactcttaactccctcctttattccttctgatatgaccatcagaacaagccctgcgaccctctggttgagagctggcctctaatttaagttcatgagaggaactcagtctctgtggaggttaaggagcactccatcaccccaggtttccctccacgcagggcagattccaggtataattggaaactaacagcactgcctttccctgaagtctcgggtgctgggaagataaacccagcgctgcccagctcccactcacccactgtggagggaagcagttctgtggctttccctctgctttctaatatctcccacccggccccacagaagctggttccagaggcttctcccaggtgcaagagcggagagctagcctcttcccaggggatcaggtgaggaggtcattctgcctgcgggctatttctgctcttgccctcagctgctggctttggagacagccctgtactgcacacacatggacgacccttcccccagagaaatgatcaacaacttccggcaggtccagaagttcgatgagaggctggtatacacctccttctcccaaggtgaggagaggcagtgctggggggagggggtgcgggagtgtggtgccaagacattgggatcttctgtgaatgcagctctggcactgatgccctcaagaagttggctgagagctccctggctgccacgggaaccaggcgccttgtgagactaggtgtggggctcactggggtccccccttcagtgagtctttgcagagaagcaaaaagccgaggcccccaggcacatggaccagagcactctttaagcctgggagtcttgcacagatgggtaagagagaattc

SEQ ID NO: 197620 - DNA, 1000 bp, Homo Sapiens
gccgcgtcctcacttggggctgatgccattttaggcctcagcccacctgcacccaggcgctcattaaaacagcatgttgcggccgggcgcggtggctcacgcctgtaatcccagcactttgggaggccgaggcgggtggatcatgaggtcaggagatcgagaccatcctggctaacaaggtgaaaccccgtctctactaaaaatacaaaaaattagccgggcgcggtggcgggcgcctgtagtcccagctactcgggaggctgaggcaggagaatggcgtgaacccgggaagcggagcttgcagtgagccgagattgcgccactgcagtccgcagtccgacctgggcgacagagcgagactccgtctcaaaaaaaaaaaaaaaaaaaaaaaaaaaaacagcatgttgcttcacaccgcctcgtgttgtgtgtcggcgcgctcgcagggttcgaaccgatacaagaaccttacagagggtagttattaggcctggtcacacatgtcccatgacttctacttcctggcacatggtagggtggcagtttcctgccctctggaggctagaagcggtggccaattgaatgtgcgtgagagtgatgtgtataactttctgggaggaacttgaggagccactggattccccacggctcattgtggctgtggtcattcgtgattacgcaggccggcattgcccagcctctctggcgaatatagaagcctaaacttaggtatgcacatttgggtgtggtccaggctgggaaagtcccagaggatcacaaggtggtttcttccccaatctccctgtgtttttaggacaggagcaaggagaagaatgggacccaatctcattccagcccagcggtgctgtcgcaaggtgtgagtcttggggtgcctgtaataactgagtgcctacaatctgcacgaggctctgagtcagcctcaggatgctgcaggggacatcctgcagcttggctctcttggctccatcctcatgacgct

SEQ ID NO: 197621 - DNA, 1000 bp, Homo Sapiens
gctgagatcacaccaccgcactccagcctgggcaacaagagcaaaattgtctttaaaaaaaaaaacaaacaaaacatgaagaagttttcatgatttttgctaattcactttcctgaaagatttttcccatttatacaacaatcactattacagtggttagcacgagtacaggacctaaatgagaaaaataattttacagagaaaaaaagaatttgaataaacagtctatgggagccttaatgtaaagacttgcattcatgcattctctcctatttaaacaagtccagggttgttgttgttgttgttgtttttgaggtgggaaggggaggctggggagcatttaatataaacaatcccgtttttattcataaaaataaataaatacacaagaaatgtcccttcccctaaaacacaaatgacaagagacttgcctttacagtcttgaaaagcatgttataaaaatacagtattaacagtggggtgctggaataggactaaaccgatcaatgaaacagacaccagaaatgaacaattttgacaaatatggcattataaaattcagtggcaaaaagatgaacaattcactaaatggtaagagccagaaaaattttggtgagaattaagatctctacatctcctcttccaagagattcccaaaggagtaaagatttaaatgtaaaaatggttacacatgaagcagaaaggaatatacacaaatattagcaagttgttccatgtggtgggattacagatgtttttgtttccttatacttaactgtgactcttagaggagcacattacctttacactcaaacagccacctccactttggagaaaaatgttaatctgttgattttttcaaatcaatttctgatgacaaaaatctccactcatcatgtaagacaaattacatttaaatgcagattttcatcttcactcagggctggctaagcatttcagagttgttgcaaatggtactaaacagctgatactaagaatt

SEQ ID NO: 197622 - DNA, 1000 bp, Homo Sapiens
ctccactgatttatccatcaaacttgataatatgttgaatataatctatcctatttttgatgatatgtgatcataactattgtcctgtatttaagagaatgaatcagctcatacaaaactagttctggataactatcattgtcaacatggccaaaagtctgacttttgactgaacaattatggtatacataaatttgcttttttcactgtaagccattggaatataatatatacttggatatgaaagcaaagtggtacttattgatataaaattggagcttgttagaaataaaaatctcggcaccgcaccctctaagacctactgaatccgaattttgataatatttgcacatgatttgtatccacattaaatttgagatgcattgattttgagcagaacactctccaacagaaaactcttcagggatgaacttccattactaccatctgtgaaatcagggttttatgttcttggatctcaacttttccctttaatactcttcagtccaccttcatggatgcctttgttgtataacatactcttaaccaaaattttatctttgtgataaactctcatgctttaaacaagtttgtaacagataaatggatccattattcaacttggtttagtatcatgaatcataagttcctaaatccttaaggaacattataaatcatccaggttcaatctaatcttgcattttgcagaagagaatacgggagtccaacaaggtgaatcgacccgtttaccacatcaatcaagcattaacatcctgtactctatcttaatcacaggtctacatattcattcattccctccttccttccctccttcctcccctccctccttctccctcccttcccttctttccttcccttctttcctttccttccccttcccttccccttcccttccccttccttccatcctttcttccttccttcctaccttccttcctgtctctcttttactttgttttctgttgaaattcatgaattc

SEQ ID NO: 197623 - DNA, 1000 bp, Homo Sapiens
aagatgttaacattagaagaagttgggtgaaggatttatagaaactctctgtactatctattgcaacttttagaattataaaatcctaattttatcattttaaaaattataaaatcctaattttataattctaaaagtattacaaaataaattacttaaagccaaaaaaaaaacctcttgataaaataaatttaattcaataatcaaaagttttatccaaatctttccccacaaaagtggccgggcacagtggctcatgcctgtaatcccagcactttgggagcccgaagtgggcagatcacttgagcccagaagtttgagaccaccctggccaacagggtgaaactccatctttattaaaaatacaaaaattagccaggcatggtggtgcgtacctgtagtcccagctattcgagaagccaagacaggagaatccttagaaagaattgcttgaacctgggaggcgggggtgcagtgagctgagatcacgctactgcactccaggttgggcgacaagagcaagattccatcttaaaataaaataaatatagcctgtgcgacagagcgagactccatctcaaaaaaaaaacaacgtaataaataaatctttcctaacaaaagatattttaacgatgaatgataaattgttaaattaaaggcagtcatatacatatatatatatatagagagagagagagagagagagagaattaattgaaaagatacacaacaaaatgttagagtgatttctcttcaggtggtagaattatagattataggtgatgtttatgtcctgattacctttattttctaaattttctatagtaaacaggtgttttttggtaataaaattttttttttaatttaatgttctccaatatgataactctagaaagtgccatgtcatgaacagttacaatacatagctgtgggctttctccaaggtcctggctcttataaagtagagctttctaggaactactccacttgacaggaattc

SEQ ID NO: 197624 - DNA, 1000 bp, Homo Sapiens
atgtgtttactatattatatttcttatcattattttagagtatactccttctatttgtatatatgaaaaaagttagctgtaaaacagccataggcaggtttttcaggaggtattccagaaggaggcattgttatcataggagatgacagctccatgcatgttactgcccctggagactttccagtgagacaagatgtagaggtggaagacagtgatattgatgatcttgaccctgtggaggcctaggttaatgtgtgtgcatgtgtgtgtgtgtcttagattttaattacaaagtttaaaaagtaaaaaaaagaaagaaaaatatcttcaagagtaaggatatacataaagaaaaaaattttgcaaagctgtacaatgtgtttgtattttaaactaaatatttttagaaaagagtcaaaagagttaaaaagtttaaaaggtttataaaataaaaatgtttccgtcatctaaggttagtttgttattaaagaaagaacaaaatttttaaataaacttgttgtagcctaagtatccagtgtttataaagtctattatagtgtacagtaatgttctagggcttcacattcactcaccactcactgactcacccagagcaacttcctgtcttgcaagctcctttcatggtaattgccctgcacaggtgtaccattttaaatcttcgatatggtattttactgtaccttgtctatgtttagatatgtttagatgcacaaatacttaccattgtggtaccatggcttgcagtattcagtacagtaatgtgctgcataggtttgtggcctaggagcaataggctataccacatatcataggtgtatagtaggctataccatcgaggtttgtgtaagtacatgctatgatgttcacacaatggaatcgcctaatgacacatttctcagaaggtatccctttcattaggcaatacatgactgtatattagcattgctcaaagtatgttctagctattcctttggaattc

SEQ ID NO: 197625 - DNA, 1000 bp, Homo Sapiens
tgccttattgccaaatattatttgatttgcccatgtcttacctataaggaaagaatggtggtagctgttctctcctgcttcctgttccatcattctcataacctatttcacagagaaaatgaaagccttctgacaggagctcccataacttgccacctccaacctccgtaagtacataggcagacacccaccttttcctccctctctcctcctatgatgggagagatgtctaaccacccatgttcttattcatatctgattttgttttttgttttttgggttttttttttttagacagagtcttactctgttgcccaggctgaagtgcagtgatgcaatctgggctcactgcaacctccgcctcctgagttcaagcaattatcatgcctcagcctcctgagtagctgggattacaggaatgagccaccacactggactaatttttgtattttcagtacagacggggtttcgccatgttggccaggctggtcttgaactcccgacctcaggcaatctgactgccttggcctcccaaagtgctgtgattacaggcatgagccactgcgcccggcatctaaaatatttttatttctttcagagctgctatctgtcatatgatgctatacaaggttacaatttggtatcttattgctacaaagagtctgtgttttcagccttaagatttaatgttaatactggtcagttgtgcctgaattccaaaaggaggaaggtataatgaggcatgatgggacccccacttcccatcatggcctgaactagtttttcaggtttctttggaattccattggctgagacgaggggtccattcagtcgagtggggggcttagaatttttctttcagtttatacacactcaacagtattcaatcataatacctaataaattgcaaaggaaaatgtctcacagcataccaaattcttcagataaagaaagacaccaaatagctgggcatggtgactcatgcctattatcccagcac

SEQ ID NO: 197626 - DNA, 1000 bp, Homo Sapiens
tatgagcaatgatgaggtcatctgaatgaacgccatgcaggcacagcccctcactgagggaaacaaaaaccaagacatagtttaggaatacaagcgtgggtgtcaaaaccctggagttgtgctttccagtgggcctgagacagagacaaagtgacatgatgtttagagagcaagaaagagatcgaaagggaagagggcaagcagtctcaggcttccatggtaggaaataaataatgtccagaagggtctggctctgaagtggaccaaatggctctcctgtcccatgtttatgaggtcatggaccattaagccagccaacctacagatgtcttcataagactttacgagattagactggggagaccctataactcagcaagaaaggaaaacaagaggggagaattgcaggtaagagatggtagaaacaagtgctccgctccagaggcctcacatatcagtgggaggatatctgggtttggtgaccccttcatcttcctcacttctctcttctgtgagtttctgcctatctccattagattcagggctacatcaggcttatattattcgataatttcttgattatccacatactttcctcctcctaacttccaactgacctcacaccatgttcctgacctgcaagccttccatcctcagagaagtttctttggtatttgtgaagcaaatcagaaagataaaatacaaagtttacaaattcacatattttcaaacctgatttagactgcatttgcttgatgtggtattccataagttctaatagccatgagatgactcttccagggatccctaggttgctgaagcctaatatttattctctgaaccattaggagcagagaagagcatggaaaccaggaaaggtacacactgaaccagttaaggaaataagagtaggaaacaggatacgcattatcttatttcctcaggcttgcgccaacctgtggttatttgcagaaagtcagagaccaataatccttagaaa

SEQ ID NO: 197627 - DNA, 1000 bp, Homo Sapiens
actttctcattttgcagcaattttagtgtcttagtaatatttacacgggacccctaggccaaaagaaatatgtgagttctgtttgttaattagttaggtgtaaacaacttaatttttatatccttaatagttatatcctaacaactcagtggcaacatgattcattaatatatattaactgaaggtaaaacattatttctatttcatttttaaattatcacagtgacttactaagggaatccatgttcctgttggactcaaaacaatttcctaaactttggaataatgttagacatccccaccctcacttccctttcctcactgacttttgtgttatacttgcatcatatcacagcaaccactgaaagtgaagctttacaaaaatatgacataatgaaaaggaatgtagcacaatctaatgttgaaactgtgactagccccaagcaagcagcctgcaaggctgtctagccttcgaaacacttagaaatctggtgatgcccctgtgagttcactggaatgcttaagactgacttttaacttttattgtaaaaagtcaaggttttttatcgttaccaacagatgtttttgtgtttactacaaatggagcatcattgtgaaaaggtatgacaagttatttcatcaaacaaaggaaaaaaactttataaaatttctccttcctacaaaacacagtacagtaacataaatgtggatgcaacactataggcaactgactgcttatccttcttgctggctctgttcttaaaatggctggaggaagcaggtgatataggagatggaaactaaagttcttactttcttgtagggagtggggacagggcatgaaagaaaaaacaaagctacatggaaaatgcaggtaattccacccccaaaaatagggaggaagaagatgggttctcttgtctccaatgttcttccatatccatctccccaattctggccaataaatatcacctaaacagggaggtgatttcttaagctt

SEQ ID NO: 197628 - DNA, 1000 bp, Homo Sapiens
ctctgcctcccaggttcaagcgattctcctgcctcagcctctcgagtagctgggattataggcgcgcaccaccacgcccagctaattttgtatttttagtagagatggggttttaccatgttggccaggctggtctcgaactcctgatctcaagcgatccacccatctcagcctcccaaagtgctgggactacaggcgtgagcacccagtcaaatatttacctttttatgattctttgctttaactttttctgtaaattgactaccattactgattatgcaaataaaagagctgcttgtgtcaacaaaaatataaaataaaagagctgcttgtgtcaacaaaaatataaaacaatcacatttgaaagtcagtttaaatgtaaaagcatttcaattactttgggtctccaatatctttttcttgaaggtcaaaacttaactactcactatctagatctcaataaaaagtgacaaagcaacctggcgttcaaaagggaacactgtacctggagtttctctttgttgcttgttcggataattgatgtcaagatgtctggtaaagcttcccttggaagactatctaaaagacgtctcaatttagcaactgcagggacagacatatccaacatttcaaccaactagaagggggaaaaaaagtcttttaaatgaaatctggcattatttgtgaatttttaaaaatcagatttccatctaggtttaatgtttgggcctcagtctttgtttttgaaagatcactgattaatatagtccacgtattttacaggcctcagaggaaaagaaaagtactttcaaaacatcaatcagaatgaaaagcaataatggcttaaaagtagttaacactaatgtttacaagggttttgtaaacctgtgccatgattatttttaactttctattgaaaaaaattcaaatgtacaaaaaagttgcaagaatcatacaataactcctgtacatccttcttccagattcaccaattgaattc

SEQ ID NO: 197629 - DNA, 1000 bp, Homo Sapiens
gacgatgctgtgacactgtctgtagtcctgggggtctataattctggcttttgaacttggcgatactctattttagaaattgtatcatttagcctccctatacccttattatattgagcaagagactgaggcccagagagggcaggggagctggccaaagtcacacaacagtcagtgatggagcctccgtcacctgagctcatggcaacccctgactttggccatagagtgacccccaacaccaaatatacaccaacctcctaatctttaccccctgactcaaccccctaacctggctcagatctgaaccctaacttgaaccccagtgattctgggtctcagacaaacacaaatccctatacctggctgtttgcaatgcagctaggaccttcttaccaaagaacttgaccttgaaggcgaggtcaggagggggtgatgacagctccgctcagcccatctccctcccagggcactcctctctctgggctagtgtggcagccggcttcagggctggcttcaggccagggaggctcctggcatagtgggtgtccatgaaaagacccctggcagggcagacagatgcactgatacttacacaccaggagggcaggcttggtgatgcggcacacgatgcctgcctcgtgcgaggtgcctttggagcaggcatggccattgcccagcagggccagggtcaggactgtggcagccagcatggttatcaggcagtggtgtgtaagtggcccgagccgttcagcctggagcccgtatatgtatgtctgcccagcccccacggaacatgaggctcttccgggcagcagggtcttcctggccccagagattcacctccttcctgcccagcccctgcggcctcctctagagttcagagccagacattcaacaagagcaccccaacttctacttgtctcccctccaccatctgcaccatttttgccatcccttatgttatctggataattgcttaatatgtttccatgaattc

SEQ ID NO: 197630 - DNA, 1000 bp, Homo Sapiens
gaccaggtagcactaatgctacgtgtattgtcctagaacacaaaaaaggaaggaaaacttccaaattatttttatgaagtaaacactgatacccatacctgatagacagaacaaaaatagaaaagtatagaccacgccgggagcggtggctcacgcctgtaatcccagcactttgggaggctgaggcaggcggatcactggagatcaggagttcgagaccagcctggccaacatggtgaaaccccgtctctactaaaaatacaaaaattagctgggtgtagtggtgcacgcctgtgatcccagctactcgggaggctgaggcagaagaattgcttgaactcaggaggcggaggttgcggaggttgcagtgagctgagatctcgccactccagtccagcctgggcaacagagcaagactccatttcaaaaacaaaaaaaaagaagaaagaaaactatagaccagtatcacttatgactgaatatccatagaaaaatactaaatattaataaacagaattcaaaaacacattaaaatagtacaacatgtgggatttatgccaagaatgtaaggttgattcattattaggaggttcatgaagacaatctaccatatgaaaattcaccatcgtctccaaagatatgggaacacaattcaatagttactcctgtaaaacaccactcaggaatagaagaactgaggaatactttgttaataagctaaaataacatatgccttcccttttacagtcagcctctcatgtaacgtggcatttccactaagatcaggaccaaggtaaggaggctcactatctccactatgttgaacaatgagctagaggtgttagcaactaaacaaaagaacggtgcaattcaacaaagtcagagtcatgagaatcagcaggaagcagtgtatccatcgatacttaaagattatatgttagtacacctgtaaagccctaaagaatcaataacaaaactaacctgaacaatgtaagaattc

SEQ ID NO: 197631 - DNA, 1000 bp, Homo Sapiens
accctgccacagtggagtggagcactgtatgtcatggaagccagccagcagatttagaaatcatgttgctcttggcatccactctgggactctgtgtagagctacgtgctgagatcccattgcatgggcagcttttcaatgccggagtctaccctacatcttgctgtgctgacgccttcccaacacaacttcaaaaacaagaggaaaaccgtgtcctcaaactaggagtccctttactcacccgtaatgaaaataaaccaaagtccgtcttcatttgccctgaaatccaacttcctttccaaattatcctcattgcataagcccttctaagcaatgtttatcagcagtcaaagcaaaaccatgtggatctacagtttggttcccacagatcccaacactgccttcaatccataattaccaagaacaagcggcaaacaggagtttccatcagtaccagttagaccccatgaccggaggccctctcagagagcaatgggagattaaaacagtatcttttgatcaaaagcagtaatgtttccccccatgacgcccttgaaaatgaaactcccaccttacccttcattccaaatttggaccgtcgaccatatttgttgatcatgacgaagagaaccaccaacaggacacaggcaaaagcagcaagtccaactgctatggatacctgtgaggaaccagaaacagagagtcagcaacaatcacagaaaacccaatttccttgaaaataatgtgtgtgcccagataagaacagtcctactgccatagtaattgtagccttctcagaactgcaatactgagtaaggtctttagaagaagaaatatatgagacccttagaacatttaaaagtatataaattacccaatttgattagagaaagttccacgattcaatgttctgagccccttctcacctggggccattctaacagatgcaaaaacaagcctagagaggcgtctgattttgttttaattagcaagtgaattc

SEQ ID NO: 197632 - DNA, 1000 bp, Homo Sapiens
ttgtatttttagtagagacagggtttcaccatgttggccaggctggtctcgaactcctgacctcaagtgatctgcccgcctcagcctcccaaagtgctgggattacaggtgtgagccacctcgccccgtcgagaagctgcttttcaaagagttgtgccagtgtacactctcaccagccacgagccagccagtgtgcccgttttcctgtattcttgccatctgtgagcttgattaatttattttggaaatcttaccaggtaaaacatggcatcccattttgccttttttagttgccaatgttggtatggttccttgctagtggacttgtctgttcatgtccatttacctttgggggagcctaatgtcttacttatagatttgtgtgtatatatatatatatatatatatatatatatatatatatatatatatatatatatatttttttttttttttttttttttttttttttttttaaagagacagcctcttggtctgtctcccaggctggagtgcggtggtgtgatcatagctcactgcagcctcaaactcctgagctcaaaggatcctctcacctcagcctcccaaagtgctgggattataggtgtggagccaccatgctggccttgtattaaccctttgtcatatttgccatctgaatttttcttagtctattgattccttcatttaaaaaacagttattgagaaatgcaaatcaaaactgcttcacacacatcaggatggctaacaacaagtgttgtgaggatgtggagaaactggaatcctagtgtactctgggtgggaatgtgaaatggtgtggctgctatggaagcagtatggcagttcctccaaaaattaagatggcaaattttatgttatgtgtgttttttgtttgtttgtttgtttgtttttgagacggagtcttgctctgtcacccaggctggagtgcagtggcatgatctcagctcactgcaagctctgcctcctgggttcacaccat

SEQ ID NO: 197633 - DNA, 1000 bp, Homo Sapiens
tgttattttttcacttacaggaatcttgcctaacctatcatattccgaagggttaggaaactaaggtgtgcacagtgactcacacctgtaatcccagcactttggaaggctgaggcaggtagatcacttgaagtcaggagttcaagaccagcctggccaacatagttaaacctcttctctactaaaaatacaaaaattagccatgtgtggtggtgtacacttttagcctcagctactcgggaggctgaggcaggagaattgcgtgagcctgggaggtggaggttgcagtgagtcaagatcatggcactgcactccagcctgggcaacagagcaagactccatctcaaacacacacacacacacacacacacacacacacacacacacacaactgtaatctttgaggttaccttctctacacaacagaaataatttgcatctctcctgagcaaaaatatgcaagttcacaagtaccttcacagagcgtggtccctaagcaacagtcaagcagtcaaacacagataccttctcctagagaactgagtaatcccacggtggacacgatggctcacaccagcaatcccagcactttgggaggctgaggtgggaggatcgcttgagcccaggagtttcagaccagtctgggcaataaagtgggatcccatttctacttaaaaatttttttcaaggtggcaggggtgaaaagacagccatgctgttgccttatttccatgttttggacaatttgtccttacactcattatttattgtgtatctgtgcaatttaatgtgttactaagatgataaataatttatgacttgaaggttatgggaagaaggtatagtattctttcaataaatgtgtgctcaagtgtgtttcatactctgggtttccctttggggaataattaacaaaaatcttgtattagaaaatcagggggccaggctggtggctcacgcctataatcccaacactttgggaggctgaggcaagaggatc

SEQ ID NO: 197634 - DNA, 1000 bp, Homo Sapiens
aacaatgattcttaacctgttgtggcacacttcttttgaaaacttaattatatggattagcttctcaggaaaacgtgcatgtacctattaaaacattttgcgaggctgggcacggtggctcacgcctgtaatcccagcactttgggaggccgacgcgggaggatcacttgaggtcaggagttcgagaccagcctggccaatatggcaaaatctcgtctctactaaaaacacaaaaattagcggggagtggtggtgcacacctgtagtcccagctactcaagaggcttggttgggagaatcgcttgaactcgggaagcagagattacagtgagccgggatcgcgccactgcactgcagcctgggccactgagagaggctgcgtctccaaacaaacatttttcatataatttcctcaggagaaattacgaaatacttttaaatagcaaacacacacaaatgacttggtgtcttgtctgactcactcttccaagttatctatgtctttcgtggtctttgaactatttttcaaccctgtaactcgctacagcaacatggaaattaggtttgtccagtaaagatgcaattaattattgtcctgagcagtatttattaatattcatttcaacgttcctgattgcctgtgtacctgctttttaaattctcctttgaactggtttttagcacttaactggttcccttatttacagtcaagcaccacataccgacagaccgcatgtatgacagtggtcccataagattataggtgagtaataggcaatagtacctaggtttgtgtgaatacatcatagaataactacatactcaatgatgtacttactcacctgactgtgcatttctcagaatgtgtccttgtcgttaagcaacccatgactgtgcttaaatctttaccgtgtattcattttatatttgtacaagagtcttgattttaccttatctttaaaatgtatcatttacaatttaatggagcccactagaattc

SEQ ID NO: 197635 - DNA, 1000 bp, Homo Sapiens
attaattggagaaaagtcatacagattttattacatgtacacgggggaaccacagagattactcaccccccaatggggttcggaagcatgtataatatcctggcaaaacaggttatatggctggtccaggtgcagtggtgtttacagctaattgatcacagccagttacagatttctttgttccttccactcccactgcttcacttgactagcctaaaaaattaattaattaaataaaacaggttataggagaagggagaagaggaattctgttgtgaggattactaggaagaatgaatggatcagggaagggagattaacttgtacattatcttgtggaaggatctgttcaggtgtgattacattcttggtcttactgggaggggaatgcaaaacagttgttctcggtgggtctggattttaggcgataaaggaacttcagagaacgtcattctgactttgggagaagtcagttgtaggggtgggtggttgggggaagtcagagagaccctgaggtattggttactgagtcccaacatgggaatgcccagtttgtagccaagtcagactaatttgactgatttgtggctaatttgaggatccactacttgcaattagcatctgaagttgggggtagtctgtgggactgagccctaaacctacgggggtctgtgctaactccaggtggtgtcagaatttaattaaattgtaggacgctcgattggtctccacagagaatagatttgcttctggaaaactcacacatctggtgtcggaagcattgtgagtggagaaacagttttttatttatgaggcaagagaggctatgggggtcttgaggcggtattggggaccttagatgctatcatctgctccagtatctgggaaggtctgtcctcctcattggcatcccgtctccagttgccctgtcttcttcctctccctcatagaccactgttcacacgggatacacttatgatccccacactgttttctcctt

SEQ ID NO: 197636 - DNA, 1000 bp, Homo Sapiens
tctttgcctttggtttgaatttcctcctgtagctcggagtagtttgattgtctgaagccttcttctctcaactcttcaaagtcattctccgtccagctttgttccattactggtgaggaactgcgaagttggggtatttgcataaatgactctgactcgatgagtagaccttttagcagacttcctttatcttattagaactcctggtactgaattttcctagctgttctatctggatgccacctgaattcaggtgtggcatggagtttatttgttaagggcactgcagagtaattcttttattgaatagaaagttaggctacatcttccaaatgtaagcatgtttatagtttcttgatgttttgggaagcctctcttacttgccaataagattgttttttcaaagatgcctcattcttggcagttattataattttcctccctcttctctggtagtaggacctatgctgggtattctctaacagcttgtttgcccgtctgatcttcaagtgatattagggaaactgcaaaaacccagcgtgggttcacctaacagctgaggaatgcctttcctccctgtggatcacatgactaggtatgcctgtcaaattgactgtccttttaaaaataagtgagaagtgtaggagttttacctactgtaacagctgctagtgatgatatctcttcagagaaacaacctggatgataaatgatagaggagaggaggttagcactacatcctcccttactctcttgtgtcttcctttctaaagttatgatgcccctttcacacttaattgaaacatttttaagtagcacagaatatctttaaaagaaatgaagcaattcttccccaaactttaaaaaaaaaaatctttccagcctaggtagttcagaaaagagtagctatgaactctgacatttaccttgagagcaagctcatagccagctcaggccatttcatgagtttagtagaaccttgatatgacataatgaattc

SEQ ID NO: 197637 - DNA, 1000 bp, Homo Sapiens
ggagagaggagggtatctacagaagaatattttcatctccattgaataatgccttcaaaaaagactcccttctcttctgtttttaaaattcaattcactaatctctctcgttgacttcatctccaaaaaattcccaatagggaaataaagtaaaaaatgaagcccctctcacccacctttacccttcacccctagatttccactacctcttaataactagtttccagccatttggtgcaatttttttttctagtaattattcagctattcagtgaacacgtgtccatgtacatttgtaatgccttttattttttattttatttattattttgagacaacatcttactctgtcacccaggctggtgtgcagtggcatgatctcggctcactgcaacctctgtcttccgggttcaagtgatcctcttgccttagcctcccgaatagctggaaccacaggcatgtgccaccatgcctgactaattttttgtatttttgatagagacagggttttgccatgctgcccaggctggtctcaactcttgagctcaaagtgatccacccacctctgcctcccagagtgctaggattacatgtgtaagtcactgcacctggcccataatgcctttttaatggcatatccaaacctatccaaaccttttaagtgacatcataaggaggtgatataattctacttttaagtgagttgagctctgctccagtaaaaaatgttgcccagatattttaattgtaaaccatggagatgtagcaacctgtgagagttatcatgaattgatgtacatagcacaggactggacccgtctgctacattagaaggatctttctgtattctggttattgatttgggacagtttcataaaaactgcaatgtgatcttggctaatttctttgaaatatcactttaagaataaggaccacacatagtaaaggggggctctttggcataatagtgatattcatttctgtagactctgctgaattc

SEQ ID NO: 197638 - DNA, 1000 bp, Homo Sapiens
tgtaaacaacaggggcacaatggtgacactgcaagtcccaacatccctccagtcagcaattgaacaattacccagccacctgacctccctgcctctaacctccccatccctcctgacatcaattcactgaagccagagtaaactatggaaggctttaatctaactcagacacttttctcttttaaacaaaccaaaatctgactcacccctgcaagggctcccgtcacctacagggtccagcccaggcactcagggagccctgggatctggccccacccacctctcggctgcctgcctcccactgtgctccctcacactctgtggccgcctggagtggcagcggtccctcttcactggcagcagcaagtctgtgaccaacccctcctgctcggagctccccagttcccccactgtccaaccattattggttttcatgaaggtccctgagggccaagactgagcttttggccccagagccacgtggtatctggcaatatgggtagtaggtactgagaaggtttgctgaataagtgtgaataaataaacgatgcggtgctttcaccacttgctaaagaaaacttaaagtgataaaggttgtgttgttttcactgtagtgtatttaaagtagagcaaagatttaatatggtgaagcattttctttttgcattggttaaaacaggactgtaaagtgagatgcatgcagtgcacagctctgaagcccgacagctcagtgaagctttacacacgttagcacgcagaccagggcacagtaactgcctgcaccccagggggttccctgctccactcccaccctcgccaagtcaatcagaggaggattttcaatatgccatgcagttttatctcaacactaccaacaatcactagccccaaccttctcatgttattaaaataataataactaatgagaaacaataggagcttcctcttagagcaaactactggagcacagccatcttgttcagagagacgccgaaagctt

SEQ ID NO: 197639 - DNA, 1000 bp, Homo Sapiens
tggataatttcaaaggaaatttctaaaacttgtctgcctagattggaatatttgcaaatcaacatacacaaaggtaaaaatatacataaacataacctgagaattaaattctagatatattacatgattttttgtatgctattaggaatgagggtaagctgtcctgcacttaatctcatgtaaatatttaaaaattagtgaaatattatattaactgtttattcagaaagttatattagtgttttaaattcttagccaacatttgtgatttgaaagttttaagatgattatgttatgttataatacaccttctgttgaatacatgatatgtactgggtagtatggtaggtagctggaataatagtactttgaaacctcttaaaagcataaaattcctaggcagcttctgggtgattttagaagcatagataaaagctattaatgatttgttaaaatagaaacacttatggataatatactaagagaatgcaaggaagaaagtaaataatatttctcagaggaactgggaaggggtataggaacggttatatttaagacaagctttttagaatatgcattctccaagtagaggaagaaaataatttaataataaagactacagtttcagcaggggcatgaaagattaaaatgcttagtatatctgacaaattagataatataatagaattaaatatgttcaaatagaagtagcattaagaaaagataagtagagtaccatggtgtagcagacactgttgtggcctggccatgtctccttgggttgtatcctctactgcatcctgacctattttcaactgtctgagggctctctctggtggctgaagcctgctctggacgtattctgctctggagaataatggtcccctggagctaccttttgctaatgaatacaggttagttggtgtattaatactccagctccctcaccttttggctggacaactctaaggtacatgttcttcactaattccttgaattc

SEQ ID NO: 197640 - DNA, 1000 bp, Homo Sapiens
aaggatatttttgctggatgtaaaattctgggttgacatgtcttctagcactttagagatagtatttcatgttcttctgtcccctgtggtttctgatgaggaatccatgttcattccaattactgtttccatatttgtaatgtgttgtttttctctagctgttttcaagacacctgcttatctttagttttctgtaggttgattattgtgtgtctggacttggtttctttgattctatcctgtgtggggttctctgatcttcttgactgtaaatttatgggtatattgttttggttttgtttatcaaatttgagaacttttggcccttttttcttcaaatagtctttctgcaccaatctctttctcttctccttttggaattcaagtgttaagctttttaatattgtcctacaaatctctaagactctcatttttttttccccactcttcagattggataatttctattaaatttttcacttctaaaatttccatttggttcttttttgtagttcttatttatctgttaagaacttatatttcaattcatttcaggtgtgtttacctttacctcatgaaatacagttgtaacagctgcttaaagtcttaaatgcctgtgtcactgccaccactgtaacagtcccctctacatacacacacacacacacacacacacagacacacacacacattggatattgggtccaccctcagggcaaagccaggagagagagaaaaaaaaagaaaagaaaaagcaacaagatttcccctacactcttaaaaccacaggggacttaatttccagacaatattcctgttggagctttggatgtgtccttaccttcactgtgcaccacaatatagggctcactctcgagttaaacttataaaagaagacacaaaacaacatgaactgggaaattcatcacaacgtcggttatagccacaaattggactttcctctccaatctgcattggtctgatttacttttcagaattc

SEQ ID NO: 197641 - DNA, 1000 bp, Homo Sapiens
actaatcatcagagaaatgcaaatcaaaaccaccatgagataccatctcacaccagtcaaaatggctgttattaaaaagcgataggaatagttttgtagagcaacttataacgggacccagtggggcccagaaatattggagacccaaagacagcttgggctggacaaagggacacatttcacacctgtgtttaaaccttttgagagactgtgcttcagtgccatttaaaaagttcactctgttgtcgttgtgatattcccaggtctcagagaaggccttggataggagaaagcagagggtaactaatcaaattagtgaggtgaagctgctgagaaccatgctaattgattaatgcataaacataaccattttgtttaaattagcagcaaatttcaagcaatcctcaaaataactgagaatattagccctgattagtgtaacagcccggaaaatttcttctggtgggaaacatacaatagtggggtctccccaccaggtctttattcaatcaatcactcattcatttgctcattcaacaaacatgcgttgagtattattttacgtcaagcattacaagacaaaaaggcagctttgcccaagtccctgccctggaggagttcctgtctggagagagaggcaggaacttagatgatcacagtttatacaatgaaatcttacaacctactgctccacactcctttcccactagcccacaaaaagagagagcaggaataaaaccaggtctggggatttctcccattctttctgcctaaatttactagactgtaaaagacacagggtttttgggggagtgctttttctatggaaaggtaaattgttggttataggagaagaaagatgaaagcgactttaattccttctgacgtttttgaaatactaaagctgccacatttatgctccaggaagtgctttgactcaaggtttaaagattagagttgagatgaaagaagtattctattttaacctggagatgaattc

SEQ ID NO: 197642 - DNA, 1000 bp, Homo Sapiens
gccataaaaaggatgagttcatgtcctttgcagggacatgaatgaagctggaaaccatcattctcagcaaactatcacagaaaaccaaacaccacatgttcttattcacaggtgggaactgaacaatgagaacacttggacacagacagggaggggaacatcatacaccagggcccgtcagggggtgggggactgggggagggatagcattaggagaaatacctaatgtaaatgacgagttaatgggtgcaacaaaccaacatggcacatgtatacctatatatcaaacctgcacgttgtgcacatgtgccctagaacttaaagtataataaaaacaaaccattaaaaaatagttaatataatataaaacaaaatttctgtggggatgaatttctaaagcttgcttattaccaacaaggggaatgtttaaaagccagacattttagtatatcttttaggattttttttttttccagacagagtctcactctgttgctggagtgcagtggtgtgatctcggctcactgcaaccttcgccccctggcctcaagcaatcctctcatctcagcctctcaagtagctgggactacacatgtgtaccaccacgctccgctaattctttaaattttttgtagtgatgagttctcactatgttgcccaggctggcctcaaatttcagggctctcatgatcctcttcagcctcccaaagtgctgggattacagctgtgagccaccatgcttggccagttttacctttgtaatggtcatgttcatagctcatcagctagtaagtttgcactgttcacttgtcttggatagtggtaattgctggaatattacattttgagatccatccttagtttcttttcatctttctccctttttgagagtggtttaagaaaattctaattgaagatctctgccatttttttctccttcccacttgttcttatttgagttatttgatttactagaaatttctggttgcaaacagaattc

SEQ ID NO: 197643 - DNA, 1000 bp, Homo Sapiens
tgggttttaaagttttagtggggctgctgggagggagggagtactgctaagtacttgggacttctgtcctatttccacttcagccagaacaatcagtcctattttcatttcagccagaacaaatttgttttacataagctttcattgaagaaaaggttccatggccttttaaaaaagtgtgaaaaccattatgtttgcatagaagctgcagaaatatgaaaaggtcagtgaagaaagagttcagggatgggtgtggtggctcacacctgtaaacctagtgctttgggagattgaggagggtggatcatttgaggctaggagtttgggaccagtctgggcaacatagtgagacccccatctctacaaaatataaaaaataaatagctgggtgtggtggcacatgcctatagtcctagctactaggggagctgaggcaggaagattgcttgagcccaggaggttatagtgacttatgctgatgaaccaaatatatgacagtggtctcataagaccacttgcatgtccaataccatatctgtaatatggtatttgtactaccatacattatggtatttgtactaccatatttgtactgtaccttttctttgtttagatacacaaatgccatgtgttacaactgcctattaggtacagtaacatgctgtacaggtttgtagcttaggagtaacaggcgatacatagcccagataagtagtaggctataacatccaagtttgtgtaagtgtattattctatgaagttcgcactatcacgatgaaattaagggtaaatttctcagaatttatccaatctttaagagattcattactgtacttctggttcaggtttacttttgttcccttcacatcttagccccttaaaggctatgtatgacatatgattttgcatctccagtgtttagcacagtaagagcctaaaaaatgtctgttgaactagtaaatccacaaggtttatactcaaagtaatgtaagtggaattc

SEQ ID NO: 197644 - DNA, 1000 bp, Homo Sapiens
tcacacattactggtgtatactgggaatgtaaaatggtgcagttgctgtggataacagtttggaagaagtttctcaaaaagttaaacatagaatcaccatatgaccaacaaattctgctactggttatgtacctctgaagaactgaaaacaggcattcacacaccaatttgtatatgaatgttcattattcatagtagccaaaaggtggaaacaaccttttgaacccaactgtccagcaacagatgaataaataaaatgtgatgtatcaataacatggaatcttattcagtcctgaaaaggaacatgtactgatacatgttacaacatggatgagcctcagaaacatttgccaaatgaaaaaagccagaccctaacaggcacatggtgtatgattctgtttgtataaacatccagaagaggcaaatctgtacagacaatctgcttctatagaagcagattttggctgccaggacctgacggtggggagtgcctgcttaatggggaggggtttcctttggctgtattgaaaattagaactagatagaaatattgtatgcccaacactgtgaaagtactaaatgccactggattatacactttaaaattatttatttatttatttatttatttatttatttatttttttgagacagagtcttgctctgacgcccaagctggagtgcaatggcacaatctcggctcattgcaacctctgcttcccaggttcaagctattctcctgcctcagccttctgagtagctgggattacaggcacccaccaccacacttggctaatatatatatatttttttcagtagagacgggatttcaccatgttagccaggctggtcttgaactcctgacctcaagtgatccgcccacttgggctcccaaagtgctggaattacaggcatgagccactgcgcccagccactaaaatgatttaaatggagagtgatatgttgtgaattttatctcaataaaaggataaatataaat

SEQ ID NO: 197645 - DNA, 1000 bp, Homo Sapiens
taaatgtttgctgattatatcagattataaacttaaaatacagaagagttatgattaaagaaagtatgtagtgagttgatgctgctaaacacaatcattaacaaagattgtcaaagattttcagaaggccactaatgccaaataatgtaaattcaaatggtataagcactaagtgactatagccaatagcacatttattgagttattactatgtgccaagcacatgcaaagtgctttatatagatttcatccaaccttcaaaagagccctgtgaaatgtgataatctccatttcaaatgataaaactgaggtccagaaacttcctaatttacccaaagttacaatgaaataactgacagagccaggtttcaagcctaggtttgccgtattcaagagctcttgctcttaaacaatacaatgtactgactgtgcacgcacactctcacccatacctacagtccaactaaaccaactgcatttattttcaggatggaatctgaaacactttcccatttttctatttcaaaattttatgtgtgcttattgctattttcctatgatgaacacgtattgtctttttaaaattttttgttttgtttttgagacagagtttcacttttgtcacccaggctggagtgcgatggcacgatcttggctcactgcagcctccacctcccaggttcaggcgattctcctgcctcagcctcctgagtagctgggattacaagcgcccaccaccatgcccagctaatttttgtacttttagtagaaacagggtttcgccatgttggccaggctggtcttaaactcctgacctcaagtgatccacccacctcagcctcccaaaatggtgctgggattacaggcgtgagccaccacgcctggcagattttttttttttttttgagacagggtctcactgtgttgcacaggctggaatacagtggcacaatcatagctcactatagcctcaaactcttcaaactcctcaaggtgggag

SEQ ID NO: 197646 - DNA, 1000 bp, Homo Sapiens
ctcctgcctggccccatctgccatccctgcggctgagcccgactgagagtgaagtccttcattaaatcagtgcctacctcgtcctgcggatggaggtcattctcagcctcattccccttgccagagaaggatgtggggggaggcaggcagggcaaaggcagggagacatcctccggtccagaattgattcctcttctgaaagaaagaaaagcaaagatgtccctaaaggggacattaaaactctcaacaagaccctcaggctgggagtcttcttcccaaggccagggtcaggcctgagaggtgttctcaaagacccggagtgaaatcctcttcctagacaaagatgattccaaggatgattccaagtgggaaggggagagaggggccttgcacgaggcaagtaactaggcctgtgggagcaagttcgtaccgtctaccctctgtcaaactctgtacttgaaacggttcatgttttttaaaaggatgggcgttttaaatccctccattccgctctgccccatgatgtaatttagaaatcacgagagctctcaaaaaaaaaaaaaaaaaaaaaaaaaaaccagcgagatgtgctcacagcccttggtccgcaaatgtttttgccagatgctgagaacctaggcagaatccagagcagcttttatagaggatttgatgtttaactcatcatggagaggtccctgatctctccctggagaaaaaggaagtcgatggggtcgtttgtacggcgaaaactacagcatgatgttggagggatcagggagcctccttcaagggtttagggggctctgggtcagggcctttctggacggttcttcccttgggaataggaagccaggatcacagaggggaagggtccagcccagatttggagctggataccctagtgggtatcccttaaacaggagcaggtgagcctgtgttacaggacccgatctggaccccaagagagggttcttggatcttatgcaagaaagaattc

SEQ ID NO: 197647 - DNA, 1000 bp, Homo Sapiens
tatcctactgttatgagagtttcactgccatacaacatataacagcaccattcaatctcgcaatgttatgtcattcccttaccacgctggtgtagtctcacgacatccgggagtaaagtacttacatagatccacaagaagacagtggtgcccaaggtgaacccaactttcagccagtcaggtttggcattcggcggctctcgcacgtagaactttgatcgcactgaagctgaaaggggaagagggtctgtaaatttgtaacttactgccttgtagggaaaaaaccctaacatttacgtgcgtattatcgcatttaattctcccttcaactcccccatctcccacttaaacagccaaggaaatagaggttcaaagagatcaagtacctcgcccagggccactggcgagttagacaggacgcacctgtcctgtccgaggctttcaaagcctcgtttaagggcttgcggaccctcagacgactcgggagtggtcatgtaaggggcgccccggggagggtgtctcctctcccggtttacgggacctaacgtacagaggtggggaaggcaaggacccaaagtccatttacaaaggccaagagtggtcaggttgaacttggataagtgctagaggcgggtgatggggagcagagagccctgcgtaggggacaggcgtgggctgggccttgggtcgtctgccggcgaaggtcactgcaggacgaacccgggccgctgccgcctcctgcacccgtgggctgggtccgccttaggaggggtaatctgagggtcgagtcggcctgcacgaggaggatactcacggccgctcgggagcctggcgggggccagcagccgggaaaggggacgcagcaaggcggacggcgccatcttgcgtggcccagctcagtctctccgagttggcaacagaaccagcgccacctggcggccggaagtgcgggactcgagggctctgcagcagagctccgtgggggcgtcaacgtgaattc

SEQ ID NO: 197648 - DNA, 1000 bp, Homo Sapiens
catgaaaattttaaggaaaatgtaaaaatgatacatttgtttgaacttgtagagaaaattatgaaaaatccaagcttgtagggaatgatggactatctgcagaatattagcatagctctgattttgcaaacacgtggactcagataatcttacccagtggagacataccaatgcaaagtgaactaagatcttggagtactaatggacctatataacacattgagaatgttgaaacaacccgaaacaagctagagaaattggagaagcttaaacctgaggattggtgccctgaaatggaagagaaacaacagtcaactttatatgaacaggatgaaatagcatacaacaggatgatattaacatatctctgagcctgtgagggacagggaacagacttagagcaatccacccttgccgttaagatctattttgaagtgagacaggcgcttgtctcaaaggtcagggactaaatgtgtcttagagaagtcatcgtggttgttttaccttttcatccacctttgaaataaaagattagagataagatgaaatctaactagatccttgctaggagaatgaagttttaaaaggagagccatagtcacagctgtcttcagagtaggtagatgccaagtcttagggaagtacaggattaaccatgttggtaatgacagaacctaaggtatccccagcagtgttctttaagagtgtaaaaaacaaggattaggagagcaggtgattggacgcagctgctgaataatcttcttaacctcatctttactccacagggagaaaaataacaggaaaataaaagcttccaccaagtggttggtggcagtgaaacaaaaggagcatcaaaaagtacacaaggacagatttgtcctgatgctaataattctgaacaaaagggccaggaaattgctgtaaagtgctctgtactagtgtaagataaatacataattagtatacttaaataaagaaaaaaatagagtagaattccgcg

SEQ ID NO: 197649 - DNA, 1000 bp, Homo Sapiens
aaaaattagccaggcatggtggcacgtgcctgtaatcccagctactcgagaggcagaggcacaagaattgcttgaacctgggaggcagaggtcacagtgagctgagatcgtgccactgcactccagcctgagtgagacagtgagactctgtctcaaaacaaacaaaaacaaaacaaaacaaaaacaacaacaacattggtctgaggccaggcatggtggctcacgcctataatcccaacatttagggaggataaggtgggtggattgcttgagccccggagtttttgagaccaacctgggcaacgtagcaagaccccatctttacaaatatgaacaaaaattagtctggcatgctggcgtgtgtctgtggtcccagctaacttgggaggctgaggtgggagggtctcttgagcctgggaggcagaggttgcagtgacctgagattatgccactgcactccagctttggtgtcaacgtgagaccttgtttcaaaagaaaaaaaaaagtctttggtctgtcttacactgggaatggttctactcattcatgcctataacatgcattgatcatttggaaaatattagttcaatgagtgatgcagatgttgtcccattacattattttgtatcaaaaaagtcctcttcattaatatcactattcatctcatcagaaaagtgtgcagccgtgcaatcatagctcactgcagccttgacctcctgggctcaaatgatcctcccacctcagcctccttggtagctgggactgtaggcgcacatgccagcacgccgggataatttttttaaaaaactttttatagagacagggtttcactttgttgcccaggctggtctcaaactcctgacctcaagtgatcttctcgcctcagcttcccaagtagctggggttacaggcttagaaaagtctttaaatgtcaagaagctgccaaactcacagtggtggctacacattttccaaaattctgatttctccttaaaagctt

SEQ ID NO: 197650 - DNA, 1000 bp, Homo Sapiens
ctccttcaccagtgtttctaacctctgaaatagttcctgggtaggtgtgaacaaatattgcgtagcttggtatttttgagagtattttatattgtaggcagcacgtcaaaaaactagcagccatttagaaaagaaactgttttttaggccatttagggagagattatagctgccttgcttttctggtgctgttattcagccacatttctagtatgtcctttgtctagtcctctacctgtggaagttaggcatgagttctgctctgaggagccagtgtgtctgtgttggtagctggcagtcactggtgacttctgagctggatggtaacgtaattagaatgacttcataggatgctttcgttgctgcatgtataaggatcctggctaaaggctgatgggggtctgaaagcaaaaggaagttgggacagatcacagttgtaccagttgaaatgcagaataagcaaaagatccaaatacggttgtaaaggagccttagccaggaatatcgctcataaatcaaggtctgcggcagctggccctggccctgtcatggtatagccaaagtgtcttcatcacggaacatcggggagcaccacacagaccagagtagaataatgtggaatacagagctggtcagcacttaattggtttacacctgcttgtctgtttcccctgtgtttctctgcaggttcgaatcgtcctcccatgccatcagtatgagcgcctatctgcgagaacagagaagggagctctatagtcggagtggagaactgcaaggtgagtgattgagcttctctggaaaaattaattttctggaggagtatttcctttattacacatgagtttgtgtcctgcattcacacgatcctttcaaggtaacaaacacttagtgacttaataatttgtttcttctgtaatttcccagcatctgctgccaagcaggtaaaactattactgtggccataggacttgtagacctgctactgttcaagtgggaattc

SEQ ID NO: 197651 - DNA, 1000 bp, Homo Sapiens
ttgggagagcacatagtgaacatctttttccaacattttttcttgaggagtcagttaaccatttgccagcacaacagtagttacctctctgaataatctaaatgtactaattattttaattcatcacatggtatgtgtgactgataatttgtatttaatagtgggagaagatacctatatattgtccaactttggttgtgtatattttcctttgcacaaattggatcagtccatttctattttttatcgtcttactttcctgacttattgataaatcttgggagatcttcccaagttaacacattcaaatctacttcattttgtgttaacagctacattacaacccactgtaccaaagtttatttactcagatccctttagatgaaaaaagtttccagtttttagctataataaagaatgctgcactgaccattttttttacattgcacctttgtataaaccacttttatatacagatacaggaaaattgctgagtcaacctgtaggtgcattttaagtttggatagatatgcttaatttgcactcatactttaagggtacaatttggcatcatttgcagtatcatttacaattgcaattttcttttcttcctttttcatggcaggcttaatcagatttgaaaatgcactgttaggcatgtcctttttcatcctcctttcaaggagatatttctaacagaaagataacaaaggttttaaaaagtcagtgttcccttaaatttcagcaaataattaagaagtgcctgcctatgttctagagactcaatagtttaataaggcagaccagtttcatgacttcatgtagcctatgctctaataggagagctgaggcaaatgctgtcaagtatacctgataaacactcactccaagtatttgttaggtaattccttccataagaccctcgtctacttttctcagtttgttattctaaaccagtggcattcagatatgatctcacccttcaccaactcgggaattc

SEQ ID NO: 197652 - DNA, 1000 bp, Homo Sapiens
gttaaattccttctgtttatcaatgttttcaagttgtaaagagaccaattagcagaatatgaccacaagggtctctctggcatggacaggctcctttttgccagcatacaccttctcaaagtaaaaaaaaaaaaagtgacttcccttttcactgttatttcattgcttggccacattcaataactctccaggaataccgaggggagtcatccaccagcccgctgtagctcaggccaggcacctgtcggaattgttcaaacccttcatcggtgcatggctcagcctgagaagccaatcacgatttgtgctggcacagcagagtgcttcaaaatggtctttgtaataagagtttgctgaacaggcccaagcctttcccttttcccttggtctcagcctcctcaaataacataaccagatggatggagcaacccccaaaaatcccatctcccctgcctgaccccagcccaggcctgtgctcccaatgccttgtgtgaactcaactcccctttcacaaatgtggtggggactcacgttcactataaaagaaaaatatgattcatacatggctataggtggtattattttgtaaaactaaacatgtatgagttgcggggggcgggggtagatgatgaggggaaggaaaggaaattagattagctgcaagggacagggtagtacattggaatacaatttccaatacagatacaggcaccaggtgttccaataaactcttttgtttgtaatgtgattttactgggggcaatccaattatgaagaagttcaagccaccatccttggggtaggacctgaggccagggtctaactattaataactctactaatactcccccatcactagacatagcagtttgcccttggccattgtgactacctgtcagagaatgccctgattctaaaaccactggggcatgaaggccagcctggctgaagccactgttgtcaaaacagtggccaacaggctataatgactgaaagaatt

SEQ ID NO: 197653 - DNA, 1000 bp, Homo Sapiens
ctctacaaactcagaattattttcaactttactgtaaacctgagctttttttttttttttaataaaaaatatatcttagggagctgggcacagtggctcatgcctataacccagcactttgagaagctgaggcaggtggattgcttgagctcaggagttgggcaacatagtgaaaacccatctctacaagaaatcaaaatttagctggatgtggcggccttaccctatagtcctagctacttggggggttgaggcagaaggatcacttgaacctggaaggacgaggctgcagtgagccgagatcgcgccactgcacttcacctgagtgtcaaagtgagattctgtctcaaaaaaataaaaataaaaataaaaataaataaatatatatatatatatatatatatatatatatatatatatatatatatttgcatcttaggatagttttagattcacagaaaatgttataaatatagaaaagataggtcccatatgccgtacccagtatctccatttattaaaatcttacattattatggtgcatttgtaacaactaagaaaccaacgttggtatattaatctccaaactttattcacatttcactagcttcatcaccactgttcattttttgttcaggatcctgttctaaatgccatgctacatttaaccatcatgcctcctcagtctcctctgctctgtgacagcttttcaggctttccttgcttttcatgatcttggcagttttctttaagagtattggtcagacattttgtagaatattcatcaatttgggtttgtttgatgattttctcatgagctaataggttttagcgaaagtgaccacagtggtacaacacccttctcacattttgtcataggctctgatatatgttgtctttgatatgtcctatcaggtgttttgattttaaattacttcacaagcagtgtcagtttaagcctcaaatctatgtaattttaggtgattgtcattatgaattc

SEQ ID NO: 197654 - DNA, 1000 bp, Homo Sapiens
agaaatttgccagaattaaaaaatgaaacaaacttctcctaatttcaaatgatctagactcctactcattagggtctgtcttaaactatagtaaaattgataaaagaccctactgattataataaacaaatgattcatgacagctcaacccttgaagcagggcaaagcaggagagaaaaaaaggaagaaaacagcccacaaaaaatgcactttaaaatgacttagggcagtttttagtaagcatgctatctttgtactacgattttatcatcaagcattgcaaagtgttgtgacgattgatgaagctaactttcctacagactgctaacactcatcctaatagaatgcttctcaaaatggggtttctgggacagctatatagcatcgcctggaagcatgttagaaatgcaagttctctggcccgacctcaagcctcccaaatcagaaactatgaaggagtacacccctctccccctgcaccccaccatctgttttaacaagccctccaagtgatttcaatcctgccaacatttgtaaaccactgttctaatagatagtagatgttatcaccataagcaatttggattcccttctgaaaatccaccagtttttttttttaaaccaaaattaaacataaaagaatgaagtgtttttaaagaatttttttttcctttaaaagcatacaagagaaatgttaacatgtagatactcttaataacagtacatttactgaacacattttcaaaaaaatgagattaggatcagaaatataaaatatgctccacttaattttaaacaattggttatttgtcactcatagcttctaatttctaggctcatgaatttctatactgctttgcatggagtgtgtcacccataatgcatgtgttggaaattttgtccccagtgtggtggtgttgggaggtagggcctttgggaagtgattaggtcattaagagggattaatgctgctcctgaggggactgggttaattttcaga

SEQ ID NO: 197655 - DNA, 1000 bp, Homo Sapiens
tatcacatattccccaaagacagaagaatcccctgtccaactattttgttccattggctgagcacttgtgacgtgcccaggtactgtgctaagtgttttctgcattatgtcatgtgccctgacagatgcacatctgcctgcgctggaatatgacaaggcactttctaacccaagaccatgctcttcacttgtgaacagatgctgtaaccaaaatctgcatccctataacttctgcctaatccccatggagccacacagtattgggctaattctttttctgcatgtcagctgttcaattgctgtcagctagcaagggcctctattatcatctccagattaatcatccctttttccagaaactcttgttcaccaatacatccccaatacctaggacaatagctaggatataagagaaattcaaaaacatttttgctaaatataaaatatagccacatactctacctgtcctacagtttattaataacctacccaaatgataaagatcagaattgaacacaatcttacaggtacaaagtgcaaagtacagtgggtccatttctatccccttgaacataacctattgcaacagtatcttttctggcaaaaaagtcactcattcagcttgagtgaagttaactcatagccccacaggaacattttcttcaagcaggcattgccaccccctcatttgtgtagttaatgtgggtttttgtttgtttgcttgtttaaaccctaagcaaaggtcttacttgtatatttttacctttttaaatttggtctgatttgtgttcctagctatttttgtttaaatctgccatgaattttctaacatgattccaaacttccccaatgtcaagcttcccacaaatctgattggcaaaccctttcatatcttatctaaataattaacaaaattattgaataaaacagagccacatagaatgacactagcaacctggcctccaagttgatacctatacatcaatcaacttttgaattc

SEQ ID NO: 197656 - DNA, 1000 bp, Homo Sapiens
taatctatgctattagctgttttttctctttataattcttaccaccacagttgaccctggaacaatgtggggattaggggtactgacctctcgaacaatacaaaatctgagtgacttttgattctctaaacttgactactaatagcctactattgactggaagctttactaataacataaatagttgattaacacacattttgtatatgtattatatactgtatttttatattaagtaatctgaagaagagaaaatgttattaagaaaatcatcaggaagagaaaatatatttactattccttaagtgggtgtggatcatcataaaagcctttaacctcatcgtctttacattgggaaggctgaggaagaggaggaagagcaggtgttggtcttgggtgtctgtctcttgggtggcagaggtgaaagaaaatctgcttataagtggacttgtgcagttcaaacccattttgtttaagggtcaactgtgtttgaaatcattcttctaaaaaaatctgcctgtctccatttctacctgtttcttgtgttagaatgtagacttgttagagtggggaacttcacctctcttcttatccattgttatattcaagtgcctgatgcagtgcgtggcacagaatcagcatttaataatatttgctgaatgaataaatgacagaaggaatgagcgaattcccttttccgttcctccctgggacacaatgtttctccccagaactgttgtttgctgagtagagtttgaggtcccctagatggggatctaggcccacagacccagatactcctgataaagatgctgccaccacattcttgttcagggacccttactgacttttgcttccctcccttcctctcctttcttggatggtgtcctgatgctttagtgtctctccttagtcctctgaacaagcaatttcaagaggcaacccagtgtggcttgagacattgggagatccaggttcaaatccagcctctttcacttat

SEQ ID NO: 197657 - DNA, 1000 bp, Homo Sapiens
atatttattttccttttcatcctaaaggaggaagtagtttttcccagaaagcagtgtggaaactttcctgttcttatttctatacttgtatatggaggctgcttatggtatattaaagaatttggactgggtacagtggctcctgcctgtaattccagcactttgggaggccaagatgtgaggatcacttgagcccaggagtttgagaccagtctgggcaacaaggtgagactccgtctctacagaaaatagaataatttgttgggcttggtggcacatgcctgtggtcccagctactgaggaggctgaggtgtaaggatctctggaccctaggagactgaagctgaagtgagccatgactgtgccactgcactgcagcctgggcaacagaacgggacccggtctcaaaaaaaaaaaaaaaaaaaggctttggaagcatctttttttgtgttcatatcacggctagtatgcaaactttttttttttttttttttttttaaagacagagtcttgctctgtcacccaggctagagtgcagtggcgtgatccaggcttactgtagcctcagcctcctgggctcaagtgattctcccgcctcagcctcctgagtagtcaggactataggctaggacccccatgcttggctaatttttaattttttgtagagacgggatctcactatgttaccaagggtggttttgaactcctgagctcaagcgatcctcctgcctcagcctcccaaagtgctgggattacaggcgtgacatgtgatcttgagcgaaatatttaatttttctatgtcttaatttgctcttgagtaaaacggtcacaacaagaacaactttagaggttcgggggattaaaggagatatgcaatgctcttgagacaacgtcaggtacattttaagcgtgcagtcagtgtacatgattatcatgataatgatgtaaatttttccccctcttcttgagttcttcttgagttggaagaaggaattccgcg

SEQ ID NO: 197658 - DNA, 1000 bp, Homo Sapiens
ctcttggcctcaagtaatccaaccaccttggccccacaaagtgctgagattacaggtgtgagccactgtgcccagccagtctaatctttttattttccaaatgatgctgcaataaataaatttgtatgtcatttcacacattttaggaaaagtacatgtatttataattttgatagattttatcaaatttacctctcctgagtttgtaccaatttgcactccaaacaggaagatatgagggtactgttgtcttataccaatgacattttgttatccagactcttgagctttagcaatttcattagaacaaaaatggtttcttgcagttttaatgtaaatttcatttactataggggaggctgagtaaattttcatatgttgtaagaccctatattagtttgctagggctgctgaagcaaagtaccacaaactggtattactttaaataacagaaatacattgtcacattctggaggctaaaagtctgagactgaggtatcttgcaggtttgttccaagtggtgtgaggaaggatctgttccatgtctctgccctatcttccaataggttgctggtagttcctggcattctttggcttgtagaagcgtcactctgattactgccttcatcttcatgtggccttctccctgtgtgtttgtgtccagattttcctttaatatttatttttacacctttctttaaggagaccagtcaaattggattagggccctccctactgacttcattttaactagattcatttaactagattaagactctatttccaaataaggtcacattctgaggtactgggggctaggatttagacatatgaatcttagggggaatacaattcaacccataacagagccaattatattttcttacattttctgttgacataatttatctattgagtcttttaaaattggctgggaatggtggctcatgcctgtaatcccagcactttgggaggccaaggtgggagagttgcttgagct

SEQ ID NO: 197659 - DNA, 1000 bp, Homo Sapiens
agtgactcagttattttggatgccatgaatattatagaacataaagtgtttaccatttcaaccatttttaggtgtactgttcagtggcattaagtacatttacattgttgtgcagccatcaccaccatccatctccagaacttttcatcttccccaactgaaactctatacccaccaagcaataactcctgtgatggtgaatttcatgtgttttgtttgtttgtttgtttgtttgtttttgagatggagtttcacccttgttacccagggtggattgcaatggcatgatctcggctcactgcaacctccgcctcctgggttcaagcaattctcctgcctcagcctcctgagtagctgggattacaggtgcccgccacccctcccggctaattgttttgtattttcagtagagacagggtttcaccatgttggccaggctggtcttgaactcctgtcctcaagtgatccgcctgcctcagcctcccacagtgctgggattacaagcgtgagccaccgtgctggccttctgtgtcttcttgactgggtcatggggttcccagacaggatgcttttaaatgagattaacatattaatcagaagaggaaagtagatttcgctgcataatgtaggtgggcctcatccaaaagttgaaggcctaaagaacaaaaagcttctaaccttcccccaaataagaaagaatcccccagctgtctatggactggaactcagccatcaactctcccagttctccactcgctggccgagtctggcagcccacactccagattttaaattaccaggctctataatcatacaagccaattccttataataaacctatttctatgtatgtacacagcgtattgatcctctttctctgcacagacctaatacaaatcccaattcctttctcctttcttggaaaccaccgttccatttttttgtttctataaattggtttattttaggcacctcatactggtggaatcatataatattt

SEQ ID NO: 197660 - DNA, 1000 bp, Homo Sapiens
tcgtgatatcattgttaatgatactttccaacttgaaacatctcaaatgattaccaaaactaaaaagttctgctaaacaactcaatagtcaatggattactatataacaatgaaaatgacggaactacaaatccacacgtgaacatggatggacctcaacacatggggtgaaaggaacatgtcaccaatgaatacatactcatacagcatgagtctatttatatagatcccaattacagaaaaactaaactgtatcttttttaggataggtacataaattagaaaattaccaagaaaagcaataaatccagattttaacacaaatatcatattaatagccttgtgtgggagacaggaagcggggaattcctgtgctttccaagggatgggcaaaattctatttttattccttaaaatctcagtagtattattcacatgctcgctttagcctacctactcattaaactttgtatgtgtgtgtgtgctcatgcatgtgtgtgtacttgcatgtgatttagacatccttttgtatataactctctcaaatttttaagttacataaaaaagtaatccatttgacctaatagtatagtggaatttcggagttaaaagtaagtctctggcttcaataaaagactttgtaacttatctaatgtcaattaagaaggagtcataactcttcccagattatgtcttgtatttcaaaaagtgggaaactttataaattgtatattataaatggtattttggttttcacattgatggatgcaaatttctctgattaatagaacataaagccatttttatgtctgtagtgatttttccctttttcttttccttcctcctccacttcctcttcttcctcctccttttcttccttgtttatttgtatgttcttgacctttgtctttctattcttaaaaaaatgaagaaagaaaagtcaaaagcaagaagaagaaaaagaagtcctctccttttccacaagagtttaaaggaattc

SEQ ID NO: 197661 - DNA, 1000 bp, Homo Sapiens
atcgagccaacagggatatcataacacagacttgtagggtttggaagcaagtttatacactcttctttacataactattctccttttgtgaaatagcttctggtttatgactgggccttgttaaagactgaatgcttaaccatggacctcaaatggacatttgccctaagcttcccatcatgaactgggggttgtttgacccacctagtcataaggttaggtacatatagcaacaatttatcatcaaatggaaatagtacataggcttggacaaatctggaaggcatgggtaaattgtatgagaatgtggtttaaactcctttacactaatagcttctttgtttgtttttgagatggtctcactctgtcactcaggctggagtgcagtggcatgatcacggctcattgcagccttgacctcccaagctcaggtgatcctcccacctcagcatcccaagtagctggaactacaggcacctgccaccatgtccagctagtttttgtatttttggtagagacagtgtttcaccatgttgcccaggctggtctcgagctcctgagctcaagcaatccacccaccttggcctcccaaagtgctgggattacagacatgagccactgcagccagcctacactaatatcttctgtattgcctcctctcctcaatccatggctagagtattcaatataaccagttgactgtagatgaaaaaatgtgaatctgatttatagttggatctctataatatgctagcaccaactgaaagtgtacatctgaagcgtcatagccccactgagggtgtatgaccttgcaggaccatcataaaggaaaatcctcccagtggatagacacttaaatactacacttagttgtccactatgtctggggtgacagatggccagaagtatgtgtctacactgactttataacctattgctaatgcttttgctgaatgaccagggacttagaatatcattgaaagattggtaacaaggaatt

SEQ ID NO: 197662 - DNA, 1000 bp, Homo Sapiens
tacaaaaattagccaggcatggtggtgcatgcctgtcatcccagctacttaggaggctgaggcaggagaatcgtttgaatctaggaggcagaggttgcagtgagctgagatcatgccactgcactccagcctgggtaacagagcaagactctgtcaaaaaaaaaaaagaaagaaagaaagaaaaaagaaataaccctgagagttgctactattccccactccctaccacccacccgctatacccaggaaaacacaataattaacatttaaaagtgagataatgtcagacaaaagtcagaatatactaggaaagcctatgctttggggccaaatgtttctttagggcagcagttctcagtcctggatgactgtgagaatcacctggggctttgtggttggcagacccgctgcatcagcatcacctggaagcttggttggaatgcagactcccaggccccaccctacacctgccgaatgagaaactctggggatgggggccagaaacctgtgttttaacaggccctccagaggattctgaggcccagtaaagtttgagaatgactgacctacatttgaaaagataataataactctgtctgaattccatcccaggtaaattaactctgagcaggtgcctaaagcagcaaggttcatttgtcttttacagtctccaggtgattcaaatgtgcaaccagcacagtgactactgctaaaaccacagcagatttactcagaactagttttccaagtcagtgatgcactggcaaatgtttaatgactgacaggggtgagaaagccctgatttttagcatttgcaccaatttcaagctactaagagaaagtcatcgaatgggtagttgagatgtgcactacctgttcttcaaagccagtgaactggctccagcacacactgccagaaattgtcattgccaaaactgctttcaaaagtacttgatacagtatctcaagttggttgtctggcattttatcttaagaattc

SEQ ID NO: 197663 - DNA, 1000 bp, Homo Sapiens
ggtcatgttatagttggaagaatcaagattttttcttttttgagacagagtctcgctctgttgcccaggctggagtgcaatggtgcaatctcagctcactgcaacctctgcctcccaggtttgagtgattctcctgcctcagcctcccgagtagctgggattacaggtgcccaccaccatgcccggctcatttttgtatttttagtagagatggtgtttcgccatgttggccaggagggtcttgaactcctgacctcagatgatccactggcctctgcctcccaaagtgctgggattacaggcatgagccactgtacttggctgaagaatcaggatttgagctcaggtctatctgggtccaatctacatgcctcctgcaggctggcccttggtgccaaagggcagggcaggctggcacagtgtcagagacaggcttttaggggccccgcagcctcccccatccccatttccacatctgcaagccagcaggtagctgacctggtgtctggactgtggtgatggtggtggtgatgatggtggtggtagtggtggtctcctcatcatctcctgaagctgtggaggaggtgatggtcccctggatcccgatccctgcgccctgggacacaacctctgcaacccacggccttcccatgtctccaggaccctcttgggttggtgtccaggctctgctggggggtgtagtgctggctatctcccctgggcctagggtgggcactgccatgctgggccctggaggtaggggagctgtgattcgaagcataggggactctgactccggactccagggtccctccttggactggggctgagtgggtaccgcagccatggctggagtggggctggtaaagacagggcggctgtcctggttggccaggcggggaaggggacttggggtgaagggtgcaggtgggtcaggctggaagggcagtgctggcctcagctcctcatctcccttttccagcccctcttgtaggaattc

SEQ ID NO: 197664 - DNA, 1000 bp, Homo Sapiens
ggaatgaagtacttgtcttttaacccctggtctgattctctttctcttcattgcaggacttcctcagaaatctggaggatgtcattctgaaggcttgtgctcaccaatcattagattactttattctttttttttttttttttttcacttctgtgtggctctctgtgaccatacagatggttatttaccagactaaatgtggtaaattcttatctaggtaaaaagaagacagaaaaaaataatttataatctctatcctctatttcaatgagggtacttttatgcaggagaaattaatatttgtaacatgaaggtcaacccattcccccttttacatagttgccaatagtttaaatacaccatatgagcaaattattttacgtattaggaccactattgacctttaaagatccttcatagtcagtacttctactctacctagagtgaatgactagtttttttttttaaagttctaatgagttgcaaacagacatgtttataaaataaaaataaattatgagaaaaataaagacatacaaaatgtaagcctcaattattagattcacaaagctactccatcaaacggctctaaaaatttctaaactcttatttcaatttctgtacctattttgtcactgacaagtaacattcacaggacatgctttcagtagcactgcaagtgattagaacacctttttgtagtggatgaataactacatcaagtgggatggattctgatctaacatctgagacttttgaaacagaaagctttctccaataaataaatatattcgggctagtctcctactatatttattatacttacaagcctataatacttttctaatgcaaacaggcttttcaatgaagttgtacataattttaaaccatcagtcatttcccaaaagaatcaaatacaatctctaatagtagaaaactgacttccgagaattaatattattttccaaatcatggaggaacagtagtcattagagaattc

SEQ ID NO: 197665 - DNA, 1000 bp, Homo Sapiens
catggcacatacatttgccaaaaccagtgaaatttacaacaccaagcatgaaccctaatgtaaacacatactttgagtgataatgatgtgtctacgttggttcatcagctgcagcaaatgtaccacactggtgtggacagtggggaagcctgtgggtgtaaggggagggagtatatgggaactgtctgtattttccactcaacttttaataaacctaaaaaagagggaggggccacgactttcattcacattctaggagacagtgggaacagcagctgttcataaggacaatactagtcatggtagttcatatctatcatataaccacagaaattcctttcattgaggcttagagcaaaagaagaaataaagattattctgatgacagacaaaacaaggaggaaaagaagcttaaatccagtgatcctggctaactatcagccaacaacaatggcaaaaactaagctgccaagtctcattccagagtcaggtcttcaacttgtaggccagagctcccagaatgtgtctagggataaaatcataataatcatcacagtcacatgataggtgagctctgccaagcctaatagcctctgtgcatctctctacctttgcttctctcagaaactcttctcttctgttgcttggaaagaattaggaatcttttttcaaaacagcttcacagcttctctctaagatttgttctaggagaagggaaatgaaaagtatgattcaacagttcagtgaagatactgaacaatgggaatcattagcaaatctatcagaaaagctaattcggggaaggtaaaaaagggcaagttgcaaagaaggaaatgattaaattacatttcagtcctgaaaaatctgtttaacttgagactttctaattcagaatggccatctctgactgtgtgctgctgggaagatgaaataagaatggggttggggatgtaaacactcatcatcctggagacacaattactatctttctgcttggctg

SEQ ID NO: 197666 - DNA, 1000 bp, Homo Sapiens
cttggctagacgccgcgcctgcatgcctgagcgcggggttgcgggccgcggcgcggggccggagagtttgtcacctcctcttcctcctctgcctccgccggtggccgcagggccggggactcgcggccgcaaggggctgcaggagccgccggccaggacccgcggctgccactggctgcagaggcgcgggcgccgccttcgctggaccggccggcggggacgccggcggccggcggctacggcggggcggcgcggcggccgcgggcgggggtgggtgtgagcgagcggcgcgctgccgcctccgccgccgccgccgccgcccgggagccgcgggccgcgctgcgctccatgcggccggcggccgagcccgcgcgcgcctctcccggccggctgcgcccgcgcgctccgggcctaccgctgccgtgcctcggcgcgagctgtttgtgttgtatgttttccaccaccgcccccctcttcgcgagccattcctcacaaccctccggtccccccgctcagacaaaacccggactggattttttttttctcttacccacagtctccgaaagtctggcgcttcgaagcagttggccctgacaccagggcaaacgcttaaccgcagcccattcttccctccggagggaggggagtagacttcgctggaagtaaggttgtctgtcaaagttagactttgaacgtagagatttgctacaagtcattttaatggacactgatgtgcatggcagctactcctgagcttgtgtgaaatcaaggaaggtgtaccaatctgaggtttgggatgaattcctaatatgaatcatcagagtcgcttagattttcgaaacactgtttcatgagcgattgtctaccaatctcacactctttgaacgcaccactctaggccctgcgattgagctgccttggctctgtgctgagtgtgtaggtctttcagcttttactcctgctattctaccttgagtgcctgattttaatggctgaattc

SEQ ID NO: 197667 - DNA, 1000 bp, Homo Sapiens
tgaaaccctgtctctgctaaatacaaaaattagctgagccatggtggtgcacacctctaatcccagctacttgggaggctgaggcaggagaatcacttgaacctgggatgcagaggctgcagtcaaccaagatctcaccactgcactccagcctgggtgacagagtgagactctgtctcaaaaaaaatttttttttcttgtcgttgttgagacaggatctcactctgtcacccaggctggagtgcaatggcagcaatttcagctcactgcaacctctgcctcccaggctcaagtgtattttgaaactttttatgcatattaactcaatccttaaaacagttctgtgaggtactattattgttcccatttaccggatgatgtaacaggcatagagaggttaagtgatttaactgagactaaattctaagctaggctatccctaggtcctatgctcttaaccactactttatgttgcctctcttatttcaatttattttctaagcactaaacactgagctttgttttgtataaggttgatactatgatctataatattgcttcatttaagtggaaatttaaatatgcaaagttcaaagtcagttactatgcccattgcttgctatgtctataaagggtgctggtgggatggttggtgaaggcatgtagagtggttattagtcagggttctccggagaaactctaggaggggaaggagagggagagaggaaaaggagagagagagatgagagagagtgagttaagaggagatgtattaggggaattggctcacatgactatgaaggctgagaatgcccacaatagataggccatcagcaagctggagaaccagcgaagccagtaatgtgactattgaagtccaagggccacagatccaggaagccaactctcaatctaaggccaaaggcctaagaggggtgaggagaagggctgatatggtggtacaaatcccagagtcccaagcccagagaacctggaattc

SEQ ID NO: 197668 - DNA, 1000 bp, Homo Sapiens
agcaggagagtggcatgaactcgggaggcggagcttgcagtgagccgagatcgtgccactgcactccagcctgggcgacagagcgagactccgtctcaaaacaaaaacaaaaacaaaaaaacaactgaagaccttttattaacaaaaataatgcaaggttgttataacaaatcagaccacgcatacccatatgatggaggaaccaatgttcgagaatggctaagaatattttataaaagaaaaataggaagcgggtaggggcttatcctaccagattaaaacagtgtggtagtgagtataaatacggtatgttggcagaacagataggatcccgctacatataggcacttactcgataataaatgtgccacttcagtggggaaatgacagattgttattttcttaatggtacagagacaattgattccacatttgggtgaaaagctagcttaaatggagtataaaaataaatccatatgaactaaacataaacataaaatcattattaaaaatagtattaaagactatactttgaggtggaggcagctttctaagcaagatagaaaacacagaagctataaaagacaaactattagcagcttcagttacattaaaaaattaataatttttaaaattggaaagagatcccataaagaaataagccaggtaattattagaaagtatttgcaactcatatgatgcacaagaggatattatccccaggatgcaaggagtttctacaaattaagaactaaaagatagacaaccgaacagaataatgaatgagggcatagttttaagtctccctccctctctttttataaaacactaatttttgttcaaagcaataagcaaaagtttaatttgttctgtgtcctctatatgtaaagtccataaagttctgcgggaatcatctccttttaaatatgagctgctcaatttcgacactgaattcagctaacgtatattaaccaagagaaatcaagagtgctttgaattc

SEQ ID NO: 197669 - DNA, 1000 bp, Homo Sapiens
ctagatatgcaaatgattgaaaaaaaaaaaaaaacaaaaaccaagcatggtggctttgggaggccagggcaagaggattgcttgaggtaaggagttcaagaccaacatgggcaacctgggcagacactcaggaagtgggggtgggagatactgtttactgactgcattcctcatcaccctcagttaatgtttattaggtatactcaaagtacagggcagtattatggcttgaaaaaagcataatgaacttaataagttaaaaataaccttgaggctgagcgtggtggctctcgcctgtaatctcaacactttgggaggctgaggtgggcagattgcttgagcccggggttcagaaccagcctgagcaacatggcaaaacctgatctctaccaaaaatacaaaaatgtagctgagtgtggtggtgcatgccaatagtcccagctactctggaggctgatggcagttggatggattgagcctaggagattgaggctgcagtgagccaagatcgtgccactgcaccccagcctgcgtgacagagtaagaccctgtctcaaaaaaaaaaaaaaaagaattaccgtgactcctgtctagttagatcctcaatgcaactttgaaaaacaacgaaaaaagggccgggcatggtggctcatgcctgtaatcccagcactttgggaggccagggtggatggatcacgaggtcagagttcaagaccagcctggccaagatggtgaaaccccgtctctactaaaaatacaaaaattagccaggcatggtggcgggtgcctgtaatcccagctactcagcaggctgaggcagagaattgcttgaacccgggaggcagaggttgtggtgagccgagatcatgccactgcccagaagcctgggcgacagagcaagaatccatctcaaaaaacaaattaaaaaaaaaaatgaaaaaagaacttttccaaatacaaaagtgagaaaggaaacttaatattctgactcactgaattc

SEQ ID NO: 197670 - DNA, 1000 bp, Homo Sapiens
cactacccacaggattccgggaaaccacacgggactttttctctcctgtttcttccattctcttcccactttgtagggctgtaagcacggagatggagcgcacagccacgtacactacacttgcccctcagctgcctccgtggatcgtggttccacacagaactatggactggacgttccccccagtccttacggctctgtttctgtgcttatctactcgtctgaagcacactgtctagttccatggctcccaagctgcacggaggcaccctaggggccctgctgcacccacaggggcactgcagcacagcccagatgtccatggggaaggcagtgacccttggcacctgtcagcaccgcatgcaccactgccttgaggcagctctcgtttccaaggtgagatcacactacattcctctgaaagacgtctcgtgaggccagaagtagctgtaattaaaagcaaattcctgctatcacgcttgttgggatagtaccatttaaaaaaggaagaagaaagaaaagaaaaacaaaaaaaatgaaaacacaagtgctggtgaggatgtggagaaattggagcccttgtacactgttggcataatagaaatgtaaatgggtgcagctgctgtggaaaatagtatggcacttcaaaaaattttaaaaagagctaccatatggtccagtaattccacttctgggtatatcccaaaagaactgaaagaagggactcagggagacatctgtacacccctgttcacagcagcattatccacaatccaaatggcggaaccaacccacgtgtccagcagcagaagaacagatcaacaaaatgtggcatattcccgcaatggagtgttattcagcactaaaaaaggaagcaattctgacgcatgccacaacgtgcaggacccctacggacaccatgcgaagtgaaataagacagtcacaaaagaacaaatactgcacgattccacttacatgaggtacctagagaggtgaattc

SEQ ID NO: 197671 - DNA, 1000 bp, Homo Sapiens
cgggtcgaggtcacgcaattaggagagtttctgttttgataaactatcacaagcccacctcaggggacgaccggggagaggagaggacggacggctgacctcaccgccgcagcccgggacccgcgggcgccccggcccggacccgccctgccccgggtggcgtccgcgtggcgggcccggtcgcgcgcggtggaaccggcgagggccgcgcctacccgagtactatggggacagtagctcttgctgaagatcaccacccggctgcgctcgatgaggcccacgaggtggcggcgcagctcctcgcgggcctcggacgagcggctgggcccgggggacgacaggcgggcacggcgccccggcggcgacaacacgcgcgcccctcggacatggcccgagcggcggttgggggcatcgcccgcctttcccggcccgggcgactgcggcggcgaccgctccagagtctcgctctcgctcctggcccggccgggcctgctcacaaaccgaaacgcaggcggctgcggcgccgggacggggcctgaggggcggcgaacgctgccctcgctggccactctcaccacccgcgcgaatccgcgaggcagccgctcgccccgccccccaacaccgccccgcgcatgcgaaattgggtcccccgcccgcccgcagcctaggtgtcacctgcccttcgcaaaggggcgggtaccaagcgcgagcctctttatctccaggttgtgcctgcgtccggagaccacccaatcttggcgatggcgctctgagatggcctctgtgcaatgccttttactcctaataatccccaacagcccctttaaaccaccttaaaatatacgttcttcaatttttatgggaagtgtgaattggaaagattgatatttttaaaagtttagatcacacaagctaaataaatatattgcgtttgctattgcaatgcagctttaatgagtttcctaggttgctacccgtcagttcccttctacatagaatt

SEQ ID NO: 197672 - DNA, 1000 bp, Homo Sapiens
cctcagataaagatggaaaggctgatggcagcatgggtcgggaaggggatgttgccactactggagatggggaagctgtttcttctggcagaaaagtttcatcagagtttacaaactcagtgtctccagcttcatcagggtcctctcacacatccccattccaagtttcagggtcccaatattttccaatcaatgccctcactctaacagtaaacacctggtgaggctgcgtatgcatctttccttgcagatcagcccctcgcatggtaagagcttgtgtctgcttttccacagtttcagctctttctctacaggagataagactctcattcagggcaatcttagcagatttgaggctctatttctgcctctaaagccaggagatagaatccctgagttcaccattttctttcataattttgtccactgaacttaggagcaaccaaccagcttcattatgttccttggttgtccacatacggttagtacatatttatttattatctaacttgtctactactatgtaagttctgaagggcacaggtttctgtgtccttttttcacctcacacagcatttggcacagagtaggtgctcagtagattttgttgaaagactaagtgaatgagcttggctcacagttttctttttttgtctcagagagtctgtgtcatcttccatttttactccatagccatgggccagaatcaaaatgaattgtgtggctggcctagtgcaaatgacctcctatgtaagaggaagaagtgcgctaccatgctggtttgttgacgccatcactccagagacggtgccctgctttgcagggggcttatcccaggtaaaatcctgctgggcctgaggctttggtgctggcgtatcatccagttatgcccttttgccgttgggtgtctgttgacaaactagtcttatctgccatctataactgcctgtccttgtttaactttctggaagacgatgtttcatggccttgcttttgaatt

SEQ ID NO: 197673 - DNA, 1000 bp, Homo Sapiens
gaaggctttgcccagagctttggagaagattacaaaggaatgctttcttccttcagcttatttcttaggaaattacctccagatctacccaagaaacaaaggctgcaggatctccttggtgtcttcatacattgaacacttatttagaaatccctcatgactttttccactcccatttcttgaggagaaaacagaagatctgagaaagggagaatgggagatggcctgccctggtctcttggctgccctaatggaaaggctccaagttgcagctttagaaacaagggctggcactatgagcaggctataacttcttgcttacaccttctctcttcacatcgggtgccgcctgtcaggtgagggccacagtccttcattccaggtgtttttgccttcagccttgctttactaccatgtttttctccttttctgtcttccatctgtccttccataaatccattcattattcatccatccatccgtcctttgagacatccatccttcaagccaccgtttgaccccttcatcccaaattaatgacttactatatgccaaactgtgtgctagaaactgactctacagatgagctagaacagttcttgccctcaatcttggaagaacaactcattggtagcagctccactgtttattggcagaagggaggattgtgtccagggccgcagtatgcagtggggcagttcaggcactgcacaaaaaggccctgcagagccagcgaatgggcctgaaatgcaagctctgtgtcctgacctggagatgggtctttccagaagaagggacagcaggaggtgccctgtgagttaccaaacgtagttcattttgtagcaaaacctggacacctgtgcaaagatcaaactagatcagaaggaaaggagacaatattgctgtgaaaatctagctggaactcagcaaacattcaggatggaaatgcacacttgcaaagcagtttctagaactttgtgtgacaagaacactaggaatt

SEQ ID NO: 197674 - DNA, 1000 bp, Homo Sapiens
cagctgctggaggtgagtggattcccctcccactctgctccctgaagggtggagcctaatgaactcaccagtgacctggacgctgggcatgttctcaccccgcccagggaacagcatggacagctgtttgtccatcagcgggtattccccaggcacctcctgaatgccagctctatgttgggagtgccttggggaacgaagccacccagaccttgtcctcatggagcgtgtgttccagtggggatacaggtggcaaataagcaagtatgtgtgcatggcagggggtggccagtgccacagaaggagatccacagtgcaggggtggggcgcctgggatcggctgttgtcttgtaagggaggataaggaagggttctctgggtgagcagatgtccataggaagggaaggagcaaggccagtggcccagagggagaggaggcaaatgcctgggacagcagcatgttccacacatgctgggaagagccagggggtgggggtgggaggtgggggagcaggagcacaggggccaggggaggggagacgagagcggagaggcactggggcgtctgtcccaaggctcgatggttccctaggagaacacctggcctcagcatattctctccccacaggagacttaggacagcaaaagcacagagagaactcagcccaaggaggaggtgcgtgggaaaaggtcttgggagccaggtgcaagcttccagggccctctcccagtacagtcaccaggacagcttaattctctgtgctgtccaccatggaagccccttagggtttttagtgggtagtggtcacataagcaccccctgcctggcacagaccagagttccagactctagaaggaaaggaggtattccacctaagccatattgtttgcagaacagtttaggcagagcgggccactcttattagttaatggtgggagccgtctcctagtttgcagagaccagctgaggatccaaccttgttggccctttctgaagctt

SEQ ID NO: 197675 - DNA, 1000 bp, Homo Sapiens
cagtgaaaccccgtctctactaaaaatacaaaaagatagccaggcatggtggtgcatgcctgtaatcccagctacttgggaggctgaggcaggagaattgcttgaacctgggaggcggaggttgcagtgagctgagatcatgctattccactccagcctgggcaacatgagtgaaactccattaaaaaaaaaaaaagccaaatgaatgaggctggagatttgttcaagatttacagttaattaatacaattataataccaaggtttcctgtaattgcaaatcccaatactttattatctaatgttcctgcttatttgaagtggttcactgtagtagacctctactcaggaggagtaatgtcacaaaagtaatggagtagaagcattctggctccactcttcccatcaaaaaactaaatatccagcatccagattatcaccagcaatatcctagaactcaaatatgaggctgagatgatccccagggccacaaagaagtgcaaaactccgagcagagagtaagagaaagtgacgtctctctccgtgacgcccctctcccaatctgccagggattacacatggaaaattcttctcagacttatggtttctactctggaaaaagtgagattgaggcagacagccagcttctgcaccatcttgggtacgcttacaagaaaactgttcctgcctcaacccataggaagcattgcaagtgcctgtagggagaaaaatcccaaagagcagctagagacaaaatagggaggtgagtctagcaatcccagcctgtgaattctgctctttatctcagccaaaggagatttccaatcagagtagctgttctgcagcaccatgctgtaggaggcaccttccataggtcttctggacacaaacctccagccaaccttcttacatagaacaggtgtatcccatttgggacccccttcccatatgggacaggcagtgctctgaacatttgggagagctgaggcaaacctaagctt

SEQ ID NO: 197676 - DNA, 1000 bp, Homo Sapiens
agcaaaggacatttctgtcccaggaaacttgcctctctccagatgtttgttttgaacaggatatgcacacggaaacagcaactactaattctctggccagagtgcatcaaggccttaatccaaagcctcccatccatccagctgtctggcatttgctattatagggcaccaacagagaaatgaggctgtggctttatcactgcacccctgggtgacaacttgattttctgctttcaccgcaggcagcagcagcccaacatgatggggctgttaatttgtgcatttcatggtgtctgtcaggggggctgagagaggagggtttcagggggaagggaatggagcatgtcccagccgcggaagcacctgtctgcattgacggcacagagcacttcttattagcgtgcaggtctctaaatgcagcccggggatgacagcctggcatcccagcacccacacactgtgacaggcgccggcagccggtcccattgtttgcccttgatgagcatgtcattaatggaaatagaagaaagtgagggccacatcagtattcaaatagcctctattctttctgccattcacccggctggctcagcctgctgcagatttccttctgcaggctcctcttagacttttttaaaaagcagatttattcccattgcatataaatcctttccatgttgttcgtggtttcttccagtcctgtgtttacatccaccgctttagactggatttagctacatcaaagcagatttggattctcgcgtattgcaaaggtctaattagcaagtgtgtgctgtttgcagccaagaaaatgcaagttgccgctcgaggaacctatctcctatgcctgctgaatcctgcatctcctctcggaagatgttggctgctctgcttatcactctcagaaatatctgatagggctggggagcactgagtgtagaaaatctgacttctccaaaactggcttgtttggaaaacaacacttccctttctcaagctt

SEQ ID NO: 197677 - DNA, 1000 bp, Homo Sapiens
tctgtatattccattcagttaaatgtccttatgtcttttgcccattttctaattagcattatttggttttttacctgtacattttgagagttcttcatatattagatgtgtcttttgtcagatgcatgattcacaaatattttcttcaatctgtagtttgtattttcattctcttgacaagatctgccacagaacaaatatttttaattttgatgaagtccagtttattcattttttaaatttatggattgtgcttttgctgtcatgtctgagaactattctctaatcctgtatcctaaagattttatcttgttttctttcaaaggttgttttagttttgccttttacatttaagtctatgtaatttttgtgagttaagttttccattaataggtgtgaggtttaggttcaggtttttgcttgtggctatccaattgctctagcactacttattgaaaagtttatccttcttccatggagtcccttttgcacctttgtcaaaatatcagttggccatacttgtgtgtggctatttctgggttctctatttcagagagaaattttaagcccaagggtggctttggtgtctgggtgaattttaataaagattttctatgtgaaggaataatgggatgtgtcccagtgttcataagagcaacttcctatagccctgttactggccctaccaaccaaagctcaacctctccacctaacacctattctagtccccaacttccatggatctgaattccccaggaaagcccccggtctctagtctctttgtcttttgtacagcccataatccaacatcagcattgccagaaccctagtggaatctttgattcccttcactttctgctggattccctcagctgcccattcctgaggtcctttctgaccttatatacaggatataggtgttagaatggaacagaaataacttggtatgttcatttatttatactatttcacctataccacaggctgtaccattaagctt

SEQ ID NO: 197678 - DNA, 1000 bp, Homo Sapiens
tcctttccttatgaaacaaagagaaattcaaagcccatgatttctctatcagatttttctctataatctcatctcacatgccatctctgctctgcaaagcatattgtattcactggctcctggtttagaaaggccaactacagggttcttaggcttagcctgccccttccctttcttgctgtacttctcaagtcctgactgcacacaggaatttccatagggcattctagatgaataatcactttctacaagggaatagtgtgggcctggtggctttcaaagaaacttcacttaccatatatgccttgtaagtcacttgtaccctgttgggagaataaagaaagtggtttctagatgtaatgccttgctaggctcagccaggtttataatccagtccaactccttatccccactgctccagctagacatagaccaacgtgggtacagccattccaccacacttttaaaaaacgatcttctgctaactactagataatggtgaattccctttttccttccttctttttcaaaaatctcttccttttatctgatgatctcaaagaatcctacataaatgtttcagcctagttttcttctagcagcaacatttcaaccatggaggtgagttggcaatgtagtccccagagatgctaacctggctcaggcccaagggaacaaatcaaaatgaggcttgaataagcaccaggttccccagactctctcattttcctgtttcttcatggaatatagggaggcggagggagctggttatttcaaaaagcctaagatcacttccatcacaggcaaacccctcctgaaagtgtgaaatccagcctacaatggactttcaccgacaagtgattcattgagacaaaggctagagttccagcatcaaacagatgtcagacaaagcaccaaacgcctataaatgattgctttgcaagcaagggaatgactggaagacctggcctaatgatgtaccccatgtctggacaagctt

SEQ ID NO: 197679 - DNA, 1000 bp, Homo Sapiens
agaatatattcattatttatgccaatataaacacatcatttaaacatatcagggcattgcttcaagtgcttattttgaattaatgagaaataagtcatttttgacatgggtcacctggtaaaacacctggtaacagccttcgggaaaccaagttccagttcagtaagtaactaacgaaatatacattgccttgtaagcacatctttgagatgccattggggaaatctctaggtttgaaagataagggattacctgcttaacacgcttaatccatgcccagctgtcaagcagaaattaaatgtgttaactctctcagtgaggaagtaatgaaagagtcaggaatatcgctcttttatttctcaaaaaccattaaaaaaaaatctagagaagccctctgtgttctgcaacataacaagatgattcattggacattcccctgtggccaacacctctgtatggtatagggtaaaaagagctaaagaaaaataagatacaaataacttcttcattttgagttctgctggaagcagcagctgaaccttttcagctttgttaagtgccagatgatgatcttgctgcctttacagtgttgtctctttctctgtcgtctttaagtatgaaggaagaaatattttactcatgatcatccccaatttctccccagccaattcagctttggctgcagtaagaacatgtttgcactgtatcagcatcctgaatcattataaatacatcattcattttagagttagataactaatgaaattgcttaatctctttcattccttgttgacttgagagtcaaatgtgttcatcatgcaatatactataaattagtaaagagagggaatcataggattattcttccttaatcccttacttcgaagataatagatgaagatttaaattctgtatttttgattaagtcaactctatgaattttctggtttggatataggaagcaagggtgatgtccatgtaaatattgctacataagctt

SEQ ID NO: 197680 - DNA, 1000 bp, Homo Sapiens
cgcctgacacccgggaggccaaggctgcagtgagccgtgattgcgccactgcattccagcctgggcaacagagcaagaccctgtcttaaaaaaaataaccgagccaccaagtgatcctatcttaggagatggaaacccccatcataagaagagtaggtaaatgtctgcagtctagcctctgggaatgaaatttcttaaggacgggcttcatggatttggggctcatgaacctgcaagaacactggcaatcaagagagtaaaaacataaccagaagggttcagagtttgggaagcttcttcgtagcactaactgagatattgctaattagtggctctccaaaatattattaaaataatctgttgattctggacagtctttattaggggaggaggctgtcctgtgcattataggatgtttagcagcattcctgacttctaccctctagatgccaggagcagccccagtcatgacaaccagaaatgttgccagacatggccaaatatcccctgggaggcaaaatcatccccagttgagaactgatggcttaaagttaatggagaacactatttacaaaaaatctcactagagtctcggggtgcaggtaggggatggagcaaagttgggagtatttttgagattgtgaagtctggattttttccaatgtgtatcttttagtgtgagagccagggagccctggctggggtctagtgaggaccataatctaatcacttagaatgggcaaacacaagatgaagattttgagggcaaagactcggaaatgctcaaattttaaaattttccttgaatgctttctattgacgagttgatgtgtctttggggaaattcctggaatgaacaatacagttatttgtaactgttatcttcttgaggaagagttttctggaacagtaaagttatgctgatgaagatcctggaatagtaaaatcatgttaacgtagactgtgtggatataaatacgttttagatctcagtgaattc

SEQ ID NO: 197681 - DNA, 1000 bp, Homo Sapiens
ctcctgggttcaaatgactctcctgactcagtctcccgaatagcgggtattaccctaacctctgcctcctgggttcaaacgactctcctgactcagtctcctgaatagcgggtattacgggcgcccgccaccacgcccggctaatttttgtatttttgttagagtcggggtttcaccatgttggtcagactggtcttgaactcctgatcccgtgatctgcccacctcggcctccagagtagctgggattacaggcgtgcgccactgggcccgaccgagaaagttaatattattcctagtttacagaagcacttcatcgccagtcagagttaatcatggggtgcaaaggagacccgctgccttcacaaagtctccgagaaaataaatgcatgagaaaataaacccaaactttctgaaaccaaccccccgcatgccagctccgaaaccccacagccatcgccgctggacactcacctccttcccggcttctgcctccgaccttctcggtctgggatgcgctctccaaccggcctggagctgaactgcgtctatttatggagaagcgggactccaggccgcgtttccggttccctgcgccgcgccgtgattggtttagggccacagagtccattttcgtaatcggcgttgattacatttcccactgaaaccccacccacaggaaattaatgtattaaacgtgcctactgtgcaaataatacaggttttcccgctctactgagttgtcatattgctgaagtatgtggaggcctcagaaaatatagatctgcaagttttaaccactttgggtcccctcatgccacagacagtaatatcctaacaagtaaaggacgtgttaagagctggttgacttcgcttattaaaacaaaacggaaaaagaaaaaaaaaagaaaaattcaaaatagagttggttgattaatatcaaaccagtgatttaatctcatttttaatctcatttgagcgaagctttcacacgcgaattc

SEQ ID NO: 197682 - DNA, 1000 bp, Homo Sapiens
gatgatggctgggtcaggaaaggaattagatctgagctattgtgggagatcttgggtgagtttgtaattatttgatagtggtggtgggatccttttatagcaacattctgtcttttattctgcctttttcttttaacattttctttctggttctatttcctttttcactttaatccttccggtcccatagttcaatgctggctgcatgtttagaatcaccttgggtgagggtgatgctagcacctacccctagaaagcctcatttaatttgagtcaggtgaggccagactgttggtggttttgaaagctccctaggtgattctgatgtgcagccagcgtggagcccctctgctctcgaggtttgaacatctctgacaaaactggacatgtcttaggaaccataagcaggttggactttaagtcagaagcagtgctgtttcctatcgtagtcttggcattatcgaccacgttagagtcatcaaacagtttggctggaaatctcctctccttccagaaagaacagatttgttctcctggtgcaaagccacagaatgcctggatactgaagtccggtcctgtgctgggcagatgctgctcctggaaacagactggccttgttttgacagtcccagatggatgattgacaatgaggagtgcacataagggtcgagtctctgtatctgattagtatcttcttccagtcatgggctcactcagctgctctcagagctgtttcaaaacaggtgctgatgtatagccatggacatagcaaacagttacataagaactgctaactaggagcatgagcagagatctcatgccacaatcccttctggaggttagtttctcacatctcttttaatatattgcactgctgcttttgtgaaacattaaatttgacagattttgcctcatcactgcttcctcatggctatttagaaaaattagtcaaaagaagcttggcttttcctgtctccactatggcttgtgagctgaattc

SEQ ID NO: 197683 - DNA, 1000 bp, Homo Sapiens
tatcatgctttgaacaatgttcaaaagcatcgtaactaaagcagcaatataactttcctgaccttgaacagaaggtaaataaaagtcacttcaactggcgacaaaagtcctttgtacttacatcagtcatttcactccggggctgttaaacacttacacagtggttgctacttgctaattttcacatttttagaaaagaggcagaaactaatttcccctagagaagaggcaacccccgcaggtgaggaacaggaaggtagtaagcagggcctgactggcgagcaagctgtcagtcagtcctggaggtcagattgtagggtctggaaatttctcactcaccaagtacaaccttcaacccacatacccgctgagactaagtacagctgtcaccctgagcaaggacactcacactctgttacagctgcaggcgcttacctcggacccacacaaacctcaactacctaatgggaaagaaaacactggaacataaataacatgcacacatacatgtcaatctttctaagggatagctctggttgtatcacagccctgttcacacagagccagcacatgccagtttaagacaaaggcttcgatttcccattcgaggtcctcacagtatggctccaatttaccttcccagtcaatacgcccttatacaaatcctaccttttagtccaaccatagatcattctacttgtttcttgattaaaatgctcacttcctgtctccacctcagctgaaactggcctctccacctgaaatgtaccatctgttgagcctgatggatcttttaggtgtctctcaaatgctccctcctgcgtaaaactgtcccgatgcatcccacaggtgccatccgtgatgctctcacccctaggttcccagcacacgctgtacttgcatgaggatgtgacccctggtcacactctttttcatcttaagcatgtccatgtgaactccccattaaattacacattcttgcagcggagcagctgaattc

SEQ ID NO: 197684 - DNA, 1000 bp, Homo Sapiens
cagtaatttggctcccacttatcaggccctcggggggccagtgagaacctggcctgcctcactacaggcacagccacctaggttggaagggagagaccctcttgggtctgaggtccagtaggccactgatttgtccaaagtcctgccccacttgggtcctccccctccatcttaccttccggccgtggtagccctggatccctgggtctccctgggaaaacaaagagaaggccattaaagaggttttcccactgccaaactttgacttgtgctgttccccacacaataccatccctcttcctctcgatgactccaagttccactgccccttcaacacccatctccagccttcccaggagcaatagctcttagcttcctctgaggacaacacagattgttctactcttgagaacaggctccactttgcagaggctgaggaatggtgggaagagtcacttgggtagagacccaggagacccaggagacctgattctattgaacatggacaagtcactttcccacagggctcttagcttctgcatttataagatagttaggcacaatcagcactgggcatcttcttgtccccagagccccagggtccccagcttcaaagggagagcctgtttgacattgtgggcttctgggtgagggttcacaggagactggattaccctagaggtctcttcccattctgacaccttataaaacactattttattgggatattgtgacggtgttctgggcatgagcttagagtttccagctagacgctatactccttagagggtggactgtgccttcaatgccagcccgtagcactagcttcattggcgtgagcacccaagaagtgcaattcttgttggaatcaagttagttcctgagaagggtggtgttttgtaagtgggtcaagcttgatctgtctctcagctgagatccctctctgctcctgcctcagtcaccttctgtgctgcctccccctccctcctgcagggaattc

SEQ ID NO: 197685 - DNA, 1000 bp, Homo Sapiens
cacagctgtggtgtgttctactgagtacggccgtgcaaacctcaggacagctgggccaccaccaggactctagtatggtggacaaggtgctgtcccatgaggaaccagacaaatcagttccagctgaatgccctccttgggtgtaccttcttgagaagaaatatgccctgagaaaatggaaagaattatcaattgtggagttaaaaaatctatatatactgtattggtctgttttcaaactgctgataaagacatatccaagactgggtaatttatcaagaaaaagatgtttagtggactcacggttccacatagctgaagaggccccacaatcatggcagaaggcgaaaaggcatgtcttacatgatggcagacaagagagtatgacagccaagcaaaaagatattccccttatcaaaccatcagatctcgtgagacttattcactaccatgagaacagtttggaggaaccgcccccatgattcaattaattcccaccgggtttctcccacgacacatggaaattatgggagctacaattcaagatgagatttgggtggggaaacagacaaaccatatcatacacacacacacacacacacacacacacacacacacacacacttgtatgtatgtatatatttacattcacatataaatgtaaatgtatatatattttaaattgacatatatatgtaaatttaacattctgcagcacagaaggtttgggtggcattttggtggcaaaaagcagagtttcagcccactggaaaatgatgggaaatgagagttgagtgacaccgtttaactgagaaacctctttggaggttttatggtataatagtttaggcggactaaaggaaagatgaaacattcacctttctcctggtaaaaggccagcaaaggaactatgggacgatccattatttgcagttttccagaagcagcatttcctcatctatatatttatccaaattatgttaatagggagagtgaattc

SEQ ID NO: 197686 - DNA, 1000 bp, Homo Sapiens
ccaccaagccaatcctcaacatactccagacacatgagcaataaacactgccggtgagagtttgtggtttgttacacagcattattatggcaatagataaggatacattaactaaagtcccatttctagacaacttcccttcatgtacataatttttttaattaaacagaatatgaacatacagcagctagaacaaaaagacatagccatcgtttcatcaagctttgcgatgataccaggaatctgttgcaccattgatactgaatgggaaaatgtttcacgcccatgttgtttgacaaggtggacttattgatactatcatacctggaaggataaaaaccagagggagagtctgatgcttttctagctgaaaaacaaatcaggtaggtttcttatagaaaaacgggtttcattattagtttgaagtgcagttagattgtatagttcttaagcagcgcttcccatccctagttgcatattagaagcactgggggatttttctaaaaatattcatgcctacgccccatcacagaccaactgaattaccacctctgggaaggaggcccagacttatatattgtttaacagctctcccaggtgttctaatgcacagtctgggctggcagatgctattataagacaaacaattccattctataggagatagttctaaacatttcaatctgacctcaaaaagcaggcttgttaccaaaaaaaatagcactgagtcacttctgtggtacgaggccttttcttccaacatgggtagaaacatagtcaagctaaatatcttgcgatcattctcagtattatcttaatacagtgcagcacatagtttgacaatctcttaaccttccaaatcttctcttgacaactgctctttagaaatcccagcctctgcttcccctaagaatctaccaaccagagctgaaacaaagaagagtacaatacctctagaattcaacagttgaaaccaagactgctactaggataagaattc

SEQ ID NO: 197687 - DNA, 1000 bp, Homo Sapiens
ccgggactctgcctgtttcctcccattagcacttcctcccatttctgactttgacacatctggctggtcacttagtaccaaaaggtcctggtcaagcagcaggggccagatctggacggtcctaaaacccacagctgggaagggaagatggccagaggtggtcacttgtccttcgtatactatctccaggcaggacattcaaactgctatgtagccaccctatcaaaagacccctgggattagtgagcttgatgccccatggagatccgctcctccatctgatctaaacctctctgctcctgtgcctcctgctgctctttttgcgcgggcagctggggtctcagtgacagtcaggacatactatctgtgtaggttttatccctcttgcttttccaggtccatgctttttctccttccaggagaggtaataaagactcttggagcccaagtgaccattataaatcagatccagttactcccctgcttcgaacccttcaatagtcccatttcactgggatgaaatctgaattccaactgtgacttacaaggtcctttatgatctgcccctgctttctctgcagcctcacctgatatttccttgctcactcaggggcaagaggaggctctggcctgaggtcatctttcccaaagatataatcataccagctatacatctcagatgttccatgacggccctaatttgaaatcatttgtccttttttatccccaagatctaaataccatggaaatattgtattttactgtccagattgtctcttatatctggaagtgacacatgttagcctatacaccccaatttagggctcaggaaatatggtgcccaaacccctcacctgtccttgtaatgaagaagctgaatactttcacggtaattactaaccaacagcagagctctctcaagggctccagggctgaaactaaggttcaggcagagcttggtctatcccagcaccgttgagaaaggcattccgctgaattc

SEQ ID NO: 197688 - DNA, 1000 bp, Homo Sapiens
ttgagcccggaaggtggaggttgcagtgagctgagatcattgccacagcactctagcctaggcgacagagtgagtgagacaccgcctcaaaaaaaaaaaatgtggaaccagaatggatctttaactttatcctccagaaggcattcaatatctgtctcattaaaacaaaggtcagtaggatagtatttaccctaaactcatttaaaccacagtgagatttattcttgcccttcaacatagctttacttttcaactcagggcttttcaactcagggttataaaagttgacatatttattttgagtctatattatagactcacagccatgtcagatctttgattttactgagtagtaaattaattaactacatttcgcaatgctttcttgtctaagacattcaaattgaattctggaaacagtaatttctgttctggtatcatatttttcaataattttttaccagccaacccttctgtttttagcaatcctatttacttcatacagttttacttcatacagtcattaataagcataaggctgggcatggtggctcatgcctgtaatcccagaacttgtggaggctgaggcaggcagatcacatgaggtcgggagtttgagaccagccagaccaacatggagaaacctgtctctaccaaaaaatacaaaattagcagagtgtggtggcacatgcctgtaattccagctacttgggaggctgaggcaggagaatcgcttgaacccaggaggcggaggtcacagtgagccgagatcacaccattgcactccagcctgggcaacaagagcaaaacactgtttcaaataaataaataaaaataataataaaacaagcatgaattgctcacagatccaatgtgctctgtggcagaaatgaaaaacactgggatttgtggcaaggtatccagccaccataaaatttctttgcagctgcccaggaagaacaccaaattccactaacatcctagcatgcagacggtgtct

SEQ ID NO: 197689 - DNA, 1000 bp, Homo Sapiens
ttagtccactactaagctaacaatatatagctgtgaccataatgtgaagaagtgttaaagacaaaattattcaatgatacttgttaaagcaccgaacgaagactattgaggactgtctcaattggcatagggaccactgcaactgggtcttgcagtggggaagagggactgggctcaactccgaatacagcgtgggcaagagggaatttatagccaaccagcagtatggagttcagtggatggaaaattactaagaggaagcatcagaggtaaggggcatttggtgaaactgacctaacaggacttctgaagacataacatcacctgggggatggtgcagggtgagaaaactgattagatatggaggaaagggggttctttgctaaaactggatttttacaaagaagtgcacagatggacctagcagaagattcagaagccgtactagagtttggccaagcaaataatctttgtcataggcacaattctttctctgctttcccactgcctggtccaaattttcacacctttggtagcactatctatttctgtagtgcttattcactctcccacatgcccctattcctataaccctcagtagatgaaatccaaggaagatgaaagggacaattatgataagggtagcatctgaatcagtggatggattattcaataaattgtgttcttaactgattagctgcactatgggcagagagaagcagaactctatctcacactaattgtgaaaacaaaatcccaaagtaataaaaccataaaagagctagcagaagagggcgctcttttttttttttaataaattgatctcaaaatgggaggagctttctaagaagcaaaacagcaaaggaaacaaccataaaggaaaagattggtagacttggctacgtaaatgctttttacataaatatttaaattttattaaagtaaacacacaaacaatatgaaaaggcaagttgaccaaaaaaaaaaaattagcaaagga

SEQ ID NO: 197690 - DNA, 1000 bp, Homo Sapiens
tatttgatttatttccctggagggagagaagtatcaaatagaagtaaatttaaattaaaatatcttagtgagcaatacaaatataggcattttggaaatgggatttccattatgttaagataaatctaaaatgaaagcagatttgggagattagagtattttttttttttttagttttttaaaaaggaggaacattttattcacacactcgtgtctcatttctcctcttgtgacaactgggaaaatatttctatgtctcctcttttccatcttaaagaattctggcaatgacaagtttgtttaaaaatattgtcaaaagttacaaagataaacaggttattttatcaaaaaggtcttcaatcttccattttacaggagaaaatatatgtattaatgtgtgatattgtaggctagtcatgacaaatggcaaagttgtagacaaaggaaagtacccacttattcttagttaatttttcccgatcaactttagaaaatcttaatataagaaaagaaaaaggttgaaagatccaaaatgtctttaaaaatctgttttgaggaaattcaaaccgggtgagatcattcacataaagggttatagtagtaagatttggatgcttaatttaagatttatgatcaatgtggttttttagaaattcagaactatagtacatatatacccaaataaaaagggtcataaatactatgctataaatgctatttgctcaaaaatagacttcccgatgattttggggcagtaaatctcacacaaaactcaagtaagaaacccaggaggcctcattttgctttccattatatattgatttagaaatgatacttctttttctatagctttaacacatttaaatgtgtaaattctatgtaattttcttcattaccaaaatattagaatacattttaaaaaatttaagaaagaaagcctttcaaggtagataatgacatttttaaaacctccaaatttttgtttttgagaaaagaattc

SEQ ID NO: 197691 - DNA, 1000 bp, Homo Sapiens
agtattctatgataatgataaaggtaatgatgatgatgatgatgataatgatgataatgatgatatggaatgcaatcattaaggctcaaacacgattctcttctcattttggcaatggcctataaagccctgcctcacaagtaaggggaaacaagggagagagtatggataaattaatatgaactgatcacaattacaggaaaacaaactcaaagggcacaaaggaacagtcatgtgtactgtttttgaatacaaaggactttttttttttgtcctcagaaaacactgaatagcctgttgatttcttcctggccccaaatctttgggtagtacatttcttttaatgaacttgatgtttttattttctaatttagatgatacttgtttaaagcattccgcatttcatcattaagagctcttctttcagcaaaagctctcacattattagaaacacttctgggcaattaagaaaggagactacatgaactcatccacttgacagggcctttttaaatgttttttgaaaagttagctacagctataatcatttaattacttgatatttgtcaaaacattgctgattttaggtactttaatgactgacagcaaagcaggcagaaaactagcacaacatctgcccacatggaaattacttatttgtgacagacctttgcaaccagctctcacagaccattccagcactggaaagaaagtgtctacagaagggctgtaaaaaaagccccagcaacgtcaaggacaactggacttgaaaaatttattcatgacaaagagtattggaaaatttctgtgccctttaatgtatttaatgaaagtatttggttaaactgtgatctcaagtattaatttctacagccttaaaatatttgactttgtagaattttcgtctttgtgtactctcaatcatctccaaatggtaaggctcttgcttggagaaattatgtggctcaaacatgttacatttccagatgggcatgaagaa

SEQ ID NO: 197692 - DNA, 1000 bp, Homo Sapiens
ggccttccaaagtgctaggattacagggatgagctatcactcacccgtactttatatccttttgtgctatatcaattgttctgataagcatgtattagttatgtaattaacaattaaaaagaaagaaaagaaatggggggaaaaaggggttgtgggaggaagggaaaggaaataaaaagggaaataacaggagccaggaataagatgacaggcacatgtgctagcagtgtggtatggagagatctggagtgtgatggttcaggttcaagtcctagtcctgttactaactttgcgcaagttgaactccaaggttcagaggtttcgtttactgaatagtcttactacggtaagactatttctcaccctacagaattattgtgaacattaccatgagaacatttttgaaatgtgacaaacacagtgtctggtacagtataaatgcccaatagacggtagctattttatgttttgaaattaaaatgctaaagaaaacagctttacctataatttgatttttataccttaaagtatatttgatataaacccttttcattagttttaataagtaggtattaatgatgatcacaaagccaattcagtagaatatatgctggtggtactactagaaatgtatttcatctgagatttccaattccagctttgcaagtccctagagcacttgtccttgttcatacaactttgaatcctaaaatctgtgcctcttatgcagaaatttcaatattcaatttgtctgtataatgaaacttgtaaatacctgtaccccttgaagtcattctgcagtagagaggtaaaagggggatactaatgaggggcatttctccagaccattctttcatatttaaaaaaatcacttggtagggatgtaaatttgtacaacctctatggaaatcagtatgaagatttctcaataaaccagaaatagaactaccaggtgatctagcaatcccactactggatatctacccaaaggaaaagaatt

SEQ ID NO: 197693 - DNA, 1000 bp, Homo Sapiens
aggtatagccttatacaaggattaaaaaaaaaaacattaaaataccaggatgaaaaaacctgcactgtgcattccgtccaaaaaaaaagaaaaagaaaaaattacactgatatcagacaaataattctttaaggaaataggcaatatgagggatcaagaggaaaaacaaagacaaaagttttaatttcccagcaaaaacttcttttctccagtaaaaatcattttaatattgtaattgaaatttgtaggcaatagactaattaatctgctatcctgatgagagataggtgactaatataacagagacaaaattcagcatcattgtaaaatatctgatcataattaacatcttattgatgcataaaaatgctacacctaacaactccacaatacataattttctcaaatacacaaaagagtttaccaaatccgaacacagactaggaaacatattaactctctaataatatcaagtgacaaatttatctaggaaatagtttctacagacagtagaatcaaactatataatgatactacagatatgtaatatttcacaattatttcaacaataagcaatacatttttaaataacatgactgaaggagtaagttactatatataagtgtgtaaagattacaatatcatagtctattttgaactcaatagaaattaaccaaaattataacactgatataacccagagtttttgtgaaaactaaatttttaaatatgtacattagaaaagaatcattatttataaacagatatgtccgtattgttttcaaaagctgtgaagagaacagtgaattgaacccgaagaaattgctacacttgtgaaaggaagaagacaattcatttttttcacccaaataatgcagagaaaacatttgagaaagttaaacataaacttgtgacaaaaatcgaccaggaattaaagtactgtgatggggtatttaaaaatttatagcaacactaatgcttagcaatgaaaagctgaatt

SEQ ID NO: 197694 - DNA, 1000 bp, Homo Sapiens
tagaactgaaaaatacaataatgacacaatatgtgctttcccgctatgatcaggaacgagacaaggatctccactctcatcactcttattcaacacagtgataggcgttttaacccaagcaaaaaagcaataaaaggaaatagaaagcatacatattagagaggagaaataaagctgtccctgtttgcaaatgacatggtagtctatacagcaaatcccaagtaatctacataaaaactaataagtgagtttagcaaacttgtaggatacaagatgaacatacgaaaatgaatttattgctatgtactagcaatgaacatgtggctactgaaaaattgcaaaatagtacagagtttttatatatttttcacctatactatcacaattgttaacatcttgtgtaaacatagaacaatgatcagaactgggaaattaacattggcacaataccattaaccaaggctggagtgcagtcgcgtgatcttggctcactgcaacctccgcctccaggttcaagtgattctcctgtctcagcttcccgagtagtcggggctataggcatgtgctatcatgcctggctaaattttgtgtatttagtagagatggggttttgccatgttggccaggctggtctcaaactcctgacctcaggtgatccgcccccctcggtctcccaaagtgttgggattacaggcatgagctaccgtagcgcctggcctccactaatgtattttttttttttttttggtttttgttgttccaggatactattcaacataccacattgtatttgattgtcatttctccctgttctctgacagtctccaattgttcctgggtctttctttgtcttttgtatgatcttgacacctccagagatcagttattttattgtatgttccttattatgaacctgcctagggcattctcctgattggactgaactcttgcacgaagaagctttctgaaagcttccaacttctgaaattcagaaagaatt

SEQ ID NO: 197695 - DNA, 1000 bp, Homo Sapiens
ccttcctttcactaacctcttccaccactttctccttccctgaacttacccgggtacattgccccagagtttaccacctcccaggagccaaaggggctttcaaaatatcctagcccaggaaaggaggaaaggctgggaaggaaatcctgcatagcaaatgatttcctgtgttttcctttcaacagaactgaagaaggacttcatcaattagtcagctgatcattgggcaaaattgatgatagttcaggatttaatttgtgccatataactctaaaggaaatttaaaattttgaatgaccttattataagaaaattcctttcattcccattaacataccatctctgaaaataagaaatagagatttaattggtggtgagccaagctttattctggaaataactaatattaattcatggtatgaactaatttcaaaaatccatctatatccagccgggcacggtggctcacatctgtaatcccagcactttgggaggctgaggcgagtggactgcttgagctcaggagtttgacacaaggttgggcaacatggtgaaaccccgtctctacaaaaaaagaaaaacaaataacaaaaatactagctggctgtggtggcgtgtgcctgtagtcccacctacttgggaggctgaggtggtaggaaacacttccgcccaggaggcagagtgagtgagctaagactgtaacactgcactccagcccgggcaacacagccagactctgtctcaaacaaacaaaaaccatctgcatcattagaagtgggatttttaatacattttaatttttcctcataattatttaaatgtataacatttttctggtttgatcaaaagcatttaataactgtaatagctcagtcagaagaaacatagcacttagcctcatggtcacaagaaagtttttctatttatatgcattttaaaagaaacctttttggaagcatgacacacaaacaggagtatttagtgtaaaactcagtgaatt

SEQ ID NO: 197696 - DNA, 1000 bp, Homo Sapiens
gaagaaggattgcttgagccgaggagtgaccaatgatcaagccactgcactccagcctgagtggcagagtgacaccctgtctcgattttttaaaaaactgacaaatcttttgctaaactgaccattttaaaaagagaaaaagtggccaggagggtggctcacgcctgtaatcccagcactttgggaggccaaggcaggcggatcacgaggttaggacatcgagaccatcctggccaacatggtgaaaacccatctctactaaaaatagaaaaaaaattagctggacgtggtggttggcacctgtagtcccagctactcgggaggctgagccaggacaatcacttgaacccaggaggtggaggttgcagtgagctgagatcgtgccactccactccagcctagcgacagagcaagactctctctcaaaaaaagaaaaaaagttcaatatatgaaaatcagcaattaaagaggacatcactatataccttacagaaaaaaaaataaataaaaggtggccaggtacagtagctcatgcctgtagtcccagcactttgggaggctgaggcaggcagattgcttgagcccaggagatctgttgtccaggagatctgagatcagcctggacaacatgacaaaaccccatctctacaaaaaatacaaaaattaggcaggtgtggtggcacaggcctgtagtcccagctactcagggaggcagaggcaagaggatggcttgagccctggaggttgaggctgcagtgaaccctgacggtgccctgcactgcagcctgggtgacaaagtgagatcctgtctcaaaaaataaataaataaaaatagattataaaagaataccatgaataaccatatgccaacaaattagataacttatataaaataaaatgggcacattccttgaaagacacaaatttctgaaacagacagaagaagaaggagaatatctaaatagacctatagacctacagcaagtaaagagattgaatt

SEQ ID NO: 197697 - DNA, 1000 bp, Homo Sapiens
cctttattttcttcagccctgtgtaggaaaatcctaggcagaattccccttcactgtttattttcggggcattcccctctcacctagtacttcctagaccgaggaaaaggatagacaactgggttgtgtacgtggagttattttggcttcgaggaattgcataaactgatatctgaggacagagaaatccataagggggaagtagaggaaagagaggaaaattggcagatcatggaggtgggaatgtgagaggtgtatgtatataggggtatctgttggaggagtaatcaaaaaaggctggacttgtaaagtagggccagattatgggtaactttcaggggcaccttacagagttaagactgcaagcatttgtagaaggggggtatttccaattttgcatgtgcacaatagaattattttgtaattaaattttttcccaccgatttcaacataagtttggaatcatcctgttccatttcacactgaagtgttgagaggttatgccatttgtagagttttgttagggttatgttcagagatcattaatttgcatttgagctcacaggggttggggaatttgtgcctgacactgtttcatagttaatatgttgggagccaggatacagttttaacagtattcacttgaatgcagctctggttccttttgtttaaaatttggattaaagtgcaaatcaacagactttgggtggtctcatcctcaccccgtagagaagcagatacatatgaccaaactccttcactatttggcaagacagtagtctcttctctcatgagatactaaagacgagaatagcaaggacattagaggtcagtcctgaggtaggttgccagagtttatttgagggaaatttgtctgaaacttgctttcactctccagcctcaactcatgttcctagttgtttcttttctataaaaatgaaaaattatgaaattttccatgaaggtctcagaggaaaattaaagaataaaataagaattc

SEQ ID NO: 197698 - DNA, 1000 bp, Homo Sapiens
ctagtccaggataactagaaagacgtaagatccccaggagccaggactggtggtgagacagtaacagatttttctattccagttgcatatttgagtaaacatttacaggggagggagaggtaaaagtgtgaagccctgaaaactgaaatgtcaaggaatgctatgactttaagttccttccttcctaaatattatatgtagtcatggaatgtagatatggaattatatcccactgaaacaaggattggaatattttgctcactgctgtatttacaataatccctggtataaagaagataatgaataatctttgttgaattaagaaatgaataaatgcaaagagaatgttcacacaacttttgttaacaatagtaactagagatattttggtttccttttgaaatacctaataattaacaaatcatctatcaaattttcatatactacagtaaaatacggctttaaaaatattaatgaaaaattacttttcttgttattgtgagtgtgcttagctgtttttctaaacaggttgcttttgatgtttttaaatcattttttggttctaactccacaatattttcttcgctgcaaacgtatttattggtataaatttcaatactggtaactaaggaggttaaaatcataagtgaaaactattctagtatttacaaatggcattttgaagaaatttggttaagagctactcattttacatatttgtccagcgccattacttagcactcagttaaagagaaatgtaaaattttcagatgttataagatgacttgctaaaatggattaggaattcaatcaaattgcctacgaagttatatttaattttttatttcatagctcacagtcagtttatagtcaaaggatataaatacttttaaatcagtgaaaattcattgcatattgattaatcatatgacttgttgaattccacatcttgtacaataatattatagtactctgaggagaaatattatcagatatactg

SEQ ID NO: 197699 - DNA, 1000 bp, Homo Sapiens
tgattctttgtattcttacttattttgtaaaatttatttaaccttcttctgctgagtgatgtgttaaaataccctacaaatagtgctctgtttcttcttgcatcttctgtagtttctgcatagataatcataactgttgtgcctttattatgaattgcagcttttagcagtaagtattcttctctatcttgtttgatgtcttttggccttacttctacgatttccgataacaggaggattgcagcctttgcattcttattattttcctttacttttcctttggatttcaccttttgaaatatgcacttcacttgttttttgtatgaagtacagcattatgttttgttttaaatatgcatatctttgtcttctaaaggagaataaagtctattcactctattgatatgatgtatgtgttaggcctcagctctatcatactatttttcttatgattctgtattgtatttaaagctactttatttctttagcttttatgtttgtttgttgttatcttgcttaaagcttctttgagtattcaggctagcttgaatttttattttagtggttatttttatatttacatattttataatatcctaatatcctaatctcattttttcttgcttaaccttaatatctagtcagttatggccgggcgcggtggctcacgcctgtaatcccaggactttgggaggccaaggcgggtggatcatgaggtcaggagatcgagaccatcctcgctaacacggtgaaaccgcgtctctactaaaaatattaaaaaattagctgggcgtggtggcgggtgcctgtagtcccagctactcaggagactgaggcaggagaatggcatgaacctgggaggcagagcttgcagtgagccgagatcgcgccactgcactccagcctgggcgacagagcgagactccatttaaaaaaaaaaaatctagtcagttatttttaatctttgagtcttaactgctacctacacaacagtcagtaa

SEQ ID NO: 197700 - DNA, 1000 bp, Homo Sapiens
ctgaaaatcagtgctctggttatcaagtggaaaacagtatcaaattacttatattcttcagcaatgatatttgcatattaattgaaagttaatgattaggattatttaagaaagaagtgaaaaatttcaaatgcaaattatttaaccacatgtgaacttccaagggagctataaatatatatttataaatatatatttaagagctatatgtacatacacgtatatatataattatatatctaagagctatatgtataatagtatacatatatactattatacatatatatatacaatcttgaattaccagtgccttctcagatcagcaagtgtaataattacatgactcttatttatacttggtttgccagagggtgcctaagtctctcacaatctcttatttccaacacaggaacttttgtttttgtttttgcttttaactcttaatttatttctattctcactaatccctatagctattctggatcttattccttctttcaatccttcaattacaccactccctacctcactatcacctaaagacttaatttcttacttcatcttgaaaatagaggctgtcaggcattaacaccacggtaggcagaaaaatgtctccccagagatgtccatagcttaatccctagaactggtgcatatgttgtctcaaatggcagcaaaaggagttttgcagatgtgattaagggtgtaaaccctgatatggagagattatcctggattatctaggtgggctcaatcaaaccacttgagtctttaaaaggagacctttcctggaggcagccagagaaatgccacaatagaagatgtagaagagatctgaagcataataagtacttgccctgccatttctgactttgaagctgaaagaagggggccacaaggcaagaaatacaacattcttcagaagctggagttgattctcagctgacagccaggaagaaaaccattacttcagtcatagaactgcaagactgaattc

SEQ ID NO: 197701 - DNA, 1000 bp, Homo Sapiens
ggggtgggtggtcatatttgccctgtctacggtttcctacaacaaaaccaaggaaatattttggataccccaaagcggtttatttataacattttcattacttattgaactttatttatgcttacctccttcctagcagatttaaaaatagttttgtttttttttttactgcttccacccccgcagcaaatgggctctattataaggaaaagaaaataggcaacatttatgccgatcaaaagattagcaaggttgctattggttgatttaaaagtttacttagagctttctggaagccagggtgaaaaggcaacatgattaaataagaaaactaattgtccagatgaaggaatgaaatgaaaggcaggtggataaaagaaggaacagcagagaggaagggaggaaggacggaaagaaatgaagaaatcctacatggtgcttgttgtaatcatgtacacttggccttagcgcagctcagtgatataagccccagaactttccagaacaaaaagagactggaaggaagtgtgttacatctgtgaggtttcaggtgctatattcaaagaagtctcatccatgtaacatatttattattttctgggtggatgtctgtggtcttctacgtaaaatgcttctgagggggaagtcacaccacactttgatccctctccatctcctccttgggaaaccatgagcgtgtccagccttgactagctgtggctggagggactatctgagcctctttctgccgtcttctttcatcctgccctcttaagagagggttggggcatgaggttatggtgcccagatgtgaggtgaaaaggcctgaaaatgcctggcttccggtttattcttactctgcttctgactgggcaagatagttagtcttcctgggcctatatttcttctgtaaaatgaaggggttggattcagtgctttccaggttgttttggcctcttaacttgtgtgagcatcacctgactttgatggttaggaattc

SEQ ID NO: 197702 - DNA, 1000 bp, Homo Sapiens
tctccctgtgtccaccaccccacaggcccacgtggagtactgccaggctaccactaatgtttacttaaggcccaggggctcttcagtcagtttgtagtgaatgcttctaggcctggagctcactgttaagggcagtgagctcccctctggcccagagcagatccagaaatgccttccaggagccaaagcctgggacctagtacttcaagaacctgcttggtgctccaccccagtgtggccaaactggtacctaaggtgcaagacaaagccccctttactcttccctctgcttttctcaagcagatggagtccctccttgtggccaccatagctgggaatgtgctagtgaagtcagcacatctcagagtctcaccccaggcccacggcatgtactgcttggctactgctgccgattattcagggcccaaaggctctatatttagcaggtgatgaatcctgccagaagttggtccttccctttaaggtagtggcttcctttttgggatagcgtgtgtctagaaatgcctgggagctgggccctggaatgagggcctcacgactcttcccagtgccatattctgctgtggctgagctggtatccaagttgcaaaacgatgtcttcattactcttccctgtcctctcttgaagcagaaggaagaagtcttttttggagctgcaagctgtgctgccagggactgggggaggtgtggtacaggcactcccttagatacctcagctcgtgtctcagtaacttgagtgcccccaagtcccctaagcccagcacagcactaggacttgcttaggagttgcagtccttatggcttagactgtctttcaggtttatttagggcaccgaagcactttagcctcaggtagtgaggcttgccaaactcaagttctgaccactaggatggtcgattcccctttggctagggctcatttaaatgctccttctgtgggcatcagctgagttctgtctggtgttgcagcactgaattc

SEQ ID NO: 197703 - DNA, 1000 bp, Homo Sapiens
ttaagtgcacggactgccctagattcaattccaagccttttctcccactacttatatgaccttgaacagatttctgaatctctcagtgccttttcttcatctataaaactggggttaaataaagatatactcatgtaaagactaaggacaatgcctgggttatagtaagtattcagtaaatacttactatttagttattagctatttagcatcagctattaaatagaagttctatgcagtagtggtttatattaataatccagtgatggctttgcctgcagaaggtagaggtagttgagtagttgagatattctgtctaacaaatagcacctttttttggggtggaggtggtcatttgattacatgaccttcggcccctctagtaaagaggtatggttgacttacaatgcaacctttaggggaaaagtcaggaagactcgttaaaattatctttgtttataatatcaggttctgcttattgcacatattttgtattaaatacatgctttatgtaattcagataagtacatacccagcttcctcttgaatataatgtatatagctgtaaatgtctgaagtatgtaatatcaagtatgtaatagtatagaacatatgtgaatttgtacctgataaagtatatctttgtctcaacaaacttagactatatccacagtgaaaaaaattaaaatcacttttatctttctattatcagctctaataatggactttaagcaaaactcttctgatactagctttctctgctcataaacctcaggtaagttttctttgtgtatgtcttcttttcagatcaacagaaacatttaaaaaagaagatgatcttgacagtcttattaatgaaatacttgaagagcccaacttggacaaaaaaccctctgtaagtcaagtgttataaatatgtagtaattctgtcattatttcaagacatgtttagaatagtcttaaagatgacacaagtagctacccattatcttttgaattc

SEQ ID NO: 197704 - DNA, 1000 bp, Homo Sapiens
tgcttagatcataaatgatacagtaattggtaacagaaggggactcaataccaaaccctccaaatgggatgctaggactgagttatttacatatttggtgatatgtggaaaactacttgccagagcaaactgaaacattaaaatgcagcatggagtggcatcttgataatgcaaattatcaacagtgcgcataggaggcaggctagtggagggcaaggacctatggtgagaaagactgtaggctgtctggattaaaattccagcaccatcacttcctagctgcgttactttggacagatcactttccctctctgggtctcagtttccgtatttaacatgaagataataatagtgacctgtcttgtagattgcttgtgaagattaagagtctatatatatataaatagcacttacaacagcgctggtctcataggaagcactatatgagctaactattatcagttgcacgattttatatgtaactcatgttaattcctttgagtcttcatcttttcttttgggtagagactcctcacacatgcttcagacttttctccagtttggaactaactaaaaaatataaagttctacctctgatgcttatgtcttcctctaatatgtggggttttttctcattatgctgtcatcagcatagagagagctcagaatgggtttttcagataacatttgctggaaataagattcaaagcctggagcctgaggaagctaggagtccatatcagagggccctttaaggccaggacctgagaaagaagacattcttagtgggtaaaaatagaggaattacagaaaatgaatatgatagggatacctgttgtcttggatttggcactagattagagaatgagagagaggcagggaaggaaggagggagaggaaacaaggtaaagggaaggaaatgataagggaaggggagaggagagaagaggagaaaaggaaagaggggaggaggggaggagagactaccccttgagaattc

SEQ ID NO: 197705 - DNA, 1000 bp, Homo Sapiens
caccacttagaagataaatattttaagaaaaataaaacaggtatatgcaatttaaaggagttacatcgaaagcaaaatataagacagaaaggtagaaagtaaagaaattaaacatgatgttaaaaactaaggagaaaaatacagttagctgtattaatgcacaaaacaaacattaagcaaaaataatttttcagaataaaaagtacttagataacaataaaagaatcatagtgtcttattatttatttggtaatatgacatgaattttatactctaaaatacattaagcaaaaacatagaattacaataagaatgtgcaaatccacctccactaaaagctgatttttataaatcagcaatagctcagactggaagaataatcgaagtgtagaaaatacgaacatcaatcttcctctaaagacacaatagaacattgcacccgatactgaaagaacgtacattcttttcaagcatgcacagaacatttacaaaaattgccaatgtactgaactatagtaggaggctcaaaaaatgtcagtcaataccacagagattgcgttgtctgattccaatgcaatagcaaaaagattacatcaaaatcctttttatttggaaatatcaacacatatttctaaataagtaattggtaatggaaatcataattgaagtattcgattggtgaaaaagtaattgcggtttttgccattaaaactagtggcaaaaaaaaaaaattacttttccaccaacgtaataaaataagtaattagaatgaagaaaaattaaagcactgtacattcatacagagactaagtgaaagctaacttgagggaaagccaaagtattacatttataaattacaaaataaaatataaagaacggtttaagcattttgctcatatagtcagaaaaagaacaaaaaagcaacatttaaaaaatagaatgatggatataagaatataagggttagaaccaataaaataaaagcaattaaaataggaga

SEQ ID NO: 197706 - DNA, 1000 bp, Homo Sapiens
tttccagaagattttcaatttgctttgccgagattcattagaggaatcactgcttatgacagctatagtcttacaaaatatatttcttaataagagttgaaagttgaaattacttcttgatccatagggtgcagagtgcatgttgtattagatggcttgaaaacaacattaatttccttgtacatctcagtcagagctcttgggtgaccagatgctttcatcaatcaggtaatatttgaaaggaatcttttttctgagaaataggtctcaagcttgggcttacaggctcagtaaaccatgctgtaaacagacatgctgtcatccaggctttgtggttacatttatagagcacaagcagagtagactttagcataattcataagggcataggtttttggaaacagtaaatgaacattggcttcaactcaaagtcaccagctgcattagcccataacaagagagtcatcctgttctttggaactttgaaaccagatactgtcttcccagtagttatgaaagtcccagatggcatctttcaatggaagcctgcttcatctacactgaaaatccattgtttagtgtagtcacgtttatcaatatcctagctagatcttctggaaaacttgctacagcttctacatcagcacttgctacttcaccttaaaattttatgttatgaagatgtctttattccttaaaccttaagaaccagtctctcctagctttaaacttttcttctgcagcttcctcacctctcccagccttcatagaattgaagagagctagggccttgctggattaggctttgacttatgggaatgttgtggctagtttgatcttagatccagaccaccaaaaacttcttcctatcagcagtaggctggtgttcactgtcctatcactcatgcgttcactagagtagcacttcttatttctttgaagaacttttcctttgcgttcacaacttggctaactctttggcataagggacctagccttt

SEQ ID NO: 197707 - DNA, 1000 bp, Homo Sapiens
ttcacttaaaggaagccatatcacttctctttggcttaacccaaattgccagcatcaatactcttgtgctttggggccatcattaactaaaataaggatcacttggacacagcactgcaataccttaacaatagatctgataagtgagatagctactaagtaactaaagggcaggtagcatcgacagcatggatagacgctagacaaagagacgattgatctcccgggagggtatgaggcttcatcacactactcagaacagcacacaatttaaaatgtatgtatggtttatttctggaacattccatttaatattttcagactgcagtcgaccaagggtaactgaaaccagggaaagcaaaaccatagataagggggaaatactgtagaacatttataagtgttagtttacataacttttcttgggattatataattattcaactgtatattatatcacacagaatcattgtgcttggggagtgtcccacagccacgtgaaagtgcccttcttgctgcctctccattcctatcttttctgtttgaacttgttcacgtacacataaataatggtgacttcacaaaaaacaaagttccataagacatggattgttttttaattgcaaagattgggctggagagctaaacgaaactacataaagaagaaatgccaatgtagaagatgtgatttataaagaggttccttttctttatcacttctcagagcaaaatcatatcctgtcaaatatactaggcaatttagtatttataggagacagtttcatctatcagattttactgatgaaaattacagcttgtttttgctgagtcaagaacttacctctggtcaaatcttaattctatcactatattagcaaaacttctgttttataaatgtgaatatacacaatatgtaagaagaaattaattcataaaataattaggataatggttttaatggagcatagtagctaccaaaaatgtccctctagatagaatt

SEQ ID NO: 197708 - DNA, 1000 bp, Homo Sapiens
gctccgcctcccgggttcatgccattcttctgcctcagagagtagctgggactacaggcgcccgccaccatgcctggctaattttttttcttttttcttttttcttttttgtatttttagtagagacggggtttcaccatgttagccaggatggtctgtatctcctgacctcatgatccgtctgcctcggcctcccacagtgctgggattacaggcatgagccatcgcgcccggccctctggttttactgttattgtgcctcagcttttgttctgatccagggcatggccagtcagaagaatggacattcatcctcctgtgtctctataggacagtgtctagtcttcagcaagagaggaagtgacgagggactcacagatgttatgcagtccactgtttccatatgatttctagtcatgtaactcctccctacagcccagggaacatgcaatgccttaattaaaatgtctgagttagcttaaatagtcttttttattatttgacagatatgctttggaacaacagacctggattcaaaaactacctttctatattgggattcttgtttccaggtctggtgaagttcaagggcatcttgaacgtggtgcacttggagacagtgagggaagcaggggtgaagtggctgctacctgagtcccttctggagctccattttgcttggtcttggagaaggcttctcagctgccctcccagctagtgtaagcactgcaattgtacctgttacctgagtcaacagatccagatgagaggtgtaggcaggagggtcatctctgtgcatttaggaaaagcagcactgatgctagtagagcatccagttccccaacatgatcacccctgaagccttaattcccaaatccttccaagccttatctgtaggggcttaatgaggacagagaggaagaaacagtcactctggcacaacaggacaatatattcagattaaatctgaaaatggtggaggcctgctgcccatgaattc

SEQ ID NO: 197709 - DNA, 1000 bp, Homo Sapiens
cattacctattacataaggttctcagataactgacatggcaggctcactcattaagggaaattcctcccttccattatacatggtagtggcaaaagcttagccagcagatggttatggttctcttgatcataaagaaatgttccctagtttcaatgaggtagactggtctataaggaaaatagaccagaagatccatgttttgatactagaaataatgcatgtaacattcaaagaaggatcttgagggcaggaaccaagacatctaaaaatttaaaagagaacccacagggttcggcctatagtagaaactgaagaaatatttaaagaatgaattacatttttattaagcaattctatttttccattgtcttgaagtacaaagtgttggtgtggcaaaagcctttgatatcaaaaaaattgtggaaatgattatgctcccctgatattctataaatagttcactcctttttcatggatatttacaatattaattggcagaagtaggaattatcttgtgggtacatgctactgtatggcatttttgacccagcaaccatgtcctagtcatgctgtgttcctgggctcctaattcagtggtgtttacctcatgaaccaaagaatgccccaaatgaatagtataccttagaaatcctttcagcacaaggcttacagtgtctcattctttcaaatatgatcttataatttgcaaagttcatttataagaaatttatatattaaaatattcctaagaacaattatactaggtaatttcacagtaggtattcagggtcttagaataaagtgggaccttgaaaatcagtaacttaaattttagctgagtattctcaagctacttttatcaactgtttagaatgagaggtatatgtggcagaatattaactagagccaagctatgacaatttggcagagactctacctcagactgtacgtctaaacaagtatttaagtagtaaccttgaatactgtttccaaaagctt

SEQ ID NO: 197710 - DNA, 1000 bp, Homo Sapiens
tgtgcaaatgttgggcaaaacactggtgtactttaaaagactaaatgttatggtatttaaataatatctcagtttttaaaaatacctcaggaaaaaaagcaggctggagaatttcaggtgtctcagaaaagatttctctttgcatgctagacctctttgcatgcctctgtgcatgctagactttagaacaggctagtagtatttagtattaataatacttgaatcattgtgtaatttgcagaattaagaaagttacacacatatatatgaatgaatcagtctgcttagtattaggtggggcttggaaatcagtttatattggagtttttcctaaaatttcagagaaacttcaatcaatccttttggacaggaggtggagattactgtaaaaggtgaaatgagctcctgagttgtatagttgtccacagcagaaatgaaaattagagggcacatgtcctcaggacctcctgatgctgtgtcatgtttaaaaaaaaaaaaaaaggaaaattagagcagtccttctaacttaataattattggggtactactttttcattcgtgccaagctttatcaatcttccaggctgggctgggagtgatatctactgcaggccagcagtgtcttcgggtgtctggtcaccattctaacctgtctatttgcatttatctaatcctgttcaaaaggggaagaggaggcactctatttatttactactcccttatttagttaaggctactgtgtgccagatgccattttatgctctgggtatacatacagaggggaagaaagcagatgtgcttcataagatggtatgaagagttcatggtccagtggtggagacaaataattaacaagtaaacacgaatccatttgttggaacaacatgatgaaacaaaggaaaatagtcaaagctgtgaaggaaaggaatagaatgcttttttcttttttttttttgagaccaagtctcactctgttgcccaggctggagtgcagtggtgt

SEQ ID NO: 197711 - DNA, 1000 bp, Homo Sapiens
tatagttagtgagggggtttggatgaatctagtatatcaataagctgaatgcattattgatgctttacttatatttaggacagcacaagcttacgtgactccaatagtagaccactactgctgtctgcttaatgttagtcctaggattacggaggaactttctctgatttctccattacacatctaaaaatgttttggtgggatttgtttctcaatttttattttagacacaggaggtaaatgtacagatttgtaacttagatatattgcacttagatagtaagcgtagtacctaaataggtagtttttcaacttatgacacgcctctctccttctcccctctagtagtttgcagtgtgtctattgtctctatgtttatgtccatgggtgctcaatgtttggttatcatttacacgtgaaaacatgcaatacttcattagcgagaacatgcagtactttgttttcttctcctgtgttaattcacttagaattatggtctctggctctatccatgttgatgtgaaagacatgattttattctttattacagttgggcagtattccacagtgtatatttaccacattttctttttccaattcatcgttgatgggcttccatatttattccatgtctttgctattatgcatagtgcagcaataagcataagagtgcatgtgtctttttagtatggtgagctaatttccctttggcatatacccagtaatgggactgctgggttgaatggtagctctgttttaaattatttgagacatttccaaactgctttccacagtagttgaactgagtatttaggaataatgttgagtctgtaaacagttgaaaacaggtcactggaaaagatatgtaaatagcaaatagcacaataaaagatgctcattattattaatatttattagagaattacaaattcaatccacaatgatatactgatacacagattctagcatggataattttttttttttttgagatgaattc

SEQ ID NO: 197712 - DNA, 1000 bp, Homo Sapiens
atcacattgtaagaagaaaccggggtgggtggtgtctccaggtcaatcaacttctgtactgggctctgaccacaatcggttttcagaccacaatgttaggagggtatttttacatccctccagttaacaaatacagcactggcatggttcaccttctcctgcaggtgaccattgacggcaggaattacattgtcgatgctgggtctggaagctcctcccagatgtggcagcctctagaattaatttctgggaaggatcagcctcaggtgccttgcattttctgcttgacagaagagagaggaatctggtacctggaccaaatcaggagagagcagtatattacaaacaaagaatttcttaattctcatctcctgccaaagaagaaacaccaaaaaatatacttatttacgcttgaacctcgaacaattgaagattttgagtctatgaatacatacctgcagacgtctccaacatcttcatttataaccacatcattttgttccttgcagaccccagaaggggtttactgtttggtgggcttcatcctcacctatagaaaattcaattataaagacaatacagatctggtcgagtttaaaactctcactgaggaagaggttgaagaagtgctgagaaatatatttaagatttccttggggagaaatctcgtgcccaaacctggtgatggatcccttactatttagaataaggaacaaaataaacccttgtgtatgtatcacccaactcactaattatcaacttatgtgctatcagatatcctctctaccctcacgttattttgaagaaaatcctaaacatcaaatactttcatccataaaaatgtcagcatttattaaaaaacaataactttttaaagaaacataaggacacattttcaaattaataaaaataaaggcattttaaggatggcctgtgattatcttgggaagcagagtgattcatgctagaaaacatttaatattgatttattgttgaattc

SEQ ID NO: 197713 - DNA, 1000 bp, Homo Sapiens
ctgaaatataatcatcattgtgaatatttaccgtgcacttcatctgtcttttactgtgcaatagtgtttttcttgggtatttctgatatcaaatccttgtggattgctaaattttgattttcactcaatttttaggaagcctgtaataaaataaaatgtgtttcctaagaaatttgataaaatttacagagttatgcacaaatgataaaaaataccacatttaagatagttccttaaatcaagatcctaataagggcaactttagtataacagactattactgaggattttcattttcattgcccgtctttacatacccagttgggttctagactggtacaccttgtatggaagagattagttagagactgaacaactctctcttttgtcttcattagtactggggcacgttaaatttcccagcctctctagcagttaggttggagccatgtaactggctctggttaatagaatagagggaacatattattgcctggccatgaaatatatgatttttccatgatctcactcactgtctggaagtcaagtactccaaaatagcagcatcacgtgatgatgagaacctagaccttggaattcttttcttggatggaattgctcagaaaaatagcttagctagaaacatctgtattggactttgtgtaagtgacaaataaacatttgttgaattaagcaaccaagattttagtttgttatagcaactaccaagtgctacactgagtcatacaactggcaaaaatgcaaggttttctgaggagttctcaaaacaagtaataatttctggattagaacataaaataaatatgctttttgtgattattcttttgtccttaacatttataaatcttccactcaaaaataattatacagtacatttagaaatgaaaatatatgtgcataaagaagatatacactattgcatctaagttttagtatggttttgaatagtactattataagaacaaatgtacatgaattc

SEQ ID NO: 197714 - DNA, 1000 bp, Homo Sapiens
ctcactcataagtgggagctgaacaatgagaacacatggacacagagaggggaacatcacacaccagggcctgttggggggtggggggcaaggggagggagagcattaggacaaatacctaatgcatgtggggcttaaaacctagatgatcggttgacaggtgcagcaaaccaccatggcacatgtatacctaggtaacaaacctgcacgttttgcacatgtatcccagaacttaaagtaaaattttaaaaaacaaaaaattagaaaatcccccattggattttatgttccagctgtagagtgattagacattccaattcgatgttgtttgtgaactactgaatagttgtcctaagagaattgtcctgaagcagctaggggaaagcccagggatggccactgccgcgccttcatggttctatcttggagaagcagcaacgtttaggctcttccagatggtgcctcaaccaggtgggagtgggagttgggctggggacagggaatatgaggtgggaaaggggtgtcaggagaggtgggtggtaaggttgagtggaaagtgaggggacaggaagatggttcagaaatccttcccatccctctcagttctcacccttgaagggcatttgtggtacaggctggggtggttgaagatttgccaaaaaaaagggaagaggaggcaagggagacaaggcagtgctccagaatggctggcacctgggaatacagccgtaaagtttccttctcaccccaatctcccagatgcaggccttccacccacaaaacatttttttaatgttcaaagtatcctctatctgtaccaaaaacaaaacaaaacaaaaaaaacctctcttttagccccacttctcatactagccactgccatttttccatcttgcttcgcagaaaaacctcttgaaagatttgcctgcagtccttacttccttatctcctattcactctttagccacctataattggatttctactctatagttccact

SEQ ID NO: 197715 - DNA, 1000 bp, Homo Sapiens
atctattattggaaccgagaccgatttggctatatgactctccgtgagtgtggagacttactggcttggtgtgaagatagcaggtttttatggataatttaagtcccactccctgccagaactctctacaaacaagtccaagtggtatcagctccacaaatcagctacagactacgctgtgttcttcgatgtgatgttctataagtggaacggggtcttttagggacttttctgaagtgcaccaagttagttcagtatgaggaactgcgagtcatttttcaaagagccggtaggtgctgcatcggagccctttagtgattgatagaggcatcacgtctcctctaattctgctggagtatttcatttttgagttgggtgttggactagtgcgttataaaggtattcatccatccatccactcatccatccatttagccatccttccattcattataattaaataattgcatggatatatgggtaacaatctgagtgacaaatttaccaaggagagaggcaagcattgctgtcatgggaaccaacaatagggaactctgtgaggtttccctgaagaagtgacaatttagctgagatttttaggttgagaggtagataacaaacctcttccaatatgtttacttttcttccctgactccacacttgtctgaatgcaatcgaagggtggccattgtctgaggcactgtccccaaccctcaatggctcctactaacagcaaaggccacgttctggggcgctgggatccttctggctcaccagaagggctgcacacagctctgctccaggttcaggagaggagagatgtgaactccaggagagccctctatcacaccggggacaggagtggtgtgtctgtgagcctgtgtgagtgcatgtgtgcctgtggagtgcaatgttgatttgctccatgtgccttcattcttatgacagtggctaccatttatttaatttacttcctattctttctgttttcatggaattc

SEQ ID NO: 197716 - DNA, 1000 bp, Homo Sapiens
cctcctccataatcgcagctactccaggggtcagcggcggtgcccactcagtccccatccctctctctcccctcccgccagcgccccctcccgccctcgccgcaagctggccccggccttgccggcccttcttaggggctttatcatgcctcctgcaagaatagagatcacacacgggacggaaacgttagactctcatcccttgtgcccattccttggtcacgggccaagctgccgcatccttagcggtccaggcatcgcggtgcccctcgggcccctacctggactaggcccacagccgggctctagggggcgcgcgatccacctccagaaggccggctgcgaaaatctacccagctactggcgacgtcaccgcaccgtaggctgaggattggctgactctgatttagcatcctaaaacttccggttccagagcttggctcgccaaagaccctccctcgagggagagaaaccacagcccccagaattcagcgggcctctccgagagcacggcgcgtctgaggatgcgtagtaaggataacgggcccggaagccggaagttcaaagccggcctccagccagagtgacggcctgcgcggactcccgccttagtgggcggagttgtgccgcgtctgatgcgcagttccctttatagcgcggcaagccgaatcctagaggctaacccggcaggtgggagggagaaagttgctttctgcaccaatagctgaggcgttcagggttgtccagggacgctaccctcacgtgtctggttccgagtgctgcgttcggctgtgctgggaagttgcgtagacagtggcctcgagaccctgcctgcctgaggaggcctcggttggatgcgaaggagctgcagcatccaggtacgctgccggctagggccgagcaggggctgccagtcccactgcctgcgcgcccacctgggccagtctccgcttgccgcgtcctcccatcccctagtctgcaggcctggtgcccttgaatt

SEQ ID NO: 197717 - DNA, 1000 bp, Homo Sapiens
gtaaaatgtgcggaatcacatactaacagtaatcatttggtgggaggaatggagcttatactccaaaggtttattatttttcaactgaacttgacttccacataaaagccagcaccaagccctaaatgtgaaatacagtggatggcagttgtgtataaatctgattaaaaacgttatttgagaatcctacttccaccagctgatttaagaagatgagcttggtcatttgataaaaaagaactagatttctaaactctctctctctatatatacctacatatatatatgtatatatgcagaggacctaattgttacaaaggtaatgcctaaaggatcacttggtagtgttttttgttttgttttgttttttgttttttgttttttttgagacggaggctcgctgtgtcgcccaggctggagtgcattggcgcgacctcggctcactgcaagctccgcctcccgggttcatgccattctcctgcctcagccttctgagtaactgggactacaggcgcccaccaccacgcccagctaattgtattttttgtagagacggggtttcaccatgttagccaggatggtctcgatctcctgacgtcgtgatccaccttcctcggactcccaaagtgctgggattacaggcgtgagtcacccaccacgcccagtcagtagtgcttttcttgaaaggagctcagcccaaggtagatttagtggtgattttcaaaacatccataaaagattattattccagagctattagtttggcataactcttgttccccttttgtaattacgatctggtatgcaattgctaaggagatgttaaaaatgtctatattatttacattggacattattcttcagaggtggtaagagctacctgcaagtcatacaatatgttaccaaaatactcagttgaactaaatatttttgtttttcaaatgtttttcatattgctagagatgggatttcgccatgttggccaggcttgtctagaatt

SEQ ID NO: 197718 - DNA, 1000 bp, Homo Sapiens
tccaattcttcccaagttccctgcttgcaaggccttctccacagtcaactttgaccttctctttggcttttgtcctttttttttttttttttttttttttagagtaaactattcttaaactcaaacaacccttccttcttttgtcactactatattccctgtgctttccagatgcaaggaaagtaaaatggcagggctgggcctgggacaaagggttctgggtgctagcagggtgtggcctggtctggcctgcggacagatggcttcctttttccctcccacacagacccaagcttctgtgtggaagcgtgaacctcagacacttagacgtctccagttccttcaggattgagcaagtcagggtggggagaggggggaagtggtaaagatctaagtctgtgtaggtcgtgtaccatctgtattcaaggagcatcttgggtaattaagcacctacccatgtccaaggccacgtagaggctttatagaattaaaatacctgctctcaaggagcttgaaatctgataacatgcataattaatgtaaagctagattaatttctcccaagaggcaaaggaaaaaggatggggttgatggatttatgtaagatttaaaaattcacccagaaaggactgtatgcatttttgctgtttggggacatactgtttgttaagaggaacatgtctgaccattgttttcttgaaccttgatggacaaagccaagtttggagagcatgcgccatctagtatggactttggcaaaaaaccataaagctcaaagcagactcgctttgtctactgctgtagcaggactaaagcaaggcaatggtgcggagcagccagtgtttgagaatttaatttgataacttgtgctgccccaccctgtgctgctcagaattgccaggaaatatggtgtttgggttttcttcagaccctacgtagcagtcattaaaggcaaaagccatgagccaactaggggaaggggacaagggccactgaattc

SEQ ID NO: 197719 - DNA, 1000 bp, Homo Sapiens
aggcagggagtgggcggcgggcttggtgccagccctgcccctcatgcttacttgccggagggccaggccaaccgcggcctgggaaagaacctgcagccccgctggcgagtggcagttgaaccgggaaacagcaaactccatgccctctttccttaacctgctcccaggttacaggctgctgtcctcagggtgccagacatcttctgctcaagagccagctgccctggccaccacagccccacctccaccaccaggctgggcatcccgaggctggcaggcatctcttcaggcagccgccagtcctggcactggctcccccactcagccccttggccctgccagccctttgaagctcatgcagcgcttcctgtttggggcgggcgatgccagggcccctcccccaccattgttctggagagaccataggtccatctgttgccccatggtggggcccctaggcagtgccacacgggagcagcaccacaaaggacgctgctggcagctttgcttatgtggggtgaggctgggccctgcagcaggttgagggtgaatggtggtcagaggcaggcctggggcgggcactgggataggaggatgctagaaagttctggtgcttgggcagctggagccctcagctttctcctccacctggagcatggagatgatattcagggagccatacgtgctgaagccaccaggagagggccaccattctcatgcctggattcccaaaaggaaaactgaggcagaggggcaaactttggtccaggatggccaataaaagggtcacaaaatagggttgtcatttcaaggggattggccccactctctgaatgcccagtaattgggtgctttcctctccctgagcagctttaccgtggctcagctttcaccttgaaccagcccttactgagcagtcagaaaccataccgtgaggtcaggagaggctgcgcggccttagtttggtggccagcaacccatgtccactgagaataagctt

SEQ ID NO: 197720 - DNA, 1000 bp, Homo Sapiens
ttcctcatagatatttgagctctggatgaaagatcaggaggtttaaaaactgaattgaaatactaacattcaaaataatttaaaaaacaacacttgcacaaaaacaagtcaaacagctttcaggtatttgtctgatgttactaaattagatattatcaaaactgatcctaaataacaatgctatcacactccccacaaaaacactcaagtcatactgaaaacacacaaaggaaaacaaatatgacttgacttcaaggacaggagcaaaatatatacatatatttttgagacagggtctcgctctgtcactcaggctggagtgcagtggcatgatcatggatggctgtagcctcgacagcccaagctcatgtgattctcccacctcagtcccacaagtatctgggattacaggcatgcaccaccatgcccggctaatttttgtattttttgtagagacaggatttcgccatgttgcccaggctggttttgaacttctggactcaagcaatccacctgccttggtctcccagagagcaaaatacagtactgctactaattttcctaacagtgtctgtgctgaggagactaacagccagccacgtaccagaacctctgacaggacaggcttcaggaatggttccgatgccccagcagcggccaggctcacagcagcactgcattttcgtcattctccccgggagctcttgtgcacagcggccattcaccaggcccgagaaacacatgcctgttctctgatctgtgcatgtataaataagacagaagatatggcagaattacctcaggttcttacaacaatcactgtacatgagatgaatgtaggtgaagtgactcataccacttaatctctgttatctattcctttcttcactctcttaatatctcagacattcattgagccagggacagaacaatgaaagacgtggagcagataggaggacagactgcagtaagaagctaaagtcaggcaattctgaagctt

SEQ ID NO: 197721 - DNA, 1000 bp, Homo Sapiens
tctcagaggagtacccggccgtgtgaggtgtcagtccgcccctactgggggatgcctcccagttaggctactcaggggtcagggacccacttgaggaggcagtctgcccattctcagatctcaagctgcatggtgggataaccactactctcttcaaagctgtcagagagggacatttaagtctgcagaggttactgctgccttttgtttgtctgtgccctgcccccataggtggagcctacagaggcaggcaggcctccttgagctgtagtgggctccacctagttcaagcttcctggcggctttgtttacctgctcaagcctcggcaatggcgagcgcccctcccctagcctccctgcccccttgcagtttgatctcagactgctgtgctagcaatgagtgaggctccttgggcataggaccctccgagccatgtgcgggatataatctcctggtgtgccgtttgttaagcccattggaaaagcgcagtattatggtgggagtgacccgattttcgaggtgccatctgtcacccctttctttgagtaagaaagggaattccctgaccctttgcacttcctgggtgaggtgaagcctcgcccagctttggctcacactcagtgcactgcacccactgtcctgcatacactttccagcactccccagtgaattgaacctggtacctcagttggaaatgcataaatcacctgtcttctgcttcgctcacactggcacctgtagactggagttgcttctattcggccatcttggctccctgcacagtgttttcaatttggttccattcttcccgtcactttcaggtacaccaatcagacgtagatttggtcttttcacatagtcccatatttcttggaggctttgttcttttctttttactcttttttttctctaaacttctgttcttgcttcatttcattcatttgatcttccatcactgataccctttcttccagttgatcaaatcagctactgaagctt

SEQ ID NO: 197722 - DNA, 1000 bp, Homo Sapiens
gtgttgggattacaggtgtgggccaccctgcctggcctacaagggtaactttttaaaatggtctaaaaacaactctatactcataaatttaacaaattggataatatggatcaatcctgcaagatccacagtctacccaaatcacacaaaataatctgtaaatttttgaaattattaaaaatactgaattcatggtcaaatgtcttccaaaaaacaaacctagaggttcttacaatttcactgactaattttacctaatattcaaataattaataagatgaattctacacaatttattctagaaaatagaagaatatggcatacttcccaacttattttatgagatcagcattttcctggcaaacacagtacactaggagaaaactgctgactaatattgcacctacatatagatgcagaaatcttcaccaaaatactaacaaatagaaatcagaaatgcatgttaaagaacaataccatgcccaagtaaggtttattccacatgtaaggctggtttaatactcaaaagtcaatcaatatgattcaccctattgattgtctagattggaaacatcatacaattctatcaaatgattcaaaaaatgcttttaagaaaaactatacccattcatgatttaaaatttaaaaaccaactctcagcaatgtgggaatcgagggaatttcctcaactgtgcaaagaacatctacagaaacctatagctaaattgtatgtaatagtgacagactcaatgctttcccatgaaatcaggaacaaggcaaagatatcctctccaagtctttctattcaacaaggtactggaattgtttgctggtgcaataaggtgagaaaaggagttaaaaagcatatacattggaagtaaaaaaaaatgaaactatccatacttgcagaacatgagcctatcttaaagagtctaaaagcaaacttccagaactcatgagtgagtttagcaaggtctcaagataggagggtgcaaagctt

SEQ ID NO: 197723 - DNA, 1000 bp, Homo Sapiens
aaaagtagaggcttgttaacgcataggattggggggacatgcgaatatgcatatgagaaattactttccctatatcagcaactctaataaataaagcaaatattgataaaaaatatgttgaaaattccaagtatagggaaatagctacaatttattgacatagaattacatagtgaaaacacattcatgaacatcgcttaaggaaaagattaagtaaaagtaggaatcgaatgaatatacttgtgttattctctagcaaaaatgaaagtttgggtgaagggtaagccagattcctgttctgctccctggagagtgggtctctcaggtctaacatcagagccagctcttgagggtgccaagttcctgccatgcaggggcctctgcttgcctctgagatagacaaagcacaccatttctagctgaaactctgagcacagagtagagcatgttctgttcttggcataatatatacatatctctgtcttttctatgtgtacagagtgcgttcactaagagggcacttcacaggggcttctgggtgcccttctgatctgaagtctaatcttatcagatctgatgactgggtggtgagttgtcagacagggaagggaatggctttttggagagaacttgaagagtattttctatggttgattaaactgggaaagagagttcttgctctttttattttatgaatacatgcagaatgaaaagactggaagaatcagcaaaatgatgttagtaaaactcttctccagctaaagtgcacagtgaaagaagtaaagccttaaatggtggcaatccagttttatagtttggaaggaataaaacaatgctatctcacatatggatattgaagcacaataatgcaaatctgtgtatggctttgttgtagcatactgctaccatcatttatataaatacagtaataaggatatttggttcattttgggaattactgttttattcttcaaaacatgttcaaacagtattcaagctt

SEQ ID NO: 197724 - DNA, 1000 bp, Homo Sapiens
atagctcactgtaacctcaaactcctgggctcaagtgatcacaggcatgttgccaccatgcccagctaatttttaaaaaatttcttagagacagagtatttctatgttccccaggctggtcccaaactcctggcctcaagtgatcctcccgcctcagcctcccaagtagctaggattacacgtatgagccacacattgtaaattttcgtttccccatgaaattcagcgagacagacattatgcttctagaaagtacagggagacccaggcactgcctgattcacagagaatcctgtcttctgtagacagcccaagtatgctacaataaaacagcagcctgtcaaaaataagatttttgaatgactttagtaatatattcaaatggggaagtttcttgggcttacatgtttttaaaaaaggccagacttttcagaatatcctaaaaccaggaacacaatactgccttcctgtacagagctttcaaaaccataaacagaaggcagatgcagtggctcacacctgtaatcccagcactttgggaggccaaggcgggcagatcgcttgagctcacaagttcaagaacaacctgggcaacatggcgaaatcctgcctccacaaaaaatacaaaaattagccaggtgtggtggcatgcacctgtagtcccagctacttgcaaggctgaggtgggagtatcacttaatcccgggaggtggaggctgcagagatcgtgccactgaactccagcctgggtgagagagtgagaccctgtcaccaaaaaataataataataaataaataaatacacaggtggaactgttcaaattcatctatatgaagcacaaagaatttctgttatgcatttgggcccctgcaagcaccagggcaacccagatgagttgtgtcagctgccttcacgctggttccaaaaataaaccatacccacttgttgcttatttaaaatgctgaagctcagatatgtgggggaaatggctaacagcca

SEQ ID NO: 197725 - DNA, 1000 bp, Homo Sapiens
aattcatgacttaatactaactcaggaccagattaatctctcttggcatgcttactcatctgaaaaagatttattagtagaaaattccttttgagctgacagggaggcacttgtcatcaacagaagagaaaccacatacagtagcatctatgctgatatgtggataccagagtgattcattttaagaaaacatgaactaaatatccaagtttacaggacaaattaagagctgatcacattaaaaatctgcatgtaaatatctttagaatgaacatatttcacagcactgaatcaaagcccaattccttaagcctctttaatgtgtctctaaattacttttccagacttatcttccactatccactctattcgctgatctatcctgatgcttgtcaaaggagagatctgtcctcttctttccaaaactgcggagcatgtaaatatcacgtgaagttttacccaactttccctgcaccatcatctcccacccaaaaattctgctatgtccgtttccctaatgactctgacaaactctgttggactgaagcattgcgactgtcagagtctcttggctttttcaagtggctggggaggaaaagcagctgccaaaaacgtattgaattaatttttttcccattatccctaagcatctctcattcattttgtcctaagtctagaccgctgtcccctgcttccagtctaccaaattcccccagcatactgcctctctttatcttgcatccttgagatccagacagacttccactccctgtacctctcgtatgtgcctcatggtgcccgtcactgtgtgtatgtgtgtactacctcccactgggactataagctctttagaaggccttctggttttttttaagacggagttctgctggtgttgcccgggctgcagtgcagtggcacaatatcagctcactgaaacctccgcttcctgggttcaagcgattctcctgtctcagcctcccgagtagctgcaattacaggt

SEQ ID NO: 197726 - DNA, 1000 bp, Homo Sapiens
taatatcagaagtaatccagtaaatcttcatggagtgtctaccatggaccaggcaggggccaaggagctgaggatacagctgtgaacagaacccctgacttcatggagtttacattcaggtggggccacaggcagccaaaaaaccccaatagatacacagcatgtgagggagtgacatacaacataagtaaaggaaagaaagcagggtaaggagagagaatgaggctggggaggggatattctgtatgggtggtacctgtaatcccagcattttgggaggccaaggtaaaaggatcacttgagtccaggagttcaaaaccagcttgggcaacatagtaagaccctgtctgtacaaaaatttaaaaataaaaaaaaataaataaatgaaaagaccactctgatggagtgacagtggagccaagacctgaaggggtgagaagttagcagatggcttgtagaagaagaaattaaagtgcttgatgtattttagaagttacaagtaggcctgtgtggctggagagagcatggaagggaagagtgggaggagaggagcacagagggccggaagttaatcctgcaggggacctttggcttttgctctgagttagacgtgagccttggagagtttgcacagaaatgggccaaggtctggtttaccttcttaaggataactcaggcttctgtgtgagggctggaatgcaggagacagggttgggcaaaaggaaaccagctgagaggctattgagaactgggaaagggaggctggtgttttgggtgagggtgggagcaagaggaaattgcaaaagtttatcttgttccggaaatattttgaaggtagagccaaaaggatttgctgatgggttggatgggagagaaagtgagtagtcaggatgacatgccttccaagccttttggccagacaagctgggatggctgccagttattaagaccgggaagacttcttgagaagaacctctttgaggatggaattcaaaagctt

SEQ ID NO: 197727 - DNA, 1000 bp, Homo Sapiens
aattagtgaatgaaatgagaaggggccttgcacagatcaatgatgacaggtacagcaccatcaactaacgagcattgagtcagcactgaggtcaagtggtggtgagtaggtaatgataggtgaaggaggcaatttcaaacatgttggcaacattttttacttacaagatttaaaagtcctttacgcagccgggcgtggtggctcacgcctgtaatcccagcactttgggaggccgaggtgggcagatcacgaggtcacgagttcgagaccagcctgaccaacatggtgaaaccctatctctactaaaaacacaaaaattagccaggtgtggtggtgtgcgcctgtaatcccagctactcgggaggctgaggcaggagaatcacttgaaccctggaggtggaggtggcagtaagccaagattgtgccactgcactccagcctaggtgacatagtgagactccgtctcgggggggaaaaaaaaagtcctttatgcatttaagctgaaggaaaaaacacagttaacagtaaaggacagaaagactggttcagacatctctccaactttaaaaacaaaatatcttcagagttttgaagataaaataattttgaacttgggcaaaaataattttgaactggggcaaccaagtaagttttccatgtgtgaaggcaacagaaaacattttaagatatgcatagacataaaacaacatatcttccaggaatatttcttgaattaaagaaaatatgcaacaaatttttaagaacttaaaagcaaaatcttatccttatatataaaatataaaattaccttttgtagaaagaggacaatccttatgagcatctgggcacggagttcttccaaggtaaacaatgttcggggtgttcgaatgaaaattttggtcttcccataagctacatcatcctgaaaaccacaccgttcaattagtttcttgacagcctctttgtctgaaggaaggtcatggttgggccaggtgaattc

SEQ ID NO: 197728 - DNA, 1000 bp, Homo Sapiens
ctttcttatgtttgtattcatctgcatatcttttggtttcttaaatagtgaagtggtgagttttatcgtcaatagaggatgatttagcaaagcctaatttgtggaagtcttgtaggatccctttctaggcaggtaacagaggtttgaagaagatggcttttaagtgagggtgtgccccagacaatgacaaggagatgctggaaacatcataggacaacattttcacatacttcctggaaccagtgctatacaataaatctaagacttttgatgttactagtcatctgcgggtaaacagccacttggaattagaaaggatttgggtattgatttttctattcttaatctcttgcgaagcatagtggccaccgcttgtccttggcctgagagtaggtgcatataaaagataatggaatgttaccacccttatttggaatgagcactgctcttgttttgagtacttgggcaaaaggctgggactaaggagtggctgccagagggtagtggagggtgctgcagtgtactgcaggatgctggaggttgcttcagggtggcagagggtgctggagggtgctggaggctgctggaaagtgctagagggtgctggagtgcacagcagggtgctgctgaagggtgctggagggtgctgcagggtgctggagggtgctgcggggtactgcagggtgtactacatgactctgagtgtacctcatccatctcttcctataccctccctgtgtatgcattagcagctaatttctttggcctgtgtaatttttctggaaataggaataggaaacactaaatcaatgtttatttcaagaatctgtttgattggcatatatgttttatttcctgggatttttcatgtcatttactgggtatccatgctggctgtcagtttttttccacttttcctcacataagtgttcaggggcagtacctaaattcttatcccgactttatcttttcctgtttccctttttgaaatcctgagggt

SEQ ID NO: 197729 - DNA, 1000 bp, Homo Sapiens
tggctggctgttgctcagcttccgcctttctaattctcccgtctcctccatcaccccgccccctcctcaagaaggcctttgtgcaggacaatgaggaatctataaattccgggggacagggatggggggaggggaacactggtcacttcagctccccccgtccaccctgggggccctgcatagatagcaaggaggggcttccatggagtggccccatcttgtctgattcacactggagcccagagacagaagtgggccaagccccaccactggctttcacagatgaagaaactgaggctcagaggcagagggcgtctccagtccctgcttcattcactctgcctctcactcatgtattcattctcctcctcttacctatgccctggtccttccctcacgcaggcattcactccacaaatacctatggagttctagatgagcaccaggccaggtacagagggggcaatggttggtgagacccagcccctccaccagcccccaactctggagggtcatacagcagtgagctatggttccagaagagccaaagcatagctccagccccagttttcccggctggcaacctgcaccctttcatcagcaagccctacacggctttcatgagcattttggagtttgatcctggtggggtccctgggagacaggtattatgtacgcctcccccaccattttgctaatgtggtctcaagagggtaaacggttgccctctggtgggcaagatcacccctctggtgggtagcagaactgaaccaggaaccaccctccgcaccactccaagtgctgtggggactcagaatatgggcgtgggctgaggctcaacttcctcttctaccacttgcccagctggccctgtgcctgacccccatgctgagctttccctggtgttcttcccatcttcccacagtagttattaaatgtcccaggctcaccctgatttctttaccccactcatctatctgttggatagtaataatgaatt

SEQ ID NO: 197730 - DNA, 1000 bp, Homo Sapiens
aagagcaaacagcaccagttcctttaagcactcctcctgcaggcctatcaaggtgcacataaagaatagcccatggcctggagcagaagctcacgtctgtaatcccagtactttgggaggccaaggcgggcagatcacttgaggtcaggagttcgagcccagcctgtccaacatggtgaaaccccgtctctactaaaaatacgaaaatattagccgggcgtggttgtatgcctgtaattcagctacttgggaggctgaagtgaaggatcgcttgagcccaggaggcggacgtggcgatgagcccagatcatgccactgcactaaagcctggatgacagaatgataccccatctaaaaaaaaaaaacataaattaaataaaacaggcaactgagcttgtttctgggttaaaaattaaacaagttggccttccttcatcctgattaaagttagccttctttgccatagtccacgactttagataattgtcctgattttggccacaaacaacctgaaaaatctactcaaaacagtgggtttttacagctgggaaggattatctttttatatctgagaaggaataaaaacaacaataaattagaggcaactgtcaattaacacatcattcattatttttaagaatcagttgttttatttctatgtctcacaaatcagtacatttattatgctatattcacaaattcacaaaaatcactgggatgaatgggcagggcaatccaattttcccttatattttctaaggggaaaggtattttttgattgacgtgtgctgttaaacagtatttgtaaagcacttaatactgttaccttcccatattatttaagctttatttataatgtgagacattttcttcaaacaccttgtcagcatattgacaaatgtgttatttgtaaaaacctcagtatgtttttcagtttaaccaggagatggtgctatttaactgggtgaagcaactgctgaattctggaaaagactgaatt

SEQ ID NO: 197731 - DNA, 1000 bp, Homo Sapiens
gccatgctgtttcattccatcttgcatatgtttgggtgactgtggcctttggggctctgatccactggggtgatttctccttgacacccttctgacccctgtgtattaccccttgaggaccaggtatttcctgtcctgttcacttttcttcaggctataggcacatgtaagcaaaagagcagggcaggaaagtgagctcaccaagttgtttacgcgtaggccaccctataatgcctgtgctgtgcaatctctcctgagaacatgcagaatgtcttctcattctgccagggacagttagttctcgttgtccacattttttatctcctgtcgcttcatgtagcagttaccatctccactctgctgaaattagaggagaaaaaaatgtaagaaacccacttaattttttcctctttagatttggggatagtagagtgaatctcttagagttgagtttgggtgaataattgatagagcttcaggaaggtaggaattggaaagtggctctgccatcttttttgatgggcttcatttttattttattaccttttcttcattcccttaggtgttaggggatggagactctggggtcaggcctcactctgccatatttacccagaagccttcttggggcttgcctgtctttctcttttcaaatgaaacatggatgtgggaaaggggagttcattgtagcccagtttggcataaaaagaggtaacagcccacatctaaccttgacaatattttaccattatggagtttcctctctttttaattttctgttcaccctcagattatgcaatgtaatttctctggttttaaatacaaagtaaattaaaagtagaagcacttggtaatactgtagctatagagaataaagctaagtgagtatgttatcattgtaatgaatcattccttttcattcattcactcatccagcaaatatgtagtgagtgcctactatgtgcaaggcactaccctgggtgcctggagtacatcactg

SEQ ID NO: 197732 - DNA, 1000 bp, Homo Sapiens
aatgaagaatgaggaaggaaaaaccccacataaaacgatgtgaaacaggatgttctagagcaatactccaggccaggcacagtggctcattcctgtaatcccagcactttaggaggccaaggcaggtggatccttcgagcccaggagttcaataccagcctgggcaacacagggagacctcgtctctactaaaaatagaaaattagctgggcatcgtggtgtgcgcttgtagtcacagctacttgggaggctgaggcaggaggatcacttgagcccaggagatggaggttacagtgagccaagatcgtgccactgcactccagcctgggcaacacagcaagacactgtctaaaaaaaaaaaaaaagtggccaggtgcaatggctcacgcctgtaatcccagcattttgggagcccaaggtggatagatcacctgcagtcaggagtttgagaccagcgtggccaacatggtgaaaccccatctctattgaaaatacaaaattagccaggtgtggtgacgtgagcctgtaatcctagctacttgtgagtctgaggcaggagaatcacttgaacccaggaggcagaggttgcagtgagccaaaattgtgccactgcactcaagcctgggcgacagagcaagattccatcaaaaaaaaaaaaaaaaaaaaaaaagctgggcacagtggctcacacctgtaatctcagcactttgggaggccaaggcaggtggatcacctgaggtcaagagttcaagaccagcctgaccaacatggagaaaccctgtttctactaaaaatacaaaaaattagcccagtgtggtggcacatgcctgtagtccctcagacctgtaagctactcaggaggctgaggcaggagaatcgcttgaaccctggaggtggaggttacaccactgcactccagcctgggcaacaagagcgaaactccgtctcaaaaaaaaaaaaaaaaaaaaaaattctactcctgaaggaaagaatcagaaca

SEQ ID NO: 197733 - DNA, 1000 bp, Homo Sapiens
gacagagtctcactttgtcgcccagagctggagtgcagtggcacaatctctgctcactgcaacctccacctcctgggtttaagcaattctcctgcctcagtctcccgagtagcttggattacagggacccgccatcacacctggctaatttttttgtatttttagtagagacagggtttcaccatgttggccaggctggtcttgaactcctgacctcaagtgatccacccatcttggcctcccaaagtgctgggattataggcatgagccaccacaccctgtttgattccattttaagtcatttttctgagctcttaatgtcataaaatctactctctgagaatctactgagcccaagtggccatgagttataatgggataaggaaaaccagtgttttcctttacaaatttgaacaagtctgcgttcttctgaacttcttattctcatctataaaatgggctcttttctggctcatttcacttgcccttcatgaggcatcgtgagaggaggctgggaatgcagcagcactgtatggatggcaagcatgactggggattaatgttcccatggattcactatgaacttcagaaaaagcccttcctctcttcctcatttagtcacttgtttgccaggatctacttattctacaggattctagcctctttcattcaggaagctttccttctttttttagagacaagtcctgctatgttgcccaggctggccttgaactccctagctcaagagatctgcctgtctcagcctccggagaagctggggcttacagacatgcaccactgtgcctggctcagaaaacttttcttctaagacacacaccattaagcttccaaattattaatctagtcatttctctcttggtttttttttcctttcatatgcttcccaactcctcccacatcttctttctctgcagtgttttttgtcatagttcttcactgtccaccatatcccaggcctcatcaccatggcaatgaattc

SEQ ID NO: 197734 - DNA, 1000 bp, Homo Sapiens
aaagatccaagttaagtatttcttacagtctagcagcagtgtaaataacctaaatatccttagaagactctcagaaataaacagaaagaaactacctctcgagaaaggcagctttatctagaacacaagtcaccatgagtaaaagccagcaggaataacagaggcatcagaattggacctgtaaatacttctttattggatttagcagtcaaaaatataaatatttttagctgggcatagtgatgcatacctgtagtctcagctgcttgagaggctaaggcatgagaatcgcttgaaccccggagacagaggttgcagtgagccaagatcgcgccactgcactccagcctgggtgacagaggaagactcggtctcaaaacacaaacaaaagaaagccaacaataatataaaatattttaacatgcttcagaaatttttttttagccaagcatggtggctcacacctgtaatcccaacactttgggagataacgcaggaggatcacttgagccacaggagtttaagacaagcctgggaaacatggtgaaaccccatctttacaaaaattagctgagcatggtggtgcatgcctgtggttccaactactcagggggctgaggtgggattgcttgagcccaggaggcagtggttgcagtgagccaagatcgatcacaccactgcactccagcctgggcagcagagcttgactccgtctcaaaacaaacaaaaaaatttaaagcatttaaaataggagtcttaaaagagactaaaaaaatgactaaacaatttttaagaaaatggaattctagagatgataaatttaaaaataggaattaaaaattcactgaattaaacagattagagctagttgaagagaacactggtgaactagaaaattgatctaataaataatccagtagatggcttagacaaagagaaaagacaatgtgaaatgagattaagagactaaaaagatggcctaaggtgctctaaaagaatt

SEQ ID NO: 197735 - DNA, 1000 bp, Homo Sapiens
tttccccaacacaagtataaactcttccaggaccacagaatcaagacaatctagtatagcattatatatagttgatgctgtgtgttttatacccttcaccaggacctcaacattagatgcagaagaaatgcttccaggtttctgaaacatttttcaaatagataatctgttttcaaaacatcattcaaccttgtactacaaattccctaacctagtttctccaaagcttttttgtttaactgtattcaacaacaacaacaaaagtctcacaattacaactagattgtactacacagcaatctttggcatatctgtacttcgaagagattcgtaatgtctgtcagctgtctatttaagagacctaggtgtcactcttctgtttctcctctagaacacgcagaaatgaccaaaaacaggcgaagtgaatcagttattgcagaactgtctggaaagggagagggtctggtcaccccataggcatacaatgggtacaagttgactactccttattagaaatgcttgggaccagaagtgttttggattttggatttttaaatttgtaatatttgcactatctatacttactggttcagcaactcaaatccaaaacacctaatgagcatttcctttgagcgtcatgtcaacactcaaaaacttcaggttttacagcatttcagatttcagatttttggattagggatgctcaacctttactggtaaattgaatagagaaaaaaacagtttaatgtggtggtaaagagttcagagtctagcctaaaacagatgatctaggtattttgtgcagattaaatcagagaaactcagatatgtggtggtatttaatggtacctgcttagcatcccattgtcactgtcatttttataacttacaaattagttttacgtgcattatcccatctctgtgatccttacagtaagtaaaatcattcctacttacagagaaaagataggttcaaggagataaataacttgctgaattc

SEQ ID NO: 197736 - DNA, 1000 bp, Homo Sapiens
gagagggaggaacttggacttctctgcatctttagttggagtccaaaggcttttcaatgaaattctactgcccagggtacattgatgctgaaaccccattcaaatctcctgttatattctagaacagggaattgatttgggagagcatcaggaaggtggatgatctgcccagtcacactgttagtaaattgtagagccaggacctgaactctaatatagtcatgtgttacttaatgacggggacatgttctgagaaatgcttacacaaacctaggtgttgtagcctactacacgcataggctacatggtatagcctattgctcctagactacaaacctgtacagcctgttactgtactgaatactgtgggcagttgtaacacaatggtaagtatttgtgtatctaaacatagaagttgcagtaaaaatatgctattttaatcttatgagaccactgtcatatatacagtccatcattgaccaaaacatcatatcagcattttttcttctaagattttgggagcaccaaagggatacactaacaggatatactctttataatgggtttggagaactgtctgcagctacttcttttaaaaaggtgatctacacagtagaaattagacaagtttggtaatgagatctgcaatccaaataaaataaattcattgctaacctttttcttttcttttcaggtttgaagatgccgcatttggattggatgaattccaaattctgcttgcttgctttttaatattgatatgcttatacacttacactttatgcacaaaatgtagggttataataatgttaacatggacatgatcttctttataattctactttgagtgctgtctccatgtttgatgtatctgagcaggttgctccacaggtagctctaggagggctggcaacttagaggtggggagcagagaattctcttatccaacatcaacatcttggtcagatttgaactcttcaatctcttgcactcaaagctt

SEQ ID NO: 197737 - DNA, 1000 bp, Homo Sapiens
ctgaagaggctgagttttagaagtaaatctttcaattggtgtgaataaagaatcatgcttaacaatggctgaaaagaagttcctacgttgtaagaattccctatctttgctttaccgtttttcaaaaagaaacatcaacaaccaatttcaacacagagacccctcagaggatgtggctagcagctgtgacagagctgttcaatctgagccagcaagtcctccaaatggacgctggtattttccactggttactcttagacaaatttgggatctttgagtatgctgaccctctgtggccttgaaattctgatacccggcctctgcacaaaaaccatgttcccgatgcctccatttgagctgtccattcatctttctctcccatcccgagggggtgtcctcacaatcctaaaccaggctgctgggctgaaggagcaaagggcacagccttccctcgctgctgcgcgccaacctggacctcagcgtctccctcccaacacgacgtgtcccaaggaaccacagacagtggtcagggctgggtgtttcccaggtgacaactgaccacccagctgccgtggacactccacagagcaccagaatagaaaggggccagtggaatagagctcacagtgcagaacacagaagtgacttgttcaaggtcacatggctgctcaactggcttctaaatccacttccacagaggacgggaaaccagcttctgagggcgtcagcgcaggtttctgaggttcttattattcacctgttgaaagttgttgattcagtctcagaactgagactgaatcaagtcttgatgcctcaaaaggggtgctctttctttcaggtacgcagcatttgggacaacaacagactaagagtgtcactgaaataccagcctgggggttatgccgcaaggcctcagaaaggaaattaggctccaatgaggcctcttcagtactttcgatgggtaaaccttcttggagatggtacaagttttgctgaattc

SEQ ID NO: 197738 - DNA, 1000 bp, Homo Sapiens
tctccctttaaggacccgaatccactggcatctaccctgttttgcctgtggtcatactctgtctggcacagcttttttctcctgagtcactttttctgccctagcttcctcctgagcttttttctttgatttttaagagctaagatgtagcagaaagcaagtgtcaacattcttttctctcctcttttttttttattgaaacggagtctcactatcacccagggtggagtgcagtgatgcgatcctgatcccggctcactgcaacctccgcctctcaagtaggattttagacgtgcgccaccacaccaagctaatttttgtatttttagtggagatggggtttcaccatgttggccatgctgatctggaatccctggcctcaagtgatccgcctgcctcgcgggagtgctaggattacaggtgtgagccaccgtgcccagcctgatctctcttgttaatgggacacgtggtcccccccttcccccaatgactcattcccctgaaccccatccccctccgggtggctttcctgagtgccccctggtgactgtgtgcctgcccccaggtggcggctgggtctcttcctcctctggaatgtgtttgtgttccctcgaggccgacatggggaccctttggctcatgttcccggctctcagtagagggccctctggcctgcacgctggcactcattcatctggccccttcctctcaggcttagtgagttcaaggtcagggcaaagtagaccctgttaagagatgtcagctggggaacagacacccttcctgcaggcctggagtaacaagagtgataaggacgccttcctccctggactgacatatctgggtgaactgtggcttgaagagggctgggagagcagggagcctggacaggctgaccccagcccagcacgtgggagcagaaaggccttcttgttctttacgagttggaagatgataagagcctcatgctgatcagattcatgactcccacccggaattc

SEQ ID NO: 197739 - DNA, 1000 bp, Homo Sapiens
tgcctggcactagtgagtacattttctttgtcctaatccttagattagaggcttcatcttgtccattttctggccctgagaaataagggtaaacattagcattatttcaaagcacattaaccatctacaagaattatactctaagctaagccaagcgacaagaccatattgagttgttctcagtccactggtagctggcgtggtcagtagaaaaccctatagaaatgtctagtctctgccactctgaaacatcaagcaccctccaagcttctgagatctaagacataaagtcaccctttggggaaacacacatgcaacatacaactgattttccaaatgttggatatattgacaaaacagagcagaaaggaaattctacacgagggtggtgggagggggtaaactcctaggatcgcattcaatgattgatgataaaatggaaagaacaccgctttaaagatcagatgactatatgtatgaatctctactgtgtaatctcggacacatttccagacttcctaaggctgaatttcctcacctgtaaaatgggttgatagagtttcctgcatataaccaccaaacagccacttctagttatggttcccgggcgtaacccccggacctgcccatcatgaggtggagactttgaagcactcccagcattcgagaaaccgccactgtgcaatgtgcaagagcttgggcctctgtgattcacgtcatggtgtcctgtattactcagctcatcctcccatctcaccaatcagctgttttcacagtgagtccatggaagtcaggggtcaaagcagcactttaacgaatgcccacaatttcctgaacagagttttcaagtaaagccaataacgtaaggaaagcgctacccacttccatcaattcatttctgcccctgcttcctgaaagatcccaatgagtgattgtgatcagctccccgaaccctttcagctaattggcccaaaaaaaaagaggttcgggagtggaattc

SEQ ID NO: 197740 - DNA, 1000 bp, Homo Sapiens
gaggctgcagtgagctacagtgagctgtgattcatcccactacactccaacctgtgcgacacagcaagacatcatctctaatttaaaaaaaaaaaaaaaaaaaaagaaggaaagaaagaaaaaaggatgatacaaaataagccgagcgtggtggcacatgcctgtaatcccagctactcgggaggctgaggcaggagaatcgcttgaacctgggaggcggaggttgccatgagctgagatcgcgccactgcactctagcctgggcaagaagagcgacactccatctcgaaaaaaaaaaaaaaaaaaagaggcaggtgcagtggctcactcctgtaatcccaggactttggtaggccatggcaggtggatcacttgaggccaggagtttgaaaccaacctggctaacatggcaaaacctcagctctactaaaaataaaaaaaaattaaccaggcgtggtggtgcgcatctgtaatcccagctacttgggagactgaggcaggagaatcacatgaacctgggaggtggaggttgcagtgagccgagatcatgacattgcactctagcatgggtgacagagggagactgcatctcaaaaaaaaaaaaaaaaaaatgaagaagcggctgggcacggtggctcacacctgtaatcccagcactttgggaagccaaggcgggtggatcacgaggtcaggagttccagaccagcctggccaacatggtgaaacccccatctctactaaaaatacaaaaattagctgggcgtggtggcagacgcctgtaatcccagctacttgggaggctgaggcaggagaatcacatgaacctgggaggcagaggttgcagtgagtctagatggtgtcattgcactccagcctgggcaatagagtgagactctgtctcaaaaaaaaaaaagaagcaaatatgaagactatgtagtcttgaagaggacacaatcttttgaacaagacacaaaatccacaaactgtgaagaaagaattc

SEQ ID NO: 197741 - DNA, 1000 bp, Homo Sapiens
tccccataatggcacacccccatctgcaaacaatgaaaggaaaagggtcaagaaacagtattaggctgaaaagtcagggtctttattgtgtgtatgcgggtgaatcggtttgtagcctctcacttggtggagggggactcagttgattgctatggttgttcttctctattaagtcccagggttggtgatggtattggaatgaatcggtttgtgcttttatgtaccttagagcttgggctgtcagatcagacctggattctaattctagctctgtcacttagtggctactaggacttggagaggtcagaacctctctgagcctcgtatgttaatcttgaacatttaaatatcaacacctaccttgaaggccgctgggaggaaaaaaatgagataatttatgcaaatcacttagcacagtgcctggcacagaatgaacacagaatgagtgcttgttgttatgaaatacttttattattaaatggtgttagttactagtttattattattgctgtgggtctgctccaaaccagcggtaaccgtaggagtttgttaaggggtagtggatagtttgtgttaatttggagattggggttagggggctggggattagcttcaactgctttgtgcattttatttgatgaaggctttaggcagatttgtattgctttctttaggattatttttttttctcttggacaagaaatagctaagactattccgtgggccttgaaaataaaataattgtattatggttcttgattttgaagcaagaccccagccccctcccgtgttgatctctggagcctttcgttttgcagagggactccacagtttctctagtggggacagggctaggctgaggggtgtgtaaaaggttggggtgggtgggtggagagagactagtgctgggggctgggggggcgggtagttaaaggaagagaccggaagggaggaggagggagcctgctggtggggagggagggaggggaggaggaggtgg

SEQ ID NO: 197742 - DNA, 1000 bp, Homo Sapiens
gaaatgatgaacactgtggtatttgggacactgaaaccaaacttgatcacgacacagatatcagctcaccaatgactacaggttgcaaagagaagtgcttagctgggaggataactggaactgaggaggtttttgataaccaaaaatctggatttggaggaaaaatggcaatgttcattatcctaaataaaaggttctttctttttttaaagcttataagcacatcaggaaactcagaagatttgttcatgtgactgagcaagcctctctgcctgacctcctttggggtgattaatcccacccagtctggccttcttaattagctaaacacatgctcttcccagcccagttggaatctttgaaatttcaggtattaattcatgttatcacaggactcagagaactacctctccacttctgttgcactacaatatgtacctcattgaaaccatgcagtaaagcagatgattgagaattaggcattaaatacatcgtaaatataatcaataatatatcaaaattcaaagatacatagtaacttaaatgggtaaaattgtgctccaggtccccctgccaaattggacataaatgattttgtgttacatatcttgattttttaaaagagccaacactgaaatgtatgacaaaaaatacatacacaaaagcctaatacactatacactgtgttaaagctaatctcatagctgtcatcatcattcatcactgaacacttctcctgcctcaaatactttttcaggttatgagtagcccagatctcacaaaagaagtcctctggggagttttaattgatatcttcctactctccccaactttttaaaaatacatgtctttgtaatgagcagagagatgctaaagctcactacatgggagttgggactgtcattcttttcaagcaatagccatttccatgctaagtatttgagtctcacactaaagtcttgaattgaaagcctatgagaatgaggactcctcagaattc

SEQ ID NO: 197743 - DNA, 1000 bp, Homo Sapiens
agatgatgcagaagacaattgtgctgtctgagatcagagtagaatcaagagatcagacttgactttgagtttagtgaactgtaaaatcaagaatttcatagcatatcccctattaatcaggaaggcagtatttaggagtagaggctttggaaatggatagaactagattccaggctggaactgggaaaagttacttgcagacttccagcctcatttcctcacttgtaaaaggagggtggttatagttcctgcctcgttcctgaagtgaggattcaatgagaaaattcaaagtgcccaataaagcaccaggccccagtaagtcattaataaatgatgggtaatggtgatattaaatgctgtccattttatttgactatctttcagtttatttaggtaaatcattttgctgtctgtaattctgcaaacctctattatactaagacaattatttagcaatttaaaaatgtaaagtacaagtcctttagaaagttttgaaatgttttctctggagaaattagaaaaaaagtgtgcttaaggatgcaatttttggggcttgtgattacactgagatgaagctaggaagttattaatgaatggaatgactgagctaggttgggtcatggcaacctcagagacttcctttctccttggagacccccaccaggcaacagaattaaaaatcaatccagcagactgattttatgaggattaaattatgtcagaccaatttaatttccttctgtaacagagggacagactttggtgacacaggaaagcaatggatatcacataccttggcttcagctagctcttaaattctagcctacgtaacagtcaaatctaaaaaattaattcaattccattgagtagtggagatgatctccaaaaacaggaaccacaggctcaggatcattttttgagtaagaagatgcaagaaaccttcttctttgtggaactgggagaaaaacatgccccctccctgcagtgaaattcagaattc

SEQ ID NO: 197744 - DNA, 1000 bp, Homo Sapiens
ggtaactcctaaaatggccactacctgggtaatagaaccctggaagcaaaagacatagaatatctattggtagaatgtgctggactagggagaaagaagttgagcttcattcatatacccctgctcaacttcctaccaggaccatgccacgagtctttctggagaaatatcatttggacacctgccagatgaagagaactggtggtcaattggtaataatcagagaaactgggacaaccaacagaaagggacagaaatgtttcccatgatctagttgaggttgttcatacaatgaaccacagttatgtcctgctaataaaagggcaactaattttgaagggcaattatgtaaagaaatgtaattttcctctccttcctccttgccaccccaactggtatcgggatggcaggagtcatgtgtggttttctatggctgtgtaacaaattaccataaatgtagtagcttaaagcaacacaaattattagctcacagtccatatatcagaaatccaggtaggctcacctggttcctctgctccaggtgtcataaagcctaaatcaaggtgtgggccagcttgggctcttaaggatctagggaagaacctgctttctagcttattcaaattgtcagccaaattcagttccttgtggttgtaggacggtagtcccctttttcttgctagcagtgaggaccactctcagctcctgaaggcttcctgcattccttgctacacactcccctccatcttcaagccagcaacagggtgttgaatcacccttgtgctttgaacctgacttactctcctgctatcagccagaaaaaaactctgacttcaaaggctcatgtgatttgatgaggccaacccagatcatctcccttttgccatgtaatgtaacagaatgatgggagtaatatctcctcatattcacaggttcctcccacgcttaaaggggaggggatcatccataggcaaggtcactgggagtcattcttggaatt

SEQ ID NO: 197745 - DNA, 1000 bp, Homo Sapiens
aaagaactgcttatacattttgtctgttcgttaaattcttcctttttgccataccaactggcactgataattttaaggttgagtttttatttgtgtgtgtatatgtagatttttatttattcttggtagcactgtgacagattttgtgggtagaaaataccagtttcttgaaattgcataatttaaaatacaggtccaaataggtcctagattttgtaaaattgttagtgtgattaagacacaaggaagacaacttaccaattattaatatatacagaatagagtacttcaaggtagaaaaaaattatatgaaacaattattagtaatgttcagagactagtattttgagtataaattgagattataataatcactttagtattgtaaaacctttaatagctttctaaaatgatgtagtatttttctatgtgagtgaaatatcagtttacatttataatacttgatacttaaatctgaattcctcatttcacttaatcttttttcaaatgatcatacacatatactaaaagaggggtgtttaggaaaagttgaaatgatggaatgttttggtcttaggaccttttctcaaaaaaaataaggaaatctaaaaagcattttttcaaatgccaacacaaaaacattccttcttatattttctattctggcatgtacagggatagggaggctgtgtggtccactggttagagccaaggactgggagccaggaggatcctgggttccaatgcggggctaaccactgacttactgtgtgaccttgggcaagtcacttgacctccttgttcctcagtcaaccatctggaaaattggttaaaaagcaggacctcgctgacaaccagatgctgcatctgagctgagctttcttgggtaaataaattacaaaaacaatttagagtttttaatccccctttataatttaataataacattttgggataaactcaagttctttaaggcatagtaatatttggttgtaagctt

SEQ ID NO: 197746 - DNA, 1000 bp, Homo Sapiens
tgccaaaagtgggccatgtccaatccattatgtttgtgtgtctcacaaatggctatcaaagagcagcctagtcatttgcaggggtaggcaatcagaagaagcctaacgccttctgctctccattttaatcccactcatcaggcacatttgctattaatacatacatctgcattcaaaggctgaatggcattttcatcatttcccaaagagcattctatgagggccagagggagaaccatacactaatagacagatgcattatgttaggaaggtgtcaacactttaatcagtacacagtcaatattctccatcatgaataacttattagcttctaaactctgttcctcacatgtcatggcaaaaatctatctgaagaatgtcatctgcacttaaggaagggacaagcattgtaattaagttttaagctatttcttcagcatgaagctgccacgaagtgtgaagtgactataattcacatttttaagaccctgaatttattagcatctattttctattcaaggttagggatatggtgcttggattgtcaagggattcaaattcctctgtgctttgttattctggagtgagtgtgtttgagcccagatgccaggcaaggaaaattatcattaacgagtcaggttatatttgtgaaaaaagctcaaagaactggaaactcatcttccgttgtgaataggaagcggcaatgaaaggtataactgggtaaaagaggacttggccttcctctgtgaattacgacaaccatgcttgagaagatgaataggaaccgtaggccaggggcttcaaattaagcacagttctgctgaagcgtgactattgcacagcccatgaacaaaaaaggaatgtgaagttttaaaactgctttcagtaaatgaaagaggaatggattattctcttttggaaatgatatattatgaatagaaaaaagaaaggcatgagataaatatgtgcttaggcataactacagaccccaggaaagctt

SEQ ID NO: 197747 - DNA, 1000 bp, Homo Sapiens
accacattaaatttaatagagtttaatggagtaaaaagtgacttatgaatagggcagcctcctgagccagaataggttcaggaagattccagggtagaagatttatagacagtaaaaggaaagtggcatgcagaaaacggagggacagaaacagctggatagattacagcttggtgtctaccttatctgaacatgatttgatcagttagcccccttagattggccaaaacttggtgattggcacaagagtaggttacagtctgtttgcacttccatttaggttgtagttcattgtagttcactatgtacagcgaaacgtttaggctgaacttaaaataaggaagaaggcaactttaggctaaacagcagaatagttgcccaggcgccgtggctgatttaacagcagaatggtgggccagacacggtggctcacaccggtaattctagcactttgggaggcccaggagtttgagaccagcctgggcaacatggtgaaaccccatctctacctgcaaaccaaaaataaaattagctgagcatggtgagaatactcaagaggctgaggtgggaggattgcttgaacctgggaggcagaggtggcaatgaaccgagatcgcgccactgcactccagcctgggggacagagtcagatagttgcaaaaaaacacaaaaaccaaacaaaacaccagcagaataatgagtccctaaaaatgttcagatcctaattcctggaattcatgaatatattactttacatggaaataggaactttgcagatgtgattaagctaaaaatcttgaaatggggacattatcttggattacctgtggaagaggaaggcacaaaaggacataagagtgatgtgacgtgagaaggactggacccattattgctggctttgaaaatggaagaaagagtcacaagctaaggaatgcaaatcgcctctagaagccagaaaaggcaagaaaatggactctcttagagcctccaggaagaaacc

SEQ ID NO: 197748 - DNA, 1000 bp, Homo Sapiens
aaaagtaaaacaaaaaaacttttaaaaatagaaaaaagtttatagtataagcatataaagaaggaaaatgtttctgtacagctgaacaatgtgtttgtgttttaaggcaagtattattacaaaatattcaaggccaggcacggtggttcacgcctgtaatcccggcactttgggaggctgaagcgggcagatcatgaggtcaggagtttgagactagcctggccaacatggtgaaaccccgtctctactaaaactacaaaaaaaattagctgggcctggtggctggcatctgtaatcccagctacttgggaggctggggcaggagaatcatttgaacctgggaggcggagtttgcagtgagctgagatttgcagcgagccattgcactgcagcctgggcgacagggcgagactctgtctcaaaaaaaaaaaaaaaaaaaaagtcaaaatgagtttaagaaagtttataaagttaagttacagcaagctaaggttaatttattactgaagaaaaaaatttaaaaaaaatttggtgtagcttaagtgtacagtgtatataaagtccacagtagtgtacagtaatgacccagggcttcacattcagtcgccactcattcactgactcacccaaagcaactcccagtcctgcaagctttattcatggtaagtaccctttacaggtgtaccatttttaaaaatcttttatgctgtgtttttactatacctttcctatgtttagatacacaaatacttaccattgtgttacaattgcatgtagtattcggtaaagtaaaatgttgtatacgattgtaacctaggagcaataggctatcccatatagcctaggtgtgcagcagattatcccatctaggtttgtgtaagtacactttatgatgttcaagcaacaacaagataacctaaggatgcatttctcaaaaagtatccccattgtcaagcgatgcatgactgtacttctagcctagtcctggtctttaaagctt

SEQ ID NO: 197749 - DNA, 1000 bp, Homo Sapiens
ggcaattttaatatggactaagtatattgttatgtaacagactaaaggcatgtcggtggctcatgcctgtaatcccagcactttgagaggctgagacatgcggattgcttgacctcaggagttcaagaccagcctgggcaacaatggtgaaaccccgtctgtaccaaaaatacaaaaaattagccagatgtggtggcgcacgtctgtggtctcagctactcaagaggctgagatgtgaggatgccttgagcctgggaggaggaggaggctgcagtaagccacgatcgcaccactgtactccagcctgggtatcagagtgtgactccatttcaaaaaaaaaaaaaaaaaaaagtcatgatgtctacaatgtactttcaaatggctcataagacaggcaacaaagaggcaaaatgttaaaattgagataaagagtgtattagttttgccgggtgcagtggctcatgcctgtaatcacaacactttgggaggccaaggcgcgcagataacaaggtcaggagttcgtaaccatcctggccagcatggtgaaaccctgtctctactgaaaatacaaaaaattagccaggcacagtggtgcgcgcctatagtcccagctgcttgggagggtgaggcaggagcattgcttgaacccggcaggcagagggtgcagtgagctgagactgcaacactgcactccagcctgggtgacgtgacagagtgagattccatctcaaaaaaaaaaaaaaaaaaagtgtattagtttttgtcacattgttcttttaatttttttgtggatttgaaaaaaattccagaaaaaaattagagggaaaaacagaaaattatgtgttttcaattgtgtctgccttcagaatttttttcttgtcactgaagaataaaacaaaacaaaaaggctgagcaagatagcaagaccccaggtctactaaaaataaaattaggtgggcatggtggcacacatctatagtcatagctactcaggaagctt

SEQ ID NO: 197750 - DNA, 1000 bp, Homo Sapiens
gaaaatgagaaagaagcgaatgtggaaacctctgataagcccatcagatttcatgaaacttattcactattatgagaatagcataggaaagaccagcccccaagattcaattacctccccctggttccctcccacaacagatgggaattctgggagatacaattcaagttgagatttgggtgaggacacagccaaaccatatgacaccatattaagtatttgagtgtatttgtttcaactccatgagtgtcaaattttccagttcttttacttgaagggtcactttttagatcatttgacaggacagcagcaatacatgagaatttaaactttggagattatacacttgaacacaacaaagtggaaaataataatcaaaaaaagttatattaacagatcctgtgattcagtttttaagaaaaatcttaattcctaaagtaagctaaggcccacttcctaaattgctctgaaaacatatattaattccaatctaaagaacccacagaaatatgtggcattattacccaaagtatctacatttatggctttttattttttttagatccttttagaagattaaaatccaaaagatttgtagggattgagtataatattcttctccttaaacaacacatgctctttcttgagaaggtgatattatgttttggagacctattccaagcaaactaatttctaatttagtgaatcctttggtctaagagttctgtaaccttgacaacttgacctagttctcttgctgtcctcagactatggcatgtagtatcctcccaactttgaaggcctgttttaaagaataaattgaagaggcttaaggacaatagaaggcaactagaatttctcttgaatagtttagagttgcaggttcctagatgtctagattattatagtgtttgccacgtaaaaaaggcacatagaggttgagccaaattacacaggaaatcaactgattgttaatagaaactggtatcaagggaagctt

SEQ ID NO: 197751 - DNA, 1000 bp, Homo Sapiens
tccatgaaaaaaaaaaaagaaagaaagaaagaaagaaaaaaaaagaaaaggaaaaggaaaaaaaagaaatcccaaactagaaataaatggtcaagaccggcttatcaggacacattcgggatacccctaatccttacctggactacgaaacaaatgtttaaaaatggaagtacctgggaaatcaacttggacgcattataaaacagaatctccccaccgtcaccattaccaccagccatgggtaaataaaaacccagcacttaagctactagaaactacattttaattagagctgaggtttacataatcgcaaattacataatactgccgtgcactaaaaacccttccataggtgaagcttcacaccatccagtctttttaacattttccagagagggctggaaaagtctgctgaataattgaggggagggagggagggaatggggtgctggaaaagtcacccttgacaagctgcacacccgaccaaatgtttcaggataaagagggactcggagcaggtgactcccctccgcccccgtgtccgggcgtgtaaggccaaggcagggcgagcgggcgtggggcgcggggccggggcttacctgctccccgaagtcgatggctatgttggtgatgcccaggggcaccaagaaccggatcaggggccagtagtgcgtgagcgccgggaatttcaccatagtccccgccgtgggctgaccccacacacatctgctgccgcgaggggactctgcggggaggcgaggggcgacggggcgacggggcgagcggggcgcgggccgacagaggccgcgggcggcggggcctcgggcgcggcggcggcggctcctcctcgcggctgcggcgccttctccgagcgcggctgctctagcaggggatccgcaagctcaagtccatccctgctgccctcccacacaacaaagatctgccgggaaaaaaaagaggagggacggcggcggcggcggcggcggcagaaggttctgct

SEQ ID NO: 197752 - DNA, 1000 bp, Homo Sapiens
ctctgcaaaattaatgaagacattagtctaaaatattcaagtcaccagaaaaatcttcacagttcgtagtaggttgtgtgacttgtctgctttattggctttactacaacagatcacatgcacctccctgtcagcttgtactctttcccttgtactccagcctatggatggagaatgaaaagaaatatttcataattttaaacacctgtggcaaagaacttggatacaacttaccccaacaaccagctgattgttcattattgcaaaatatctttttttttttaaacccaacgcatttttctggatgtaagaaacaatacaacctttattgttattgctctcataatgaacgaactttttatgaaacgtactatttgttgactaaaaagttgaattaataagctaataatggagggtgtggcggaaaaaaaatactagaatacaacttaggtagctttttattgtacaatcttgtttcttccttcaacctaccctctttgataagaaaaaccgaagtggagatacctaaggctttatagggggaatggagctactcctcaatttctttatcttgcctctgctgttcctagttgctttcacctttagctactatcaccaatctctacttgcagtttttagtgtgtattgacagcctcttctcagctttcaaataaaaaggctgatgatattttacaaactgccagctaagcaatggtgaagtgatggttttatagacaagtacaattttccttccatcacaattgttttttgctagttactttagcaacttttctgcttccaaacaggctacagctaaaggatgagggatctgcaaagctggatccttaagctacctgagatattcaaataacgcttactgatatgatttgatttgttctaagaaagggcttaggaaaaggtaacaaaaattggcttaatgtttacattttgtttcactacactatgttaggtcacctcacaaaacttacttaaaaagctt

SEQ ID NO: 197753 - DNA, 1000 bp, Homo Sapiens
agattgcctaaagatttatgttcagggatgtttactgtagctttgtttgtcaaagcagaagttttggaagcagcccaaatgtcaagcagtgactggttaaaggaaatatggtgtgccccatatgatgagatattattcagtcattaaaaattatgacttgtggaaatagtcacaaaaagaatgttaagtttaaaagcatgatataaaactacttccagattccaattttataaagtacatatgtatatttatgtaactggaaaagactaaggtgaaatatagtaaaatgtggagttattctctctgaaaaacattccatttattttataacattcccccacagctcctcatctaatccatcaaaccaagtcttatcaactctacttccaaagcgcaccttgagtctcgtctgcttctctcatcaccactactatgccctagtcaaagccaccatcatctttcatctttagaaacttagaagcctcccattggtctccctccctccccttttgccccgttgcagaccaatctccatgcaatagccatagtaatctgttttcaatgtaaatcagattgtattaccttctgcttaaaaccctccagggctttcccatcacaccttgaaaaaaaatcctaagcttttccctttgccatggctcggaggcccctggaatcccactgctgcctccctatctgacctcatctcctgccacgctcccttcccgccttgcttcagcctttctagcctcccctcttggcccagacacctgcactggccttgacaccagctcttccctctgcctgccgtgcttcccccagctctttacagagctgacttctcctgaggtctcagcttaaatccacctcctccaagaggcctcctgatcacccagagttgccaccctgactttacctatcgaatcaatgtattttaattgtctgcactcacgaccatctgattttttttcttaactgactcctttctgtattgtctaagctt

SEQ ID NO: 197754 - DNA, 1000 bp, Homo Sapiens
ttttagtggtgtcaagtcatggctatgtgccactaacatgccagatttggacatgtcacagatgatagcaaatggtttctcacttttatattatattatttaaaataaataatgacacaaaacttactcttctgtgatggcaaacgtgaacagggtgcttagtatatgccaggtgctatttcaaacacttaacaattatttaatcttcaaataattatgtgaagtacataaaacaaagggcactaatccccacccagcttggtttacataaaagaaaataaatcgcagaaaaattcagtaactttcccaaggtatcacagcatacgagtgaaggattcagactttcagatcctgaatctgtattttcactgaatattctctatgttcttactaggtatagtaatgtactctttctagagggtttcttaggtaaaactccaaattatgaagatatccattaattattggcaaggtataaatataccaaacctatttaacatataaaatgacatatgttactatccagagccggttagttatagaactgctttctttaaaatattgttttcaaaatatgtgctcttagatcatcttttttgtacatagattttgcaattctgtgactgctgatttaaagtctcagcaagtgaaaatgcaacgcattactagatattctcaggcagcagacctctaagcatatgctacagctcactcagctcacacatcattctgtgtgaaatacgtatatttggtattatgtggtgtactctggccactcctcttgctattaatgttatgttctgagaatatttataatctattataactgacagataatgcccaactgatattaaagacttggtaataaaatgcaaaatttagtagcataaagcagctttggggatgggaaaaatatccttatttcaaatgcaaatattttcattatttgaaaataatgaaaaagtatttttctttaaaatattttatttctaataagctt

SEQ ID NO: 197755 - DNA, 1000 bp, Homo Sapiens
agactaggattccaacccctacctttttgttttccatttacttggtagatcttcctccatccttttattttgagcctatgtgtgtctctgcacgtgagatgggtttcctgaatacagcacactgatgggccttgactctttatccaatttgccagtctgtgtcttttaattggagcatctagcccatttacatttaaggttaatattgctatgtgtgaatttgatcctgtcattatgatgttagctggttattttgctcgttagttgatgcagtttcttcctagcctcgatggtctttacaatttggcattttttttgcagtggctggtagcggttgtttatttccatgtttagtgcttccttcaggagctcttgtagggcaggcctggtggtgacaaaatctctcagcatttgcttgtctgtaaaggattttatttctccttcacttatgaagcttagtttggctggatatgaaattctgggttgaaaattcttttctttaagaatgttgaatattgacccccactctcttctggcttgtagagcttctgccgagaaatcagctgttattctgatgggcttccctttgtgagtaacccgacctttctctctggctgcccttaatattttttccttcatttcaactttggtgaatctgacaattatgtgtcttggagttgctcttctcgaggagtatctttgtggtgttctctgtagttcctgaatttgaatgttggcctgccttgctaggttggggaagttctcctggataatatcctgcagagtgttttccaacttggttccattctccccgtcactttcaggtacaccaatcagacgtagatttggtcttttcacatagtcccatatttcttagcggctttgttcatttctttttactcttttttctctaaacgtctcttctcgcttcatttcattcatttgatcttcaatcactgataccctttattccagttgattgaatcagctattgaagctt

SEQ ID NO: 197756 - DNA, 1000 bp, Homo Sapiens
gtggcatgggtgggctgacagtgctgggggacctggtgcaccctccgcagctgatggtctgggtgctaagcccctcactgcccagggccgctcccagtgtggggccggccaagcccgtgcccacccagaactcgtgctgccccgtgagtgccgcgcacagccccggttcccggctgtgcctctccctccacacctccccacaagcagagggagccggctccagcctcggccagcccagagaggggctcccacagtgcagcggcagggtgaagggcccctcaagcatggccagagtggacgccaaggccgaggaggccccgagagcaagcaagcgctactagcaagttgtcatctctcactacattaatttttatggaaatgataatgcgtatatcatatcaatatatagtacatttattgaacatctattttatgcacaagtaaatgcaagctctttccacatcagtgataatttcagatgaatcctgatgatatttttgcctgatgatggtgtttttttttttttttttccagcattttttccaatctagctacttggaaaacttgggaataatttgggagataatgaaaaacaacaaaaatattatctttggatcatgatgttttcacccacatcaaaacagttttcagaaaagtatttatgatactttaataaatgtaagtattctctgttaagttttaataaccctagtatgagatttaaagaattttaggcacaacccagaggaaatttatatgctgtaagccaatgatctcagaaaaataactatagcctttcattagcaattttgatttgcagcaatgttgattgtcagttttcacaagtttccttcctttttctcttcttctccagtccctccccttcctcacaatcaagtctcaaactagagcttttggttcctgggatcaatctcttccagaaaacctgaagcacagcttccatctggttctgtactttagctgttcctggctggaattc

SEQ ID NO: 197757 - DNA, 1000 bp, Homo Sapiens
ctatctttctatttctggtgtcctcttcaattttttgcatcaatgctttatcgttttcattgtagagatatttaacttcttgggttaattcttaggtattttatgtaatttgtagcaattgtaaatgtgtttactttattgatttctttttcagattgttttttgtggacatatagacattctactgatttttgtatgttgattttgtatcctacaactttattgaatttgtttattggttctaatacctttctgatggagtatttagatttttccaaatataagatcatgttatttgcaaacaaggataatttgactttttcctttccaatttagatccctttttttctttatcatctgattagctacttttttttctttatcatctgattactccagtactatgttgaataacagtggtgaaagtgggcatccttgtcttgtcctttatcttacaggacaggcttgcattttttcctcattcagtatgataccagctgtgggtctgttgtatatggcttttattgtatggagatatgttccttcaatatccagtttttttagggtttttataatgaagggacattgaattttatcaaatgatttttcagcatcaattgaaatgatcatatggtttttgtccttcattctgttgatatgatgtatcacactaattgatttgcatatattgaaccattcttgcattcctgggttgaatcctacttggtcatgatgaataatctttttcttgtgttgccaaattcagtttggtagtagtttgttggggatttttgcattgatgttcatgagatatattggcccgtagttttgttgttgttttgtttgtttgtttgttttttgatgtatctttgactggtttaggtatcagggtaatactggcctcatagaatgggtttggaagtcttccctcctcctctattttttagtataatttgagtaggatttgtattagttcctctttaaatgtttggtagaattc

SEQ ID NO: 197758 - DNA, 1000 bp, Homo Sapiens
ctaaaagaatcattgcccctagactgggagttgctgatttagtatattctaatgtgagggcagggaaaagcagatatgtaaacataaggaccatacagagtaagtgcaatcctttaggtaagtaaaagtgctttttgagcaaaaagacacaacgattaagtaaatcctgggcaactagagaaaacttccagcagagatagtgtttgaattgggctgtgaagtttaagtcagagtttattgcagagaagtggcagggtggatggtggcattctagatgggaattcatatgtgtgaaaacattgaggttcaaaagaccatggctggtttgaggcacattctctgagagtagaatgaagaatatgctggtgtggaaggtggatgatgaagctagaaaaagtaagttgcagtaaatttgttgtgctgggtttgggatgttgaggagtttcaacttttcctaccagttggcagccatcaaaggttctcaatctaatgagtaatataattaaatttgctatcagtatgaaaattgtccacaacagatatggaagtctcattcacttcatcttatttaacacgtataatgtgctataatttacatatgttacttaattcttatagcaaccttgtgttacatatatttatccccattctacagctaagaaaatagaggttcataaaagctgaacaacttgcctcagttcacagtaataactggagttaaaagaaggtcaccatcagtctacatcttgtaaaagtacaggaaaggaatcttaaggcttacagaaggactattccttagtattaggtataatgagttagttaagtcagaattaggctgtatagatggtttctcataatattgaaatgtattatttagaaaactatataccaaagtcaatatagaaatgaatagtactggtcgtttttaacagaagtgtttatgtggtcaggaatatattattatttcaacatctacatgaatgtcaatgtgaaagaattc

SEQ ID NO: 197759 - DNA, 1000 bp, Homo Sapiens
gggcatatctaaatgtatagtatagggactgggcatggtggctcacgcctgtaatcccagcacgttgggaggctgaggcgggcggatcacttaaggtcaggagttcaagaccagcctggccaacatggtgaaaccccgtctctactaaaaatacaaaaattagctgggcatcgtggcacatgcatgtaatcccagccacccggaaggctgaagcaagagaattggttgaacccgggaggtggaggttacagtggcccaagattgcaccactgccctccagcctgggtgtgaaagagagactctgtctcaaaaaaaaaaaaaaaaggaaaaagtatactgtagggaaaattttatgaaagaagtctttatggcctggcgttgtggctcatgcctgtaattccagcactttgggaggccgaggcaggcagatcatgaggtcaagagatcgagaccatcctggccaacatgctgaaaccccgtctctactaaaaatacagaaattagctgggcgtggtggtgtgcatctgtagtcccagctacttgggaggctgaggcaggagaatcgcttgaacccaggatgcagaggttgcagtgagctgagatcacgccactgtactccagcctggcgacagaccaagactctgtctccaaaaaaaaaaaaaaaaccgtctttatcatgtgattttgggtaaactaattactgttgacctttactaaatctaaaatccagccttttacgtatgctgtggtgttgtcagattagattatatttgattacggacaaagagagaatctattttgaattcctacactatgccagacagatgatagacattttacatatgtattttgatcctcacattggtacttccaggtatgttttgacaaactctttttttttcttttcttttttttttttcagatagagtcctcactcttgtcacccaggctggagtgcagtggcacaatctcggctcactgcagcctccacctcctgggt

SEQ ID NO: 197760 - DNA, 1000 bp, Homo Sapiens
tgtgagccaactcagaatgaaggggggtagaatactgccttctcagtgttgcaaaatataccagatcatgctgcattgtttgtgctcttctgaaagtgactgggataaaacaacataaatgtacttctcttggcttcttcacaaatgtgagtgaagtgtcacatgatgtcatgccgagaataaaaattttcagcacttagaactgaaatttcagcttgcactcctatttaattataacctaaacagtcccccactcagcttctgagaaaggtaaagcatctgctaacgacttctaggaatagagagattgtgagaatagctttacttgaggtctcttagctggaattaagctggggatctgtgtgccaggcctataggggaactgaagactgagcttctgtctttcccctcttcatgcaagcatctgctcccctctaagggccaagtggctttagagagtgcttgtggaccagggctgttcagttagccgggaatgcaaagtgcctggtgcaaactggaatgatgcagatatggaacaattcaaacacattcaaaccaaactcttcacacatctgcagtggtgaattagagtactgagccatttgaatcagagtaaattccttttcaaaaccttactatctttagaagtggtttttaactttttaaaggtcaaagtctcttatgagtagttaagaaaaacaactgatctctctccaccaaaaatttacttatgcaaacccataaaggctaagaaaacttgatcttttctacattgtacatgaaagtactaatttattaatggctaagatatttatttaccttaaattatgattaataaggctagactgcctgagttagaatctctagttctgccatttagtagctataggagattgggcaagttgcttgatctctctcttcctcagtttcttcatttgtaaaatgggactgataataataacacctaccactgaggatcattacgggtaaataatgaatt

SEQ ID NO: 197761 - DNA, 1000 bp, Homo Sapiens
ccctaatggatgtgtaattaatatatgatgaataaacacaagctttcttcctttgttttaggaacaaaacatttaatttttctaatattatcaaatgatacattagagggtctatgtatatatttgcttttagtggaaaaaaaaggatttctagattataatatgattgcaaaggctagaaagagttccaaatactttttagacaactttttcataccttagttcttctattaataaaattaggctatgtattctccaaaggttacttgttcaattcaagcaaaactgaatgcaatggattcatatagtcaaataatattacaaaaacattaatgtaatcactgatctagttatgtagagaaacacacactgcagaggtgttttctcaaattctcatgaaatgtcagctttctcttacctacatgttgagtatctcttatctgagattttgcttattctgggaacagaagtgtttggattttggaatatttatacatataaaatgaggtatcttggggatgggacccaagtctaaccatgaaattcatttatgttttatatataccttattcacataccctgagggtaattttatacaatgttactaatattttgtgcagaaaataaggtttgtttacactgtacactgaaccatcagaaagcaaaggtgtcaggtatggaattttccacttgtgacaccatgttggcattcagaagttacagattttggagtattcaggttttagatttttgaatcagaatgctcaacctgtataataaatccatattaacttaaattttaggaagtagcaaactatcttaaatacagttattagaaataatctttgaagaaaagtacacattactaaagtataaggatgtactaatatgtaactgtgaaattaatgaaaaatcacatttatatcagactgtgacataaaaaatcttaactgttagaaatcctgatagatccacgaggtcaaattaggccgaaagaatt

SEQ ID NO: 197762 - DNA, 1000 bp, Homo Sapiens
aaatctatctcgaaagcttgtttctcttttctatctctgctaagcagaaattgaaatacaaaatatgatttcaattcaaaatgaaaagaaacgcataaacacaaatattaaaaaaagaaaacaggaaaaaaggaagaatgaaatacttcactaggcaagcttctggttttccagagaccagcccaatcatctcaaatatgtcattagataagattcacctgagactcgcctctttcccttccccacgtggaggacacagtatggtggctgaaaactcaaggtggtgaggacatggaaaggtgagggaaggtggtgggctaacacaggtatgaaccagaggcctgcagttgagaatgggggtggtgaaggagagacagaggtgacaggtggaagagatggccagtgtggctggaaaaccagttacatggagcaaacaggcaaactgagcaaaaaaatcaatatattaaggaaaatgggcttcttgctgttggaggaggtattaacaaacatggaagggaaaatgcgagaaagaacactgaggtattagactgtggttggagggatcagtatgaacccatgatttatatacacacacagctatataaatacttccagatgtaaatgtgtgtgagtgtatatgtgtgtgtatgtgtgtatatgtatatgtacccaagctttctctactgagagggtctagaagcaatgacatctcagtagcagtgagcacctcatctacccagatcctggatcctaagttaccatcctctactaaaaggaatcaggcagggctctttggcaaaatggctgattccagggctggggctggggaagtacaagatgagtctggaaatctttttgtgccagatcataaggaaatactcaatggatgatggaaggaagttaaaaggaccaggaggaagaactcccactggccaaatcctagatagttttagcatcaaaataaataatagactataacccattgaattatacaggaatt

SEQ ID NO: 197763 - DNA, 1000 bp, Homo Sapiens
tacttgggagggtgaggtgggaggactgcttgagcccgggaggtccaggatgcagtgaactatgatcacaacactgtactccagtctaggcaacagagtgaggcctttttaaatgcaaaaaaaaaaaaaaagccttaattttactgattacaaaagaaatacatgttcagtgacagaaatttaagaaatataacagctcaaacaaagcaaataaaaagcacaatccaatcacacagcaacaactgctattaaaatttggaatcactgctttgtgatctttctatgttgcacattatgaatgtttacttcgacatatcaatattcttctatgatatgatttttcatggctacaaagcagttcattcactgcctagacataccataactaatttaatcaactgtgggctattgggacatttaggttattttcaatttttaaaaattattttttaagatgttgtatcctcatatataatatttggcacacaaacttgataatttctgttggacagatggacagattcttgtaagtccctgcttaaaagcgtgtaaccatttaaaaatacatattactactttttcttcaggtaagtaagatgggccacaactccctttcctataattctgaaatccaaaaagctctgaaaccaaaggattgtttaaaaaatatttttcacaccaaaagtcatctggcagcaaaacctggcctgaaccaaagtgacgctatttatagtcttcacttatctctcaaaagcatttaattatgaaataaagactagtccataccaggaattgttgggaacaggtacccaaatctggccacaaactggccccaaaattggccataaacaaaatctctacagcattgtgacatgctcgtgatggccaggacgcccacgctggaaggttgtgggtttaccagaatgagggcaaggaacacctggcccacccagggtggaaaaccacttaaggtgttcttaaaccccaaacaatagcatga

SEQ ID NO: 197764 - DNA, 1000 bp, Homo Sapiens
cttgggattctgctaaaaaccagtgataagatcacttacatttatacaaggtatatccgaacctcagctttgccccacacatcaatagaacctcgactttgtcccacacatcaataaatgtcttttataagttgtctttgtctagtgggccctttctttttttctaacttattatgggttggcaacaatattattagtgttgttaaatttctatataaggaaaagtaaacagtcttagggaaggcttcagcggttcaaactggaaaaagtgcatgaaatttgagtccttgttttagattgttcagaggctgtcttttgttttccctttaccgtccttccttctgaatctgttgctaataagcagggttttttgtaagtgaagtgttattgcgtaagaattttatatgacacatttcagaatattgacatgaggagttgggcgcgaccacaggattagaactccaaaatttttgtgacttttgtctagatcttcacagtgactatgattctggggcaaatccttgagcctctctgttttgtcatttctctttatacttagacttgacgtggcagccttcttcagtaccgtcaggtataactagtcctttttattgtattttaagggcattgatggttaatattcttccaaatttattgacaagaaaactttactcataagagattaagtggcaaaactggaatctcgaggaggcctgttgattctcagtttcctgtcctttacattactcttatcagggatgaaactatgtatccctgtatacattattgaagtattggaaaaacaaataacttgaaaaatttgaaaggaagttacctctatttccaagatggtggcattatatttttttgttatccataaagtattctttgaagacaattgggattttttgtcaggtaaacacctcatcctgcacagcacaaagagaagcaggtttaatacaattgagtaggaaaaagtggactgaacaaaaacagaatt

SEQ ID NO: 197765 - DNA, 1000 bp, Homo Sapiens
cacagaggtgaaaagacttaagacatgagatccaagaataagaaaagatttatagatcctaaaatgtatagagtatgaaaatggacaccctttaaaagtattgtatgacatggtcaagttttaaggaaagaaagaaagaaagggcttaatgaatccacctcttctaaagaaattggtcccccaaatttccatttcattgccatgacaactagtactccatcattgccatggtaaccagctgaatagcattagtctaaagacaagctctctgattgggtgaccaacgaaagccagtaggtgccccaccacaatgctgaaagactgttttgcaatcactttgacctatttctagcttttcaatgtgttttaattctccaaagtgtttccctaaaaccaaatgttttttggaatgagacaatttcaagaagtgcataataactgtattcctgcatctccctgctaagttcaagaccttgttttctatcccagaagtgtggtaatgtatgacagccatacccttcaccatgacttgcagtttaattatgacatcccctctgttacagcaactaggcatgctagccacatctaaaccagatgttggttgctggtgacaacaagctgccttctttgtttgatgaggccactgacaagttgaactgcaaggaaactttgacggtgggaagtgacaatccagtaaaataacagaggggggccaggtgcagttactcttgcccatagtcccaacactttgggagcctgaggcaggaggatcatctgaggtcagaggtttgagaccagcctggccaacatggtgaaatcctgtctctactaaaaatacaaaaattagccagacgtggtggtgggcgcctgtaatcccacctacttgggagcctgaggcaggagaatcacttgaacccaggaggcagaggttgcagtgagctgagattgtgccattgaactccagcctgggtgacagagcaagactccatctcaaaaataa

SEQ ID NO: 197766 - DNA, 1000 bp, Homo Sapiens
atctaccccgtaaggcaaaccaacctgccagccaaaaccgaaatttagtcaagttcattgttctcatagctttgttttttgctttcccttagttttttttttttgtttgttttgttttgttttgttttgagacagagttttgctcttgttgcctgggctggagtgcattggtgcaatctcggctcactgcaacctccaccttctgggttcaagcgattctcctgcctcagcctcccaagtagctgagactacaggcatgtgccatcatgcctgctaatttctgtatttttagtagagatggggtttcaccatgttggctaggctggtctcgaatgcctgacctcaggtgatctgcctgccttggcctcccaaagcgctaggactataggcatgatccactgcgcccggccaaactgagacccttagttttaaagtaaatgttcctatggatttctctaagcatatctggctgaaattagcaggaataggaggtccaagatgagaaggggttttgggagttaggataccagccccagagtctgaggcggtggctgggctagaggagcttaaagttgagggtggaaggctgaacttggaaatacattgggagtttcatcgtagacaggagcaccacaagagaactcagagaaactgattcagcatctaattttgtaatccgttcactgtgacccctagcagtgtaatattaataattgttcagcttattttcttgtctgtaaaaagtggaaaataatgtttgtcttacctatttcattgggacactgtaagaatcaaacaagattttgtatgtgaaagcatcttcctttaccgctttaccagaaagagacattaaagaccatgccacctgaactaaactacaaagcaagggtatggacaaatgctaatcatcaagaattctcagtcgggggtggtggctcacccctgtaatcccagcactttgggaggccaaggcagacagatcacttgaggccaggaattc

SEQ ID NO: 197767 - DNA, 1000 bp, Homo Sapiens
taagtctaatttccacggttctaatcactagagaaaatgggtcaatgccttcttttaaatatgaaatgtgtagtttcccttttaaaacctacgttttcaaataaaaatgcaaccacaatgagagctgttacataaggaaaaccacaccttgcagggtgcccattatttcagcctctaagcaaaataatgaaaccttctctgtacttcaaaaggaccccgaagatgactgaaacagttttaattaaaaatgcaattagcatgagttttctgagatacaatgataatgggtgggcaggacataagaggctatcattgatgctttcagcttatttaatgaaaaaagcaggcccagaaccacagagactcacacctataatccaccagtttgggaagccgaagcgggagggatcacttaagcccagcaggtcgaggctgcagtgagccatgatcctgccggtgcaccccagcctgagtgacaaagggagacaatgccgcaaaaaaaaagaaaaaagaaaaaaacctgtgacaatgaacctgtttgtagagcacccctgtttgggacaacctatctatatacctcattcatcctttcatcctttctcctcaatctaactcaaattcatttcatatgtaggctttctaaaattgacaaaaactcagtcatcacacatgcagatatcaaggatgatttttttttttttgagaccgagtctcgctctgtcaccatgctggagtgcagtggcgcgatctcagcttactgcaacctccacctcccaggttcaagcgattctcctgcctcagcctcccaagtagctgggacccccaactaccatgcccagctaatttttgtatttttagtagagatggggtttcaccatattggccaggatggtctcgatctcctgacctcgtgatccacccacctcggcctcccaaagtgctgggattacaggcgtgagccaccgcgcccagccaaggaagatttttacgtcaagaattc

SEQ ID NO: 197768 - DNA, 1000 bp, Homo Sapiens
cgaagcagcaggtgctgatgtagaagctgcagcaagttttccagaagatttagctaagatatctgatgaaggtggctacactaaacaacagacattcaaggtagaaagcacagccttctattggaagaagatgccagctaggactttcatagctagaggggagaagtcaatgcctggcttcaaagcttcaaaggagaggcttgctttcttgttagggactaatatagctagtgactttaagttgaagtcagtgctcatcgaccgttctgaaaatgctatggcccttaagatttatgctaaatctactctgcctgtgctctatacatgaaataacaaagcttggacgactgcacacctgtttacctcatggtttactgactattttaagtccacgattgaaacctaccactcagaaaataaaagcttcctttcaaaatctgactgctcattgacagtgtacctagtcacccaagagctctgatggagatgtacaagatttatgtttttatgcctgcaacacaatattcattctgtagaccaaggatcaaggagttattctgttgttgttttgtttgtttgttttgttttttgggttttttttgagatggagactcactctgttgcgcagactggagtgcagtggcgcgatcttgactcactgcaacctccatctccccagttcaagtgattcttctgcctcagcctgcagagtagctaggattagaggcatgcgccaccatgccagggtaatttttgtatttttaatagagacagggtttcacaatgttggctaggctggtctcaaactcctgacctcaagtgatctgcctgtctcagactcccaaagtgctggtattacaggtgtgagccatgtgcctggcctgttttgaggcttttaagtcttactatttaagaaatagttaaggctataggtgtcatagatagtgattcctctgatggatctgggcaaagtaaattgaaaaccttctggaaagaattc

SEQ ID NO: 197769 - DNA, 1000 bp, Homo Sapiens
aatcctcattttgaaaagaattaagatttatcctacctttctagtaggagctcataagaatgccaacttatatgtacaagaaataacagaaatagtcaaatatcattttgcaacccatgatgaaattattattatttttagagacagtcttgttctgttgcccagactggagtgcactggcacaatcgtggctcactgccaccttgaactcctggggtcaagtgatccttcctgcctcagcctcttgagtagctgggactacaggtgcatgccaacatgcttggttaatgtattattttttttttgagacaggctcttgctatgttgcccaggctggtcttgaatgcctgacatcaagcaaccgtcccacctcagccttccaacgtgctggaattataagcataaaccacattgcctggcccataatgaaattattgattaaggtagggattatctactggaatgtaaaacaattaggctaaagtctgatagggaattgaacattcataaactaacaagctaccatcacacaaactacattatattacaaaggaggaaagtgaactttaaaaatggaaggaacagactttcatcttaatccagtggtcaaccctagcatcactaatagaaggtcaactgaacgctgtatatatactaagacatagcatcaagtacctatgatatattctagcccaaaatatttaactttaaaaaactaatcctctaagcctctcagtttttctcaatcaggattctaggaaagaattatatcctataggttgggtgtggtggttcacgtttgtaatctcatcattaagggaggccaaggagagaggatcacttgagaccaggtttgagaccatagagaagctctatatctacaaaaaaaaaaaattgtatagaattaagcccttcagaaaattatctgagtgcccatcttcttaattatcctaagggcggtatatagctagaaccattattaatgtagaggaaagaattc

SEQ ID NO: 197770 - DNA, 1000 bp, Homo Sapiens
tgcaccaagcggacctaatagacatctacagaactctccaccccaaatcaacagaatatacattcttctcagcaccacactgcacttattccagaattgaccacgtagttggaagtaaagcactcctcagcaaatgtaaaagaacagaaattataacaaactgtctctcagaccacagtacaatcaaactagaactcaggattaagaatctcactcaaaactgctcaactacatggaaactgaacaacctgctcttgaatgactactgggtacatgaggaaatgaaggcagaaataaagatgttctttgaaaccaacaagaacaaagacacaacataccagaatctctgggacacattcaaagcagtgtgtagagggaaatttatagcactaaatgcccacaagagaaagcaggaaagatctaaaattgacaccctaacatcacaattaaagaactagagaagcaagagcaaacacattcaaaagctagccgatggcaagaaataactaagatcagagcagaactgaaggaaatagagacacaaaaaacccttaaaaaaaatcaatgaatccaggagctggttttttgaaaagatgaacaaaattgatagactgctagcaagactaataaagaagaaaagagagaagaatcaaatagacacactaaaaaactgataaagaggatatcaccactgatcccacagaaacacaaactaccatcagagaatattataaacacctctatgcaaataaactagaaaatctagaagaaatggataaattcctcgacacatacaccctcccaagactaaaccaggaagaagttgaatctctgaatagactaataacaggctctgaaattaaggcaataattaatagcttaccaaccaaccaaagtccaggaccagatggattcacagctgaattctaccagaggtacaaggaggagctgggaccattccttctgaaactattccaatcaatagaaaaagagggaattc

SEQ ID NO: 197771 - DNA, 1000 bp, Homo Sapiens
tgcctttgcttcaatgtctactgaagcagctgtagcaacgatttataatataaaatgtgacaaggacagtgaaaaaattggcagaatgttattccttagacttagaaatctaccaccaaatttttctttttttttttgagacagggtctcactgtcactcaggttggagctcagtggtgtgatcttggctgactgcagcctccaactcccaggctcaagtgatcctcctacctcagcctcccgaccagctgggactacaggtgcatgccaccaaatccggctaattttttatatttttttagtagagatggggtttcgccatgttgcccaggctggtctcgaactcctgagctcaggcaatccacctgctttggcttcccaacatgctgggattacaggcgtgagccactgcacctggccccaaatttcatttttaacattactattttgaaccttgacatagtagggttatatataatcatcatgctttatgttcaaaattctcacctaattaataatttgtagttaccagaaagcagaaccaaaccaaaccaaaacacacacctgttaaaacagtttaccatggcacttcctgacagactccccgttatactggctccagctagtgccatggtgctggccgtttcactcaggttgtctcggatggctcctattcgatccatgtggcttccacttgcactcaaactgccagtcagcccaccaacacttccctcccctatgcttgggttgtgtcttgcttctgctactgatgttgtgtctaaatgcaaatattccaaagaaactaagtaagtatgattatcaattttctccttcttaaattcctccatgatttcagagaggacattatataaggtataaaatatacgcagacatggaaaaatatttttttcaggctagtccactagaagcagtgggaatagagccaacaattttaaatggtcactagtttcttttttcaaaaacccagatttaggaattc

SEQ ID NO: 197772 - DNA, 1000 bp, Homo Sapiens
tggtggtcaagaatctaccaagatgccaaaagttaccaacttctttgcagctacatacacagggtcagagaatgttatttagactaatgagtacatgtgtcaacattttccaggactgtcaaaacctaaggatcaggtgtgaagaaagatcttgtctttcttagctgcttcttgtggaaatacttcatttgtatttcctgaaagaaagaatgctttcagtcactctaaaagaaaaacctggtaccaacaactagaagctactgtcagatgcacatatacccctcctcaatacaaccgtgttttgagagtttcacatttgaatcagaagtagtttacaagccagcagcttggagaaattgacattttaataataatatattgcagacaactaatataatgtcatatggggagatatggagggaaatatggagatatgctttatatactagttttcagtattctgggaattttagggatatctgtagaaaagttagtacctgtctttttgttagtgcaattcccctttattttgctatcttctgttatctctgcttttactgcttccttttgaatttcatccttaaagaaagtacttttagaacacatttttaagatatgtatgtttgacaaatgtgtattatttccttttaaaataatatactccatatcctaaagtatatctggtattctatgtttctaaaactgaatttctttatatgcataccatagtgacagtgtcactgataatgctctgccaagattttaagtgtcttctcaattgtcaagctcaaattgttttatctgaaatagttttaatatgaagtttttttctggtattatatttcttcagaaattggtaatctgtgatttaactagattatgaggtaaaattcaattaccatatttataagtaagttgaaagtttgattgatttttgatggttaaatccacaatttatggggagcagtagataaatcatcttacattgtggaaggaattc

SEQ ID NO: 197773 - DNA, 1000 bp, Homo Sapiens
agaacgttcagtatgcaacaggcttccttctgccttcatgtgcaatagtggtctttaaagctggagcttttgctgaatgttgttgatatactacaacaatatccagaaaatgcactctatttcctcgctaatccaaagcagacaatggcatacttctaaattaataagaacactgaaaaccacaaacatttaattccaaaatcttgttgctgacattaggatacatgtaaaaatttaatccaagttcaacttaaattcttccatcagtttttgtttagttgctgtggagttttataggaaattcagatagctataggtttcccctataagttctcttcaataatttgattcctgccaataataaatctgtccatcatggtaagtgatgcttttgttattcacattgccttatgtttatttaacacaaaactccatttgtatatctccactggaatccttggtaatttgtgattgtctattaaattgtgttttaaaattggcattgagtttcaaatcatactgtataaactgccaatggtatgacactcattgtttattttaaagccatgataaggataattcccttttctgctaaatggactcagttccaagtagaattacaaggaacaacaaaatgtctttttttatttaatttaatttaattttattattattatactttaagttttagggtacatgtgcacaatgtgcaggtttgttacatatgtatacatgtgccatgttggtgtgctgcacccattaactcgtcatttagcattaggaatatctcctaatgctatccctccccccttccctctacaaaacgtctttgaaataaactttgtagtagagaacaaagtaaacaatccttgataagaatcaagaaatttagattatcctcctggccaagcaaccacctgcctgtaattttgtaaaacaaacttggcttcattgatgtctctctccttgtcagtaaaggaagagagaaataattgaattc

SEQ ID NO: 197774 - DNA, 1000 bp, Homo Sapiens
tgtttctgccttcatctgcccacaatccatacatttttcattctttcatccaataggcacatttatagagtgcctattcttgccacactaggcattgcttttcaagtttgtggacccttttacagggtactccagcatatgagaagaagttcccaggctactggaaccccatgcctacagccctccaaggcactcctggagcttctttcccaagtttctagcactaaattgttaggtttatttctgtctccctccccctggagaggtaatccctgggaatggaagtgggttagaaacagattactctgatccaagggctttgctctctcctccctaaacgtggtgtgggaggtgggggatgtggggagttgaaaatagcctgaaattcccttttaggattattgcttgatttagccatctggggtgaaagtggagcaagaagaggtgagggattaattctagacctagcttgagcaatgggatgcatgggcttcttttctggctcagccaaggtgagcaagcaacatctcttctgaaacctgtctttagaataaggaatctagggcaagcaagcagaaagaggtaaaggaaaaggatttgtccccagcagcaggggtgagtggaaggatagatgggaaagaacagcagctaagagaagaaagaccttcagcacaggaataaggaatgacttttgggcttggaagctacctgcatttcagtggtcttagcttcagcaaaggcgagaactgctctctaggggaagagagctaacgctcagggcttcctgtggacttcttgttcatccatccaacaggaactctcctgctttaggcacgctgcactggggtggactctgggggcagggatgttatctgtgtccagcacaaagagcagttacactttccaggtttctgctaggctccttatatccctttcagggctatgatggggcttggaagcagtaattataactaaccagagtgggaccatatatgaattc

SEQ ID NO: 197775 - DNA, 1000 bp, Homo Sapiens
ttttacattagaaaattagggcctctgatatttttgaagaaagaaaaaatagataatcatattactaatgaaagccaaaatgaatgtctgtctcttaagttgttagatatacttgtcattaacccaaaatcaactgagtaggagctgagtatagaaaaaaaaaacagtggaagaaagggtacattccattgatgtggttgtggatctgaaattatttaaagtgtcaacataacactgagacatctaaaaacatgcagttcaagactttgcttataagaaaattccattcaaacatttcttggggaaaacctgaagcttttgaagtgtgatgctaaggaaatcatttatttctatgtcaattctactcaacgtttctgttaactcttagattatctgcaggtaagagaatatttgatttggtttaatgttagtaatgagacagaaaataaatatagcaaaataagttctctctcaacatatggaggtcatctaattcttattaaaaatgtgctaaaatgttgttttaaaatgtttacattttcgtttgtgtttataattcagtaatcatctaattttttaataattttattattgctctataattacttataattatttaaagctattgtttttataatgttggacaaatattctaaaaagaataaattatttcctttaaaaaagcattcaaggaaaaagaaaaacagtggctaaaatccaaatacgatcaaataataatatactgattttttatatctaagctgatcacaggtatttatccaaaaaattacatgtttcctaagacagtgatttattactatattcaaataacaatgtgtaagcaagcctagaacagaagggcctacacagtcggtatctattaacacagaaagctggttggaactgtaggcaagtaattaaccttctggcccagagctttaaaaacccaaaagcagttcctagaatttcttccataatttatgaacaactgatggaattc

SEQ ID NO: 197776 - DNA, 1000 bp, Homo Sapiens
actataaagtaggacagagcttaaggccagggccaagtgttgcattttgcaaagtattatcaaacagcgtatgaaatgacactggactgatcacgaacttccaaataagagattcatttaaagccttatgtttagggctcacaacttaactgcccaaggatatcagagggcgcagctttacataaacaaatgaactaatgatacgtttacaaagaaatcagaccacaggtacaactattaaaataatcaattaaaaaatgacttttggccaggcacgctggctcacgcctgtaatcccagcactttgggaagccgaggcgggcagatcataaggtcagaatttcgagataagcttgaccaacatagtgaaaccccatctctactaaaaatacaaaaattagcccggggtggtggcacgtgcctatagtctcagccactctggaagctgaggcaggagaatcacttgaacccgggagatggaggttgcagtgagccatgaccttaccattgcactccagcctgggcaacagagcaagattccatctcagaaaaaaaaaaaaaaagacttttgtttatagatagtgaaaagagattgggttaagagcctcaagagcacagttctgttccattaaaccctaaattaccgtgggatcttgggcaagtcctggttcctctctgggttcctgaaccctcatctctaaatgaaggttgactggaatagctaatgattcagttaatgactgcatacatctgattcctgagaattctacttggtaaaatggagtcctcagccctccttagagaaagtagtggttcgaagtggttagactgtctgcaatagggaacatgatttaagatgccacgtggtaaagcgggcagtgacaacatggagtggaagcagatgggagtgatgaggatggtgagaggtctggaaactgtatctcatcagattagctgacactgtgaatggtgggagcagcctgatatggtgactaagctt

SEQ ID NO: 197777 - DNA, 1000 bp, Homo Sapiens
agaccaggattgcaacccctgctttttctttgctttccatttgcttggtagatcttcctccatccctttattttgagcctgtgtgtctttgcacgtgagatgggtctcctgaatacagcacaccaatgggtcttgactctttatccaatttgccagtctgagtcttttaattggggcatttagcccatttacatttaagtttaatattgttatgtgtgaatttgatcctgtcgttatgatgctagctggttatttcacccataaattgatgcagtttcttcatagcattgatagtctttataatttggcatgtttttgcagtggctggtactagttgttcctttccatgtttagtgcttccttcaggagctcttgtaagtcaggcctggtggtgacaaaatctctcagcatttgtttgtctgtaaaggattttatttcccctgcccttatgaagcttagtttggctcaatatgaaattctgggttgaaaattattttctttaagcatgttgaattttggcccccactctcttctggcatgtagggtttctgcagagagatctgctgttagtctcatgggcttccctttgtgggtaacatgacctttctctctggctgtccttaacattttttccttcatttcaaccttagtgaatctgacgattgtgtgtcttggggttgctcttctcgaggagtatctatgtggtgttctctgtatttcttgaatttgaatgttggcctgtcttgctagcttggggaatttctcctgaataatatcctgaagagtgttttctaacttggttccattctccccatcactttcaggtacaccaatcaaatgtagatttggtcttttcacataatcccatatttcttggaggctttgttcagttattttcactcttttttctctaatcttgtcttctcgctttatttcattaatttggtcttcaatcactgatattctttcttccacttaatcaaatcggctattgaagctt

SEQ ID NO: 197778 - DNA, 1000 bp, Homo Sapiens
tctgcatgacctgggtgaaaaccccagcctccaaataggtttcctgactcccctcccaaccgcagacaggggatatcttcaaaacacagccccagtcccttcacactgcgctgaaaactattccaggttctcagagctctcaggatggatcacaatccccacaactgcagcttgtgggttcagccccaactcactgttccagggaccccttcatgactcagggcctttgcagagtgggttccctctacctggagtctttctccccatcactgccctgacatgcaatgcaggggcatccttcagctcacagttgaaacattccttcttgagggaggcccacctatctccccacccctttctcaaacaccctgatcccccatttaacaacttcatggtactttgtactgtgcctgctaagtacttatcagattttttcatcaaatatttctcaggcactattttatactgtatatgttaccttatacattatatgacatttgatatgaacatgctatatagtatctaatacaccatgtacagttatcgctaggatgaaccatatgaattgccatttgtataggtcataagttggcgaaccacagcctgtgggccaaattcagcctgctgcctgcttttgtacagcacacaggctaagaatggatttcctttttttttttttttttttttgacagcgtctcactctgttgcccagactggagtgcagtggtgtggtcatagctgactgcagtctcaacctcctggacttaagcaatcctcccatctcagcctcatgagtagctgggatacaggcatgagccaccacacctggctttttttttttttttggtagagacagtgatatggcttggctgtgtccccacccaaatctcattttgaactgcagttcccataatcctcacatgtcatggaagaaacccagtgggaggtaactgaatcatgggggtggttacctccatgctgttcttgtgacagtgaattc

SEQ ID NO: 197779 - DNA, 1000 bp, Homo Sapiens
ccggattcaagcgattctccttcctcagtctcccgagtagctgggatcacaggcatgtgccaccacgcccagctaatttttgtatttgtagtagagacagggtttcaccatggtgaggctggtctctgccttcgcctcccaaagtgctgggattataggtgtgagccaccgcgcctgcacttggcctccaattaaactttactacaaggacaggtgcttggcctgatttggtccatgggcatagtttgacaaacagtggtttgaacaaatggacctagggacttcagcagtaatccagtcctgaactaagcaatactataccatttttttgtatagcttttatatttatacatgaagtgtaatatcacataacgttagctctgatctagtctgcctggctgtaagtcctggcatctcctggttattgacagtgtgacattgggcaaattaacttctctttgcgtcagttttttaattttaatctttaaaatggggataatagtacttcttacaaagggttgtaaggagtaaatgagttaaagcacataagtgtagtgcttgtacatataataaaagctcaatatgtgttaacttaatattttaaaaattattcctcatatacattattaaaggcagatctgagagatgttttaaggtagaatttactggcttaatgcatctctagctacggaggaaagacagtatccaacacttcaaggcaagggccgttcacatagaggtaatatggaagtcataaaagtaaattaagggagagagggaggtaggaaatggaggattaaggactgattttgatgggatgcacaggagagaaagtggggagagtaaaaaggaataaaaaagaagtcaagaaggaggcagaatcagtctctaaagtatgataggaaccagaatagcatagtagtatatagactaacagaaggatgggtggtgaggtactgctgagaataacagttattgtgttgatgatattagtgaattc

SEQ ID NO: 197780 - DNA, 1000 bp, Homo Sapiens
gatggcaatgtctctgcgtccacagcagcctctggcccttttccttggctgttactggccatgttcatgactgagctcctttgaaatgtgttcactggggaagagcagtctcctgtttcctgttgctactgcttgaaatcatgatttcagagcccaggctgtaggatgggcagctgcctcttccctaggtgggaacagaatactggcccagcctcttgaagtcttcttgcaggttcctaccctcttggtactttagaggggaccctgagaagcagaagacatctttttattcctggaagcccctgctctccttgtccatggtgttggagggtgaatatctccaaatcagcacctccatggcaccacgtgtgggtgaccaacaactgctcacaaaggtttcttccccaacctctgggggaactccaggcagggagacctgtggaaatacctcagaggatattcctgtaatgtggactgcttggacctcttagaccctccccacttgctcttgcactcaccagccgagcctcctcacggccagccagtcctcttcctggcctctcttccaggcccagctctgtgccagcgcctgggggaggctccattctcttaccctcctgcatgctttgttttactcccactggccaggagccttctggacctccttgagaagcagtctcaggccagctcaggctggggttggggagatgggccatggttgtttcctgatatgatttggaacttttgtcctctccaaatcttatgtaaagaagtggcctcccatgttggaagtggggcctaccgggaggtgtctgagtcatgggggcagaaccctgatgggtgtctgggtgccatcctcaccataatgagggagttctcactccgagttcacaggggagcttgtttgaaagagcctggcacctcctcccctctctcttgttcccactttcgccatgagacacactggctcccctccctactctgccatgattggaagctt

SEQ ID NO: 197781 - DNA, 1000 bp, Homo Sapiens
accagagctttctctacattctctacatcatggcttcttatatgccatgcaaaattctcaccaggaatttatggtctgcaatattaaaaatgttccccttgtggtgttgaacatgggaagtcacggatactgaagattcctattgggaaaagctggggtccttagtaaagatgaagaacatctaatgttgagattccatctgagctcccccttagctctatgcagaacactgtttagaaaatgctgatttaaacaagatggtatttattacacaaaaacttctaaaaaatttattaggagatacttgctattagagtgttaaagacagactatttaaaatcactactaaaaatgacaaattttcgaggtaacttctaactcaacatatcttttacatctgaaacatatacataactgattctctatgatgcaagtagaacactgaaaagtgtacacatttgtgtttatactttatcatccagaaaagtattatagatacactggtgttgtggatcttatgccattctcttttctcaggattagagatattaggaaatatttctgtgtaaataaatattttattggataatttcagtcactcctgtaagtcagaaccagttctttttactctctcattttgcctttagtcaagttataaattttgctggctacctggtgtgtgtgtgtgtgtgtgtgtgtgtgtgtgtgtgtgtgtgtgtgtgtgtgtgtgtatgtgtctatgtgtgagtgtttgtgtttttcagggactgttgacatttacagatgtggccatagaattctctctgatggagtggcaattcttggacactgcacagtggaatttatataggaacgtgatgttagagaactacaggaatctggtcttcccaggtgatgacaacttcaacacacaattccaaatataccctaatggtttcatttctcttttttgtagaatgtgttttggtaatttatgctttgcataaatgagtttcagatc

SEQ ID NO: 197782 - DNA, 1000 bp, Homo Sapiens
tatttttctattttctttcattctttttttgacaggatctcgttctgttttccaggctggagtgtattggcacaattggctcacagcagcttcaacagcctgggctgaagcgatcctcacacctcagcctcccgagcagctgggactacaggtgcatgccacgacacccagctaagttacatattttttgtagaaatgggattttgccatgttgcccaggctggtcctgaactcctgggcgccagcaatctgtctgcctcaccctccaaaactgctaggataacaaacgtgagccactgtgccaggcagatttaaataattttaaaactcttgtgagagattcccagtcccatctagtacaaaaaccttcctataacctttctccacatggtattttagacttggtttggatatatctaatgtatgaatctcattctttcattaggaaggtgttttacccctcatttttagcaactcctgtagataaaaattgtctgattataactcactttcatgtttcaagtgttggttcctagttttaccttctagagtggctgtgttggagcctgggccttggggaaccctctgaacaccttaaaattaaaataatttttattttgtcatttcacatggaaggacatggagaagggtaatttctatttctatatccaaaacacatatgacagtctagattacctaggctgggaccttgtggcactgtatgtgtgctcccatggaaaccttgctataaatgctggctttatcttttgatgctattatgttcttataattaaggtacaccattggctaaattggcttttgttggttgatctggggactgaatcattactaacaatgaaaggtattacattatttcctgtacaaatgcattctgagctctctatatgtggttaatctggggaatatcacaaatccctaagaagggaactgactagattccagattggcctgatccctgcacaaagcagaattgttattt

SEQ ID NO: 197783 - DNA, 1000 bp, Homo Sapiens
gggcttgggagttttgcaagcgtgtggcacggcagaacccacgcccgccttcaagcagcattgggaccactgcggagatcggtgcttgcagatccgcagcaatactggtcattgcttttgcaccatcggggaaaacagcaagagacaccaacatctgagtattcttgctgaaacaattttgaacttgcagatgccctgaaagtatcttgggagcccaagctcaggtgctttgctgggcccagcccaccccaatccagcccatcccaatccagcccaccccatccagcccaccccaatccagtccatccagctgacagcacgtcctaatttcttggccatgtcaggcacgtcaaaaacatttcaaccctggcatggtggtggggtctttccatgtcctgcccagggaccacctccattggctggctcctggctccctgcacagctccatcccaaggctgacttgcccagtctcctgcggagccactcctcttggggtccccctcttgaaaagacccctgcccaaagctccagccctgggatgctgatagcagccgtgctgagattgaggctggggtagaggggccatctagagcagtcgctcccactacctggcaacttttgcaagtttctcgtgcctttgtccattccttcactgaaaattatgcagtctgaggtcaccaaatggtggccctcagtagaaaggaggagctccaaaacccatacagagcgccaggcatgtggctagctgccttggggagctgacaatggtggtgtcggtgctactattcctgtggatactgagcagaaggagaggcagctgtcccagggcacacaccgcctggcaggagacagacaccagcagtcagagagaagcacgcaagtgctacgtcagggagtcccctcagggtcccgcgggacacagagcctacccagccactggccagagacaccatggcccccaatggtatccaagctgggacttgagaatcagtaggaattc

SEQ ID NO: 197784 - DNA, 1000 bp, Homo Sapiens
ctctgatagatttcatcttaaccaagttataaaacttagtatcatccataattaagtggccatgtcccagtttacctgggtcataccctggtttcatctgttgtcttagagtacttacttattaacagtacaccctttcacccgcaaaagtataccattttgagtgataaatgatagggtcattatcctaataatataccttctaatagaatacaataagaattatacaagatcatttatatattattcttgtcaaaattttaattttatcaggaggaaacacaatcagagaaatctaaaccatgggacattttataagacaattactttgagctttaaaaaaatgtcattgttaccaaataaaaaaatctttgagtgtgctaatcatattacgggtaggtaggataaaatcctcatttcttaagagagaaatgctggtgtctttagataacaaatagctgagtcttgcttttttacccagtctgatatgttctatttttaaattggagtgtttggaccatttatatttaacataattatcaatgtatttgggtttaaagttattattttgctgtgagttttctatttgccccctctcttctttgttctcttattcctgttttcctcctggttttagattgactgagtattttttcatgtttcattgaactctctaacttgaattaataatatgtctttgtttacttattttacttgtcactctatggctttcaatatgcacagttaacttatcccaggataccacttcatgtctaatacatacacccacctgtccctcccttcctttgtcctattcttattaatatcacaatacactattattttgcttcaaaaagtcaagaacaatttttaaaaatgaaaatagtgagtgcaaaaagtattttctatttacttacatgttgaccatttctggtgttttttacttctttataaaagtatgtttccatttggtatccttttcctttagccagaagaattc

SEQ ID NO: 197785 - DNA, 1000 bp, Homo Sapiens
tgccaccttgtggggtttccatactgcttctaatcattgcaagatttcttgtggatattttctgtctttaccctcagagttcaataggcccttttctttctatcacgctccatgcacttgaagggttaaaaagacataccgggaatcagtgtaaatgttgacagtctcaccctcactgagttctaaggcccaatgaaagcaatgagttcagctttctgggctgaagtggcctggggcaacgatccggcttcaacaacagtgtccagagttatcactgcataccctgcacctctctctccttgggggttgaagaagctgctcccatccacgtatggctcccagtctactgatgcccaagcctggtcccggaggtcaggtctgctagagtcaattgagtccaacatttctacacaatcaggctcgacagggctctctgacacggggagcaaggtggtggggtgtagggtgttacaaactttactggttatacggggattttcacagagcaaagtttggtccttggtgagtctagcattcgttagccaatgatgtcctttagtatccattaaagtcaccacagcatggggggcctttatgttcaggttttgcccaagagtcagcttatctgcttctggtactagcagggcagttgctgccaaggccctcaaacacgggggccatcctttagaaaccccgtctagttgtttagagaggtaggccaccagcctcagccagggcctcacagtttgggtgaaaagtccagctgccatcttttctctctctgacacatacaatggaaaaggctttgtcagatcgggtagccccagggctggggctgacataagtttttcctttaggtcatgaaaggcttgccattgtagggatccctattccaaaggttcctggtacctgcccactttgtgaccccatacaaaggcttggctaatactgcaaagtttgggatccacagtctacaaaaccccacagctcctaagaattc

SEQ ID NO: 197786 - DNA, 1000 bp, Homo Sapiens
atcttccatagaaaaaagtaggacagaaagtgtaacatcttactcaaaacatgaacttctcctaagttcaaatgttaagtcaaatgttcaacagttcttaaagcaatcatgtgattgaagctcatgacaaatttcctaaaagttaagaaggaagtaacataatggactgaaatgaaatcaagggctgtatactgtcttatacgtagttgactatatttactgttatattttagtttaattctcctagtgttttcccatattagcaagaaacaatgggaatcatgagtcagtactctcttattatgcaaataaataacaagggaatttagtcatccaggcaggtgtcccaaaacacattataccctagacacagacatttatttatctcaaattagatactgaagtctcatcatttcataatccttacaattttatgattctctataaaattcaaatatatatttgtataagatacaaaattctttacatttgtttatattcaaaacaaaacataaattgtggaacactgaaaactgtcagcctaagtttaattaaggagagagaatgactggcttccttactgcaaaataagtggtatgtacagtcaagcaataattcagaaagctctcctccaaaccatctactacatacaaatttattacccttaaatccttcttaaactagagaagagtttaatatgcacaaaatatgcaaaccaactgataacacagcatcttcttggagtgctaattttattcaaagattcattcaaagatttattcaaagacaaaaattctgaatttgtacttttaaaaagttttgtcaggtgaggtagggaaaaaacattttgtcaagtgaactcacaagcaaatctgcagcaaggtgcttttatattaagaaatgtaagtttaatgataaaaatctggagagcaggaattaaaaaaatctatctttttcaccaagaaaccctgtctctactaaaaatacaaaaaaattagct

SEQ ID NO: 197787 - DNA, 1000 bp, Homo Sapiens
cttgtcataggctccagggagcacaggtttgagcctaatcctgcaatcactcccttcactgacaatgcaaactcgcctgcattttacaaatccgtaagtactctcagccttcagctgataaagcaggggctgctgccctgtgcgcaacaaaactgcgccctcaaaatgacccgaggctgtaccacagcgccctcgccaggcagcaccaggcggcacatgcttttacagaggtggtgatggttggggatgggttttccagggaccctcctctgcagaagactcagcaagcccaaaggagcacgaatcctttttgttaaaggtaacatagcctcagtgtaagcttgtagaatatttccctgccacactttacaaatgagaaaaaaagaggctgcatgcagtagccacccacaagcagcgaaaaagagcagtatttgctttgggaggttttgataagaagccaggcagttacttttcccatctatgttggaaactctggtttgggcttgctggcgaatgccgtgcaaagctcatcttttgttagtctgccgaacaatgttattggttataattggggcaattatgggctgcttgaggaagctaaacacagatgtttaagcgcaggatgggggtattcaagtccaaagcagcttgctttaaatagtccatttcccgaatcatcctgccttacttgaaattcccccagaacttgcccatgttcagagcgagattcggggaggaggggctgggtagtgaagccggggaagcaagactcgagggagagagatgcacaaagagaggaggaagaaagaaggtggctgagagagcctcgagagttgggatgcggtgactatgaacggagtattctgcatgacctgggcaaagacctttaggtgggggagatgggcagggggagagggatgccaagcaagagaagagccctctaaatgaatcgggttctgggagaccaaggtcacgcccgtagaaatgctctctggaattc

SEQ ID NO: 197788 - DNA, 1000 bp, Homo Sapiens
atgatgctatttgcttaaatgctgacttctgaattggtatttctactcttttctcgtctgtcatatagatcaacattttctagttctttctgtagaacttcccttgaatctctcccagtctttaattcttccttccttcatcaatacactcactaaatatttattgaacacctatcatgtgccaggcacaagtcttgagtatgatgaatatagatattttgacttgacatactgaagactaaccacattccatcctcctctaaacgttcattttcttggtttcatcttttgaccaaagacatcagatcaatttggccaaccaagccaggctgtctcttacttctacagcccagtagttaccaagtgatgtctaactttatttataaaatgagttttgtatttgctagtgtctcatcgttttcatacctattgccgtaaatcagacccttattatccctattctgggttatgcaataaatgattaccctgcctccaatctctccttttccaattcatcttaaattagctttttaaacacagatttaattatgttatttctctgctcaaagatttttggtgagtccccactgactatagaatagtatccaaatgcttttcacataatcttttacacctgatctcaacctacctttcaggagttcgccaactctgagcaatttcctgaatttaaaatgcaatgtcatattctgccctgtttacattattctctttctcctggcacaataagaatccatcacatttgtatgttgttttccagtttacagtgaaatttcccatgcaccttctgtgaggtaggcagagatatttccccccagacttagagctggaagagtcaaggttctgaatgtgtaggtgacatactgagcaagctaatcttgcttatgattagcaagagagcccagatactaaacatcaatgggcagtagcaccaagaaacagattaggatgaagtgtagtattttaccaccaaaatgaattc

SEQ ID NO: 197789 - DNA, 1000 bp, Homo Sapiens
tagggcttccccagtgaaaagcaacccatccaacccatcaggctgttttccatgctctccggcagccactccttccacagcgtttgctccaccgcctgtccccacgttttccaataaagcagttgaggctggaaaagtcaagagattggcctggaatccaacaactcactaggaagtaatgcccaaatctgagccacatctggagattccaaaggtttttctgtaatccacacagctttcttttagtccagactttggaactagaggtgctgggactttcattgtttgcccattcattccatgagtcctgagctgttctcagccctgaggacgcagcctgagacaaaatagatcaagatccttgcccttcgaaagtgacaagaatcagaccccaagccctcgacctctcctgcactctcacaggcatggcagaggtggacgcctcagtcctcccctgcaccccagctccagaagacgttcactctccctgccctccaggggcccacccctcccctgaggacagccagttgtcctgttacctgaaacttctgagtcactgtccccagtgccatttgcctgggcagggattgaagctgagtgaggggttcaagactgggcaggacccagaggacagcacgctgggctcatggagcgacatcaccaaaggcgggagcaccccaagctgctccttgccaggccatgtcccagttcctcggagggctggagacctaaggctgtgaccttcaggtgtccttcctcaaggagggtgctgagacaaggggcttaagacccacatctaatccagaaagtatttcgaagacagggtgcaaacatggatctctcggggctggcagaggggccattttagtaaagtatttccaggccaacccaggaaagtgcttgagaaaatgagaaggggagctgagtccaggtgctcagggcccccatcacagcttcgtccatcaccagcaacccccaactctccgacgtgttagaattc

SEQ ID NO: 197790 - DNA, 1000 bp, Homo Sapiens
ttgcaacaatatgaatgaaactgaaggacattatgctaagtgaaataggccaggcaagaaagacaaatattccatgttctcactcatatgggggagcttaacaaacacatttgaactaatgaagataaagggtataaggatggttgccagaggcttggaagagttgtgaggagggagggataaagtgggaatggttaatgggttcaaaaacactgttggacacaatgaataagatctagtatttggtagcaaaacagggtgactaaagttaacaataatttatcgtatatttaaaagtaagagtgaaataggaaggttcctaacacaaagaaatgataaagccttgaagtgatagataatccatttactccgatttgattattacacattgtatgcctgtatcaaaacatcacacgtaccctgtaaatatatacaactattatgtacccataagaatttgaaaaaacatggccgggcgccgtggcccacgcctgtaatcccagcactttgggaggcggaggcgggcggatcacgaggtcaagagatcgagaacatcctggctaacacggtgaaaccccgtctctactaaaaatacaaaaaacaacaaaatccatttggaattttttaaagttgtttggacttcaacttttctaaaatagaagactgagctccaagttatacatttaaattctacatctattgttcaataattattttttgaacatacgcgagatactgtattcttttagttactaaaaaacacatacaactaaaaatacgtttgtggcaaattacacggatttttagttctgctatacaatttactgcttgcctcaagtttaactgaaatggtagccataccaactaactactgactgcttacatgcaagagggatgatactaaccatcctcacaacactaaggtagacattatcatcctgatttacatatgaggaaactgagactccaagagattgtgttgcataactagggggaattc

SEQ ID NO: 197791 - DNA, 1000 bp, Homo Sapiens
tgagcagaagggcaagcataatctcctacatggtttaaattatttttttcttgtcaagttcactttatgggcttgatgtctatctagaggtgttctcccaaattccaactttcagtatgcctatactgtcagccattaaagtgtcagtaagtcttcctggttttcctcttacaactcaagttctctttctttagtacatactgtttgtttatttgtcgagacagtctcacctatgttgcctaggctgatctcaaactcctgggcacaagcagtcctccctgcatgaagtgctgggattacaggcacgagccactgcacccagcctctagaacataggctttcattactattctccagattacatattttgactgacctaaatcatatatgtagagtaaaaacaaattttatctaaataaacttattggacttcattcaaagagaaattgtttccttgggcagttttgctcccaacattagatcccgcattctcaggacagctgtcatctttttaatttagttttctgattttatttttatttattttgttactccaacctttgctttggcctttaacaactcagtgttttggtctaatcttcaagaggaatttgaggttcacttgaataagttagactagtttgaggtgggtgtagctagaggattgaagtcgtaccaaaaaaaaaatgtatgtatatgtatatgtggtgatcgtgggtagggggaagaattcagagggaagaagcttgtggacgtctttgcctggacgatttctaaaaactagctgactcgtcatctttaaaacaacaacaataaaagctatcatatgcatatgttactttgtttaatatttacaacaaccctttgtggtaaatattttcatttttcagatgaggaaattcaggcacagaatgattaataatttgctaatgagtcacagcagtgatggggatgtggagatttaaatcaatgcattttgagttgcctgagcaaagaattc

SEQ ID NO: 197792 - DNA, 1000 bp, Homo Sapiens
tcaaaaaagagaatgggattgaaattattattttctctatcataaaataattttgatcctctaagaaaaatcatatcatggagtactcttcagacacagattacgaatctaacaggcctgttaacaaaaattaacattgatgaactaagaaaagatgaattaaagttctaccagataaaagttgcatggacacagaaaaaaggtaataagaaataaataacatgaaaaatcaaaagtataatatataaatatggaagaaattggaatcaacactttgtacttgaagaaccaaaaagaattttttaaagtgtgacagtaaagagagatgagacaaaaagggggaagataatgtagattccttaagagtagaatcttttgtctttgttcatagctgtaactccagtgcccagaaaaatatctggcaaatagtgggtagtgaacggaagtaactaaatgagtgaatgaataggataagtaagagagctgacactgatacaacaatagtggaaaaagaagatgttataaaaacataaaaatatttttataaaaataaaactagaaatagaattgtgatggagtaaagggaatgtgggaaatgatcaatagagaaatgagaggataaaaacaattgaagataaaaagatacacagaagtacaacaggagataggaagaggtgaaagagaggagtagatgatataaaatattaaaattaccaaaaaagatagaaatggtaggaactggcaaaaaagagaggactttagatgatatgataaaagattaagtagaagacaagagaaacaagtagctaacatgtaggttgcaagtactattataatgctagttaacagcagagcttggattaataacatgattcaattctaaaagaataatagctccataagggcaggcatctttgcttgtttttattcactgatatatcctaagcatctatgtgcctggcacatagcaggtgttcaaaaatatttcttaaatgaattc

SEQ ID NO: 197793 - DNA, 1000 bp, Homo Sapiens
aatatccggtgtttgggaatctctgaagacaacagtctggtctattctgccattgtcttagtaaggaggtactaagcatcattttcataaaaagcaaacatccccgctggaacttaagtcaattgaagcttgccttcttagcacctgacaaatagtgctcagataatggctccgagtgagttaagcatgggtcatatgcatgtcacatactcactgtcccaaaaccagtcaacagtgatagagtgaatgggacactcagtgtccaaaaaccagtcagcagagtgaccagagtgatggggacgcgaatgtttcctaactgctgtacctcggtagcagagacgacatccagcagagatgacagcaaaaacagcagaaagctcttgagatctgggctaagaaagggagccatagctcaggggctgtccctctgccagcctcttggtatttcactcaaatcagaagaagtgtaaacaagtcggtccccggatccccaaccaacgtttgttcaagggtgatgctaagaacatcggaagaagtgtcagggctgagcattcgagaaaccaaatagatgacatgcctaacccagtctcaagccaaagccagtgccgtccacctaagaagcaggagtggactgaggttgcgggaaggcaaggaggagcccagggctctggcctgtaccactagaccgcagtgcagcggtggcctgggagaggcccgctggacacacttcgcaatgggccagttcagctgctggtgctttcctgccttgtccaactatgtgacctcaggcaagtcacttagcctctcagaagctcacctggcagggtcgagaggaatgctacctagcaagacgctgtgattctcggtaacttaagttctaattccacttaaaaataggcagtcatgaaacttaacgaccaaagccaaactcaaaagtcactgggacttaaaagacatcaagagttaaggggcttctctctttgggttcaggctagaattc

SEQ ID NO: 197794 - DNA, 1000 bp, Homo Sapiens
attcgttggcatagaagaaccaggatgggatggggcagagggaggaagattgatcagaggttctaagagtagaaagtatttgaaatagcattatgtaaagtgggagaatgagctgacccaagaaacataaagggatgacggagctgtaacagcccatttgaggccagtgacattaatttataaatattagagtgataccaatctgccttcttatctgacttcctactgcaacactggggaatgggggtttcaaataaattgattagcaaagacaaaattagaatatctaattgccaatttgtagtatatacatttttacccaatccacccaccctcttaaaaggagagtgaaagggtataacatattttgagcagttacatacattaataattgaattctgacaacaccttgtatggtaaacagtatattcattttacaaagagaagatagaagatgggattcattcattatatcataaaatcagagcaagagcccacattttttccgctatgtcatgttgctacacctttcaaacagggttatattatgtgaatctaatcacatcttcccatcccaaagaaatgtcaaaccagcggcatctagaagccctctaagcttccactttaaaaatgtgctaacaggcaggctctgcttaggactcaggaattaatcaaacttcattgtacctcttgacattatctactttttaacagaagagcctatgaactgaattctggccaatcatctcccaaatactaacctgactctacccaatgcgtaacacctggcattcactttcacagattattaaacaattgatatcatattttaataaactaaaacttaataacgaaaacgaattgtcatcctcctcccattgctactctctctccctcacctccaaagaaaggtgaactacaggtcttctgtgagtttttaaggaaaacagctgagactgtattgatacaagtcaaaaattaccaacaatcatttgaattc

SEQ ID NO: 197795 - DNA, 1000 bp, Homo Sapiens
tcattaatattgccaaaattataaaaagacctatcctgtagaagtgtcaaacaatgccactttatttgatgtagatatgcattttcccccaaccagtaagcaaatgattcattatcctcatatctatatccatgcatccaaagacttattgaacatttaccataaatcagagattgctgcttaaaaacatgagttcaggccgggcacagcggctcacgcctgtaatcccagtactttgggaggccaaggcgggcggatcacaaggtcaggagatcgagaccacggtgaaaccccgtctctactaaaaatacacagacacacaaaaaaattagccgggcgcagtggcgggcgcctgtagtcccagctactcgggaggctgaggcaggagaacggtgtgaacccggtaggcggagcttgcagtgagccaagatcacgccactgcactccagcctgggcgacagagcgagactctgtctcaaaaaaaaaaaagaagagctcaaatcccctctctacaaaagcttacaatctaatgagacaggcagatgtgaaaagaagtagctataatacaatcccataaacgttgatatcagcatctaagctgcaatggaaacagtatctttgtatcaaggagagtcaggcaacctgagatgaatcttgtaagatgaaaaggagtaaaggaaagataagaagagtcaagccatcagttaaggggtgagaacatgttatacaaaagcagaagagaagaggtcacagtcaaagcctatagggagattctatcatcaacaaggatggttccaaccctagggcactaacgcaaagtaaagaagggattaaaaataagattatcccacataaaaccctagatctttaaattttacaactaaaatttgaatttccctttaaaaataatttgattcttgatgaaagttaacaataaggatagttaaggctgggcacagtggcttatgcctataatcccagcacctgagctcaggaattc

SEQ ID NO: 197796 - DNA, 1000 bp, Homo Sapiens
ctgtgatcaaaagattgtctggttttgcctttaattgcttcatgtattttggagctcttatgtgaggtttatacacatttataattgttatattttactgaaaaattggtcagcttttgcagtaattcttctctgcccgaaagaagtatccaggtgatttgaacatcctgagacagaaggtagatgtagatgttcatctttctgaatatggtttaggcctttgaattagactgttctagcaaattgtagttaggaatcttaatatttactgaatcctctttttttcaaatctctaagtttaatctttaatatataattatctgcatattcttaacattaaaaagtttttattatgactaatttttattgcagcagaaagcaaaacagaaactggccaaacagtttgaagaattttgaaatcaaaatacaaaatgaggtttgtagtaggaagtagaaaatacagtataccagccttatatagtttggaaatattttgttgtgctgattaatttttggtgaattagatagtgaatgatgcagtttttaaacctcagtgactcaatattctgccacagtgatgagaagttagtgacaccctgcactgcttttataacaagaattcaacttaggctgtagtctcttatagtataatgcattcgtttggcttagctattttgtcctaattccaaggacgtgtcttcacaactaaaaaatgaataggaatttttacgaagtcacatttcttccagtgctatcctgaggggaaaatgtaatatttgcactgctcactgccttaagttgatccgaaagttagatcagtaaatggacactgattttgtgaaattcactaactacatatattaacttctctttgtagagaagtgaaattaaaattaaatactaggaattaggatatttaataatatcagcaataagacttcagtgtatagatttcactccaccttgcccaggatgaaaaattattgaatgtgtagaattc

SEQ ID NO: 197797 - DNA, 1000 bp, Homo Sapiens
caaagaggttcatacatgaccaaagacacttcaacagaatatttactcctggaataatcatttaaactctctgtgcctgttttcttgtctataaaatagaggagagctctgagctttgcctacattacaaggcggttgtatgcgagaaactgaatgcatagaaggatggaaaaaccataggatttacagcacagagtaatgggctctatgtaatcctggctctgaaactgaactcgctgtgtgaccttgggcaagttatagaacttctcaagtacaggcatatagggtattatgtacacatagtatccaaaacagtgcttgatatacaataggtgctcaataaataataacctgttatcaaaacagtcttttgtaaaccacaaagcactataaatgcaatttgttaatgatgatatatagaaaaagggagaaaaagtagtgaacaaaactggtaagacagaagtgcagtatttggagtgtgagtataagatatgtttgaggagtgagtagcattgcatggctgtaggatgggtttcctgacaaaaggaaagagtctgatttttattgtcaagaatatagaaaactatgcatagagagcattttgagaaaaatataacaagataggatctatgctgtaagaaaatcactgtttagaaatgtggaagatggtatgaagggagaaaaactggaggcaagacaaccacttggttaggaggtaagagtgcatgatactgagcatggggatgaggcagaggggctggatctcagagtcatggagaagagataggagcctgttaacaagagtctagtgaagtaagggaaaactcaagagagtagggatgtcaacaaatgaggacaacaaataaccatttagatcatcttcatgaataaagagaagttccataagatttcaaggcttcaagtggaagatttagagaaagtcaattccattgttcaagaataaggagaaaggagcatatgtgtaagtgaagatgaattc

SEQ ID NO: 197798 - DNA, 1000 bp, Homo Sapiens
tctccttccacaatattctaaatcattaaaataatggtccctctcaattttacaaccatcagctttcctagattcaggtaaagacattcatttcatttgacttataaatgcagttgtcctcccataaaaggataggtcccttaatataatcagccatctactctctattcagatttcagcttcctgagaggttttctctgcttcccaaataaaaagatccttcactattctctatcaccctatattatccttcatagcttatattgttcaccatcacatatccactaactatcataaaaaagtacctggcacacagtagatactccatgaattcttgaataatagtaagcaagacagcaacatgtcattcattaaacatattacatacattatcccactgaactctcatataaccctgtaacacgggcatattttccttttaaattaatgatgcaattgggctctgcaaggctacattacttgttcaaggtcattcatatcataatccaaagcacatacaaaatattccttccatgatactaccactcataacctggatataaatggttagattttgatcatttgggaattccatgctcaaaacattattctaaaataaaaaatatcctgaaaattatacagtattcacaaatactccaggaagaacagaaaactataaatcacttttaacccagaaaactataaatcacttttaacccaaaatattgttatatagtaacaaagagaagaatattatgcctcatagaagtattcttccttctcaagcagaatggaaaatattttctatgaatttacaaattcattaaattccagccattcactgacttgagtttaagggatataactcattttatcaacattcaaaataacctgagatagttgcagacttaggaatttcagttgacaaaacattagaggttatctagtttatagccctgattgacagaagaggatcatgtgacttattctagattaaatg

SEQ ID NO: 197799 - DNA, 1000 bp, Homo Sapiens
caactctcccacttcagcctcccaagtaactggaagaaaaggcgtgcatccccacgaccaactaatttttgtcttttcagtacagatggggttttgccacattggccaggctggtcttgaactcttgacctcaggtgatccacctgcctcggcttcccaaagtgctgggattataggtgtgagccaccgcacctggccaagctttgtaaatttacttaacttctctaagcatgaaattcccatttgtaaagtgaaactaataatgtcagcctcacagaattgttgcaaagattaaataataaatataaaatgtttaaattagtgtctggcattatggtagatacactataaatagacacatattattattaagtacatctctctacacaaaaaagacctagaatcaaaatttaaaagctgtccaggcacagtggtttgtgcatgtaatcccagcactttgggatgccaaggtgagagcatcacttgagccaaggagttcaagactagcctggataacaaagtgagaccccgtctctacaaaaaatacaaaaaagtagccaggtgtgctggtgtgggcctgtaatcccagctactagggaggctaagccaggaggactgcttaagcctggaaaggctgaggttgcagtgagccgtgatcatgctacttgcactctagcctggacaacagggcaagaacctgtcttaaaaacaaaacaaaacaaaacaaaaacaaaaaaagctggaaggtactcagaaatcatttggtccaattgcagtgacttcatacatgaagaaactaaaagaaagaatagctggcttgcctgacaacgctctgctatctaatggtagagttgcaattaacacttaggtttctgggatctcaactgatattttccctacaatctcaaaatgtttcttgttcatctctctgataacaattaagcctaacttttctaatctcaatttcttcattgataaactctaaggacaggatgaattc

SEQ ID NO: 197800 - DNA, 1000 bp, Homo Sapiens
tggtaacagtacattatatgtggatgatgagtatattggtgttagcactgttaaaaacattatggaaaggaatgtaagtgataaagtagtataatgactaaatttagttggaaactactgctgtaacaaatctgtataccatagaccaaacaggtgtttagtggccatttaaaaatctgtgccattatggcaaaggacatttgctttggtacagaataatctgatccactgcgcagtcaatgagcagtgagggttgattcccatggcagtccaatctttgcttatcaaggaaggatggtgtgaagtttctacagactttctggtaagtgattgatagatgagtttatggtgtgattgagtttttgctttgagtttatgcttagtgattgataggtgagtttatgctttgtcaggtaaagcatttaactgcaaatgtattatgtttacacaaatattcttaattggaaatagtttctgaatatgcacctaaaaatgttcttatgaaatatgtcaggcaggctgatttttaacttgaaaacttctactttaagaaattgtttgggtcccatcgcctataccatgtagaatagaaacaaaaagccagttatttaatttttaatttgcaattaaactcttggccaagaggatctgttgtccaaaattacatcgtgatagcttaagaaaaaaaaaatcttactttgccagaaagggaattatacaaggatatctttatgagttgctgccaaattttgttctagaccacggccctctggcctccatgaaggatcaaagtctgggcaaagacaattctaagttgtaggtaaacatgcttttcatttccctccattccttacttttgtcataagcagtctggattttcaggggtaaaggctgatagggttgccagatacagtcattaaaaattgagaatgtgcagttaaattggaatatcagataaacaattttaaaaatatatgtaacacacatatgccaaaacact

SEQ ID NO: 197801 - DNA, 1000 bp, Homo Sapiens
tttttaaatatccaagcaggcaacggccaagccataaaggtcctggaaatgggaatggcagtacttaatagttactataaaacgcaggcaggataggtatgagccgtttcattctgcacactagccttggaacctacctgctcagcaagtctccacaaaaaaatagcataagtccaagaaggaaaacaagaaagagtttgggatcaaatcctgaaataaataaagatttttgcttaataagggaacaaaactgcttaaggtattatagaataaaagacaacgttggcactattggtcagctacagtaaaaataaatgcaaacagcccacctaaaaagcatttaaatttcacctaaagcctgggcacccttccaatgtataattaggtctctgtctaacctgtatttgcctgaagatcttacttttacttaggctacctatgctaaggttaaaagaaactcaagcttcgttttggacaaagctagacacagtaccatcagcaattcatgcaatcacccacaaggggtctctatcactctggctttcaagctttaagtcactcacagtcatggaactcagcagatttgcccagaactgtgggtcagggccttgtgttgttctctaactggctgcttttcttgcccaacaataccacctacttccctttgctacagaacactgtgctggaaaagcctacacgcaaatacctctcactcaggaccagggggccctagcaaaggccccttagtggcataccagatactcccacagctttcacattcaagagttctacgggaggcccacaaacagaacaggagcagaaggaatcagtaactgtagaaggaacgtcaaaaaacaagccaaccctacgtaaccaaagaaccctaggacaaatggaagggcacaacctatttcatactaaacctagaaacatttctactacttacaacatcccaggaccctgtgtagtaaccaaggggaaacaaagtcagagagaattc

SEQ ID NO: 197802 - DNA, 1000 bp, Homo Sapiens
gacattctgttgcatgcatatgaagggtatcctgctgtgtgctgtggagggtgagtttaaataaagactttgaccaagaagagtttatacttgcaggggaagttaaaatagagtggctttggtaaataatggttacacttgcttgaaattgtcttttttcataggtcaaaatgcttgaattttatgtgatttaacctaataataagaacgggcatatatggggcatttactgtctgccagccgctcttctaaggtaatttacgtggattatctcatttattactgggatcaattctgtgagctaaaggcactcatttttttggcggtgggctggagtcttgctgtgttgcccaggctggattacagtggcatgaacgtgactcactgcagccccaacctcctgagctcaagcaatcctcccacttcagcctcccaggtagctgggaccagaggtatgcaccactgtgcctggcttttaaaattttttttgtagagacagggtgtcaccaaatcacccaggcttgaagccactatttttatttccattaaacacgtgagaagttagaggcacaaggaaattaagtaacttgcccagggtcacaccttagtcacctgcagagcctgggtttgaattctagcagtcaaatgccaaggtacatgtacatatatgtatattattttacctccatattacacaagggtaggcctacctgtccactcaaatcaatttttaaaaatgcagtttcatttgtagagtcctatatatatcaaatcatcatattcaagatctagttcagaagccaaatagaacaaaatccacttggctccagactagtggaatatttttgattcccaaagtttgaacatttatctagtttctcagttatctgcaggcttgagtttagagtttattgcatgtcctatattgtctagagtttgaggaagcattcactcataaactgagaggcaaagtgtaaattggtacagctctcctgaattc

SEQ ID NO: 197803 - DNA, 1000 bp, Homo Sapiens
tgtcaaatgccttattctgtatcactcataacagttccgcttctctgactgaactctttcctaactcacacgtagctgtcttcctccacacactgccaatcttatcattctattctaccctggcatgttactgacttttattagtgccttgccattacctagaaaatcaagtccacatccctaagggtggcattcaaagccctccatcagctttaccaaagcctatcctcttagctgctacactgaactgctttccagaaggcctgggaatgaatctgcctctgcctcctattagctatgaagcctcgggctagtcaatttccactgaacgtcagttttcacatctataaaatggcaaaaccatcctgcaagactgatgttctgcccacaccacagttgtttactgcctgtgtgttctttgatgggttggttcccatttcttgccagttcttggatattttgaatagcaccccgaattatttttctgttgctgcataacaaattgccacaaacacagtggtttcacaatcctttattatttcgcagtttctatagttcagagtctgggcacagcagagctggattgcccgttcagggtctcacaaagcaacatcaaggcgttggctggggccccatggtgatctagaggatagggtcctcctctgagctcattcgggatgtgggcagaattcagttccttttgtctatggggcagagtccctgtattcttgctggctctcagctggaggttgatctcagcccctagaggccatgctcaagtcctagccatgtgggcctcttccagcacggctactcacatctgcaaagccagcaggagaatctctctccagcctgctaggacagagtcttacataacacaacccagtcagggaagtgactccccatcatgttcccagggcctgaccgctggggaggacccaatgggaggagattttacagagcatgtgcatcgggagctgggaatcttggggctacctta

SEQ ID NO: 197804 - DNA, 1000 bp, Homo Sapiens
tgtgctgctggatttggtttcacagtattttattgaggatttttgcatcgatgttcatcagggatattggtctaaaattctcttttgttgtgtctctgtcaggctttggtatcaggatgatgctggcctcataaaatgagttagggaggattccctctttttctgttgattggaatagtttcagaagaagtgggaccagctcctccttgtacctctggtagaatttggctgtgaatctgtctggtcctgactttttttggttggtaagctattaattattgcctcaatttcagagcctgttattggtctattcagagattcaaattcttcctggtttagtcttgggagggtgtatgtgtcgaggaatttatccatttcttctagattttctagtttatttgcatagaggtatttataatattctctgatggtagtttgtatttctgtgggatcagtggtgatataacctttatcattttttattgcatctatttgattcttctgtcttttcttctttattagtcttgaaggcctttgacaaaattcaacaacccttcatgctgaaaactcttaataaattacgtattgatgggacgtatctcaaaataataagagctatctataacaaacccacagccaatatcatactgaatgggcaaaaactggaagcattccctttgaaaactggcacaagacagggatgccctctctcaccactcctattcaacacagtgttggaagttctggccagggcaattaggcaggagaaggaaataaagggtatgcaattaggaaaagaggaagtcaaattgtccctgtttgcagacgacatgattgtatatctagaaaaccccatcatctcagcccaaaatctccttaagctgataagcaacttcagcaaagtctcagaatacaaaatcaatgtgcaaaaatcacaagcattcttatacaccaataacagacacacagagagccaaatcatgagtgaattccgcggatc

SEQ ID NO: 197805 - DNA, 1000 bp, Homo Sapiens
aacatctctgcattgtttcactggaaatcgttatctgttctgataaaggaacagacctacatacagactgacttgtgtggagttctgaaagtcatagaatcttaatttgtacagtgtagtcttgctgttcaaagcactgtcgcacttgacccactttgcactgtgagttgacagggcaggtattcttccctcctctattagcattgctagggagaatacaagacactcagttaaatttgaatttcagataaataaatttttagtataagtgggtcttgaatattgcatgggacatataccaaaaaattattcattattggctaagcgtggtggctcacacctgtaatcccagcactttgggagactgaggcaggtggatcacgaggtcaggagttcgagaccagccagaccaacatggtgaaaccccgtctctactaaaaatacaaaaattagctgggcatggtggcacacacctgtaatctcagctactcaggaggctgaggcaggagaatcacttgaacccaggaggcagaggttgcagggagccgagattgtgccactgcactcgagcctgggtgacagggcgaaactctgtctcaaaaaaaaaaaaaaaagaattcattattaactgaaattcaaagttagctgggaatcctatatttttacttactaaatctgacaagcctacacatcactcctattttgcaaaggtagagggaacctaagagactttttagaactacctgggaggcagtgtcaagccattgatggaatctggtctttagactcctgatttgtaatgttatcttgactaagagaagcaccggagacaatacggagtgctatcagggactagtctgctgtggtttcctcaataagctttccaaaaatatggtttgtagccgcgtttatattggtgaacaaggaacaggtgtacagttgatgacgccagtcaaggttcataatgagataatgccatcctccccaaattggagaattc

SEQ ID NO: 197806 - DNA, 1000 bp, Homo Sapiens
atcttttttagggacatatgggagcatccaaggttatagaaattttacacatgatcatgtttaaatgtgagtgcattatgacattctgttgtatattgccaatatataataatatattgggataaattggatttgaaaggatgtcttagcccttcctcattcattctccctttccctccccttcccttgtccctcctttcctgtttcttttcctgtatatcaatttaatcttaatccttatgtagaataaaacaaagtaaacatctgtggcagtaatgggagggagccacatttttctagtgaaggtgccccaggatgtctatgtagcaggaaattctgcagggaatgttgaagcctggctgggttcagaaggccatcagtgcagaagggtggtctgatggagatagtagggccaactagggtgatgaccatgttcacatacagggacaccaatcatggcgtcagagtagggcatggagggcattcatgttggagagaaggtaacagcaaaggcaggatattagatgcagagggattgatcaaataagcaaatcaattaaaaataatgggatatagttttctcactatcagagacatggatatacaaatatggaaaggggaaaaactagatggaactctaggatgttggattgaaattacaggtattgctgtgaactcatgtttttcaatgtatatgtgacagagatgcgaataaatgtagataaaaacatgaatgtattttgtgtatgcattcgtgtattgcatagctgttttcactcaagggcctgcaaatgggaacactccaataccaataagcacatttagcacacagatcttggcttccaaatatcattctggagctccatgaagaaatggttaaatccatggctgagaaagggaaagtgcaaagtaatcctaaaacatctcattatgccagaaaatatgaaagcactaaaaaaaacatggtcaagagggtaaagaagccagacagaaggaattc

SEQ ID NO: 197807 - DNA, 1000 bp, Homo Sapiens
atggggaaggacatgaagtttttgagtaaggtaccatgcagagtttgctatggcagaatcaaagcttttatattctctatcacacccctatgtcatctacagttacaaacccctgggacaaaagaaaaaggaaatgagtctagactaccatgtgatgaaagtacctctaaattctagtgtaattccccacatttaaggcaagctgctagaaaaatacagcttcatcaaaggttaagtgtaactgttcatatgatttttagaatccttaatatgctgcccttattgactaagttactatcactagttaatgtaaactattatttgcattttataatacattacattttgtaagtactttaagtggccaacataaaaattaatgagacccgtatcaggttaaaccactttgtaaagctacttcagctgatctggagttactttgggtaaggagaggctaaactggaggtgatgggacactggggagtatgtttagcttcttccctaacattacataacagagaagtatttaagaaatcattaaacataatttgtccatgtgcattagacacacccatttacacacaagttcagttcacaaatgagaacatcaactgccttttaaaaatattttcaacttatttaaaatatgtagcctttatttctgagggaaaatatctagtccttgtgatatgggaagaaggcagggaagcactgggtggagaaacgcagggtccccggctagggctcttcccttctggcctgtgcccacggaactaggtgaggacaggcactcctgcttttgcccccaaatgttgcatttttccaagaccaccctggcccaccacacccgccactctgtgcctatgaaaaccccaagaccctcgcgggcacaaatgcagacagctggacctcgagaggagcagaggagcggaagaggtcaccgacaggcaccagtggactctggcaggccatcaacagcaggacgacatggaattccgcg

SEQ ID NO: 197808 - DNA, 1000 bp, Homo Sapiens
cattgcatgataatctgggcagcatttttagggaggaaagagcaggcagcagaggcacatctgaggacccaggagctgcagaggaggcttcatcttgatgtttgcagcctctcctggaggtgagtggactacatgcaggacttcgaatgatctggatatgaattcttttttaaaaaattgctttaattgatgcataataattgcacgtttatggggtacatgtggtattctgatacatgcatacaatatggagtgatcaaatcaggatgttgaggattcctatgacgtcaaacttttataatttctttgtgttgggaacatttgaaatcttctctcctagctactatgaaatagccaatatcttgttttgaaccatagtcaccctattgtgcttttgaacaccagaacttactccttctatctaaatatatgtttgtacccattaaccaacctctcttcctccccgccccaccctaccttcccagcctctggtaatgatcagtctaccttctacctccatgagatcaacatttttagctcccacatatgaatgagaacatgtaatatttatctttttgtgcctggcttatttcacttaacataatgacctccagttccatccatgttgctgcaaatgacaggatttcattctttctttctttatttttttgtactctgtcgcccaggctggagttcagtggtgcgatcttggctcactgcaagctccacctcccgggttcacaccattctcctgcctcaacctcatgagtagctgggactacaggtgcccaccaccatgcctggctaatttttttgtgtttttagtagagacggggtttcaccgtgctagccaggatgctcttgatctcctgaccccgtgatccacccgccttggcctcccaaagtgctgggatacaggtgtgagccactgcccctggccaggatttcattctttttaaatggttggatggtattccattctgtagataggaattccgcg

SEQ ID NO: 197809 - DNA, 1000 bp, Homo Sapiens
acccttctccctcttgtagtcctcagtgtctactgttgccatctttatagccacgtatacccaatgtttagctcccacttacaaatgagagcatgaagtatttggttttctgttcctgcattaatttgcttaggacaatgacctccagctgaagctatgttgccacaaagcacatgattttgttcttttttatggctgtgtagtattccctggtatatatgtaccacattttcttaatccagtccaccgttgatgggtacctaggttgattccatgtctctgctattgtgaatagtgctgggatgggcatacgagtgcatgtgtgtttttaacagaatgatttatactcctttgtttatatacccagtaaagagactgctggatccaatggtagatctgagttctttgagaaatctacgaattgctttccacggtggctgaactaatttacattcccaccagtagtgtataagtgtttttattttttttcctacagcctcgacagcatctgttgtttttttgatgttctaataatagcccttctgactggtataagagggtatctcattatgattttgatttgcgtttctctgatcattaataatgttgagcaaatagtgatttcaatagaaaccaagcagttctctccctccagctggaaaagtcagactcggaggctatcagtttgaggatgatcctgtggccagagcttcacctgtgcggaaggtgccttccctccatcagcaggaaccgcaggacactcagtaattctcctgcattacaagtcttgtgctcaaggtagacaacctatgccaacatcagcctctggatacgagacaattatttagaaaaagaaacgaagatactcatggagcctcatttcagtatttttttagcagggatgggagattcctttgtcctcttcaaagccctttgttcaccttcaactgctggcaaaaaacatcaacgccaaagaaagcccacaagttgtggtgaattc

SEQ ID NO: 197810 - DNA, 1000 bp, Homo Sapiens
atacaaaattatttctgctttttttttttttttttttttgagacggattttcactctgttgcccaggctggagtgcagtcgctcaatttcggctcaacgcaacctccgcctcccaggttcaagcaattctcctgcctcagcctcctgagtaacgccaggctaatttttgtatttttagtacagatggggtttcatcatgttggtcaggctggtctcaaactcctgacctcatgatccggccgccttggcctcccaaagtgctgggattacaggcgtaagccattgcgcctggccctccgctttttttttttttttttttttttttttttgagacggagtctcgctctgttgcccaggctggagtgcagtggcgcaatcttggctcactgcaagctctgcctccaaggttcacgccattctcctacctcagcctcccgagtagctgggactacaggtgcccaccaccacacccagctaattatttgtatttttagtagagacggggtttcaccgcattagccaggatggtcttgatctccctctgctttttaaagatactaaaagtagttcaacaactcagtaatgcctgttagccagttatttaaatatccaaacataatattccactcttactttccacagattatcattccttctcctaattcatgttcatagataaatatatagtcctcaaatgttagtcagtatgcttaagatgcctggatttaaaatgctctctctagagagacacacagtactcattacgtctgtatttcttattctataaagcaaacatttcatatacgatacaaaaactgcagctgattttttaaattaaattaaatacaaaaaagatgtttaatggattaagatctcccaatccacagttctatggttctaacctcagctggatctaaagaggtgggaaaagtagaaagtacactggccccagattctaattctatctctgctacgaattagctttgttgccttggaattc

SEQ ID NO: 197811 - DNA, 1000 bp, Homo Sapiens
gtgtgatagtaagccactaagttgtggcaatttgtcatacagcaataaataacaaatgcactcatgcatgtgcatttatcatgtttacaagtattttctacagccatcataggtagcagttattaggttgagtcctgcattttatttgtgagaggaaacagaagatagtatacttaattattaaacagtaagtttctccttcaggaagaataaattttagctggtaagtccacatgttcctttgatgcgaaaatgaaaggtcagagataccaggccctgcaaatgggtctccagtcctgtttttcctgccagtccttgcaggtcagagcccacaggacaagttcctgggattcacacagctaaagactcaagtattgttctatctcagtgtcttcctaggttctctcctcaaatcccaatgtcccaagataaacacaagctgagatagctgcaaagggtctggagtatggaagagttcctggacatcataggtcctcccttggcagcccagtggtttagcatgtgggccctgaaaatcaactgcctagttcaatcctggctcagcctcttataagatgcaagggctaaggcaaatcatgagttctctatgccttagtttcttcatctgtaaaatggaaataataatggcccatacctctaagggccatagggatattttaaccacataattcatgtaaagggattagtcgagagtctgctgaatgttttgttaaatgccggtgtcatcactattagttattcgtgtaagtcccatttctagtatattccctatttgtgcagtaattcatgtgcataatctcagctgcgtcaccttgtagctgtataactgcacaagctgaatgtcctagccttggctttcctatctggaagaaagagtggtcatagtgcctgcctcccagggcatggtgagaatgtatgagaagctactgaaccagtgctagcacagaaaccacacaggcaaaatccctttatggaattc

SEQ ID NO: 197812 - DNA, 1000 bp, Homo Sapiens
aaccggtaccagccactgcaaaaacatgccaaattgtaaagaccgtggaggctaggaagaaactgcatcaactaacgagcaaaataaccagctaacatcataatgacaggatcaaattcacacataacaatattaaccttaaatgtaaatgggctaaatgctccaattaaaagacacagactggcaaactggataaagagtcaagacccatcagtgtgctgtattcaggaaacccatctcacgtgcagagacacacataggctcaaaataaagggatggaggaagatctaccaagcaaatggaaaacaaaaaaaggcaggggttgcaatcctagtctctgatatttttattttcttttccttgcatttctgctttctgtgatttttttattgttgttcatttgttttgggttttgccttttttattgaaggccttcttccaatgtctcctattcatttacatttaagaacaaagcatcaaaaagctgactgcaagttccatgttcacaggggtagggggaagagggaggaaggttatagggttgttgaatgatgggttcactgtagaaaaaatgggtggtaagtcatttttttcattgtcggacctcaaatgtcagtttctgtaagtccttctaaggctgctcattttacccagagaagagtcctccagtcctgactgaattacctatcctaggtttgggcttggggaggagtatggagtctcactgttttgtgagccgaatttcattaaattcctttttcagtcgatcattgtacctttctcttctgttttgtctggcatccctacatccagaacctctattttactttaatttattcagaaaaaacatgtccagtctctgttaaagacttcatcttgtggtatggcatagaagaagtgaagtgaggatctagttcccttacagattttccacctatccctcattttcaggcttatgccccactccaaagcctctaattccagaaactttctggaattc

SEQ ID NO: 197813 - DNA, 1000 bp, Homo Sapiens
attctctaccttcacatcttctcatactgaggtcaagtgtacctcctcccagaatccttacctgattctacctgagaatactgagatggagaatttaagtatagacttcaggtcccgcagcttaatcagggattcacatctatctattatgtatattgtttcactttcctgactattttattctttttcctgcctcaggacatttgcacatgctgtttcccagaaaaatccctcaccccacaccccaccaggacttgaaggcagcctcctgctgatccttcagtcctcaatctcattgtccctgctggaagaaacttttcctattctcctatctggaggttgctgtattactctctcttctctcctctggcaccctgttctctttccttcataatgccaccacaacttttaatcttataccaacttcttcatttattagttaatgtctatgaccctctataaactctacaaagacagggacagtggtgtttttataacttgaccaccattacctgtccctttatcatatcacagaattgtgagtgcacaattaacttttttaatatttatttttggtggggatcaggattgaacaaattaaggagaagttgtaagtatagcgagaggaaggaggacaacctggggaatgcaaaaaacttactctccccaagggagtttggtgatggaggcaagagggcaaggtacctgggcacacctgtgaagctgttgtgtgctctgtggcttggctattctgcagtcacaggttcctaagtgtgctgctgtggcgaccagggggtgtctctcgtgtgggtggtcctccctgaagtatgcagctgctgtgcaggccgaggcccagcaagagcttgtccgaggcctgatagatggaacagcccacagcatttttcttgcctggttgctggcagctctctgacttcaaagctgggacacgctgacccagaacactgtgacctttggcacgatttcctctatcctctcccct

SEQ ID NO: 197814 - DNA, 1000 bp, Homo Sapiens
ctttatcagcagcatgaaaatggactaatacaggcagcaatcagtgtccaggaccagatgtgttccatggtataagtgcaacacccatcctctggtgggagcagcattttccttgttgttcctcatggagtggccagtacagtaaataggacagaccaaattgcatagcctccacacctgttttttaagccatcatgatgattctgtaagctatccagcatacttttaaaaaattcccttttaggccctgcacagtagctcatgcctgtaatcccagcactgtgggaggctgaggtaaagggatcacttgaggccaggagtttgataccaggctgggcaacatggcaagaccccatcactgcaaaaaaaattttttttaattagctgagtgtggtgatgtacacctgtagtcccagctactcagtaggctgagacaggaggatcccctgagcccaggaggttgaggctgcagtgagccatgattgcaccactgcactccagccagggcaacagagtaagaccccgtttcttaaaaaaaaaaaaaaaaaaaaggcaggtgtggtggcaggcacctgtaatcacagctactccgcggggtgcagaatcatttgaacctgggaggtggaggctgcaataagccgagattgcgccattgcactacagcctgggcaataagagcgaaactctgtctcaaaaaaaaaaaaaaaaaaaaaatccccttttggcttgaatcagccagtgtggctgtttctaagtaagcatcctgactggcaactcagtcaagctggatacctccctcactccttttagaacatgccctttgctttcctgactcataaaacactgcctactgttgcttccatccagaattctcctctgccttcactattggccaaaatccttcccaccctttaatgccttggtacagcctttctgaagggcaactttgccttgttcatctaataccctgaaagtgtgcatttcttaagactcagaattc

SEQ ID NO: 197815 - DNA, 1000 bp, Homo Sapiens
agccaccacatcttgagcatctgctacatcaggaagcgtgttaagcactttgttgtgttatgattgctgacatcaacagtaacacagtaaccgtagctacaacttcttttttttttctttctttttttttttttttttgagatggacttttgctcttgttgcccaggctggagtgcaatggtgcgatctcggctcaccgcaacctccacctcccaggtctaagcaattctcctgcctcagcctccctagtagctgggattgcaggcgtgcaccaccacgcccagctaattttgtatttttagtagagacagggtttctccatgttggtcagactggtctcaaactcccaacctcaggtgattggcccgccttggcctcccaaagtgctgggattacaggggtgagccactgcacccggccttttttttttttttttttttttaataaagacagggtcttactttgttgcccagaccggaatgcagtgccacaatcttggctcactgcaacctccaccttctgggttcaagcgattctcctgcctcagactccggagcagctgaaattataggtatgcaccactgcgcccagctaattttttttattttcagtagagatggggtttctccattttggccaggctggtctcaaactcctggcctcaagtgattcacctgccttggcctcccaaagtgctgtgattacaggtgtgagctgccatgcccagtcagtaactacaacttcttgaacatcttttatgctttaggcactggcttgggctttacagatcattattaccatcatcaccgtcatcatcatcaccatcagactactgacaactgctgtgtttggcacttattagagacccttatgttgtctagtttaacttgattcttaaatccaccatgtgaaggaagtattcttaccccattttgcagatgaggaaactgaggcacacagaggttaaatgacttgcccaaaatcatttaactttgaattc

SEQ ID NO: 197816 - DNA, 1000 bp, Homo Sapiens
gtaaataaaatgttatctcatttaatttgtatacaaaatagttgagtgcattgtgttttttctgattttatgaatgagaataaagttttctgatttatggctgaataagataaaatatctttccagtatcatgactggcaattacagacacagttaccaactatgaagtttgtcactgcatatgcttcatactgactctctttcctacaattccttatatgtcagggtgttgcagagaaatcagaatccagggattgtgtacttttgtcatatgacagtttgtcaaagcatttggaggtataggagctggcttcaggaaggaaaaattccaaaagtcaccaatcactgtgttttaaatatctacattaaatggctataaaagatataactaagaccaaactatctactttttatggagatgaatcctggctcaagttaagaagtgcttcctgtttaagcatcaagggaatgaaaccaactgttaggacacgcattccttattatcacaggctttagagtcttacaatgtgatttactttcccatttgttccttttctccttcctattttcctctattccacaaagcatttctgtaatgcatactatgtgctgagctgtgattgtgattgagaataaaggcaagaattgcttcacgtttctcaaaaattatcaattcagtggtgggtacagatccaccaataattgcaacaagatgtggcacatgtaaagataaagatgtacagagaaattcaagaacacatgtagaagaagacttcatggaagacgtaaagtcaaagctaagactaaatgggttattaggggtcattcagagaaagaagaaacaaccaaggaaggtgggagttctgaggagaagaaacggacagggcagttgcagccacctaggatgcctaataatgtgtgagaggcaagacagaaaggaaattaacacagaagaaaatgctaaactgaaatattcatatttatgtatacctatgaattc

SEQ ID NO: 197817 - DNA, 1000 bp, Homo Sapiens
cttttcaaagaaccaccttttgtctcatttatcttctgtaattttttttgtttcaatttcatttagttctgctctgatctttgttctttcatttcttctgctgggcttgggtttgctttgtttttgtttctctagttcctttaggtgtgaccttagattgtctatttgtgctctttcagacttttcaatgtaggtatttaatgctatgaactttcctcttagcactgctttcgttgtatcccagagtttttggtaggttgtatcactattattgttcagttcaaggaattttaatttccatcttgatttcattgttgacccagagatcattcaggagcagattatttaatttctatgtatttgcatggttttaagggttccttttggagtcaatttccaattttattctgctttggtctgagagaatccttgatataatttcagttttcagaaatttgttgagacttgttttgtggcctattatatggtctgtcttagagaatgttccatgcactgatgaatagaatgtatatctgcagttgttgggtagaatgttctgtacatatctgttaagtttagttgctctagggtatagtttaagtccattgttactttgctgactttctgtcttgacttgtctagtgctatcagtggagtattgaagtcccccactattattgtgttgctgtctatctcatttcttaggtctagaggtaattgttttacaaacctaggagctccattgttagtacatatatatttagaattgtgatattttcctgttggactaatccttttaccattatataatgtccctctttgtcttttttaactattgttgctttaaagtctgttttgtctatagctactcctgctcgcttttgttgtccatttgcatagactgtctttttccacccctttaccttaagtttatgtgagtccttatgtgttaggtgagtctcttgaagacagcagatacttgtctgctgttggtgaattc

SEQ ID NO: 197818 - DNA, 1000 bp, Homo Sapiens
aactgtaggattaacggtcactttattgtaagatatgaagtttgtggtaattggttacagcagcaagaggaagtttatattgtaattgtatcaggaaaatgagaaccataatttacaactgcttttaatactgcacttggatgtttgaaatcacgtacatggaaatgagctctatgtgcatgagggaggatagcaaattgatgccaaaataatgcaaatgcaaatcttacactcatttctatgtaggtttcatttaatctttgaaattaaagtgaaattaaaagattgtgatattttgatgaagttagactaaaatgaacaataaccaaataagaactcacttacattctttatatggtcaataaagaagtgatagtggaaaaaaacaagatcaaatgaaggtgatgatttaggaagttggaaagatagctgaaactacaaaatggtatataaccagtgaacacttagacacactgattgatgaacttcagcttttggcttggtgagagcataaaatgagagcagctgaggtttgcaaatttgtaatctccttgtggaaaaacaggggaaaacacatctcagcctaataagatttatctactaaagagtctagacttgatccatttgtccttgtaattcaaaagctaattcaaatactgatttgatgtattgtgtgaacaaccattgctgattatcatcgcatacctggcattctcttttatctgatatctaaaatatttggtaattcctggactttctcttttcaaacccagtacggtttaatttgagtgttagaacagttgtctttgagaaattcttccctctactgcatctgtgaatgggcatagcatggttacatacatactgtcactccatagaacatttgttaaattaaagccaaagtttaaagcaagagctttaacttactggttttactaatgttttcctccccaatagccacaacaatattgataccctcacaccttttaacataaagctt

SEQ ID NO: 197819 - DNA, 1000 bp, Homo Sapiens
gtaatgcagcactttgggaggccgaggcaggcggatcacctgaggtcaggagttcaagaccagcctgaccaacatggagaaaccctgtctctattaaaaattcaaaaaagtagccaggcgtggtggtgcatgcctgtaatcccagctactcaggaagctgaggcaggagaagtgcttgaacctgggaggcagaggttgtggtgagccaagattgcgccattgcactccagcctgggtgacagagcgaaactccgtctcaaaacaacaacaacaacaacaacaaagtcaagtcacttgagacctcaacccactgacaagagaagagggactggggcagacccaacctgaactggttctgtaaagcagccacggcacagaccagagtggactgtgggcctgagcagtgtatgcccctggggcctggaaagtaggggctgggacttcatttcttgaatagagggagaaggaaagacacttgagaatctggtaaaaacaaaaacaacaacaaaaaaaaacccaaaacaaataaaacattctagtagcttcaggccctccactgggcatggtgtcttcttgacccacagacaataggcaggcaaagtagatggaagcaagtgctaacatgatacacagctcccagggcttagacacttcccacctcagcaagctggacccatccaagctgtggtgtcagggtagaacaaatgattctttttttcgagatggagtttcgctcttgttgcccagtctggagtgcaatgctgagatcagctcactgcagcctccgcctcccaggtttgagcaattcacctgcctcagcctcctgagtagctgggattacaggcgcctgccaacacgctcagctaattttttgtattttaagtagagatggggtttcaccatgttggccaggctggtctcgaactcctgacctcaggtgatctgcccgccttcgcctcccaaaatgctgggattacaggcatgagctaccgcgcccagc

SEQ ID NO: 197820 - DNA, 1000 bp, Homo Sapiens
caaaaatgtcctttataagatccacaccaacaccacatattttatttagttatatatttttagtcttatttaatttgagataattcagcctgtcttttttttttctgagatactgccttgctctgtcacccaggctaaagtacagtggtatggtcatagctcactgcagccttgacctccagggatcaactgatccacctgcctcagcctcctgagtggctgagaccacagacacattccaccacgcctggcttttcttttcttttctttttttttagacagagtcttgctctgttacccagtctggagtgtggtagcgcgatctcagctcactgcagcctccccttcccgggttcaagccattctcctgtcttagcctcccaagtagctgggattacaggtgtgcaccactacacccagctaatttttgtatttttagtagagatggggtttcaccatgttggctaggctggtctcgaactactgacctcaagtgatctgcctgccttggcctcccaaagtgctgggattacaggtgtgagccacagcacctggccaaattttttaatttttaatttgatagagatagggtctcactgtgttacccaggctggttttgaactcttggactgaagaagtccttctgccttggccttccaaagtactgggattgctgctttgagctaccacgcacagctgattgacgtttgtttgttatgacttacatttttgttgttgttttttgagacagagtcttgctcagttgcccaggctggagtgcagtagcacaatcttggctcactgcagtctcctcccctaccaggttcaaatgattctcctgcctcagcctccccagtagctgggattacaggcatgcgccacaacgcccagctaatgtttgtatttttagtagaaactgggtttcaccatgttggccaggctggtctccaactcctgacctcaggtaactgtcagccttggcctcccaaagtgctgagat

SEQ ID NO: 197821 - DNA, 1000 bp, Homo Sapiens
gagtagtgtacaatttacagaggagagaataggggatttctgctattggtataacattctatttgttggcctaggtaatggggtacagagttatttgctttatccttttttccaaatacacatgtatgtatttacatactcacatgtgggatatatttaaatctgaagaaaaagaaaaattaattaaaactgtaaatactaaccatatatttttctcttgaaaacttaggagtaacttttagaaaactatgcttttttataccatttaaaaagttattacttttcacctaaaacatacatccatttatgttggtgtattccttaattctccaagtcccctttgtaatttgtagataagatatctagaagatttcatcagcattcacattttataacactatctatatgctgataactcaaaaatctatctctacagctcaggttgatatatggtgttccgaattattatttatagagtcttagcgagtatcttaaccttaaattttaagggtttgaaaagtatgattgtactaagaaaaatattttagatttcctagagaagaaaattttgtcaaagagtagaaaaaagtaggcagttgaagaatctgaggccccagaatcacagggtgattttagattgagatagtgaggcagctagaggaatgaaaggctgggcttagagtgaaatgttggagcttacatgctttgagatagacaattcctggacagtaatatacttcaatccatttttatcatgactacttgaagagtatgaataatttgaagattttggagaagaaacaggtaagacatttattgatccaagtcaccagagagtataaaataaaggggcaatgctgtaccagacacctacataaaacaaaccaaaacactgtggtgactaatgcaagaaagtttggtaaagaaagttatagcaaagttgcacaaatctcaataaaagccagacttttacgtgtggaagaatgtggtaggaagaatt

SEQ ID NO: 197822 - DNA, 1000 bp, Homo Sapiens
gtccttgtttattcaggagagatgaagatgggatcattcatgtccttgcctttctttgatggctccccacttcctttgatataaggcacaagtgctccctgctccatggtctggtccagctcaactccccaggctggctcctcagggccccactaaactgtatcttgtgctccagtatctccttgcccttcctcaaagcaccacaatttatcatgctttccagcctgcccactttatttccttctgacttatttcctttctcctcttttccactcattaaactcctacttaccctttaagaattttctctaacatcatctcttctaggaagacttactcaaaccttcccttcctaactcggattgccctctaatgaaacccttttttgcctttgcctggcatctaccatgagcattgtaattataattgtggatctgtctgtcttcttgctggaatatcctcaactacaaaggcaatctgtttcatctttgtattctcaggtttggcatgatgcctggcacatggtggatgcccaatatataaatatatcaagtggatgaagaattaacaaaatcaagtatccctattgtagcacggatatatattaaagcctaatggatctacatggtctgtaatgttgaaggaataccaataactaatacggggcctggggtggaaccacaggtttacaactaaataccgggcccttgcctaaagcaggtgaagcctggtttgtcttagctataaagctgtctgtacacagtattttgcatttagatgctaatggtatgtttgaaatgatagcgtatgactgactttgttttttagtttttatttgagataattatagagtcacgagttgtaagaaacaatacagagagagtctctatgcctttcatccagttcccccgacaatagcacaatagctaacctaactatagtacaatatcttaaacaaatgacattgataaactcatcagccatattcatattttgccag

SEQ ID NO: 197823 - DNA, 1000 bp, Homo Sapiens
tgcaagagcaaatgaccttattaaacgtctactttttggagaagcagaacaggttgctttttattaactgctgtggtgccgctcctccctcttcatctcagtcccctaatccttctccctttgagcagggcttctgggatcaagagtgcagatgatggcctatttatgtgttgtttttgtcttcccagcatccaggcactctacttgggcattagcatcctgattttccttgggcaacagattccgccctctccatccatctccgaggtttggaggattggggatttggttccaccccttgcctctaaaaataggcatgtgaccaggtctggccaatcagatcattccatccctgtggccactgtgactggcccagggatgagcacatgactcaaaatgctaatgagacattcacctgagttgttccctggaactgttggaaaagataaatatctctttcttctgggatggttaaactaatagaaaataacgtaagtaagcagtaggaagaaaacatagggatagagccaacagatgaaaagagatagcaaccttaaaaaaaaaaaacttgtaagccgggcgcggtggctcacaactgtaatcccagcactttgggaggccaaggcggccggatcacgaggtcaggagatcgagaccatcctggctaacacggtgaaaccccgtctctaataaaaatacaaaaaattagcccggcgtggtggcaggcgcctgtagtcccagctactcgggaggctgaggcaggagaatggcgtgaacccgggaggcggagcttgcagtgagccgagatcgtgccactgcactccagcctgggcaacagagcgagactctgtctcaaaaaaaaaaaaaaaaaaaaaaaaaaacttgtaaatttgacataatttcaaatgtacagaaaatctacaagaatagtatgaagaaactcccatgtgtttacccaaaatcaccaaacatacacacttctcacatttgttttagaatt

SEQ ID NO: 197824 - DNA, 1000 bp, Homo Sapiens
cttattttttgccttcttggatttgctttccaagactttgttgtaataaaatttgagtacgttgataagctggcactgctgtaagggaaggtaggctctggccttaggcggacacaagagaactagacacttggtggtttgttacatgttgtgtgaagttaatgtccagtgacacagcctgcatggtcagccagaaaagagatttggcttagggccatgctggtatcacagcgatctcagcgtcagctctgattccaattaggtctttacagagattcttgcatttagagccattcttttgacaactaaatctgtccatgtgtgcatttattaaatgtgtatacttgggtctaattttgtatttgatccacttccagagaaatgaatttattcattcattaaaaatggatacattaaaaaaatgtaactatcagagggcaaagtgaaagaaatatcacacctttctttttctgtcttccatttcttcctcagccctttaaaaatatgttattttatcattcatttattaaacattttttattgccagctaagctgcaggcactataggggcatatgaaaggaacttaatgtccacttactcatctctagccaaaccattctcaatgcctaactcttattttctgtgtttttattcatgttgtttcttctgcttaggtcatctgtatcagcgtctttccttaatctccctgtttacttattctaaatgttacccaccctttaaggtctgatttaatattattgggagatttggcatttaggtgaaatgtaaaactcttctttcacaaataccggatactgttttttaagtaacttgcttgttagtaatcatttgactttttgggcatagcctgagctgttctttttagagccagccttctttgtcaaatgagaattaaaaaagaaaaatgcgggaagcatgtttcacagatggaagatgaggttaatcaatcaaacatattatctaaaccatgcagaattc

SEQ ID NO: 197825 - DNA, 1000 bp, Homo Sapiens
tgtattcctgggatacatggcttctttcagtacactgtacattttgatgtgagagtatttgatttagaattttatttttttaaaaaaattcttgaataaaaccaatgtattcttttttcttttctttttgtactatttttgtcatttcggatagactaagtgtaaaggggccttgttttctctcagcaagagaggatttgctgagttatggggaaaatgagaatccaagtgggtctagcagaagaaatggaagtcgctaacacaagcgtgcatgcttggtgaatgcttcaaaaactcaatgttcagccttagcaaatgagccttaacctgcaattagcaatggtacctgcaccctttagactcagagaggcctcctgttaaagaaggatgtaattccccctattcaaaggcttgatccatgaagtttatagccaggaactaattagtgcatctttatcttgctttaaaggtctcaacatatgcactagtggaagtgccacctcatgtgaagaatgtctgctaatccacccaaaatgtgcctggtgctccaaagaggtatgtaggtgggggaggggaggaagaagggaaggaatgctgcgagggtgagggtgagaaggaggccaacaccacaacacactaattcactatacataaaaatcctgtgcagattctgtaagctgcctcttccccatcagggcagagtgatgacaaatccaagtttatgagacaataagataaactgggtttcttgatactgtggaatgctaatcctgttttggggaaacaagactttccttcccttttgtttggagaccagttaggattcatctgtagttttctgatctttggtataagaactccaaaagacctgagcttgtgaattgagtttgttgcataatgattcaaaacatatctagatggctggcatgttggtggaagccagtcatcttagtgtgtttacttgagaataaatattaggaattagcctttatggaatgat

SEQ ID NO: 197826 - DNA, 1000 bp, Homo Sapiens
ggttctaagttcccactgactgccatttttctggattatagatcccactttcttctttctttgcatgtctagtaatattttaatactgaacattgcaaataatatattgtagcaactctggattctcttgtgttcttctgggtatttttctttttaatagttggttaattttttaaattcaaactgtatcctcactctttcctgtggaatgcagcagctggtaactgcttattgctcacagcatccagctgctgtttttcttacccttgtccactgagggtctccgctgtaactgcatggcaatcagctgaagactcagacaaaatgtattgttacatttttaagctcacacatcatggttactctgctgctggagagttccccttaaatttccagatgctctaccagcttcaggctcttttctgtactatttcaaactagtaaatttttaggttttccttgctagattgaaatatgagttgggaaatgcacctagttaacaacaacaacaataaagcagcaaactcacaatcttacctggtgaatctgtctttcaggactatatgactttttggtctatatttaccagacacacagggctcttctttgcacatttgtaatttactggccagttggagatttctgcagaacttaacatgcaaattttggctctcaccccttctgtagtactcctgcttacaggatttccttttcaaatactcagctgctcccctggtactgagttatttcccctgcatctttgacctggttaggctggctttttctctttgttatacgtgttcttaaagagaatatccaatcatttcctaccttttgtaaacacagttttataagaataaaatttcctctggcttttgtttgtacttgaatactttctactacttccaaatagttattttttaaaaaatatattatgtttcaatgtggtaacttttatttgtgaggtttatgacatcactttgttaccactatcagaatt

SEQ ID NO: 197827 - DNA, 1000 bp, Homo Sapiens
tctagcttttaagtggggtgtttagcccatttacattcaaggttagtattgatacgtgtgatttttgatcctgtcatcatgatgttagctggttgttatgtagacttgattttgtagttgctttatagtgcctgccagctgtgtgctaaagggtattgttttttttttgtttttttttgtttttttatttttgagtccatgtttaacactcccttaaggacctcttgtaagactggtctagttgaaacttattccctcagcatttgctttactgagaaggattttatttctccttcacttatgaaacagtatggcaggatgtgaaattcttggttcgaatttattttctttataaggacactgaaaataggcccccagtctcttcttgcttgtaagatttctgctcagaggtctgctgctagcctgatggggttctctctgtatgtgacttgacccttctctttagctgcctttaagatttttttcttttgcattgtccttggtgaatctgatgactgtgtgccttggggtggtcatcttgtatcatatctagctggggctctttgtatttcttgagtttgtatttcaaactctctaataagattagggaaatttttgtggactacattctcaaatatattttccaagttgcttattctccttctttctcaggagtaccaatgagtcatagatttgttctctttgtagaatctcatatgtttcagagatttggttcatttaatttttttctttacttttgtctgagttgattcaaagaagcattcctcgaactgagattctttcctcatcttagtctattctgctgttaatattccaatcatattatgaaattcttgtagtgagttttttagctctaggagttcggttttcttttttctgaaaatgtttaaaaactttaaaaatttggttttcttctttcttatttcatctttcggctcttggatcattttactgaatttcttggattgggtttcaacta

SEQ ID NO: 197828 - DNA, 1000 bp, Homo Sapiens
gtcactcatttatcctcccttctttctttcttacatgatttactacaatgggacatattgagatagtcaatcaacacatttattgattacctattctacaaggcattatgtcagatgggatggggaatccaaagatgtttaagacaggtcttccggagaatataatctattgtcaaagatatgatacgaactagataatataaacttaatgttaagactatatctatagttttgcttgtagaggttaaatgtatttcatgctagatttatttggcaagtggtaactatattttaccccagaactccatagtaaatagaggatttaatatcatcatttaataaagctcttatggaataacatttttaaaaatttgtgtttatttcttaccagagaggcctgtcaaatttgcatctttgatgaaaatttcagttattccaagagccttcaaaacatcttttaaatcaatttcctgttccactgtgaacctggagaacacatagggagaaaaatatttagttagagcatcttgttacctggaacaagaacaaagtgttagatatgtggatatttaaagtctgctttatggagagtaaattatgctaaaactggcttttgactgcaattagcatttgattgaacatggaaaaataggtggcatcaaagagattgacataacaaaatagaatttaaacacataagtaggaaaatatatgatatagacacaaaaccataatatatggtacaacaaatgagttttgagatcaagtatcattaccatatgattacttagtatcatagtattgagtaaaacttgtaaatgagtagctttcaaaatcctttgacctagtagtaatatattttatttttttttttaagctggagatgactaatcatacatttacctcggttatttcattctcttcttagtatcctggtcaatttatgttactttccctctgccactgtgcaactcccacccacatcaatgccatggacaag

SEQ ID NO: 197829 - DNA, 1000 bp, Homo Sapiens
catactgacctcaaaggcatattacaattaaatgagatacatatgtgaaagtgcctagcaaagagaattgcaagctataaagaaaggcatgaaatggaaagtattataaaaggatgaagaaatgacgggagagagaacatttacttcagagggcagagctctaatggtcaatttcgtccctttcctccctcacttcacactaccccagaatgatttaaacaccaggcttctcccaactctcttttttttttctcctgggcccttttcacttgcagtggcatgtttttctcctgtcattagctgtctgcattttctaagataacatcagagggccttgccacttctctagttctcaggcttgttcttattgaaatctgcagaataaggccctggagcagcgaggggaactagaactcctcgtgggcttcaggtagacatgtccacttcaggggacatgtccacttcccagacagaggcctgttttcttattttctttgtcctcctgttttttactttatttttttttttaatgcaggccagaacaatatgacctacttaactcttcacaagctgataactttgtagtaagtaggtaattgagagggtttagaccagtactgtcctgcagaaatacaatgcgagcaacaaatgtgaaccacatgtgaacaccactagaaaatttaaaattttctgataaccacatgaaattaaaaagagataggtgaaattaattttagtaatatattgtttttaacccgatatatctaaaatatttaccctttcattacataatcaatattaaaattgtctcattattaaaaattatcaatgagagattttactttttttttttttgcacatctcaatttgaacgagccacatttcaaatgcttgttagtgacgactgtattctacagtgctggtttagacagattttccctcttgcactctctctcagtgctgtagaagaatttttggaataagctaaatcatcgagact

SEQ ID NO: 197830 - DNA, 1000 bp, Homo Sapiens
agcaagtatagcaaggtggcaggatacaaaatcaatatacgaacatcagttgtatttctatatactagcagtgaaaaatgaaaaataaaattaataaaacaattgcttttatagcactatcaaaaaataatatacttcagaataaaatttttttttcagatggagtttcactcttgttgcccaggctggagtgcgatggcacgatctcagctcactgcaacctccgcctcccaggatcaagcgattctcctgccttagcctcccaagtagctgggattacaggcatgcgccactacgcctggttaattttgtatttttagcagagatggggtttctccatgttggtcaggctggtctcaaactcccgacctcaggtgatccacctgcctaggcctcccaaagtgctgggattacaggtgtgagccaccgcacccggcaggaataaatttaacaaaagaagtgcaaaatgcaaccattcttatacaccaataacagacaaacagagagccaaagcatgagtgaactcccattcacaattgcttcaaagagaataaaatacctaggaatccaacttacaagggatgtgaaggacctcttcaaggagaactacaaaccactgctcaatgaaataaaagaggatacaaacaaatggaagaacattccatgctcatgggtaggaagaatcaatatcgttaaaatggccatactgcccaaggtaatttatagattcaatgccatccccatcaagctaccaatgactttcttcacagaattggaaaaaactactttaaagttcatatggaaccaaaaaagagcctgcatcgccaagtcaatcctaagccaaaagaacaaagctggaggcatcaggctacctgacttcaaactatactacaaggctacagtaaccaaaacagcatggtactggtaccaaaacagagatatagaccaatggaacagaacagagccctcagaaataatgctgcatatctacaactatctg

SEQ ID NO: 197831 - DNA, 1000 bp, Homo Sapiens
tccatcaagtcttgttgccatatgtggagcgacctaatctaaccatttatcatcattttaagaaaccagagtattattgtttgagggccgaagttctgcagaaccggctcaggaagcagcaaaacaccaccgtcaatggatatgaccatcagaaaggccggctaactctccctcctccccaggaaacagctatgaaattagcatgtgagcccaaaatgccatcattaggcttgaaataagctgcggtctccagcaggaaggagaataattgaattggcaatgtgctctctctgacatcggttaccttttagacaaagcctcacgtgttcctgatttgaaatttcatttcaggggtggggggagagatctggtttctgtctgcttgggacggggagggtgagagcaggcagagaagaaagggcctgtgtggagagctcctggccacagacatccaaaggaaggggaaattgcagtgaccctaacttttcactttcaaaagctgagtgatccttctgcatgtatggaatgctggcatgtcaatgacaaagccaccctgcagtgtggctccagatttcctaagggggagtgggggtggggagaagccttcatctagtggaaaggggaaccccagcgccccacgtgaaacaaagaacttttggaaaatatttggattcttggcttctgcaggagccaccattgataaaacacctggagcaccctacgcattggctgccagtttggtcactgggctgtcacctgccctcagagatggtccatagatgatgtgacaaaagacagagcccaggcctcccgacttccaaaaagttctttttctttttttcttttcttttcttttcttttctctttctttctttctctttctgtctttctttcttttttttttcagacagagtcttgctctgttgcccaggctggggtgcagtggtgtgatcctggctcactgcaaccgccacctcctgggttcaagcaattctcatgt

SEQ ID NO: 197832 - DNA, 1000 bp, Homo Sapiens
atacagatttctgggtcccactgcagagatgggctttcctcatttactatcagatggagagatctgcaatccagtctggagtgctgtggtgcaatcgtggcttaatgtaaccttgaactcctgggctcaagcaatcctcctgcctcagcctcctgagtagctggaatcacaggcaggcaccaccactcctggctaattttttatttttagtagagatgaggtctcactatgttgcccaggctggtctcaaacttctgggctcaagtgattctcccaccgtggcctcccaaagtgctggagttacagatgtgagccaccaggcccagcctggaatctgccttttaagccagcatcaggtaattctttgttaggtcattcttggaccatacgttgagaaacagtgtaatactggctaaatataatgtgacattcaattttcttgcagacctggctgcaatccaccttttagacctttttcttgtcccacactgtaatgacatcatactacccactacctcgtccccactgtttacccccctctatctttgctcattctccatgtctaaaatgcctttattttccctgcctagtcagagccgcttatcttttgggggtttactttaaggctacttacttttcaaatccttctttgacccctccaggtagaattaatcattctcttctctatattttcatactgctgtgtgcaaacatccagcatgaaaaatttgttacagagagcagtgggtgggatatgttttctttctttcttttttttttttgagatgaaatctcactctgtcacccaggctggagtgcagtggcacaatcatgactcactgaagcctccaactcctgggttcaagagatcctcctgcctcagcctcctgagtagctgggactacaggtgtgtgccaccactcccagcaaattaaaaacgatattttttgtagagatagggtctcactatgttgcccaggctggtcttcaaatcctggga

SEQ ID NO: 197833 - DNA, 1000 bp, Homo Sapiens
cagctactcgggaggctgaggaaggagaagtgcttgaacccaggaggtggaagttgcagtgagccaagattgtgccattgcactccagcctgggcaacaagagcgaaactctgtctcaaaactcagtctttttaatgttagccattagcatatggagtgactgtatctttcatacactgctggtgggaatgtaaaatggtaaaacactttggaaaacattgggcagtttcttaaaaagttaaacatacacctatcatatgatgtagccattatactcaagtatttacccaagaaaaatgaaagcttatgtcaatacaaagccatgtatacaaatgttcacagtagctttaatagccaaaattggaaacaacccaaatgtatatcaacaaatgaatggacaatctgtgataaatacaatggactgtaactcagcaataaaataaactacagatatacactacaatatgaatgaatctcaaaatatgctgtgtaaaagaagtcagacaaaaaatagcacatactttatgatttcatttatatggaattctagaaaatgcaaactaatttaaagagatagaaatcatatcagtggttacctgggggaagggggtggtgatggcaggtaaaaaggagtaggtaggaggggctaaaaaggggcctgatgaagctttttgggagtgatagtggatatgtttatttccactatgatggtggtttcacagatatatacctgttaaaacaaattatgctctttaaatatgtacacattattgttgtagaaagatgtaccaaattgaaataagtctgggtgtggtagctcatgcttgtaatcccagctctttgggaggcagaagcaggcagatcatttgaggtcaggagttcgagaccagccttgccaacatggtgaaaccctgtctctactaaaaacacaaaaatcagctgggtgtggtggtgcatgcctgtaatcccagctagttgggagactaaagtgagagaattc

SEQ ID NO: 197834 - DNA, 1000 bp, Homo Sapiens
gaagttgttacatctgggcagggtatgtgatgacaggcaggggtttccagggaggtagaatgtaaatgttctacactgagggaacaaggacgacacttaaggaagggagaggtgtttgcaaaaggcgagaaacttggtccgtccagagcctgagatgtctgtgggtgggccatgaaaggggcagctgaagaggccgggagggggtagatttagcaccttgtttgccaagctaagcaccttgacttttgccagaaagaggttcaacctcttgtctggtgtctcagccagcagatggcagggtggaacccacactctcttccaaaagtttctctacacaaaagaaaatgtgttatattaagtgctcccaggtattcaagccagaagctgatgtaccatctgtattagtctgttctcacactgctgtgaagtcatacctgagactgggtaatttatgaagaaaagaggtttaattgactcacagtttgacaggcttaacgggaagcatggccaggaggcctcaggaaacttacaatcatggtggaaaatgaatgggaagcttgtagatggccaccttctccccatgtcttcacatggtcttccctctgtgtctgggtctaaatttcctctttttatgaggacaacagtcagattaggacccaccataatcatctcattttaatttaattacctctttcgagacctcatctccaaatacagtcacactttgaggtactaggagttaggacttcaacatgtgaattttggtagtgggtggtgggggtggggaaaggacatgattcagcccacagcaactcttctcatcatttagaatgcagcttaaatgtccttgagaaggctttcttttcctccaccctacccaatccaaattagatttcccattattttcatatatagcaccccattccccccatacctattccattttgtaattgcacattgatttatgggtctccatctagaatattaagtgtcatgaatt

SEQ ID NO: 197835 - DNA, 1000 bp, Homo Sapiens
ctatcaatgcttacttcctgcttccaaattgctgccaatctggggaggcaatagtgctgggcggtgccggtatgaaaatatgagatgcaggctgggtgcggtggctcacgcctgtaatcccagcactttgggaggccgaggtgggcggatcatgaggtcaggagatagagaccatcctggctaacacggtgaaaccacgtctctactaaaaatacaaaaggcaggcgtggtggcgggcgcctgtagtcccagctactcgggaggctgaggcaggagaatggcgagaacccgggaggcggagcttgcagtgagcagagatcgcgccactgcgctccagcctgggagacagcgagactccgtctcaaaaaaaaaaaaaaaaaaaaatgagatgcagaccctgtgttctgtacaagctcagggccagagctctgatgctcaatgagaggcagatagtttgtaaggctgcttctgttaagtaggactgtttttcaaaaggacatggcaagacaggagaggaagaggggatgctagtgccagtccccggtcaggaatgaatgtggcacattgaggatggcgctggcctggctggagcaggggtctcattctggaagcacaggactagagagctaggagctaagatggggcctgactccccacagtctagaaggccaggctgaagatgggcaccggggccttacccatgctcctcgccacgcagctagtgctctgagaaaacctgaagtggaccgtgaggaggggcactgacaggtggacaggtgccacaagagtataaaggtggggaaagggcaggggcgagccaggaaggggaaatgcgctcggggagggattattttcatgtcattttcaacatacttttaaaacttgtgatcatgagatcacagtaagagttcaaacccaagcaaacagcagagtgcaaagaagccacccgggccagatggcctaaccctgcaaagacccaaagaaatctggatgaggaatt

SEQ ID NO: 197836 - DNA, 1000 bp, Homo Sapiens
cagcgtttccactgtcctggtagcaatgatatacccatgcttgcacgagctatgaaatatggattgagtaacggacgattctgcatatgtgttaattgctcttatatttgcatttaaaactgatatcacataataaaaagataaatggtaaaattcatactaatgatttaagattttaatttttctttttcagaatggccttaaatagcaagtaaaaacaccatgagaagttgaaagaggggccccagaaggaaggaaaagggctttatattttcatacttttcatggcattttttccctgattttggaagaaggggctgaattttcatttttccctgagcactgcaaattatgtagccagccctgaggacatgtgagttaacccagcagaaatataaccatgccacaatccccaactttctcccaacacttaggccagaggttaaaaaagcaggctccagggacagtatctgggtcacagacatatttttattttacctactcagtgattttctaaaaattgaattaatcacacaaaaatccagatttctggcttttctttaaagatacaataagctttgactaggctgtgcatgcattcttacccagcagtaatcagctagatcagcagggtcactgctgctctctttagctagcacctgcatcctaaagctcaccacagtccccaccattccctgtcgccccattccagctctcacactcacatatatcccctgcctgccctccagtccactttctaaaaatgagcccaacactgaggagggcagagttgggagagggagacagaattgcaggttgaaacagcttcagacttagacatttattcttcatgaatgtaattaattctatttgccgtatgtagtgggttgagtaatgtccccccaaaaagatatttccaggttctaacccatggttacctgtaaatgtcaccttacttggaaatagagcctttgccaatgcaattaagttaaggttttca

SEQ ID NO: 197837 - DNA, 1000 bp, Homo Sapiens
tttgcttctttttaaagtggagtgagggttaggggactggtgaagtaaacaagctatctaaagagcttaaaagtttcaaaacttcaaaggcttaatcaattaataggaactaaaacaaagaaataagattttgctcagtctttgacttaaaagctgcacagtgaaatcaaatgtgtgataagagatgtgaattcacaaactatttttcaaaatcaccctgaaagtcaaacatgaaactccttacaatcctgaaataaaactacagaatttgtttattttattctgtgagcaaaaagtgaaagaatgcctgaaatgttccaaatgtaactgctggtgccatgtacagtcttagaagactggctaagaaaatatccttttcaatcctacaccaatcttcaccaccacacctaagcctcttctaatatctttctcatataattctgtcatctagatcatactgtcaaaagaactttgagatgacaatattttagacctacattgtccaataagaaagactttctgacatggcaaaatttccactgtccaataaggaactagtccccaacctttttagcaccagggactggctttgtggaagacaatttttccatggacagggcagggggatggtttcaggataaaactgttccacctcagatcgtcaggcatgagttagattctcataaggagcacacaacctagatccctctcatgtgcaggaggtggatggagctcaggcggtaatgctggctcgcttgcccaccgcctacctcctgctgtggggcccagttcttaagaggccaaaaacctgggcttgggggcccctgcaataaggtagcaatgagcaaagtgtacctattgagcacttgaaatgtggctaaggcaactgaattttacattttatttaaagttaaataaatagccacatgtagttagcggctaccatactggagagatcacattctggatccctcagcaaaaggatcctggagttgtatgc

SEQ ID NO: 197838 - DNA, 1000 bp, Homo Sapiens
ccccaacatctcaactcatttcagaattaaccccaaagtccaagtccaaagtctcgtctgagacaaggcaagtcccttctgcctatgagcctgtagaatcaaaactaagttacttcctagatacaatgggggtacaggcattaggtaaatatagccattccaaatgggagaaattggccaaaacaaaagggctacaggtcccatgcaagtccaaaatccagcagggcagtcaaatcctaaagttccaaaatgatctcctttgactccatgcctcgcatccgggtcactctgatacaagaggtgggttcccatggtcttgggcagctccgcccctgtggcttttcagggtatagcctccctccttgctgctttcacaggctagcgttgagtgtctgcagcttttccaggtgcacagtgcaggctgttggtagatctgccattctggggtctggaggacagtgaccctctcttctcacagccccacccagcggtgtcccagtaaggactctgtgggagggctccaatgccaccttgcccttctgcactgccctagcagaggttctccatgagggccccactcctgcagcaaacttttgcctgggcatccaggcatttccacacatcttctgaaatctaggcagaggttcccaaaccccaattcttgacttctgtgcacccacaggctcaacaccatgtggaagctgccaaggcttggggcttctacccactgaagcaacagcctgagctctaccttggccacttttagtcacagctggagtggctgagatgcaggacaccaagtccctaggctgtacacagcacagggacccctgggcccagcccataaaaccactttttcctcctaggtctccaggcctgtgatgggaggggctgccatgaagacctctggcataacctggagatattttcccccaccgtcttggagattaacattccactcttcgttacttacgcaaatttctgcaagcagcttgaattc

SEQ ID NO: 197839 - DNA, 1000 bp, Homo Sapiens
caactatgcattcatcaatttaacaactgtatctttgaatagtaattcgtaactttttagcaatgtgaatgatgctatcactggcggtaaatggggccatggaaacactctgggaggaggcagccaaatctgtctttgtaaatcagagaagccttcataaaaaaagccttgaaagatgagtagtaatgagtcaagtagacaagggagagaaaagcattttggaaaagtccaaaggcatgttaagtgggaatgatcatggcatgatgagaacattgcaagtaatttagtatgtttggagtgtaagatgcctgtggggaaaagaggagccagtcatggaaagtggaaatgtcatgtttaaaagtttaggctctatcctgtgggtgatagtcattgacagatgataataaggagaatggcatgaacagattagagtttcagaaggatacttaggcaacactgcatgctgctgatggactggggggcaagagggagaccagctggataaataatataggagccaaggtgattaatgtgacagggacagtagaggctgaaaggaggttgtgagcttgatctgattggttgtagaaggtgggggaggagaagtcttggccatttggtaccgggttaactcatctctggtaatggaaggcagagacatttgtgtaaatgaaatatagaaggagatcaaaattttccccactcaacattctactaattgtgcagatttaagagtctctccccgcccccaaccccccaacccccatctctcctggaatggttaatgagtaatgaagtggacagaaggcaggaagcaagaagacaggaaagaagcaaaggctttgtaaatcaaacagaaactaaatttttcattctttcacctcagcctcccagagttcactgtatacagcttcactgtatacacttttcagtgacttatgtatctgaactttgttgtcagaaacacccaagttccagaactttaaaattcaccaagctt

SEQ ID NO: 197840 - DNA, 1000 bp, Homo Sapiens
aacaaactatctctcagaccacagtgcaatcaagctagaactcaggattaaggaactcactcaaaactgctcaactacatggaaactgaacaacctgctcctgaatgattactgggtacataacgaaatgaaggcagaaataaagatattctttgaaaccaacaagaacaaagacacaacataccagaatctctgggacacattcaaagcagtgtgtagagggaaatttatagcactaaatgcccacaagagaaagcaggaaagatccaaaattgacaccctaacatcacaattaaaagaactagaaaagcaagagcaaacacattcaaaagctagcagaaggcaagaaataactaaaatcaaagcagaactgaaggaaatagacacacaaaaaacccttcaaaaaattaatgaatccagaagctggttttttgaaaggatcaacaaaattgatagaacgctagcaagactaataaaaaaagagagaagaatcaaatagacgcaataaaaaatgataaaggggatatcaccaccaatcccacagaaatacaaactaccatcagagaatactacaaacacctctatgcaaataaactagaaaatctagaagaaatggataaattcctccacacatatactctcccaagactaaaccaggaagaagttgaatctctgaatagaccaataacaggagctgaaattgtggcaataatcaatagcttatcaaccaaagagtccaggaccagatggattcacagccgaattctaccagaggtacaaggaggaactggtaccattccttctgaaactattccaatcaatagaaaaagagggaatcctccctaactcattttatgaggccagcatcatcctgataccaaagccgggcagagacacaaccaaaaaagagaattttagaccaatatccatgatgaacattgatgcaaaaatcctcaataaaatactggcaaaccaaatccagcagcacatcaaaaagctt

SEQ ID NO: 197841 - DNA, 1000 bp, Homo Sapiens
ttattagcttttgctcatgcacacagttgactctcccatttaaaccttagtaccgtggttctcaaagcagggtatggggatggacactcttagagagtcggctaggttaaaactattttcataataatcctaatgcaatatttgctcttttcacttcgttctcttgtgagtgtaatgtagggggaaaataccgtttttatccccccataaaaatgtgttaccacataatggttttattattgttttaaattagttgatagctatttttaaaatttcagtttttatttataacatagtaaatattgatagacaaaatccaaatgaacaaaagctctttggggatcttcagtagtttttatggatataaagagtttttgagattaaaaaaaagtttaaaaatcattgcccttgtctgtctgccaggtataagaactcctgttgaccacatttgataccacaggattagacaatgaattggagttggtcttctttgagtgataacttgtcttgactgcaaaaatcatctatgtcaagataaactatagcttttggccagaatgtcatttagaaattcagcaaatgttaatacaggattcctttttgtttttcttggtgatgtttaatggaaataaacacaatcctagtaaaaggagaagcataaatatggaaaagatttggaagagtgtccagcgtaagagtaagcccttaacacaggtagtgattattactgttttattattaccctatcacagtcgctattcatttatttattcaacaagtatttattgagtactacatgccaggctcagtggtctgcattgcggattcagtgatgggcaaaacacaaacagttctgccttcaaggactttatagtcaagtgggagaggcagtggaatcaacacattaaaaattctaattacaaattgtgttaagcaaacgaagtgacagaggtataagtagaccaagatttgatctgattttcagagtcagtaaaagctt

SEQ ID NO: 197842 - DNA, 1000 bp, Homo Sapiens
aagtgaaaccacacaatgagtagcctttcctgtcaatgacgtcatggacagggcactggaacagacgtccttcagtcaccaggtgaagggcatgctttagaataaacaggaccaagctcttggttgacaaggcaagaaaacaaaatacttacacttgtattggtacatacagtatacagggaatacttatattccaatgtggaattttaaaattaggtataaaacatagccttaaatgaaaagaaagcttaacaaccaaactaaataacttaataaaatcatttcagagcaagccatatttattttgttcagggcattctgctgaccactgcagagaaccgaaagacatgacacaaactttaactgcatgaaaccctgggcttttccttactgccagtccagtatgcaaagaatgaccacatgaaaggaaaaggacaatactgtcatggaggcacagagagggctctgaagactgcaggagccttggactgtaaactcagtaagggcaatgatccgggtttctctccttttgacttttaccagttcttactagttcacatcaaaatgcacagcacagagagctgccaaaccactgcttctgccctatgatgaagggagggcaaaactggcacaggagcaggacggggtgaaagcacgggtctctgggtccatcccttgagactgtctggggtggggtggggggaggatcctggaatcagtgtctttccaattagcttatgtgattctgacaccagggttcttgaatttctgtagacagcactgccctacagggtgagaagggttatctgtggaggaagggaactgagtaacacattgatgagcctggaaagcaaggagttgccagtgtataatgaccttctctgagtataagcagaaacagaaaggcagagagttatggcatacgaaagtcagaagaggatcataattctggagatttaccgtgaatgcctggctgaaaagacgagactcagagaagctt

SEQ ID NO: 197843 - DNA, 1000 bp, Homo Sapiens
ctgcaaaatttggctggtgattaccgtgggttttgattatggaaattcactgcaagaaccatttattgatcactagtttatgtcctcaacactatatttaggtgatgtagagcatatagagaaaaagcattgcctgtgttcctggtgtgctcagtgtaagaggaagagaatttctttctttcttcttttctttcccttcctccctccctctctctctctctctctctctctctctctctctctgtctctttctctctctctttctttctttttttctttagagagaggttcttcctctgttgcccaggctgaagtcatagctcactgcagcctcaaactcctgggctccagcaatcctcctgcctcagcctccagcgtagctaagactatgggtgtgcactaccacacctggttaggttttgtttactttttgtagagacagaggtctcaccatgttacccaggctggtctcaaactcctggtctcaagtaaccctcctgccttggcctcccaaagtcctgggattgtaagtacgacaccacccagccaggaagaagattaatgtttaggtgcttcttctcacctgtctgtttctcaagtgccgagctatctctgtaatccctgtagcacccagtaggagagtttatatgcagtaggcatacaagtttttcagacaattattttctaaattaatttcttatttggtcattgaattgttaaagagggcataagcatttgcaaatattagatcattctgcaagattgtaagagatgaaaacaaccagacattcctggacagcctagagaagctatctctattaggtgtctgatgggcacctgggggcctttagtctccattcatatggaaaccacatccctggaatggtgccatcctgaaacacaaaggatcaggagtttatgtaaataagaatgctttcccccagctgatcaaatagattgccaaaaagagactgcgttccaagtggatgggaacaagctt

SEQ ID NO: 197844 - DNA, 1000 bp, Homo Sapiens
gcaaaaggagcaaagtcatgtctcgcatggcggcagacaagagagtgtgtgcagaggaactcccttttataaaaacaatcagatctcattagtcttatttactataatgagaacagcacaggaaagacctgcccccattattcaattacctcccatcaggtccctcccacgacatgtagggattacgggaacaacagttcaagatgagattcgggtgaggacacagacaaaccatgtcaccactcaagatatcaatagcgccaaggctgagaaaccctgacccattttacagataaagaacctgaggatataaaaatttgaatacgttgaccaaggttcacaatttgtgaatggtagagttaacatcaaactcaggcttgactcataagtttatcctctttatcaataaaactcattccttcatgggtagttagaaacacaatcagaaaatgcagatcaacatccagttgcagacagttgtaaatattaggggactgtacatcatagagattttagatccattgaatatttatatctagaactattaaataaaaagcacatacttctaggaaatcaaagttcagctgagaagactagggaaaatatataggcatacgtggaattccagttttcaaacaatttattggtaacaaaattttattccttgtacttttctatttatgtggacacatattctcctatctgacagcctagagttacctaaatttattaagtatgagaaaattgaatcagatattttattttcaatattatttccagaactcttcatttttagtttataaatattgagaaatgccctctggctgtcctgcttgatttattttattctttgtatctcttgtcaaagaagtccagtgcatccaggctaccaataaggaattctgatccaagccttgcacatcgtattgaaaagtcctagttgcacagataatatttaattctttaggaagttgggcttattttagtttcggataagctt

SEQ ID NO: 197845 - DNA, 1000 bp, Homo Sapiens
gttagctctagcaacataattaaagtgcaaggaaagagggaaagcagccagacagatccatttttcattgtcagcatcaataagtttcatgctgctaagagaaaatgtcaggtgcaacaggttcagggaaatagaactatattttttctcttccttcttttaaagcagcagtctccctgagaagagaagagggaggtaaacaatgagatagccctatttcttcaacaactgacaatcttgggaaaaggaaggtcacttccccagcctcaggtagcaggactaacccttgcatttggttttgtaatgtaagagctgttcggtggttgggcccatttcccatgcacttataatattctcagagatctctcaacatcagtttttaaagaaagagatctacgaacagcatatggaagtgtgggttttgaaaagaaaatttcactaaactgtttaaaaaaaatacagccaatgttcatagtaagcctaaaaaaaggtctgtgtaaatgagaatagattcctgcagtactatgagtggggaaagaaaacaaacaaagcaaggtgcagagatgatttttaggtatagattttcactcagcactgaaacccatgattccccacagcacttggtggccttctgttccacagttttgtcggtgagatgggcgtgcacctttttgcagctgcctctccaaaagggctggcttcttaggaccaacagtctcaaggaaaagctccccacccacctcagccagccactgtctggaatcctctggggcacagcctactgcatttaattaaggaaatgttacatacaaatccatttgtgtttcattctttctttcctatcccattgcctaaagactggaaaggcagtttcagaaggtaccattcctcacatagaaatatttagaatgcactgacaaccatgcacatgctgtagactgaaattgcttatgttttggtccatctctgtagaggaagtgtcagcttttctgtgaagctt

SEQ ID NO: 197846 - DNA, 1000 bp, Homo Sapiens
ggatgccagcatggttggattctgctgagtgccctcttccaggcttccgattgctgtcttcttgatgtatccttacatggtagaagaggacaggagagctctctgaggttccatttacaagggtgctaatcccatttatgagggctccatcctgaagatcaaattacctcccaaaggcaccaccttttaataccatcacactgaggatgaaaagttcaacatatgaattttggagggacacaaacattcaatccattgcagacagccttttcaacaatggtactgagacatttgaatatccataggcaaaaataaatgaacttagatcaatatcttccactacataaaaaaattaacatcaatggtcatagactgacaagctaaactccaaactataaaacttgtagatgaaaacatagaaaaatacctctgtgacctggtgttaggcaaagatttcatagatatgaaaggtagcatgaaccataaaagaaaaatttgaaacattgaacttcgaaattaaaaacttttgctcctcaaaagattttaagagaataaaaagacaaactacatactggaagaaaatatttacaaatcatatatttgataaagaatgtataagaatataataagaaactctcaaaatttaataacaagaaaacaaccagttttttaggattaattttaattttgcaaaacaagtctttaaaaaaaacaaatcactaggaaaagacaatctagacctagaatttttggcaaataaactctacctcaattttcaaactattgtggctacaagaaaatagaagaataacaattagaattggggttaaaactgaataaacaaatatatagttactcactaaaataatagttttagccaagtcaactgcaaagagatatgcagaatgttaatagaatgagttggatcttaacatgtatttgataatatcttatattctactggctacttaataacctgatgcaaaaaaaaaaaaagctt

SEQ ID NO: 197847 - DNA, 1000 bp, Homo Sapiens
tcagaagggcccaaagagttctcccaaaggagaactctcccatgacgccaaggttgcctcctcagccatgtcccttgtggcttcacctattatcccagctgttggccagcttggttgcctttccatctgtgaccccctcctccactgccttcttcctcactgtgcctgacttccccatccacacagcattttgtaccgaagccgaccgatgccacagcgcaggcccctgaggggcgctttgctgtgcaggctccagcctctcctgcatctgcttggcaaagtgaggtccacctccttgggtttttgcctctttctaaacaccacctgcaaactgcctccccgcaaaggaaagtagcagggacttgtcctccccagggcactgcacacaggctcgaagcctggtcgggaggctctttggtcaggctggaaagagctttgacaagacagagtggcccctgctgggctggggtgtgctggggagagtcccttttcctctgactcctgaactcatcaggcaacagtacaggaggttgagacgaggctctggcagggtcagagtcacagggcaggaggtaaccacttgagggccatggggccggaagtagctaaggtcccatgcgatgacctcccagcatcctgagctcaaccctgaaaaggggctgcaaggacaatcacagcaattatcttcttcattttgctacaggcacagagcagacaccacacagcttccttgtcgccttccctcatgtgcgcacagcacgggtgtcatttagacatacagtagaatgtgtggcaattacatcagaatcatcacaccaaatgtggctgtatcctttgttaatcaaagtttatctgtgttagttaatggtgtgaaggaagcctatgtagagaaattaccaactgtctgtaagaaatccaacataaacatccttttgtggccaaagaaaagcatgcttcagccagagccccggcatccaccctctttcctgccatgaagctt

SEQ ID NO: 197848 - DNA, 1000 bp, Homo Sapiens
aggaacatcttcctaaactacatcatggataggaaaacataactcttgcaaaaattcagtttgcctttaagataagaagcatagcatgggaaaaatttggacactttaaagcaagtcttcacagtttcagtcttctgtttgtgtacttgttcccttccctttgatagtaaccaccatacacccaactcaggacacgtatagggttgctctactaatctttactacaagtaaaagtgggaaaagatctgaattcactcattatgtctgctgatttaccgaatatacttgagatatgaggataataccagcagttgcacattactgagcaataagtatgtgccagggtcctagtcaaattcttcacatctgtcgacaatttaattttcacactttcaagtaggtatcaggctcatccatattttgcagaagaagaagctgaggttcaagaggtgagatatatggttcgactttacccaattaggaagtagcagagagtaaactcaaggccagatctgccttactccatagcccacacttttcaaatatatgttttattgcctttttaggtggatcaagattgcataaagggaaaacaggtgttaactccaggatgtgggtatggaaatacagcaagagcagaggcttgtattagttgaactctaacagtggaggagttctactcagaacatggtgggtgtgggcagtagctatgagattagaatgcatgttgtgactaatgaggattaagttttatgtggtatcagataaaattttcagcaccaccagtcgtgaaagtgttgaagaaataacaacaaaaaagagaagagctataaaattttagcttggctatgtaaaattataatcatctgttgtccattcaagcttaattaccatgtagcacaacagcaattatgcatatcattaagtagatgctagattaacttatgtacattttacttgatcaaagcagtaaagtgcagttagcagtatgttcaagctt

SEQ ID NO: 197849 - DNA, 1000 bp, Homo Sapiens
ggattcttggcagcctctgcctagatttcagaggacatatggaaaagtctgtttgtccaggcagaagcctgttacaggggtggagcccttacaaagaacctctactagggcagtatagaggggaaatgtggggttggaggctccaacagggtcaccgctggggcactgcctaatggaactatacgaagtgggccactgccctccagacctaaggatgatagatctaccagcagcttgtattctgcacctggaaaagccacaggcactcaactgcagcccatgagcgcagccttggattctttaccctgcaaagccataggggcaggactgctcaaggcctggggagcccaccccttgtaccagtgtggcctggatgtggaacatgatgtcgaagattattttggaactttaagatttagtgacttccctactgggttttggagctgtgtggatcctgtagaccctttcttttggccaatttccccctttttgggatggaaacatttacccaatccctatacccccattgtatcttggaagtaaataatttgtttttgattttacaggcttataggtgaaagtgacttcccttgtctccaatgaggctttggactttggacttttgagttaatgccagaatgagttaagattttgggggcctattggaaaggcatgattgtagtttgcaatgtgagaaggacatgagatttggagaggccagaggtggaatggtatagttcagatatttgacccagcccaaatctcttgttgaattgtaatccccaatgctggaggtggggccttccttgtatgatgtgtttggaacatgcaggcaaattcctcatggcttggtgctgttttcatgatagtgagtgagttctcctgagatgtggtcatttaaaagtgtatggcacctccccccactctctatctctcttgctcctgctctgctatatgagacacctgttccccgtttgccttccaccatgattgaaagctt

SEQ ID NO: 197850 - DNA, 1000 bp, Homo Sapiens
ttaatgctatcacgaacttttttttcttttttgcccaatataatctgcacatttagtaggttctgctgatcttttataaatacatgtaagtgaaggggaactatttagacagcatttttaccaagatggtcttctcatggttaaaaaagtatgactgcaacatataggtaatcaatggaactagaaaaattaagaaagaaaaaataaaggcatactggaaattgtattctgattagtaaatctaataatgatttaaaatcaagtaagaccactccacgtcatacacagaaatcaatttcagataaatttggtccaaacatgaagagtaaaataataaagcttttgttttcttctgagtgaatctctttcctgaccttgctgtaagccaagattccttaaagtggacataaaacaatgttaactacaaagaagaaaactgaaaaattggattttattggaatggaaaaattctgttcttccaagggcactgttaggagaatgaaaaggcaagccacagaactggcaaaggtatttgtaatacatatgacaaaagactgtagctagactatataaagaattcctatacatcaataagaaaatacagacccttgtaatcccagctactcaggtgtctgaggtggaaggattgcttgagcccaggagtttgagaccagcctgggcaacatagtgaaaccatgtctttaaaaaaaaatgataaaaagaccaatagaaaatgagcagaaatcttgaacaggcattatgaaaatagatatctaaatgggtaatacaaatgaaaaggtacgcagtcttatatcagagaagtacaaattaataccatcatataccaccacacacccttgagtatggttaaagttaaaagatggataacataaggtggtgaaaaggctatggaactacagaaactctcatatactgctatttaaagtctaagtgcgtataatcgttttgaaagtctatttgacactgtatactaaagctt

SEQ ID NO: 197851 - DNA, 1000 bp, Homo Sapiens
ccctgacccaacacgaagaaactcttaagtctaagaaggaaagaaaagcaggggtcaggcatgatggctcatacctgtaactccagcattatgggaggctgaggtggaaggatcgcttgagcccacgagtttgagaccagctcaggcaacaaagggagaccctgtctctacaaaaaatacaaaaaagctgggcatagtggtgtgcatttctggtcttagctactcgggaggctggggtgggaggatcgtttaaagccagaagtttgaggctacactgagctatgatggcactgcacgctagccagggtgacagagtaagaccctgtttcttatttaaaaaaaaaacaaaacaaagaaaaatagccgggcatggtggctcacgcctataatcccagctctttgggaggccgagatgggaggattgcttgaggccaggagtttgagaccagcctgacacagtgagactacatctctacaaaaaaaaaaaaaaaaaagtaagaaagaaaagaaaggggagaaaaaatgtcttggccacctactgcagactaaaatgcaaacagtcacaatatacctgtagaaaaggagtaagaggaaaggccttggccagcattcagcatttggagcagaatcaccctttgctcaaatatgtgttcccacgaggctgaccgacttccaaagccgacacctcacagaacactctggaggcagcagcctggaccaggggaagggaatcctgacagagagcttttcttctctcttcaggtgaggctccacaaggcagcctctcagccagcactcagtgacacagggggcaggattgttggaacattcgttgcagggcctccgtgtttactttttgagacttgtggctaaaaggaccttttctttccaacagctctcagctgataccaaagccaggaaaagggccccggctgcaactttgagaagttgagggtgtggggctgagggagggggttgcttttggcatctttgggaattc

SEQ ID NO: 197852 - DNA, 1000 bp, Homo Sapiens
ggacagcccaccccaagggaagaatcagggagaagggaaccaacacccccagaaacatgccaacatataaaaccccaagtcaaaggtcaaaacagtgcatttgatctctcaagtcacccacttggccctcttccaagtgtactttacttccttccattcctgctctaaaactttttaataggctgagcatggtggctcatgcctgtaatcccagcactttgggaggcctaggcaggcagttcatttgaggccaaggagttcaagaccagcctggccaacatggtgaaaccccatttctactaaaaatacaaaaattggccaggcacagtggctcatgcttgtaatcccagcactttgggaggctgaggcaggtggatcacctgaagtcaggagtttgagaccagctggccaacatggtgaaaccctgtctctactaaaaatacaaaaaattagttgggcatggtgacaggcccctgtaataccagctactcaggaggctgaggcaggagaattgcttgaacccagggggtggcggttgcagtgagctgagatggtgccactgcactccagcctgggcaacagaatgagactccatctcaaaaaaaaacaaaaaaaaaaaatctggatcatgagccatggctacaagggaagggggcctggaaacagagtctgcaatggaaacagaatcattcatcattcatgcatcagcccttaagatggcacacaggcagcctcaaacaaaatctggttccattaggaaaaaagaagggaaagaatcgtttaggggtaggtaactgtttgcatctaccacagacacccacatctatacaagaggtacacacattcttgtgaaactcacacgcttgccctcacacctgcccaagcagagagaagaggctcccctctctgctcccagagcccccgtggacacctcagtgttggtgttaattacccggcttggagctgcttggtctctgtcttgtctcagaactgtgaattc

SEQ ID NO: 197853 - DNA, 1000 bp, Homo Sapiens
cctcccgagtagctggcattacaggcatgcaccaccacaccctgctaatttttgtatttttagtagagatggggttttgccatgttggccaggctggtctcgaactcctgacctcaagcgatccacccacctcagcctcccaaagtgctgggattacaggtgtgagccaccgtgccaggccaactcacctatttttaacaggactctaaggaaatgccttattttctcaaaagtatattcttcttagaaaaatataactcactttcatcttaaaatgcagaagtttttatttacaacaacaattggtaagccccattcagtattttatcaaatatatatgatcaattttctcaaaatcaatgatttggagtagcaatcttgccccaagcaccatgttttccttgcctgaatccccgccggccgacacacagcctgtccaagaataccatatattctctctttctcttcctcagttatagtgtctggaagtagattctgaacttcagatttttctctaggcagcagacgaacaccttctccctgactataaaaataaacaagtcatcagtatttcagctacccaaactttaccatatcagcagacatttaaatatctatttatgcaatgcataaataaactacacatttaaacatacctggcattgtcaaccacctttctgccccacctataagcccagctggccaacgctgcccaagatttggctacttcaggtgcctgtactgaagacaggtgatacaactgtcccaaaatgaagtcaggttctccaactccaatatgcactgccaaaatggacaaaaaaataattataataaaagaactcaacaatgttacattcataaattcctaacgacatttccattagcattttaggtttttatctgcaagcaatcaaaagttccaaaatattactgtacataacttgagaaggcacaaatatgaattatgttctctaaaaggttggtatgttgaaatgaattc

SEQ ID NO: 197854 - DNA, 1000 bp, Homo Sapiens
ctgtaatctcagctacttgggaggctgaggcaggagaatcgcttgaacccaggaggcagaggttgcagtgagccaagatcacacgactgcactccagcctgggcaacaagagcaaaactctgtatcaaaaaaaaaaaaaaaaaattcttagttttgataatggttatgcaagatgttaacattcggggaaactggaaactctgtattatttctataacttttaagtctaaaagcaaaagaattgtaagtaataagaacaaaacggctgggcgcagtggctcacaagtacttcaggaggccgaggcaggtggatcacctgaggttaggagtttgagaccagcctggccactgtggtgaaacctcatctctactaaaaataaaaaaaaattagctgggcatggtggcatgtgccagtaatcccagctactcgggaggctgaggcaggagaattgcttgaacctgggaggcagaggttgcagtgagccaagttcgcaccactgcactccagcctgggcaacaagagcaaaaactcccatctcagaaaaaaagaaaagaaaataacaaatcacagaaaatctggaaaagagataaaatagtcatctttattactaataaaacgtatctttccttctagtctttttgtctatgtattttgtgtctaggcattttaatagctataatcatacatagaatttttatcttgctttttaacacatcttataaaatcttttttttttttttttgagatgaagtctcactctgtggcctgggctggagtgcagtggcatgatctcagcttactgcaacctccacctcccaggttcaagtgattctcctacctctgcttcccaagtagctgggattacaggcacacaccaccacgcccaaccaatttttgtatttttagtagagacggggtttcaccatgttggccaggctgatgtcgaatgcctgacctcagatgatctacccaccttggcctccctaagtgatggaattc

SEQ ID NO: 197855 - DNA, 1000 bp, Homo Sapiens
aacaagagaacaattacaggaaaattgcctaactctcagaaactaaacaataaacttttacataacccatggatcaaagagaaagtctcaagggaaattttaaaatatattgtgaactgagagaaaatgcaagtacaatacatcaaaatgtatgggaaagagctacagtgggtgacgagagacaaatttacagcactaaatgaatggtacattagaaacttggaaacaaatcaataatataagtgcccacgttgacaacctaaaagaaaattaaaaatagcaaaatcaacccaaaagtaagcagaaaggaagaaataattaaggtaagagtagaaacaaagtgaaaacagaaaaacaataaacagtaaagcaaaaagctggttctttgaaaagatcaataaaactgacacacctctctaagcaagactgaaaaaaaaaaaaaagacataaattacccaacattagtgatgaaacaggctctaaagatatgaaaaaagataattaggaattactaggaacaactctacacacataactttgacaacttgggcaaaatagacttattcctcaaataatgcaaattaccacaactcaccaaatataaaatagatcatttgaatagctctaccactatcaagaaaactgaattcataattcaaagaatcccaaaaaaaaaaagaaattaccagatccaaatgaactcactggataattccatcaaacattaaaaaagaattaacacagactcaaaacaatctcttctggaaactagaaaaggaaaaacttcccaattcatattaagaagctaatattagagctaatattagcattttaagaagctaatattagagctaatattagcattttaagaagctaatattaggtaccgtacctaaagacagtacaaactacagaacaatataccttaatatatatatagacacaaaaatattcagtgaattattagcaagtagaagtaaacaatatataaaaagaattc

SEQ ID NO: 197856 - DNA, 1000 bp, Homo Sapiens
agaagtcatcagattagtggactacaggtctgttgggttggcagattttttggagttaggatattagaggtagtgagctggtatcagagtgtgatacttaaaaatggtatttcgaggctgggcatcatgcctcatgtgtgtaatcctagcacttcgggaggctgaggcaggtggatcacttgaggtcaggagattgagaccagcctggccaacatggtgaaaccccgtctctacaaaaaaatacaaaaattagtcgggtgtggtggtgcgtgcctgtagtcccagctactcaggaggctgaggtgggaggatcacttgagtccagtgagctgtgattgcaccactgcactccagcctgggcgacagggtgagaccctgtctcagaacaaaacaaaacaaaaaatggcattttggaagggttgcatttattaaaattgagaaggtttaaggtttgactgtatgggaatgagtataaaatagggttgagggaaggatcagtggaagatcctagatctactgaagggcagaacttcctttctgataataagaaactgacaagcaagaattgggaaaggattgtgtggatgatgagattcccaagcattatgaaaataatgatggtgtaatgagcaagcagctaaaatcttcaagaaataaagtggagagcttgataactgcagtaaagaacggctacagtctgatgatgagatttcagtttggatgtttttagggaagagttaggaagaattgtctggaatgggcaactaggattgagaaagaatagaagcttttagtctgaggaactgagccaccattatcaggcctagagaggcactgaaatgaaataattacctctggaagccacatgctgtgtgggctctagactgataccaggtagccataaaatgccatgtgctagacgccataactcataccctatagttcgacaatatatagtcaatcactaatcaatgctatttctgtaaaccaatgagaattc

SEQ ID NO: 197857 - DNA, 1000 bp, Homo Sapiens
cagcattcaaaccttgcagagctttgctctcagagagtttgtaaaaagacacactcctcttacaagagttcatgctaccacatagcaaagaaccttaaatttttggaagaacaatatattcattttggcattgtgcagaggtaagctatttagctcaacaagtttatattgcatgcattgattttaaagtagctcacatttttttaaagaaatgagattggattactatgacttttttgtatgtgttctatcacttggtgtgtctatatgtctggcagacattatcagcacattctctgttgttacctgtgattcattttttcttcactctccaggtgaatttcaattgctgaaaatttcccactgaaaatatgcagtaatatattttgtggttcagacatttggggcaaatggttcacattcattttagggttagtggtcatgctgtttatttttctctgctatacaaagttcctcttaggggtctgcctcatgacactaaaaaatgaatagagattctactgtaggttatctcctaggcttgagttcaacatttgtttggatttttgaagaaagtcaaatcaagcaatgctcccaaatgatgtctttgtaaattcataccctctggccctattttttttcatagaccctaactctacctttctgctttaaagcaaagtaaactcggtggcctcttcttctccacccctcaaaatgatagcaatctctgccgtcagcagtgcactcctgttctcccttctctgtgaagcaagtaccgtcgtcctactcaattccactgactcatccccgccaaccaataatttcactgatattgaagcagctctgaaagcacaattagattcagcggatatccccaaagccaggcggaagcgctacatttcgcagaatgacatgatcgccattcttgattatcataatcaagttcggggcaaagtgttcccaccggcagcaaatatggaatatatggtaagaagaattc

SEQ ID NO: 197858 - DNA, 1000 bp, Homo Sapiens
cctttctggctgggcacagtggctcacgcctgtaatcccagcactttgggaggccgaggcgggtggatcacgaggtcaggagttcaagaccagcctgaccaacatggtgaaaccccgtttctactaaaaacaccaaaattagccaggtgtggtggtacgtgcctataatcccagctactcaggaagctgaggcagtagaatcacttgaacctaggaggcagaggttgcagtgagccgagatcacaccattgcactctagcctgggtgacagagagagagagaccctgtctcaaaaaaaaattgccctttctatgggccatcagcatttgaatattggcaaattcatatcgttctacctaatagatatactattgttttcagcttcaaaatgaaggtttggagtgtgtgtgtgtgtgtgtgtgtgtgtgtgtgtgtgtgagatacacagtaaagtacctcatcagaactaaaagtagaaaaagcatggacttgggctgggcgcggtggctcacgcctgtaatcccggcactttgggagggcgaggcaggcggatcaactgaggttgggagtttgcgaccagcctgaccaacatggagaaaccccgtctctactaaaaatacaaaattagctgggtgtggtggtgcatacctgtaatcccagctactcgggaggctgaggcaggagaattgtttgaacccaggaggtggaggttgtggtgagccgagatcacgccattgcactccaacctgggcaacaagagcgaaactctgtctcaaaaaagaaaagaaaaagcatggacttgagagaaaatccacatttgagtaccaatgtcaccatcttaatagctatgagtctattactcaacttcttggagccccagttgtctcatcggtaatcccatcttcacaaaacagttgtttgggagatgaaaaaatggacaaaatatttcaacaaaagatctggaatgcaaaaagccctataatcaagacttctttttttt

SEQ ID NO: 197859 - DNA, 1000 bp, Homo Sapiens
atgccaccatggttctctgcctctctgcaacacatatttcctccgaaacatcagtgctgatcattatcagttacttatcaatctgatgctttccccttacttaacaccaatgtgctcttcttgaagttagcgaaggactgtgcatgactggatgtactttcaaacagtttatttaaatctctctgcaaacagttttcacctctttattgtcgatgacagtctcggattccatgccaggccgcctgtatttaatttggcttgcttactgggccccaagcatgcccgagcaagttcactttctttcagtgcctgggatataggaagccctcaatacatggtagttctggttgttgtttctttttctttttttctttttttttttttttttgagacggagtcttgctctgtcgcccaggctggagtgcagtggcacgatctccgctcactgcaagctctgcctcctgggttcacgccattctcctgcctcagcctcccgagtagctgggactataggcgcctgccaccatgcccggctaattttttgtatttttagtagagacggggtttcaccatgttagccaggatggtctcaatttcctgacctcgtgatctgcccgcctcggcctcccaaagtgctgggattataggcgtgagccactgcgcccggcctgttgttttttttcttatactctctccctccatgtgtgcccaagtgagattactggcttcttcaggcttccaagagagcagatcaatgtggctaatctggccacagcccaagttaaatcaagaggtgaccctggccctggaagtctgttacctctgaccttcaggtctgaacaaaacctgaagagatgctgaggaatcagggacagggctgagctaagagaaatttgactttactcctagtgaaatgaccccttccacagtgatgaactatacagtgctgtttagaaagtcctgcagtggcttgtatttgttaactaatttgtatgaattc

SEQ ID NO: 197860 - DNA, 1000 bp, Homo Sapiens
aaaaaaaaaaaaaaaaaaaaaaggaaagaaggcaccacgcccaggtggaagtccttacctgcagcaccgtgcactgctgactggactccttccagttgaaactctccccaacaaaacctccagttttcctcccccatcttctcttcatctccttcaggtgacttagcttttgcctgacccttaggctaggggtcctcagtgttctgttgttggccctctgcaactgtgctctctcagttgaggattcttagtcctggctgcacattagatcactgggggaagagggataggggaaaatgtgcttcctaaaacccttatgtccaggctgcaacccagaccaatggagtcagatttctgcgcaggggaccaaggcctcaccaaatgttaaaactctccaggtgattccaatgtgcagcctagcaacagtttcttgactgtggacatgcactggaatcacctagggagttgtatgtatgtattatttatttatttatttatttattttttggagacaggtttttgctctatcatccaggctggagtgcagtggtacaatcataactcattgcagccttgaactcatgggctcaagtgattatcccgccttagcctcccaagtagctgggaccacaggtgcatgccaccacatccagataatttaaaaaacaaaaaaatttttttggtagagatggtgtcttgctatgttgcccaggttggtttcaaacttctggactcaagcgatcctaccacctcggcctcccaaagtgctgggattataggtatcaacccccatacctggtcaacctaaggagcttttaaaacatactgataccttgacctcaccccagatcaactacatcaaaatctctggcgttgggcctcaaatgatcaaatcatgcagacaggattaaggaacatggctgtaagcattccaccctgggtaatctcaactactgccagggtattagttaccatctctaaggcaatgactctagaattc

SEQ ID NO: 197861 - DNA, 1000 bp, Homo Sapiens
agcaagaagacatttcaaaagcggtctgagttttaaaatgtcaacactgctggtgtgtcagcaacatttaattgccatcttatccatgcccttcctcttacatgttcagcaagtgtcatttagtcttcatttaagttaggaacaaaagttcaataataggtttaacccagttttctcctttcccagcctcttttaccctaaggtgcccttgaagcaagggcctctgcccagccattccctaacagaggatcatgggagtgaagtatagtgtctttcctgtccagattaaacattatcgttgagctataaagctagatgctgctttgggaagggatcacatacaggactcttgtattttactgacttttctgcaattaataatctacttctcatagtacatatcctaaaacttaaaaggagtgcagaagttagctagtcaatattgtttattttggatatggagaaacaaagcctcagaggagaaaaatgtcctatctgtaccatacagcaattattagcagatctgtaaagcctgctatataatgaagcctcaattcttagcatgtctttaagatgcaagaatttttaaaaagtgtagttggagcttcatgaaaatccactatgtctgctctgcaggaggggctatgcttctgaccctttaccatataaacttttgcttaaagatcaaatcaagaaaataaacctctgaatctctaagtagcactgcacaattggatagttcatgtcgtcctactcaaaaatgggccacctcctgtcaatgaaaccagacttccaaaacataggttatcatagcattccccattcaaacccctgcaatgattctccattgcttaggggggatgagggcaaatgttcaaatgcttagcctaaaatttaagaacctccataatcaaagcttaacctactctagcaacacatatttgttgaatactactgtgtactaggtacaataattgagacagtagataaaaatgcatct

SEQ ID NO: 197862 - DNA, 1000 bp, Homo Sapiens
aaggttggcacctctgtgattctcttagtcttccccctcatagtcatgaaatggctgcagcagtaccaagcatcgcatcttagcacggctgcgtgcaaagcagagtgcaggaagcagcacaggcagaggttctcctcctctacttccctcggatgtaggaaacaaattttctcccagaagccccccaccgccaccaatttccccttacatctcttgaaccagaagacactcacctgtctgcccctagaaccaggggcaaggcccacctttcccgagtttgggtgacctctgcctggttttgctaacaaggaaagaaagagtcatggctttgtggcaaatgacagctgccgcagtagtattctctgtaatctacagtgaggtgacgcaacaagccaaagctttattccactgaggggcctccctgcctgctgcagccctcggctgagatccagttccctccatctagaaggcttcctcctttttttttttttgttagtgcttattttttcttaagctaaccatactaagtctgtcgcctgaactgaagaagtattcaaatttcacccaggaccgttcagttctgccccctcccactcatttataagaactaagtccaaatcagtcaggtcaagagcaccccgaggtgcagacagaaacattttgtgcagaaaacagccgttccctaaccaacttgcaacagggctggaaactgctctcaccagggtcaccaggggagctgccatcctgttaaccgagctccaggaactcactggcaactgagacatggggcaggtagagcctgacaaaaatgtcatcctcaaaaacaggaaggggcgaaacccttttgtagaactctgaaaatgtcaagcgcctgcttgcacctccgtcagggttagattgaatttcacatttcactgcggtagggccctggaggcactgcggcagcgggagcaggcggtgaaggttggaatcccaaggctgacactgccggtgtggaatt

SEQ ID NO: 197863 - DNA, 1000 bp, Homo Sapiens
gtaatcccagcactttaggaggctgagccgggcagatcacaaggtcgggagatcaagaccatcctggccaacacggtgaaaccccatctctactaaaaatataaaaattagctgggcatggtggtgcgtgcctgtaatcacagctactcgggaggctgaggcaagagaatcacttgaaccagggagttggagaaagaaagaaagttagaaagaaggaaagaagaaagaaagaaggaaagaaagaaggaaggaaggaaggagagagagagagagaaagaaaaagaaagaaagaaagaaggaaaagaaaggactcctccattcattggcagggagtggctggagaagggccagaaaccaaggagattctgtgggtctctggattccaaggagcctctcctctgaacccctgacttcctcacctccccccccaacacacacacacacacacacacagacgcctttctgaacatcccccaggttccaccattggaggcctggtgttggttcaagtcaagtggagataacctctcccagggatgtgtaaacatccagtgggcgtccggggcagaagaatgtggaaatggaattttttttccctctgagggctgcacatcttctgccagactgtgtcaaatttgcagtggcctgagatccttggggtccccatctgtgtgtgccctgatgctttctcactgtggatgacatctccagccttaacaaaaaaggcttctcaaatggctgcgaccccactctctctcagcacacgccttttcctgagccacacgccttctgtggcttgcagccaggggttgccagctggggctggcccttccttcagaagggtgttaaaaggggtcgggagattttatgtggagacaagtggtttgaatttagggggaggacacaggggagctcattagaaagcccagttgtggtaaagagatatttgttttatcctactttttaggaaaccagatcttagaaaaatagcaccaagctt

SEQ ID NO: 197864 - DNA, 1000 bp, Homo Sapiens
gaccttactgagcattagtaagatttaaaagctccctgggtgattctaatgtgcagcctgggctgaatatcacagctgtaaacttccgtctcctcgtctgtgaaatagagatttagaaaacagccactatgtcatggggtattttgcaaaattcagtaaaattatgcatgataagcacttaacacagaccctgacctggaggaaacattcaataactcttccgtattattattctcttagagcctcaaattatatatttagtctcaggcggcgccctcccgtaatatctgttactccacaggtcagcagatgatttctggagagggccagatggtaaatattctttgccttgtgagtcgtaagaattctgttgcatcccctcacctctgctgttgcagtgtgaaagcagccgtagacagtatgtaaaccaatgacactgtctgtgttccactgaaacgtcatttatggacactgaaatttgcattttatataatttgcaccttttcaccaagtattccccttttgatttttttttcagccattttaaaatataaaaaccattcatggcttagactgtccaaaacaaagcagcagacaggattgggcccactggctgtagtttgctggttcttgttttactcttctctcttactatttttttcatgtgataaagcagatggcaaggttcctggaatttttgtatgttcctttgttagtttagggttctctctaaattgtctcaatctctctctccccctccttttctctctctttctttctctctctctgtctgtttctccccactgacccctggccatctccctctctctttcctttcctctctgtttctctgcctctctctctctttctgcttggcacactgctgtgccacactctactacggatcacacaggcaaaggtctgatgccagaaataggcccaggacctatctcccaaaaccctggcacaagatcagtggtttccaccaaattccaagctt

SEQ ID NO: 197865 - DNA, 1000 bp, Homo Sapiens
aaaagacaatgtcaaacgtatgcaaggattagattaaacataaatcattaaatatcttagaacctttgaggttatctttggtgaaaactaagctcagtaaattaatattgtttattctttgtgaaatttgtacttgggagacttaaaggaatgtaatggacaattttcctccaaaaggtatttatttttgcctcaaaggatttaatgaactttattgtgaacacaaagagtccacaattacggtttagtttacaaactctctcacaacctcatgtacttgaccaactttcaaatgtgtggtttcccactcaataagttagccagtctctaaactgtagcttgagccatcatcaataaccttcttatcaatttccaaacacttgtgaatcagttaaaaacttcaggccaggatgttctcatggaattagaagatgctgcctaatccctaaccactgtccaatgaactcctgagactacaagaacagcaacagtagcctaatgatcagtcagttattctgttaacagaaagattagtaattgctgcctattctgctgaaatccctgtcattcttgctgtttcctccatcagaatttatgttaaatcacacattctgtgaagctgtcaagttctctctagttctaaagctagcccttcagtttaatcatccaccttggagcaactgtggctgctaaagggaaattttacagcagctcaaccatgaattatctcctggcaacatggagatggaacattacgcagttaggtaagtgggtaaaagtcttgggttttctccatatcctataatgaagaaaactcttaacatcaaatattttgttaaccagtacccaaactgggaaatgaatcaggggtgtgatggagcaaatatttttttcatccattaaaatttctctgactgttctagaactgagaagaaaacaagaagtaagaagaaaataaattagttattgaaactaaataaaaccactgtactggaagctt

SEQ ID NO: 197866 - DNA, 1000 bp, Homo Sapiens
ccacacaaggaatctggacttgcatgtctgaaatctctttggactaagtccaggaagataactccaagtcatttaaacctgatgactgtctggtagtcaaggagagataaggaataagagtgacagctcatcatctattcaaatgcctattgcaggcacaatgctaaccttttagacagtacctttccagtagtgttgaccaagacaagtaaagcaaattgacaaatacatcacattcacattcaattcatcaagactgagtagaatgttaaaaaatgggttgctcttagaggtcatccagtctaatcctttccattttactggatgaggaaactgggaccagatagggttccagtaggaatattcacccaaggtcacaaaactggaaagccagaggactccatcccttcctccaactcccagcctagggcaatttctcctggggtcacactgacatctcactaccttctgaaagctgaaaaacctgctacccttttatcctttttaaatggttattttccatttgctataactacaacttactctctgtcaggcactaccaggagggttctctgtaaattaaatcacggagtcctcacaacagttgaagcaggttactattattatccgcattttacaaatggaaaaacctgaggtagagagaggtcacatagccagggcaaagttggggctatttaacccagacagtctggctccaaagtccacattctaacccccttcatgagagtttatgaaatataatttcttgaattataaaatgatggaagaaaaggagtaagtcttaaacagaaagggcatggtcactagtgtttgataatgaattgaaaagctaaaccataaatgtcattaatatatacaatatacgcttcatctatttattaagggaatgtctattatatatatttgaagcatattaacatttcaagtgtatattttttaaaggcacaatgatcatgtgcacagcagtcacacaaagctt

SEQ ID NO: 197867 - DNA, 1000 bp, Homo Sapiens
tgaatccgccatggccaaagctgattttgcaagatctgcttcatcttttcgaccaattggtgtggtaaaaggagacttctctgtcataactgcagctagtgttgcctatccataaatcataaatgacaaaacaatttatcattaaagagcaatacagtgaaagttaacttataaaagaaagcaaatcataaaacaatcacactttaagttgcctgtttattttcaatattttattatgtttattagtattattatactaattaatgtttaatataaaatattctatagctaacttatattttcattttaaacagttattttttgtttcattttaaggaatttcaaaaataaatccttttataacctttctgtgaggtaaggaggcaattatcaccacaatcagagaaaaaaatctgaacatttatataaatgatttacagtctgtcatacagttagaggcaatctgggaatcctaactcagttatcttggcctcaagaccactgaatttccactcttagtctgccgtgatctttaaaaataatttggactacataacaatccatttgttgttgtaggttttcagataaactatcatggaagaggttattttttgaacttggcaaaattccagtgaatatctatttcaaataccaaacaaagagagactatagtaataagtcacattttcttcattctgtttttatttttatttttgggttttttagagacagagtcttgttctgttgcccaggctggggtgcagtggcccaatcatagctcactgccccctcctactccggggctctagcaatcctcccacctcagcctcctgaatagctgggtctacaggggtgcaccaccatgcccggccaattttttaatcttaatttttttgcagaatcagggtctcactatgttgcccaggcttccattctgtatttaaatagcctttattggtaatcccagaaaaggccatagcttgataaagttgtaaagctt

SEQ ID NO: 197868 - DNA, 1000 bp, Homo Sapiens
caagctctaataaactgctttcatggtttatcatatgataatttttttagatggctaagatattgtgggaaaaggaaaaacgctgtctttcttaatgtaatgaatatgttaccatcttattaaaaacatgtaggcattatttttcatttcaaaatttaaaataaccataaaataaagttttatgaactgtttctgtgttgtgtatatgaagaaactactcaccggcttaaaaattaatcattgattttaaataaattttaaataaaaatcaaatttgctccctgcaaatttaactagagtaaagttatattgctataaattagttttctatgtaagaaataacgaacaaaaccattccacataagagagtggtggcttgtgtgtttgttttaatcagcctctctccgtctttctctcttttgcctacataatcttcagaggaaaatgttcgaagtaagtgacactgaaaatgtaaacctggtagcagcctcttctccaactgcaagaccaatttctaaaaccggtttgatcattaagggttgctttgtaaacatctgtctttacaaatggtgtgtgaataaaggaagctctcccaaaccagcccagctgtgagctccgcgccccacgcgaatgtgtcctgccgccctgggagctcctttggccggctcatccctcacctgggttatggcagagggtttggaaaggggattgatgtggattgtgcattttcttgggagtgtgttgagctgcagttggacaggtctgtgtgtgcactcacatgcagagctggaaaccaaatggcttctcagcaaggggacagggagccaaagagaaggacaatttccatatataaatttctccttttgatattgccccagttttatttctgcatattgacttggcctttgtaaacatgatagagctccgattgtgttctatccaattagcccaacctttgcctcagtcataaaactttatgcaaactactgctcgcaagctt

SEQ ID NO: 197869 - DNA, 1000 bp, Homo Sapiens
aatgtggctttgcttcattttcctccactttcttcaatcgtcacattttaagtttgggctgtcttttggcctggaaatcgccctgcatttcataagtttgaaaagaaagtagagtgcagtcttcaggcaccaagcctggggaagaaaatttaggttgggaactttagttttaccacgtgttagacacgtgacttggctacattacttcacatcttggagctgcagttttcatatttaaggtacagataattatacaccaaatggtgctgaggattaggtgagaaaaacctttgtaaagcatcttgcacagcatctgacctatggtgtatacctaacaaaggctaaatcccatttttctccttttttattaggtacagaattccaaagagattaaacaagatgtgggaggcactgaggccaattacaagtcatgaggagacagtgaattcatgggaggaaggaaatgaaaggcggaggtagatgatgacagaaaggaagaatcaccactgtcagatgagagttatctctccttccacagatgacaaaaagagtccatggaatactccttgggtacagccctaccaatccaaggcttctaaaaaatcacccttttgatcaaaaagaacattcatatctttctcttccaaaacaatgtttacagactcacaccattagaaacactgatttgtctttgcacactgtcagtttttatttatgtgcatatcttaaaatactttccccaagtcttagttgacaaagaggatcgcagttctgtagttgagtttcaaggcttctgttatagttagcagggttgatgtggagcgtgaaggagcgctagagcagggatccctgggcattctgttcttggtgaaatgcgggttctctttcactcttctcaaagtcactctgtcttcattttttaaaaaagagtatttccccctgtataattcaggttgactcttaacttcttaccttttcttttcactatataggcaagctt

SEQ ID NO: 197870 - DNA, 1000 bp, Homo Sapiens
agtgaggggattcttggccatgtgctttagccgttcttgagggaaattctgggggatcttaaacttgatcctaaatattgcgtttctctctatctaagtctcctaaaaattgttcatgtatttggggaggaaggctcacgctcatactgaagagtgaaaggaaggggacaataattcaaaggcttgcaccaactccctcccaatcccctgcacaaggttaatgtgtggggaaatccctgtccttcctgagagccctgatgtttcccagtctggcaggggccaggacaacctttctccatcctgcaggtcacagagccagcttgttgtggaggaacaggaggccctgttgtaggaggggtggcacaggtcccacaagccctatggggtttggaggacacccaggcgcctactgacttagcaagagactcccctttcccaccctgctagaggcctgaagctccaaattactgacttctttgccttaaagcattagagactccccgaacacaaatatgacagaaaagctttacttggaaatgttggaggatgaattgcaaaatggcactgctcggagagatccccagggaggagctggtcgtggaccgggcggggcggcgagggctgcagggagcaagagcagaacactggagtggaggcgacttcactgccttcgcgcctccggtaggaaccacggcttccttctgcctgcagtgtctgcagcctgggagtcccccagatccgtgtgatggccaaggccgcatgccccggagaatctggatttcgaatactgtcctgatagctgcctaaacacccacatagtagtcctcccatgggtcctggttggggttcaaacacattcctaccctacccagccttccctgaaatccgcgtcatgctgagggcagccctgacagtggccgcgggtccttgttgaggacgcaagaggaggaggagcctcagccaggtgaaagatcgtccatatattccaagaaggaagctt

SEQ ID NO: 197871 - DNA, 1000 bp, Homo Sapiens
tgttttcaacctttacaaatttgttgtgatttgaattgtatccacccccactaaaaatatgttaaactcctaacaccagatacctatgaatgtgagcttatttggaaataatatctttgcaagatgtaattaatttaagatgagatcacgctagattagggtgaggcttaatacagtgacatcatagaaacatataggcacaaagagaaaacatcatgtgtagaattaggcaaagttggagcaatgtatctataagccaaggactaccaaggagggctaaaagctaccagaagccatcaagagccaaagaaatatcctaccctaaagcctttgaacagagcaccgcaccttggttttttttggtttttaatttctagcctctagaattataagaaaacaaattttcctgttttaaatcttaaaaggttttggcaaattttatatcagccttaggaaactatctcaagatctataattgctacactcaaaataaagcaacttttattatacattacccaaagggaaaaaagtatatacattttttacattcagcgttaagtcagctggtttatttcctcaattacatgaggatggtacaatgaaaacaaacaaacagaaaatgaaaggtttagcactgtttcgccctgaattaaaatttaacctccctcaaatatatgtagcatgtaacgaagggaaaaaagaaagaatgtaattcaaaaatatatagaaatttaaaaattggttaagtaatgtaatataacacaaatacagaagataaattacactttacatttccttagaaaagctatctgatgatctctatttctgttctttgattataagacagaattatatgaattggaaatttagtctcctattgtcttctgtagaaatattttacagagatattcaaagtggtttttatttgacattattcacatttactaacctagttatataaccaattggccacatggctacctgtgactgactgaagctt

SEQ ID NO: 197872 - DNA, 1000 bp, Homo Sapiens
atatttacctataataggaataatgcaatacattttcattgctgctgttgcttcctttctaaagctatctttaactacttagtctttgctccccctgcaacttgacacctttaccataggttaaccctttctcacctatgtctggatcatgtgtctgcagtatatattgccctgatcacattgtattataattctttttcttttttttcttcttttctttttttttttttttttttgtgagacagagtctcactctgtcccaaggctggagttcagtggcctgaccttggcttactgcaacctccacccaccaggttcaagcaatcctcccgccttcctcccaagtagctgggactacaggcatgcaccaccactcctggctaatttttgtatttttagtagagatgaggtttcaccatgttggccaggctggtctcgaactcctgacctcaagtggtccaccaccctcagcctctcaaagtgctgggattacaggtgtaagccaccatgcccagctatatgtcttgacacatctgtctcttacactacattgttaggtccttgaggacaatcaccatgttgttgtttgtttttaatttttgtctctgtgtctgataaatatcgacgatccctgtgtttctctcaaattaaaaatatcccatggtaccctgggacaccttgacacttagtttgggaaccacaataattgattgagggagagagtgtttgactagggtagcccgggaagactttttggagtaggtagcatttgagttgagacctgaatggtaagaaaaagccaacagccacacagtgagggtagagtattgtggtctgaaagagactcgtgtgaaggtctagaacaggaagggggaagtaaacgggtgtgaggtgcagccagagaggcagtaggcagggccatgccgttggagccccgccatccctgagaaggcaccctgtgtttccttctaactgccgggggaagcctttggggaagctt

SEQ ID NO: 197873 - DNA, 1000 bp, Homo Sapiens
ggcgctggggattagggtcttcacacgcgaaatcctgctccctgttcccactttcattccagctggtcagctacgtccacccattcccttcgacatcccacagcaaacacgcagaccagaatatcccccatcggtttgtctaatatccaccactagagacactataaattcctacacatttcccacaaaatagacctgtgattagcaacatcacacctcacaggctcttaatgaatggactttccccgtgtggcaaagcgtgacatgatttaaacaaagtccctgatcgctagaaacagatgtttgtaatgtgcgcagcaggcagagcctgaagtaaaaggctgtgagtgagtctataaggtggaccagctggatccaaactgttaggtgaccctggaagcatattctgtgacaaaaaaagggttaatggtaacttatcgcctgttgcatctagaggctttgtaaactcgtgtggtgttggtataacacttttcacattcaacaaggttagctcattctcctgtggagaagacttgaatgaaatgaagaaggcttccaacaaagaggaatatgatttaaagatggagcggtttatgcccatctttaacgcaacaatgtagagtttaaaaagcaggtgcctaaagaggtgtattaaatgataatttcatttagaaaatgggtctaatacacagaaaaaatgttaaaagggaagctgcaggaggtgccaatcaaaatgcctgcagtagccattggtgggtggggggactgtgagtgacttaggtttttacaccaagaatgtttgtaacttcccaattttctattttgaatgtgtactgataaaacatatattttttttcaaagtgaaagtttacaatcctggtcacaattaattttctatcattcttgccagaaatggataaaggagaaaatgtcttagtttttacctaataatagaaccataggctatacttcaaagtaaaatccaaaataacctgaattc

SEQ ID NO: 197874 - DNA, 1000 bp, Homo Sapiens
aggctacatgatatttgatcttaaggtactttttgttcatttggccaggtgtggaatgagaaaatattcctcaaaagaatgatgaaaataagatggtaatcagtgatgaattgcaaggtaaagaataaaagtagtatagaaattcggagaaaggtgagcccaggaaagttgaaatacatggtgaaggctcagtggaagtcattgtcagctgggtttggaatgagaagacctggaataaaatctgttgctgccatctacagcctttgtgaccttgaataagtttatttaaattgccttcatttcctaatttgtaaagtaagaatgataatagcttccttgcagtgttgtgaagagcatgccagtccttgtcctgtttgcgatgacagatgcatttcttgcattttctatgtcccagtggtatgggggtggtgagcagctgtgtttcccaggtgctagggactgaattgtgccccctccaaattcacatgttgaaaccctactctccagtgtgattgtttctagagatggggtcttcaggagataattaaggttaaatcaggtcataagcgtagggccgtagccttataagatgaggaagagaaagagatgtctctctctctctctctctctccaacatgtgaggacacagcaagaaggtggccatctacaagccaggaagaaacctacctttgccagaaacctaccatactgacctcttgattttgaacttcccagtctccagaactgtgagaaataaatgcctattttttaagccacccagtctgtgatattttgttattgcagcatgaactggctgagacaccaggttcctgtgtcatgccaatggcaagtacagagaagactggaaagtgagaagaagagaaaagccagagtatttattttcttctctttccctgcagcatcttcaggaacagttgtgcctcttttatgacctcagttccctcgtctctaggctgactgtggttctggccctgaattc

SEQ ID NO: 197875 - DNA, 1000 bp, Homo Sapiens
cctctgtcccacagcaaatcctgaagggaccctgtcttggctctagatcctttctgccatagcccaggagtaattttacccatgcatgcacctgtttgagccaccaggacaggatttctggcctctgctccacaacagctcctaaagaggccctgtctcagtttcagctcctcattgctatggccagcaaactacacaacctgtgcagagaactgctgggagacacactcatctgagtcatcaagacagtcttgccagcctccatcccacaacacatcccaaggtggccttgtctcagtttcagcccctcccagctgtggtctggtagcaatcctatgtagtgagagtcctactgggaggcatgcccatctgagtcctgtggtaagcttgtcaacctttgtccctcagttgatcctcaaacagcccttgatcctgccctctctcatctgtaaactgagagcagtactgcttgcctggagacttggagggagggacactcagtagtggttctgcaggctgatgccctgacttgaatcacgttgtgactcttggaactgccctaaaaattggctccaactctccttaacaacagtctgaaagcaagcctgctcacacaggaacccactgggagacacatctgtgtgtgacctgaagtcaagtctaaagatctcagtctcaggtgtgtacctgaaacaactctgtatcttagttccagcccatggcagttatggacttgagtaaaatggccagcccaggaacccatccaatgattcaacaggatcctcccaaagatccagaggaagccagttcctcagggcccctaataagcacctcattttcagagactcttgaagcagtcactcacccctttgccagcctcttatgagatttcaacctgggtcatgtcagccatggtggccttaggcttagggcgttttctagttctgcaactgtggtagcagccatgggattacagaccacaacagtctactcggaattc

SEQ ID NO: 197876 - DNA, 1000 bp, Homo Sapiens
gaaaccctgtacttctgttcgcggccgtgtagagctgccccttatgccacagcttcctcatccatacgtaggggtgatgttggcaaggcctccggggcgctcaggatcaaaggcggcggcagtgtcctgccaagtgttcacagctgatgagacgtggtccctgaacacagcggttcctgttctgatcactcgagtctccgtgatgccaccgttcccagaaggcagcccgtgcagcctccgggtccccccttcagccatggcagcccgtgcagcctccgggtcgtcccttcggccaagcttccctttccttgagagcagcacgctggcctggccatgcagaacaaaacacaactcagaaatccctcctcagccctcggcagtaaaacttctgaggattcgactttttagttaatttgctcactgtggcagctcactggaaaataaatcgaggatgccaagtcctcctcttagaaaaatagcccctgcagtggggtttgctgatgtgctcatttgtgtcattgcaggctttatcctgtggataaacgcagagtgaacgagtttggggagtcctacgaggagaaggccacgcgggcgccccacacggactgaaggccgcccgggctgccgccagccaagtgcaacttgaattgtcaatgagtatttttggaagcatttggaggaattcctagacattgcgttttctgtgttgccaaaatcccttcggacatttctcagacatctcccaagttcccatcacgtcagatttggagctggtagcgcttacgatgcccccacgtgtgaacatctgtcttggtcacagagctgggtgctgccggtcaccttgagctgtggtggctcccggcacacgagtgtccggggttcggccatgtcctcacgcgggcaggggtgggagccctcacaggcaagggggctgttggatttccatttcaggtggttttctaagtgctccttatgtgaatttcaaacacgtatggaattc

SEQ ID NO: 197877 - DNA, 1000 bp, Homo Sapiens
gaactactcaggattcttgcagctgtgagtgagagagacatagagacataactcagactggcataaactaaaactaaaagggaatttatcagctcctgttactaccacgtctgggttacttctggctttagacggaggtggatctagaatttgaactgtgttatcgccaccctcatccctccctctttagctctctccttctctctctctgtttttctccacttcacatctcacatgtctcttcttggcctcagttttcaaatagttggggactctccatatggctgctctagactcaattcccctggtttagcaactgcatagaaagaactgtgcctattagctctggtacagaaatcccaggaagaggcgggcctatttcagtttccatacatatcctgtggttgcaaagatagaataccctcattggctaggtggagaagggagctctagtcacatgcagtaggcttcccatagtaatgaagggttctgtttctagaataagtagagatggcacactgggcaaacagggacaacatactcactacaaatgtctatataaaattatttgtttacaattctaggttctgggtacagatagtctcagctaatccattttgtttattttcttatttatttatgtgctttatgaagactccattgagaaactgttattttaaaatatgcatcagggaaatcctcaaagatggctgactagcagtgcccagtgcttgtctcctccacaaagaaagaaaaaaacaaattagccaggtgtggtggtatgcacctgtaatcccagctacttgggaggctgaggcaggagaatctctggcaactggaaggcagaggttgcagtcaaccaagatcgtgccactgcactgcagcctgggagacagagagactccatctcaaaaaaaaaaaaaaaaaagagagaaagaccaaaacaacaaataaataactgcactttgagtagagtgtctaagggagaatcctggaattc

SEQ ID NO: 197878 - DNA, 1000 bp, Homo Sapiens
gctccagtcctggctgcgccctggagtctgagacccgcggaggggaggggatggggtcgccttttgctgtgctttgagccgcgggtgaaggcgtccgggttcctgctgacctcccggcgctaattgcaggggccgaagggcgcgctcgggcagaggcaggggtcacgaccttgcggctccctcctcccgaggtcccggcaacctgaaggagccgggtgtgtgcaagagggcgtgtgtgtgtgcgcgctcgcgcgattagggcctctctctagatctgcgctgttctgggacccactctttctttgtggggacagttcctgacgtgtaggcccttaaaaaaatttccatccaagaaggaaaacccagattctgacctttcccctaagccagcagacagacagccgccttcaggccgctacgagaggcttgcaacgcttcacgacagcgcgctttctgcctcgctggtttccaatgtgacctcacggcaaccagccaagaaagtggctgtcggggtgcagctgcgaggccgccagcggcgacctgggttcttctgtaggtagcccagtatagactcctatctaagggtagctcttgggtgtctgcgttctggggccaggagctgcaggtgttagaaggatatgtgtatgtttgcgtgtagctgtgcgtgctccatctgtagctgtctcttccaatttgggtttagaagttcgtgcgcaagacagttccggatgtagatgcatttggttgttttataatcaagatgcgtataatcaagaagtatatgttgcagatgtcggagttcaaagtacacgaaacaagaataatataaatacttggcatacaagggacacgtgcacaagccaggcactcggtgaagcaccccataaaagtgaccctcgttagccttcacagttaaccccataaacgatatatgatctttatctctgttttacaagagaggaaactgaggcatagaccattaaatcacttacccaagatc

SEQ ID NO: 197879 - DNA, 1000 bp, Homo Sapiens
actatttgtctccttcagtaaccatatttatttgggtatattcttgcatgtttttacggcaaaaacaaattcaacagatatatatatatactattatggaaccctttttattttcctttgaacttaactacgtagcattctctgataagtaatgtaagctccagacagcaaggatttttgactgcttcattcactgctatatttctggagactagaatactgtttggcataaagtaggtgccaacaaatattcactgaacgcaccagacgtggtggctcacggctgtaatcctagcactttgggaggccaagacgagcagatcacttgaggccaggagttcaagaccagcctgaccaacatggtgaaaccccgtctctattaaaaatacaaaaattagccaggtatgggggcgcatacctgtaattccagctactccagtgagtatctggacaggggaatcgcttaaacctaggaggcgaaggctgcaatgagccaagattgcaccactgcactccagcctgagcaacagagtgagactctgtctcaaaaaaaaaaaacttaaaaattaaaaaaaaaaaaaaaaacagaaggggaccaaatatacacatccctggctccatggaactcccagttgacctgacggaaaaaaaaaaaaagaagaagtagtatatatacatatatataggtagtatataaatatatatatagtagtatataaatatatagtagtatataaatatatatatagtagtatataaatatatagtagtatataaatatatatattagtagtatataaatatatatatatttttttttttttttcactgaatgaatgaaaggacacaaatcctccttgctgtcagatcaactaggagttgaatggaatggagccgggaatgtgtctatttggtccccttctgtggtcccagcaccaaacaaagtgcctggcacacagtaagcatttaataagtatttgttgatttagcaaaaaagctt

SEQ ID NO: 197880 - DNA, 1000 bp, Homo Sapiens
tttgcaaggctcatttaaaaaatttgtgaaatgttactaattaactgggttatctctggtaatgggacagagatagaggtgatggtaattaagggagactatgtagattaattttttataacaagaatgtttttatttacttttgtaattaaaatgaattatgtatgtgtatatggaggttttgtttgctgctgtatgctcattgcctagaacagtgtggtccatggtgggtgttaaatatttgttgactaaatcaaataatgaatctaagagccaaaggcaataatatatgtgcaggtatttggagagtcattaagtgatatgaaactatagcttattgttattttaataataataattttttttttctgtgacagagtctcgctctgtcacccaggctggagagcagtggtgcgatctcagctcactgcaagctccgcctcccgggttcacgccactctcccgcctcagcctcccgagtagctgggactacaggcgcccgccaccacgcccggctaattttttgtatttttagtagagacagggtttcactgtgttagccaggatggtctcgatctcctgacctcgtcatccacccgcctcggcctcccaaagtgctgggattacagacgtgagccaccgtgcccagccaactatagcttattattactgtctctggaaactagacgcctggtgagtgtcagagcaggggttagaatccaggtttccttactcctgttagcagatggtaacagaagcagctgtagagctggcagggcctgaagctaaagtaacctgaggcatttcctttaagaataccaacttttatcttttttgcataatctggttcaaattgtcaaccctatttttccaactcatagacatttttgcagtagatataatatgacttatcactcactggtaatatacctctaaaactgttctgtgctgcttacagagcattgtgtcaaccactatagttctggagtgcttaaagctt

SEQ ID NO: 197881 - DNA, 1000 bp, Homo Sapiens
ggccagccctgccggccccgggcagtgaggggcttagcacccgggccagcagctgcggagggtgaactgggtcccccagcagtgccagcccaccagcgctgcactcaatttctcgcggggccttagctgccttcccgtggggcagggctcgggacctgcagcctgccatgcctgagcctcccaccccctccgtgggctcctgtgtggcccgagcctcctcaacaagcaccgccccctgctccagggcgcccagtcccatcgaccacccaagggctgaggagtgcaggcccacggagcgggactggcaggcagctccacctgcagccccagtgcgggatccactgggtgaagccagctgagctcctgagtctggtggggccttggagaacctttatgtctagctcagggattgtaaatacaccagttggcactctgtctctagctcaaggtttgtaaacacaccaatcagcaccttgtgtctagctcagggtttgtgagtgcaccaatcgacactctgtatctagctactctggtggggccttggagaacatttatgtctggctcagggtttgtgaatgcatcaatcgacactctgtatctagctactctggtggggacgtggagaacctttatgtctagctcagggattgtaaatacaccaatcggcactctgtctctagctcaaggtttgtaaacacaccaatcagcaccctgtgtctagctcagggtttgtgaatgcaccaatcaacactctctatctagctactctggtggggccttggagaacctttgtgtccacactctgtatctagtggggacgtggagaacctttgtgtctagctcagggattgtaaatgcaccaatcagcaccctgtcaaaacagaccacttggctctaccagtcagcaggatgtgggtggggccagataagagaataaaagcaggctgcccgagtcagcagtggcaacccactcgggtccccttccacactgtggaagctt

SEQ ID NO: 197882 - DNA, 1000 bp, Homo Sapiens
gtgagctgagattgtgccattgcactccagcctgggtgacagagtgagactccatctcaaaaaaaaataaaaaataaagaagccacctcaactgggggaaggactgcagttgcaattgcagtgaatgccacaaaatgtgaagtgaaagaagacagaagtgagcatacactacaacagacaaaataaataaaatgagcacacactacagcagacaaaatcaaatatagtgtttaagaacgcacagataggagcagaactataaagtcaggaaatggagaccaaaaaaggatcctggttacctctgtcaggaggaagaggttgtgacgactgggagagggcacatgaagggactcatctgggctaagaatattctatttcctgatctgagtggtgatttcatgcatattccactgataacaattcatcaaactgtattttttaaaacatacttttctgcatgtaaattaggccttacagtttaaaaaggtaaaaagtaaataattatggtcatgaagtcctgctctggcattccacccttgggacatactctgaagaacgctatgaaaaatgccgtaaggttcatgcgtttattagcgtttctctagagaacattacccaccacagtagcccccacctatccacaaaggagatgttccaagactccggtggatgcctgaaaccagatagaaccaaaccctataaagcctacgcttttttcctacacatacatacctatggtgaagttcagtttatgaattaggtacagtaaaaaataaacaacaataataaaatagaacaattatgacaacatagtgtaatacaagttaccacacactgagactataacttctgcagtttgaggtgtgacagcagaattagcatgtatttatttttccttcttcacaatttcatgaatagatttgttcttactgtagatcttagcaacctcagcctgtatttttcgttatgttgagaactttcacctgttcacttaaagctt

SEQ ID NO: 197883 - DNA, 1000 bp, Homo Sapiens
aatataagaacatttgtcttagtccaagaactattttcagtttagttttgtcaccagaatcatgagaggtatcttttgaccaaattcagtttcatttattgtttaactgctaagcaatgaagactattaacaaacagattatcattaactctaaataataaaactaaatacagactaaacgcttacttaactaaattataaaagttccttctaacaattccatcccttgaagtttatccagaaacctacctacctttttgctctttggaaagctgttcagcttggtcccaaatttcggtggcatagaggaagttggatgtgacctgaacatagctggctgccatctggtggatcttctgtggaatggtcactgaagaaccacttgcagaagcactactggccccagatgaataatttcctgaattgcctggtgacagctttggagaaacaggggaaggcatccccacagctttgctacacaacagaaataggaagcttgttcatatggacatggtaagcattataaaatcaagtactactagctctttctacatgaaagcatttaaaatgtaaagattctcttaaactagatgggttttcagagaactacaatttcttctaaataagtactataatcttgtaattcataatcttgttatcttagaatctgtagcctttgttttaatgaataacaacaaaacaagagatggacaataactgaagaagtcatgtaccttgttacagttcaaagacttaaaagccagatcccctcactctctgctcaacactttccatctgttcgggcatataattacatattttttatactgttttgtagaaagtttggtggaattcacatttaacctaaaaaactgtggtagaagatgggaacatcttttattgaactccacaatttctgacactttcctagtttaaccaaattactcagaggtaacaaagaggtacagctctctcaagcaactgtaatcaccccaagctt

SEQ ID NO: 197884 - DNA, 1000 bp, Homo Sapiens
tcttgacaccaagaatattttgcagactcaagatcccaggagacagcctactgggcagggaagcagggctcctctcacagagcactcatgctccctggagggatgatcacacgactctctcaagtagctgtggccagggcacatccacagtgcagaacaggagagggtgagtatgtgggatcctgggctacctcagattctcccagatgactgttggagaagttgaggcagcactggagatccatcccacagtcttcaactagcagggaagtgtgagcaaagacactaatttttaagagacctcatgtgatcctacaaatggattaggcagagggactttgggttacaagtgcaccacagaaaaaactctggaagaaaataaatcattttcagttgctatctttggatggtggagttccaggtcattttcattttctttataatttctgtattatgtggatgttttacactaaatatgtaattaccttgatagtcataaaaagcaatacagccatttttaatttattaaaaatctctgaagcaaaatcagtttttaaaagttttatagtatatggccccgttattgtgaaatacaaattcattataaatgtatagaaaagaagcatgagaggaaatataccaaaatattaatggaatgaggatttgaatggtagaattatgagtacttttttttccattttgctattttgggttctattttcctcattttgctccagcgaacatttgtcacttttatagtcagaaagattataaagttataacaaatgttttttaaatcttgtaaagagagatgaaggctggctggatatgtaactatatacaagtctatctgactctctgtgatcttacttcttctacttgctgaatgagaagtttgaactagatacattttaaagccctttttactataaaatttactatcacttgaaattttcagtgattacatgtgaaaaactctggttctcttatgtttaagctt

SEQ ID NO: 197885 - DNA, 1000 bp, Homo Sapiens
attttgatactttaggtgacttctcattaaataccctttggtgtatgatagatttactgatatcagacaggtagaaggttttcgttttttgtttttttttgagacgcagttttgctctgtcacccaggctggagtgcagtggcgcaatctcagctcactgcaacctctgcctcccaggttcaagcgattctcctgcttcagcctcctgagtagctgggactacaggtgtgtgccaccacacacctgtattttttttttttttttagtagagacggggtttcagcatgttggccaggctggtctcaaactcctgacctcaagcaatccacctgccttgacctcccaaagtgctaggattacaagtatgagccactgtgctcaaccaatacagtgttttaatacaagaatggtaatcctcaaaactactttatatgaagaaattgaattaagcttctgcatctgtgacagatattactaatgatggtgtgatcatttaaaataatttccagatgaaaattactatgttgaagttctgagttttcagattctcaattaactttttgctacaaggaaataggttttaagctttgacataactgtgcaagatcctgctcttacaaagagctactgtgcaagtcatctttctgttaaacagtgtacaaccaggtggttgtcaagaaagaaaggctgcaaagaaaattcttacaaaattgtgtttcataagaaactcagagagaggatcctgaacatttctctactcaaggaatttggagatctggtcttagaattgcttttgccttcttcccagaactttgaaattctttcctgacttccttttgcctactctcttctcaagatcttgggttgttttctgatccttgggattcctttgtctttttagtcaaagctcttgcctagtaactctctttttacctggaagcagtaccgtgtagtggctaggagctggtcttcccaatgtaggagacctgcttctgaattc

SEQ ID NO: 197886 - DNA, 1000 bp, Homo Sapiens
acaccgaataccaaaaaaaaaggtgcagtacatgagataaacattcctcttcactaaatttttattcacaaatattcagtgaaaaccataaaattatgtctttaagctgtactggattttgttgaatcattgctagaaacattaaattttgaatgaatacaatcagaataaaacattttttttggccaggtgcggtggctcacgccagtaatcccagcactttgggaggacaaggcaggcggatcacccgaggtcaggagttcgagaccagcctggccaacatggtgaaaccccatctctactaaaaatacaaaaattagctgagcatgatggtgggcgcctgtaatcccagctactcaggaggctgaggcaggagaatcacttgaacccaggaggcggaggttgcagtgagccgagattgcaccattgcactccagcctgagtgacagagcaagactgtctcaaaaaaacaaaaaacaaaaaaaaaatttctatctaaaatattttttctaagctctttgattaataagtgttttggtataagaatatataagatggaaaattaaattttaaaatattttgggacttataacaataaatagtacagtataatagttaacagcttgggctttggtaacaggaaatgtggatttgagttccagcccagacagtcactacctagtgtgactttgggcaaactactcacctccccaagtcagctttcttacttatatcatagagttgatgtaaagataatgttaaataacttaagttgagggcctaccacagtacttgtgttttccaatgcttttatcatatactttcctacttgagtctcctaataatcaaaaccatgagaaaggcaaggcaatgattttaactcccatttcacatgtgaggagaaggggatttggaggagacttgtccaaagttgtgcagctaatcaaggtttttcttactttttatcacaagtcattattacctccgcacctttgaattc

SEQ ID NO: 197887 - DNA, 1000 bp, Homo Sapiens
ggcagtcgccgggcacgacacaggcagagtccaacgcctgccaaccactcatggaagtgagcaaccacatgtggcttctcctcactctgtgccaggaactgtgggcaacagggacagggccactgtctccacgagtgttgggaaaagaatcggcaatccccagtagggacaaggactcggggagaggtcaatctgtcaccactactgcacagagtgggcagcggcccactgcagcaatcccaaccggacagggacctgtaaatccctgaggcagcccaggctggtcttgaactcctgggctcaagtgactgcctcctcaggggttgacaggaactgaggattttttggccaaccatctaagtcctggcagggttagattggacagactgaagttttcatgttcccaggtcctggacatagtttccaaagaccccttgtctcaagggtacgctgtctgcacccaacattggcaaagggactacaactcccagaatgccataggagcagccagttcctcaattatttgtcccagggcatgagaaattaagcttctttttttttttttctttttctttttttttttgagacagtgtctcactctgtggcccaggctggagtgccgtgatgcaatctcagctcactgcaattcccgcctcccaggttcaagcaattctcctgtctcagcctcccaagtagctgggatttgggattacaggtgcccaccaccacacccagctaatttttttgtatgtttagtaaagacgaggtttggccatcttgaactcctggcctcacgtgatcttcccccatcggcctcccaaagtgctgggattacaggcatgagccaccgtgcccagcctggaaactaagcttcttgagcctcttaaaacctagaagggggtcaaaaccaggtcaggctggggattcatgagcatccagggcagcatctgagagctgagtccagcaatatcacactagagaactacaactcctagaattc

SEQ ID NO: 197888 - DNA, 1000 bp, Homo Sapiens
agaattcaagaccagcctggacaacatagggagaccctgtctctacaaaaaaaatcaaaaaattgggccgggcatagtggctcatgcctgtaatcccagcactttgggaggccagggcaggtggatcacctgagttcaggagttcgagactagcctgaccaacatggtgaaaccccatctctactaaaaatgcaaaaattagccgggcgtggtggcgcatgcctgtaatcccagctacttgggaggctgaggcaggacgatcgcctgaacctaggaggcagagggtgcaatgagctgagatggcgcccttatactccagcctgggcaacaagtgcaaaactccgtctcggaaaaaaaataaaaaataaaaaaattagccaggcgtggtagtggtacctgtagtcccagctatttgggaggctgaggtaagaggattgctgaagtctgggagaggtggaggttacagtgagctgtgatggcaccactgcactccggactgggcaacagagcaagaccttatcttaaaaaaaaaaaaaaaaagccaggtgcagtggcttacacctgtaatcctagcattttaggaggctaaggctggaggattgcttgaggccaagagttcaagaccaacctggccaacatagcaagaccctgtcccatgtaaaaaataaataaataaataaataaataaataaattacagaaatagccagcctgggcaacagagtagactctgtctctacaaaaattaaacagttttcaaagaaagaatggcctggtggctcatgcctgtaatcccagcactttgggaggccgaagcgcgcagatcagttgaggtcaggagtttgagaccaggctggccaacgtggtgaaacctcatctttactaaaaatacaaaaattagctgggcatggtggtgcacgtgtgtagtcccagctactcaggaggctgaggcaggagaatcacttgaacccaggagacagaggctgcagtgagtcgagatc

SEQ ID NO: 197889 - DNA, 1000 bp, Homo Sapiens
tgttttctaatttttctacaatgctactttttaattagggaaaaaagagtttgtttgtttgtttgtttgttttaaaaaaaaggctgttgctaagactgattttgctggtggcctaacatgagatttctaaggagactccttagaaagagatgatgtttactcaagtgaatctattcaagggtgtctgcttgtaatgaaatcaactgtcttttttgccattgcttaaattacactatgtatgttgataatattataactaataagtaaataaaagcagacttcactgcaaaaaaaagacattttcatctggaaaagatagtatgatatggtatacaaataaaagtgatgtgcaacactgatcaaattacataatttcttcgaccctcagtttccttatgtgaggagtaggagccatagtaaggatgaaatgagttactgcatatatggacactgttaacgccccatccaggtcccgattaccagctggtattcccatccccgactactgagagtgctggctataaggactgcagctgtcccttccctggaagatttttctcagctgaatgtgagccttctcatggggaggttatagcccatttcctactgacttaggagtagaaagggtagtctcctttgcatgaaggagggcccaactcaattgatgttgtagagtgcccatgggatcaggctgaagttagtccatagctgattggcttcctttcctgattccctcgcccctcttctttggtgagcactcaccaataaatcatttgcacagaaatctttatctcaggctctgctttgaaggaccttaggcgacatgtgaaggtgaaaactggcccatggaaggcaatgctataggggttcggtatcatcaacaatattgaaattattgtcttggtttagtaaccatttagtaacttcactccagacccagtcaatatttcagctaatagcatccaacatgtagaaatatttctataatgaacaaatgatc

SEQ ID NO: 197890 - DNA, 1000 bp, Homo Sapiens
attcaggcagacttaagttttctctggctctcaaactttgtgcttcccaccctaccttattgccttgctattttactctaaaaccttcatgaaaatttttatgtatttacttcctttaatttaactttacagattattttattcatttacttagcagtggacccaataggatcaacgttgtatgttccaactctatatagggcagtaaacctctctgttattctacatcagaaaccttgtcatttctcaacaactacatttgggttatataaagaatgaagagcaagggttgaaggggtgaaatagattaagaaggctccattacctttcctaacaagaaatcaaagctcagaagaaagtagacgattagcaagggaaagggttttgagtaaaaaacaaaaaacaaacaaacaaaaaaccctgtatttgtgttgtagttttgtcccatactagttttgtaactttagctgtctttcaaactctgtgaattattttctcattggtaaaaatggacataaaatagaacctcagagcatctcagggattgaaatcatgtatgtgagagtacttagaaaaagagtaacgtgccaggaataacataataaatcattatagtgtagattactgtaagtgataagttttggatatgttttcaagtcataatatgtactaactttctgaaacctttttcatagatgtgccccagtttattcatcagtaatccaaaggaaaaaaatggtattgacactatgttagtgaacaaaataaacatagaatggttattttatctgttttcttgtttttatttttgtttttttcgctgcctttacaggagagccttgaacttaggaattcttcgagatcctggatcagaaatcgaagacagacaataccaaatagatctgcagtccatcaatattggtactgcacagtggcatcaactaaaaccagagaaggaaagtgtctcaggaggggtggtaacagagactgaaaggaattc

SEQ ID NO: 197891 - DNA, 1000 bp, Homo Sapiens
acttccagaaggtttcagatatattttggaatttatttggactttagagagggtatataatttatgtactgtgtaataagaaaaaactttaacttgatctgggttagtatccctgatcaaatacatgtaaaatatatgaatgtttaagttgtatcaaaaaaaagaccataagtcagtgtagatcagattttgctatccactgtatgatttatgaaagaactcttagttttcagatctttttggatacagaaattgcagataagggattgtggacctgtagttgatgtttaagaaaaataagactaagttccatttttcagtaaaagttgtcaaatgatttgagtcagaacagcagatatgtttgaatgtgcgaagttcaattaagtagctttttattttatagtaaaatatctggaaatatatttgtatgcaatttctttaccaggtggatggatgatggcctagtaaatgatatcacgccaaaattgataggagacagacctaatacatacatatacacaaaagcattggcagaatatgttgtacaacaagaaggagcaaaactaaatgtggcaattgtaaggccatcgattgttggtgccagttggaaagaaccttttccagtaagttgttagaaacctttataaataactggagttgagaattttaagttgtaactctgtataaaaagagctggcagttctttaagaacaggtattatttactaaaggtgaattaccatggcaaagctgttttgtgttcatagagttaattttattggtactttcatttctataatgtgacgctgggtatatagaaatgtagatcaacatttaaaaaatcctaagtgaaaattaaaagctgtgacattttcttaagtcagaggagatttggtttgtttcttagtagcaaaaagaggcagaccttccaggaggtagaccccttcctctgtagatcacaaagtaaaaaaggtacagggtgttagggtatttgtgaattc

SEQ ID NO: 197892 - DNA, 1000 bp, Homo Sapiens
ttgtatttttagtagagacaacgtttcaccatgttggccaggctggcctcaaactcctgacctcaggtgatccacctgcttcggcctcccaaagtgctgggattacaggcatgagccaccgtgcctggccaggaagagtgtgtgttttaaggaagactaagtgctgtggcagatcatctttctggctctttgtgctgctgtggtttatgtctccatttccatggacacatgatcctaccttattttcacttgcctggactactgtataagctgtaccccaggatacacacacagacacacacacacacatgcacacacccacacactatatatatactttcttgaagctggaagcagagcattgataaggtctcttctctgttcaccaagtttgtagagcctttctatggtttattgattaaagcccactttctttatcatggaagctattaaggttccaccccacttttccaactgtgtttccaatatttccctcgacctaccctgtatttttatccaatccacttgttcctgttcccatcctgtgcctttatttacatagttctctcatggaattcctggggttctttaccttgccacatatttggatctgcaaagtctaccttgtcaggcctagtgagaactgtgacggctgcttcttaacccactagtgagaccgttggcacccttcagaggtcttgagctactgctttttcagttctggggactttcctagcctctaccttctactttccacttttactcatctagttttccaagtctccatgttgttgtcaagttcctggagatctgttgctggggtttgtgttgttttctcctcaataccccacctcttgcctcattagcatttgcactgagaggactcaggaccagtggctcctgactcctgcgtcctggacaggctcctggatactttatcataatccaagctcagcatcccttttgacttccaattttcaaggatgattggtctgaattc

SEQ ID NO: 197893 - DNA, 1000 bp, Homo Sapiens
agtatatgagagacagtgtcttattactcagcttatttcctaatcctcgtatgaagataagatcataaaaaatacaaaacaatgtcagggaaagggaatatcaaagcccagcttgttaaagagtcatgaccccagagaagcctagacccctcttctccatgaactctaaaaaatcacctttttttgtgtttttgttgtaatactggccttcattattgcaaatcttcctggttgtactttacaatgattttaattttgtttcctgattagatctttgcaattattcgtaatgttcatctgagtgaaataaaatgatatacactgaagcagtgttaacagattgtaagatttgatatgttttgaaaagaaatggtaatgataaatgacagtgacctaatttgtggaacaatcttcttgtacaaaataatctagtggttggtaattatgtgattaactcaccaagaaaaaaaaaagtcaatcaagtcagaatcatcaagttatagaatcaaaaaaaatgtctggaatgttcccagttaattcattacctacagtgaacttttcatgtgaatgccaaaacataaatactattttaaaaacatttaggggaaagatgtacatttattaaccctaaaactcaaaagacaatcaagaaggaaaaacagcgaaaatctcgaaaagcagtaatgatagctgcttgttgttagtacttatgaggcactttcaccaacataaaacctcatctcaaaataaatgagtgaaggagtaaggcacaatataaccaagtccattttcaacatgaggaacttgaggctcagtgggattcaatgccgtgttcatgatcatgtagcttttcagaggcacggcttcaaaatttgttacctacttcatgctcttttaactatgtgctgttaagaaaataaaagtgaaatatctatgggatatcaattctgaaaaaatattagcacatttgattaggaactgcatcattgagaattccgcg

SEQ ID NO: 197894 - DNA, 1000 bp, Homo Sapiens
tcaggggtctgcttgggctttcagtgagctggagcttcttgagggaaggcccctggcccactgtcccttctaccccaaagctaagcttctgcacccacgacagcacgcagtggcttggttctgacccagcaccagttgccaccggcgcctccgtccctgtcgccctggtaggagccatctgttggtggcggaccacacaagcctcccagcatcaggcctcccccttcgtcccacctcctggggataagcagcccatggtcctcccacctcttctccctccctacacacacacagggtcccagagctgagtggtccaccctggtcctcaccctggctggcctgtgactggacctgatgcccctcactcctgagtaagctgaccttcgattcttcccacaaggccccagctgtgactcatgaaaatgaaaatgagagtacgactttggagcaaagccatttctcaagtctgaggggtaagtgcatgcacagagcgctgcacacagctctgccaacagctgtcaccacctggtgccgccgtgaagctggccacggagcagctgcacccagcagctatactctccagagtcgccactatggacacaacctcgtggggctctctgaagccctctgcctcggtgggtctctgctgtaggaagggagggttccgagccaacacaggcctagtctggagacagagtcctgggggaaggaagcagctgcgggcagggggcacagctggctcctcacacacaggagaactcatgttggaacttgtttaaccccagccatcaccaattgatgagttaaccacctttaacatgagattcaataaaacatgccatttttaacctgaaatgggtttttacagagtcactgttacgcatctcattattaaacccatcctgacctctggagagagcagccgtgctagcacatattgtgagcttactgcccataaaatatttaaaagtagagagaggggatggaaagaagtgaattc

SEQ ID NO: 197895 - DNA, 1000 bp, Homo Sapiens
tattagggtataggacaggacgaggaataattaaagtccctccaaagattaggtcagaaagggaccataaaagcttttccattaggaagctggctttggcgtttcattgtcattggagaaggcccatctgtacctatggcacgtgttatgctaggaaaatacctcctgaatccttttgtagaaagcaataagatagcatttctcagaaagaaaatgctttgctaagcaaatactttgaaaaaaacaataaatgattttttaaatggcattacaatgttctttgaataggacatgggaacaggaatcaaacttggatatattgtattttcatcttattttatttcatttttattagtgacagggttttgctctgtcacccaggctgaagtatagtagcatggtaatagctcactgcagccttgaccttccaggctcatgatcctaacgcctcatcctcctgagtagctgggaccacaggcatgtgccaccatgcctggctaatgccttttaagtttggtatggacaaggtctcactgtattgcccagactgctttctaactcttgggcacaagtgatccctccaccttggcttcccaaagtgctaggatgagaggtgttattgcatatttttacaagtatcagacatgtatgttctgaaaggcactagaatcattgaaaataagtcactgtgaagtgcaatgactcttgaagataggggatagcagaagtgtgaaactttgtaggctaatcattatggccaatgcctaattaggatttatagtaccaaggcctgaccaaagtcataaattatcagacaaaattattggacagaaagtgaatgactgcatatcttgttaaaatcactagggaacttaggcagaaggtaatgactgaaatgagaacttgcctgaaacatcaggctaaaaatagttcttgatatatgaagatgatctgaaaaatgagccaaaatttgtgttgcaaaacagcaattcaagaattc

SEQ ID NO: 197896 - DNA, 1000 bp, Homo Sapiens
ccctctactgcttcttttttcttttcttttcttttgttttttttttgagattgattctcgctctattgcccaggctggagtgcagtggcgcgatcttggctcactgcaacctccgcctcccgggttcaagtgattctcatgccccagcctcctgagtaggattacaggcacctgccttcatgcctagctaatttttgtatttttagtagagacggggtttcaccatgttggccaggctggtctcaaactcctgacctcaagtgatccacccacctcggcctcccaaagtgctgggattccaggcttgagccaccacacctggcctctctactgcttcttaataactttgctctgtggatccagtgttcccaaatctgctgagctctgtatcctgcttgctatattaaactttttaatgaagtatatcatacaacatgaatgtatatatgtatccaagtcaacaaatttttacaactgaacccatgtaaccaacactcagatcaagaaacagtctattatcaatatcccagaatctccctctagtcttcctatgggtaaccactctcctgacttctaatagcattgatttatttttgggttttattgttttctataaataggctcatctagtatgtattcttggtttctggctcttttattcagaataatggagagatttatccatgttgtgtgtagctgcagatgttcattctcattgctgtatagtaatcattatgtaaaataccaaaatttgccttctcttcttctgattatgagcatttgaatttttagtttatagccattatgaatagtgttgttatgcacattctcatacttgtcttttagtatgcatgtgtatgcatttctgatgggtataaaactaagaaaggaattgctgggtcatgggttatacctatatttagctttagtatataatacccaacgttattccaaagtggtagtattgatttacacttcctctgtcagtgtttgagaattc

SEQ ID NO: 197897 - DNA, 1000 bp, Homo Sapiens
tgaaaccggaaggcggaggttgcagtgagccgagatcgtgccactgtactccagcctgggcaaaagaatgaaactccgtctcaaaaaaaaaaaaaaaagaaaagaaagtagagtaattttcggccgggcacggtggctcacgcctgtaatcccaacactttgggaggctgaggtgggcggatcacctgaggtcaggaattcaagaccagcatgatggcgggtgcctgtaatcacagctacttgggaggctgaggcagaagaatcgcttgaacctgggaggtggaggttgcagtgagccaagattgcaccactgcactccagcctgggctacagagcgagacttgtctcaaaaaaaggaaaaaaagtagagtaattttttttttttctctgtcacccaggctggagtgcagtggcacaatctcggctcactgcaagctccacctcctgggttcacgctattctcctgcctcagcctcccgagtagctgggactacaggcgcctgccaccaggcccggctaatttttttgtgtgtgtgtatttttagtagagacggggttttcaccgtgttagccaggatggtctccatctcctgacctcgtgatccacccgcctcagcctcccaaagtgctaggattacaggtgtgagccactgtgcctggccaagtagagtaattttcatatgagtataacaacaaccaaaaaataaaattaaaaaacccttccatgtaaggattaaacagcacatcagatgtaaccaaagagagaattagtgaactggaagacagactggaagagattacctgaatgtatcaccaagacacaaagagatgaaagatacaggagacaggttaaaagacacagagtacagaatgaaaaggtctagaacactcctaatcagagttggcaaaggagagagcacagaggacagaggaaaaataatatctggatggtttctgagaactttccaatatgataaaatacgataaaagatgtgaattc

SEQ ID NO: 197898 - DNA, 1000 bp, Homo Sapiens
gcaaactcagggtgacggcagagctacagggcacaaggatggggagaacccatttatttagatgagactgtgggcccctgccttatttaggggcccaatcctggaaatgcttataaatcagtatcaaaaatgccttcattcatccagaacaatctggaggggaaagtaccctgccagctgggtagtaagaaggatgcagaagaaattgttaaaagtaacagacattgtttcaatcattcattcaaccagcagttatcaagtgcctgatttgagcgggtgggtgttttaggcattggggatagggcgatgaataagacaatagtgtgggaggaaggcaagaaactaatacacacagcatgtatgtatacacatacacatgcatgtacaatacacctatgtgcatttctacatacaaaatacatgtctgctatacacagatatgtgtacatataacacatatgtagcatgaagtagggatgagtgatatgaagaaaagcaaagccaggttaggggagagagagggtcagggaggccccccgagcaggcccctccaagggagaagggccagcaagtttggaaaaggcctttctattctccaagggctctccttgggccttaccagatcctctccctcaggcctcacatcagtcctattgtcaagtcagggaaactcaggactagaaagattagtcaggatttgaatctttatctctgagctgccctgactttttttttttttccttctgaaacagagtctccctctattgcccaggatggagtgcagtggcacaatctcggctcaccgcaacctctgcctccttggttcaagtgattctcctgcctcagcctcccgagtagctgggactacaggcgcgtgccaccacgtctggctagttttttttttttgcatttttagtagaaacggggtttcaccatattggccaggctggtgtggaactcctaacctcgtgattcgcccacctcggcctcccaaagttct

SEQ ID NO: 197899 - DNA, 1000 bp, Homo Sapiens
cacctcccaggttcaagtgattctcctgcctcagcctactgagtaggtgggattacaggggtgcgccgccatgcccggctaattttgtatttttagtagagatggggtttcaccatgttggccaggctggtctcgaactcctgacctcatgtgatccactcaccttggcctcccaaattgctgggattacaggcgtgagccaccacaacttattttattttattttattttattttatttttgagacagagtcttgccctgtcgcccaggctggagtgcagtggcatgatcttggctcactgtaacctttgcctcccagattcaagcgattgttgtgctgcagcctcccaagtagctgggactacggaggtacaccaccgcgcctggctaatttttgtaagtttggtagagacagggattcaccatgttggccaagctggtctagaactcctgagctcaagtgatccacccagattcccaaagtgctgggatcacaggcgtgagccactgtgcctggcctggaagttatattattcctacattattctgagaattctagctgcccaggctttttaccagtatggaaagtgatctccagagacactttcctgtttctctcatttctaatctttgctcacatccatatcaattgatattcctgggaagcagaagtatcttagatagatggagatacggcttctctcagaaaagtctaaaaagataggtgttgagatgaaatgaatattataagtagttatcactgcgtatatcttctggaaacagtggctttctcatgggtgaaaacctactttggtaatcatatacacggttagagctgacatagttgcagctatcgtatgtagggcatcatgacaggtaggtattggagggggtgttattgtccctattttacatggagaatttactaaaaaaatgttgtctaaaatcacagagtaggtagagtgaggatttgaattcacatggtctgattctggaattc

SEQ ID NO: 197900 - DNA, 1000 bp, Homo Sapiens
cgcaccactgcactctccaatatggatgacagagtgagtccctgtctcaataaaaaataaaaaataaaaaaaaggcacatcgaggggtggggctaggcgaattctaagactgtcatcaattactttcaaacaaggcaacttggctgagtgcagtggctcacgtctgtaatcccagcactttgggaggctgaggcaggcagataacatgaggtcaggagttcgagaccagcctggacaacatggtaaaaccccatctctactaaaaatacaaaaattagctgagcaaggtggtagatgcctgtaatcctagctatttgggaggctgaggtgagagaatggcttgagcccgggaggcggagattgcagtgaggtgagatcatgccactgcactccagcctgggcgatagagtgagactctgtctcaaaaaaaaaaaaaaagaaaacttaatcattccatttttatgtgatgcctcactaagcacagtgcctgagactacagactgggacagacaatgaaaataagcaaagggtggaaaacacattttctgatgcctccaacctacccgcctaaggaagtcttactagacacagtggttctcaatcttatcagtcccaactcccctaaatatataaatatacttttatagtatacaaatatgataaatacactatgtttattatcatccttgatatataaattttatttttaatttttaatttttttgagacagattttcactgttgttgcccaggcaggagtatagtggcgccatctcggctcactgcaacctccacctcccaggttcaatcgattctcctgcctcaacctcctgagtagctgggattacaggtgtccaccaccatgcccaactaatttttgtatttttaacctcctgagtagctgggattacagatgtccaccatcatgcccagctaatttttgtatttttagtagagaagggatttcaccatgttggccaggctggtctcgaactcctga

SEQ ID NO: 197901 - DNA, 1000 bp, Homo Sapiens
tgacacaaacattcaacctatagcacaggagcataaccaagggccccacagagggcagtttcaaagcctccaatctcttgagtctctgcagccaacagtcctcagctcaaagggcaggggtccatggaccaccaacatccttcccatccctgactccctccacagaccttcaggcaaaccagaaaccaaaggccgcctactggctgtgtgatctcgggcaaggtccctaactttgggacacctctgttttcctctcaataaaacataaaattaattttcctgcctgaaaattaataataggaagtgtttgttgaacccttacttttatggcaggccatttacatgggttatgtctcttaagtataagaaggaccctatgaagaaagtactgcgattttaattttacaaatggggaaactgaagcacagggagttaagtaacttacctaaggttgcacaggaaacggtgaagcagtctttgaacgcaggtgttttgaaagcagcacttgggcccttacctgctttgctgggatttctcagatggctgaggtgagggtgaatgagatgagacaggcaggcgaggtgaccagcataggtttggttcagagtaggggagagattccctgcttctcagggtttgcatgtgttagttgggtactgtgagggttaattttaggtgtcaacttggcaggggacatgttccaagacgttccaagtgaaggcctgaactgcatatagtactagactccagagatggtaggtttttccgatctgatactcaagatggctacctatagcactagactccagagacggtaggtttttccgatctgatacccaagatggctactaggtgaccagaggggcaggtagctgtactcagtgaatacactagacaaagggtgattcacagggattcactgcccaggcccgatggagtgggatggtgtgagatttcaccgtgccactcgaactttgcactatttaaaacttaagaattc

SEQ ID NO: 197902 - DNA, 1000 bp, Homo Sapiens
gaaaaaaacaatgagaaagctccagcaatggaccctagagaaaggtaaatctatgaaatgacagaaaaaatggagaataatctacttttaaaagttcagtaaacttcaagaatatacagataaaaaattaaatgaaattcagaaaatacacaaacaacaccagaaatttgacaaataaatagagacaatacacaaagaaacaaatagaaattctagagatgaagattacaatgactgaactgaaaaatgtaataggaagcttcaacagctggctcaatcaagctgaagaatcagtgaactcagaggcagaacattttaaactacttaatcagggaagcaaaaagaaacaagaatgaaaaagatgaagaaagcccatgggaattacgtgacaccatcaagagacctaacctatgcataataggcattcaagaaacagaagaaagagaaaacgggccaggaagtttttttttattacttatttatttagaggcagagttttgctcttgttgcccagtttggagtgcagtggcacgatctcggctcactgcaacctccgcctcccgggttcaggtgattctactgcctcggcctccctagtggctgggattacaggcacccaccaccatgcccagctaatttttgtatttttagtacagaaggggtttcaccatgttggccaggctggtctcaagctcctgacctcaggtgatccacccaccttggcctcccaaagtgctgggattacaggtgtgagccactgtgcctggcaggaagagtgtttttaaaaaataatgaatgaaaactttcctaatctgaggaaagaaggtaacatccaggtacagggagtacaaaagtcccaattaaattcaactcaaagaggagttcaccaagatatataataatcaaactgtcaaaaattaaagacagagttctgagagcagaaagagataagaaatatatcatatacaatgaagtcttaatatgactgtagatggaattc

SEQ ID NO: 197903 - DNA, 1000 bp, Homo Sapiens
aaaaaaaaaaaaaaaagaggttattagtggcctcagttattagtggtggttgaggatggagagtagaggcaaggaagactaaagagtctaaaagactaaggactaagtggaatctagtcttacagcttggctctgaaaggagagaggagacggcagtagcttgtggcataatagcaaggtttagtctttgttttattttaaatccaagacaaacccaatcatgtttttcagggccaggggaatgtgactgttatgctattttgccataactttattcctttcttcaaatatgtatatagccacattggagacaacaaatttgaatctctttcacaaatatcaggcaaaatcttgatcatgccccctgtgacttaggatggacgctggcaccatgagtggaatcacttggatgtagcacagtctatatttcaggtgtgtagtagtcatgggagctcatgcaataataaatatcctcccaatctcagtggcttcacacaatgtttctttctcatgtcatggtctgtttagctgttagcaggtgttcttccatgcagtgactcaagctgcttcccatctagtggctccaccattcctagggcctcagtatccactggacttctgcatccagacatatggaaagaatggagactctcctgaaaggtcatggaggccaggacttcattgggcaaactcactcatgtgtctcagtgaacagcaagggagcctgggaaatgtagtggaacagcatacccaagaagtggaagggaaatacaactattgctgaaccacaataagcttcttcctttgttttgtttttttctaaactcattcagtccactatgtaataaacttttagattctagcagaatttgcatttagcctggcctatactctcccctatttcattcactcaacaaatgtttattaggtgtcttctatgtgtcaagcactgtgaatggcttgacatgtcacattcttacaaggaggcaaataggaattc

SEQ ID NO: 197904 - DNA, 1000 bp, Homo Sapiens
ctctgctccaggaatttcttctgcggtgcatttcctaacactggtttacatgtctacaaattggttcaaattaattgctaaatggaagtcttgcttccattccccaggacacttcaaatatgtcagattggaggttaattttcttcttgggcaactaatgcttgtacactgtgtctacttttatgccttctatcattcctattaagacattatagtttcaatgtatgctattttctcagataaagagaataaacagaggcgttcttagaaagctacctactttcttctaaaagatatcagttacaagtaattagatttgtttattggggagtggatggataaatttaaatgggctggatatgttatggggtctctaaggtgataagttacaaaaatgaattctgaggatgggattagactagggaatagaaagacttttctttccctttctgtttttatttttgcattttaacctttgcatatatattatcttattctgtatatctaagaagaaagaggcatttatatctgggttgttactaattcttattttttctctttccaaattaaaataggattgtgtaagatacacatatttcagctctactcctttgtccctgggttcattaaagcagaaattctggagtcaatgaaggagaccttcttctcacttaggaatgcagtaggaggtggaagtggatggtcattttttcgcttttttctgagtcagtacatcaattgttattatggtcagtactggctaatgttcatcaaccagatgaaccagggaacctgacttagaaattgtagatgtgataatatttcccatttcttttgtttacttgtgctgtattactggtaactggaatattaatataattttagtgctggatgaaaccgttacagaattttatctgtattttccttcaaatttaatagctaaataaagggaataggaagttagaaaagcaatatcctgaaaaaatttttaaaggaattc

SEQ ID NO: 197905 - DNA, 1000 bp, Homo Sapiens
aaagaacttgaggggattcacagtttccaacttcaaaacttattacaaacctacagtaatcaaaacagtgtggtactggcataaggacagatatatagaccaatggaatagaactgagagttcagaaataaacttgtacatctgtggccaattgacttttgacaagggtgccaagtctgttcaatgtggaaagaacagtcccttcaacaaatcgtgctgggttaactggagttccacatgtaaaagaatgaagctgggcctctacctcataccatacactaaaattttaaaaatggattaaagacctaaatataaaagctaaaactataaaactcttaaaagaaaacatgagtaattcttcatgaccttggacttggcaatgagttcttagatatgacaccaaaagtacaggcaacaaaagaaaaaataggcaaactcaacttcatcaaaataaacttatctgttgcgggaagtcagggaccccaaatggagggaccggctgaagccgtggcagaagaacataaattgtgaagatttaatggacatttatcagttcccaaaatacttttataatttcttatgcctgtctttactgcaatctctgaacataaattgtgaagatttcgtggacatttatcacttccccaatcaatactcttataatttcttacacctgtctttaatctttcaatcccatcatctttgtaagctgaggatgtatgttgcctcaggaccctgtgatgattgtgttaactgtacaaattgtttgtaaaacatgtgtgtttgaacaatatgaaatctgattgtaaaacatgggtgtttgaacaatatgaaatcagggcaccctgaaaaagaacagaatagcagcgattttcaggcaacaaggaaagataaccataaggtctgactgcctggggggtcaggcagaatagagccatattttacttcttgcagggagcctatagacagatgtgtgagtaggagaaatattgctgaattc

SEQ ID NO: 197906 - DNA, 1000 bp, Homo Sapiens
gagtctaacatcaggtacaaataagaatttctctttatcgatgcagacaccaatagacacaagctgcctgggaggaaaggtgctgggaaaagccagtgtggaaggagctattttcttggcttcctttcaatagctgttaaaccatagattttacaccctccttccccactggatccttccctgcaacagggctattgttaaaagacacagagttgagtacaaacagtctgcaaattgtgttaagaatttggttctggaatatgtcacataacacaaattatatatgctggaaatgtatttacgaacctaacataattatgcctatgaaatgtatgttctgtacaggataacgaataactggtctaccaagaatttctataggaagctagagtattgtttttcatcccttaacacagtgaacgtaattataaaagaagtaacaggatttatcatctattaaagaagtgaagtacacgtttcatacctcacctcttctgttgctggtggctggcagcaggcatggcattgttgcaagggtcctctttagtaacaggagtcacaaccgctcccaagtcttcctctgtacagaggcaacagaagactctataaagggaagttatcgagatgagtacatagaaacagcaccctttaacatcaggcagagtgagagaaagtagctgggacctatttaactccatgacctttctgctagatcacacattgtttgatgaaaattatacaggtatgaatatatacacacacacacacacacacacacatatatacacacacacatatatatatatatcttttttttttttttgagagagtctcactctgtctctcaggctggagtgtggtggcacaatctcagctcactgcagcctccacctcccgggttcaagcaattctcatgtctcagcctcccgagtagctgggattacaggcacataccaccacgcctggctaatttttgtatttttagtagagacgggaattc

SEQ ID NO: 197907 - DNA, 1000 bp, Homo Sapiens
ccggagacagcaagccagagaagggtcttggcactgcctcaccttccacttatccaatgggggagtgctaccccattggaatggttaagattggacaccagcaccttcagaatgtcctgaatctacaggaggtgaaaaggaaaaaacaagggcagggggagaaagacagaagtgtcttagagagaagcaagaaagtcagggtaggaggaggatgtgggttcaggaaaatgaaatgctgaagaagagcagaggagattaaaaccttggcctgtcccactctttgaaatggccacctgctgccttgccagggcaggaacaaatagatggaaaagtctcctgaacaatgcagtcacagagtggagtcacctgaccaatgcagctcttcatatgctcactgaacccctctcctcaggcccaggacgtgggtgatgaatctggtagagctccagacctccacctccattaaaaaaaccagacttctgagtaagggttcactggaactaagggggctccagctaaaaaacaagtttgaaaggcactgatcttatccagtatcatcttacagaggaggaaactgaggcccaggggaagaagcaatttttctgtggtcacccagcaagctggtggcaacttagatcttctcttactcctagtacccgggactctcctcaccacaccaggccccttcagtgactcctataggggacagcctgatggcaagtggctgtactcattggcccagcttccccttgagaatggggatcaggaaaatcaaagagcaatgaccatttcctgggtatccttggtctttacagcagaccatgtactagggattaacataaaaacagcaataaggaatctcatttaaactttacaaatggaagtcaaacaatactacccctattgtacagatgtgaaaagacaggcccaaagagctcaagcaatttgctgtaaatcagatccctagaagatggagaagcaggattcaaacccagaattc

SEQ ID NO: 197908 - DNA, 1000 bp, Homo Sapiens
tgcttaaaagacaaaatatccaaaatcaaactatttaacctttaattatctgaatattttttgaagatctaaaaaaatgaaatgacagctgaccattccacctcagtactaataaatggataatggggagatttttatatgtggaagcagctttttgtagtgaattttccagtggcatttactgaaaacaagatgtaacatgaatttgagcgaatagcatatgaaatttatacatgtctgaatctgtaaagtttaatccactttattcccattttcactgcatgttgatgaccactaaatgttgccccaagggtctatgctcaaaacattacccaaattggaatggaaagaatcccaagaaaccctctttgtccataatcattatgattaatccatttcaagggagagattagcgccttagtttcttctattaaaatcctattcatgagccattggcttcttttccccatgtgtgggcttagatctctctcattctgacaaaattttgagcttggcaaatcaaaactataatctgggccccccaaaattgcacacttgtaaaagacagtaatgtttataatctttgttttcttgtttgcaatttacagactgtacagaacatttaaggacagcaaatatttgtatatgttgatggaagcttgtctaggtggagagctctggaccattctcagggataggtaggagatttaagaaatttctatgatatctctaaaaacagttgcccatgttggtctataagaagagttaatatgataaagtataataatcatatttataatttacacatgcttatatttcaatatttaaagtaagcacagggcataacccactatacacatatgatttactgtacatataacaaaactcactttgtaactaacaatacaggcttagtcgatcataaaaatggtacatagcaaaatatatacatggccttagttttgcatgaatgttagaattagctctgtagctggaattc

SEQ ID NO: 197909 - DNA, 1000 bp, Homo Sapiens
cagttcttttctattttacagctctgatggaggctgtagcgtggtgtttatcatgcaagtcagacttgatgagttcaaatcccacctccatcgctcactagctctatgtccctgaacaagttatttaacttccttcagtcttggtttcctcgagcataaatgagtgttagtggtatctaccccataagtttgtgaagattagtaacgtaaatatatttaatcctcggcacagtgactagcacatacaaaatcactcaataaaagctaggtattaattttgtctattttcttttctgctctgtcgccaatatttacagcagtatccatcacagagaacacaatcaataaatatttgcttatgaaagttatgaatttattactctctcctgcaattttttttttctgtaaagatttatccacccattgtccactatggcagacatgtacaaaaggcatggaagggttacctgttgtctaaattgacctgctttatgtgaagaggtgctaggcatttctctggtgtgaaaaaataagaatcaaacaacacttgaagaaaggtggcaggcctcagtgctgaatacagcctgtaccagctttgcgagcaatatgttctctttcagagaactcagattccattaactcaaggtcaccttctcccattgtgcctcttggatgtcttccctccccagacacggcagggatgactggagcaaaaaaaaagaggagaaacagagctgtaactgcacccaatgagtcaacaggaccatggtgtgagcctagacacctcaacatcattattttactcacttacaggacacccaacattattatttaactcacaggaaagtgaagaagaacaggaaagggaaaggccatgagtgtatgaacatgaagtatacccaggcccagagtccataattctaattgtttatacagagataattagctgtcttcatttgttctatttaaaggattacacgccattgcaaagaattccgcg

SEQ ID NO: 197910 - DNA, 1000 bp, Homo Sapiens
aatgagtaatcttgagatctggttgtttacaagtgtgtagcactgcccctgcctccctttccccccttcctcctggctccagccaagtgaagctcctttctcctccttttgccttctgccgtgattgaaagctccctgaggcatccccagaagctgagcagaagctgctaagcttcctgtacagcctgcagaaccatgagccaaataaacctcttttatttataaattacccagtcttaaggtatctctttatagcagtatgaaaacagattaatacactgtgctatgtgcactaaacatatagaaccacatttaatgcttatagaaacctataaagtcagggatcttataatccccattttcagatgaggaaacagacttggagaatgttaaactactgacctaaaggcatccagctaccaaatgaaagttcaagattagattttggttctgaaatcagagtttgtcatcttatctactacacaataataaccattgattcttttaagggagtccctgagtaaacatctttagggacttgccttaataaatttagaatacaaatgcctaacagtgctataagaatgtcagcttgcacaccagatcaatctagtgactaggaatggactttgttcttaatgcaggactttctgcccaccatttatttaagtccttcatgaatgagatttttttaaatcttgtaagtttcctggattgcaaaaaggatagttgtaaatcagtggttgtttttgttaagtatgtcctttcctatcccctccacctcccccaacagccaatcttcctgtgcccacacttaggactgccactactaagcctaattttgcctttgaagattctgagatttgatcctatctccagtcatccttaaagatgaaacaagcctataatttgtgctcataactacttcatgtgaattttttctagatagcaaataatttttcataagtagatggttctatcaaattctagaaaacaaaca

SEQ ID NO: 197911 - DNA, 1000 bp, Homo Sapiens
gccctcttaatataaatcttttattgtttggcattaaacccaaccaaagcatgatgaatgggatttggttgtcttcattcaccacacccttttgtttccagcatgcaaagggattcagcttcattttgctagatttgaagtgcacagatttaatgttctcttacttgatttttggctttattggaagaagaaagggggtgtttttcttcttcattgttctggttactgtttctccctaacaaattatcccaagccgtaatagcttaaaacaactgttctattttgcctatgatttgtgggtcaggaatttggagagggttttgagagggctcagctgggcggtccttgcttgaggagttttatgcagtcagatgtcagcctggttgtagtccttgagggcttggttggacgtcagagatggcctactcttgtgtctgacagaggatgctggctctgaaagcttatgctgggagctcagctggagttgcaaccagagtgcctacgtgtgacctttctagtgtggtacttttgcttccttttggtttctggctccttccagagtgagtgtcctaagatgaccaggtggaagcttcctggctttttctgactaagccttgaaaccttcagagcagctcttctattataatctgttggtccaagcagtcatgagcccacctgcattctaattcttcttgatcctgggtcagtgccaaagaattgtaggccatatttgaaaactgcaaccctcatggtgatgtagagacagtggcttattttgaggcccataggacatatactttcttcctttcctcccttcctttctgtggggagacttcataaacaaccacattttagtgtcttcttgaggtgctttaatggttaaccagccagcaaagcaaggactttggttagtattcccagtgaccttaaataaaccagcaacgataaaggcaagatggacagtttttagcaatgctgtgggccttgccatagggaattc

SEQ ID NO: 197912 - DNA, 1000 bp, Homo Sapiens
tcaaatagccacgtgatcttgattctgaggttataagagttggatggcagttgctatcagttacatgtgcaatttcttcgtctttaaattagttacaggtgcaaaactgcttttaccaaaacaaaaaacaaaaaacaaaaaaaagacaatctggtaaaactttacagaaacttaattccattcaaacgagtctaattcattatcacctatattttcacaaatattcagcactagtagatggatatgaagcatttactggacaacctctagtgcctattttaagcgtccaaagggagctaacaggacagaagctctgtatcacttttgttgatctaagataatgaagaaatttactttgctcagatttcctctgtctcaaggaatatgtacctaacgaaagagctatgaagattttagaaattttcccaggattatcctaacagagttataagtgagaatgctgacaaaaatagtaatatatgacaacctctgtgagaggtatacaattgtttttcatttaataaccaatttttatactgcaattggcagattaaatggatagctgctgtcagggagctttcaagacaagttgtattccttagagatagtaggggaaaataaaattaaaaatgaaaccctgtattttcttgtaaacagctaatgtaaatgatacttctttggggtgtttcctataattcataattttggaggaaagtatgagacaaatgacagttttcagaaaaacagtgattttcagagtttagaaatctacaaaatctgccaagtactggtgatgaaaaaagaggttaatcagagttaagtcagaaaaaaatgataaagctagagccatactcagaaaaaaattaatatggacaagagtaatattcaagaaaaaggtcttgaattctaattacacgtgaaattatggaattcaggggcaggctgcgatggctcacgcctgtaatcccagcactttgggaggtcgaggcgggagaattcc

SEQ ID NO: 197913 - DNA, 1000 bp, Homo Sapiens
cggctgcctgggtatgccatgctccagttaatgctgtgtgcttctttggccagctgacccctttctaccctgtggattacactgcagaccagcacggcacctgtggggatgggctcctgcagcctggggaggagtgtgacgacggtaacagcgatgtgggtgacgactgcatccgtgagtgaggcccagaccaggaggacctgaggcctgaacagcaggggggtgggactcagggccagccctggacaccagctgtggtgctttgggacctttctagagccagagaagggtatacccaggccaccttgtgccacccaccccagtccctgctgccccagtttcagcccaaatattaactcttccaccacccaagcacctcaccaggggcggatgtcaaggatcctgcccccagttaggccttctttatctcaaaatgtagccaccaggtcctcccagtcctacatcttagcaaaacccatgttacaggtgcagaagataaaggtgatgggctctcactttgcatggagtagtgaaaggcaaaagggagaggccaagaatctgaatgagggctcatttaccaggtagagctctagtagcaaagccctccgtaggggaaactgggccagccagagctgctgtcagcctcgtgggctgctgccttaactggtaggcagcaggctctggagggcttgcttttgtttgtttttgtttttgtttttaatcaagtaacaaaaccaggaggtgtgatggaaagcaggagctttagagtcaacagaggttgaatgcaggccctgagaaacaccaaccaccctcaggctcaaggcagaggccacatggtgggtggggtaatggggggcaatttacagctctgagcctcactttccttgcctgtaaaatgggtatgatgtgctggctgctcaagtccctagagatcctgtgagctaacatgtgcagagattatctggatatagtaagggttcaaccaccattcactgaattc

SEQ ID NO: 197914 - DNA, 1000 bp, Homo Sapiens
tgggaggctgaggcagaagaatcgcttgaacctgggaggtggaggtttcagtgcgccaagatcttgccactgcactccagcctgggcaacagagcaagactctgtctcaataaataaataaataaaaataaaataaaatcgctcgttgatgtaacccatgttgcatacccactgggcgcatttcaacctaccaccctttggagaaacatcatcctagcacaattgcttgtcacgaggtactaaagcacacgagggatcaaaatttaagaactggaggtgtcagaacaaaatgccaacagtccccgacccagtggaggggccctggaatggattcccctgagacatctcattaatggccagctcagttaagagacttctcagcaagtttcagcaagcaatgctgcaagcagcctctctaatcccatccagccccagggtggctgggaggatgacaggcaggaatgtgctttgcagtcctcactaccaccgattccccaacccctcctcacccagtaggccagtggttccgaaccagttgcagttttgaccccaaggggacatttggcaatgtctagagacattttcggttgtcacaactagggagggagatgcaattggtatcagggggatagagaccagcaatgctgccaaacatcctacaataggacagctcccatgagaaaggattatccagccctacaggtcaactgtgccaaggtggagcaagcctggtttaggcacgtaaagagagaatcgatggggaagatgccacaaaaccagccaggcccctcagcagcaggcctgcaccctgggtctccttgcaagaacttggccttctgaagctgtttccattcactcccggagggggttctctcttttccagacctggctgcaaattgggacttttgtttctccagctcctcccacttcctgctcagccatgcagtcgcaacagaaaacctatgtggaggatgccaacaccaagatggcgaccaagctt

SEQ ID NO: 197915 - DNA, 1000 bp, Homo Sapiens
agtggctcaatcttggctcactgcaagctccgcctcccgggttcacgccattttcctgcctcggcctcctgagtagctgggactacaggtacccgccgccatgcctggctaattttttgtatttttagtagagacagggtttcaccgtgttagccaggatggtctcgatctcctaagctcatgatccgcccacctcagcctcccaaagttctgggattacaggcatgagccaccgtgcctggccgggtgcaattcttttttaaaaaaaattctttatttttaatttatttgaacattcttaactgtatacaatttgcaacattcccaataatcattaaatagggccatattttactttttcttgttttatttttctgagacaaagtctcactctgttgcacaggctggagggcagtggcttactcttggctcattgcaacctgttcttctttggttcaagcaattcttgtgcctcagcctcccaagtagctgggattacaggcgtgcaccaccacacctggctaatttttgtatttttagtagaaacggggtttcgccatgttgcccagtctagtttaaaactcctgggctcaagtgatcctcctgccttgacttcccaaagtgctggaattacaggcatgagccactgcacccagcccagtccttttttttattgtcaacaatattccattcacaggtacaattcttgtttgtgttattttctcttttttgttgttgttgagatggggtcttgctttgttggccaggctagtatggaactcctgacctcacacagtcttcccatcttggcctctcaaagtgctgggattacaggcgtgagccaccgtgcccagcctgtgttattttctaaattaacacttttttggctgggcgcggtggctcacgcctgtaatcccagcactttgagaggccaagatgggaagactgtgtgaggtcaggagttccatactagcctggccaacaaagcaagaccccatct

SEQ ID NO: 197916 - DNA, 1000 bp, Homo Sapiens
taaacacctttgtcatgtagctgccttgaaccactccaaatctgaatgcccctggtgctctgcacctatcccagggcttttaccaactgtcttccttggattctgagcctgctaggtggtgaggttcctgaaggcaagatcgaagtctgagtcatccctgtctcccctacagagggaagcagaatgcctggtgcacagctggctcaatatatgttgagtgactgacagtaaaaaacattccatttgcaagttccatctctttttttctctccattcaatacccagaaaacgcttgattatatctcatccttaagccagcaactttgggttcagcgtctaagacagcttcatggtaacatgagtaggtctattaccgctagctcaagtaaaaaggattaagaggatacagaggtattccctggaatcccagggcaggaagtgaagcttgatctcatgaagagctgggcctaggcctgagaaggcatctgtgaccctggtggcttctcattccatgtcctgctctccctcacattccttctctgagtacaggctctatcatgggcctctcttggcaggctggcttcatttgttcccttatgagcacacatataaccccaagctacaatcccaatcctgcatccacaggagaatcagtgactggtttccagtcttaaaagagagagaatcgggccgggtgttgtggctcacacctgtaatccctgcactttgggaggccgaggcaggaggatcacttgaggtcaggagtttgagaccagcctggccaacatggtgaaaccccatctctactaaaaatacaaaaattagccgggtgtggtggtgcgtgcctgtaatcccagctacttgggaggctgaggcaggagaatcacttgaactgtggaggcggagactgcagtgagcagaagtcgcaccactacactccagcctgggtgacagagagagactgtctcaaaaaaaaaaaaaaaaaaaaaaaagagagaga

SEQ ID NO: 197917 - DNA, 1000 bp, Homo Sapiens
ttgaatgtgggaggcagaggttgcagtgagctgagatctccgcaccactgtactccagcctgggtgacagagtgagacccggtcccaaaaaaaaaaaaaaattcctcaaaacacccctagaaggcatggtatcgggttgttttcagctataactaaaagaaacattcaactcaaactggcttcaatataatacaagccacaccttgtaccaaatgaagttcttgtattttctcagaaacgttagccagctgcatgggtaacagagcagctcccttacagaattagagaaaggtggaacttgagcagctttgtgaatgtctcacctgccagtaaagagcagtcccattgaacaacacacatgtatctgatagctgatcttagccaggccctgtggtaagggctgggggcacaggatataaggctagctccaggatataagggttgtcccttagtttgaagaattgggacagtgagaaacagacagtagtaatgtgtctgaggagtcagaaaagatgttactgagaggcagtagtaattgaactcagatacttggtggtcaagatctttgtggacatttgatagtcatttcctgtgtctcctgttcagatgactctgaacttcccctgggcaattcagctcttccccaattcccatccataggtccaccatggatccagtattcagatcagaaattggggatgtaacctaattagaagcaacaactcacaacaagacttgttggggcttctgagaaagggaggctttcttttttcctcaacaagttgtgagagtgaggttctgacatctgcaactgctgcagccattttatcaccacaggggtgagtttggaggtgtggcctccactgtgtggtacctgagaataaagccattctcggtggaaggcacagataagagagagaaattctggatcccgggtgtcattctttcggattctgaatcaagccttacctgttctctacaagaacttcctttggaattc

SEQ ID NO: 197918 - DNA, 1000 bp, Homo Sapiens
cttgattgtgtcaggtgccttctgaaaggatcccaaataagtattcactgggaaagtccagggttacctggcgttcccccagacagcctattatcctaataaaggaacacagtgaccctgaatatgaaaagctctggatacacccagctgtgatgccacttctttgttcctgaaaaatatattggaaaacaaaatactcaactcatagtcgggtaatgcaaaacaaaggcaaagaacactgtttggtaggaaatttctccatgcttgctttaaaatggaaacatgagactgggaagcttctgagaagccatccagtctaaatcaccaccggatgtctggattttgttaaaggcatttcagacaagtggtcatacatttgacccaaagaagcaaggttaacataggggtttcaggttctgtgagaaggaagcaaggagatgtcaggacagggaagccagcatcacctttctgcttatctcagagtggtctgaatgcctcctgcatgtggtaggaggagctggcttctttagccagtgctgcaaggtgcagggtctgagcgtggctggagaagaacagagagtgagaggtgaaggggaggtcctgagtttaggcaggctctgggtggctgagccacacttctgatcctctccctcccctggggctcctgtctaatctccttcatgtgaacagaaaacagcacagagcccaggaggtgaatgaggccaagtcttgatcccatcactgtgccagaaggccccagcagtcctcaccacctccaaggactgaatagcaccctgggggacgatggagggaggcagagcctaggagcaggggccccagctgctttcagaccacgttttaccttaaaacatgtgatcaaaattaaaaacctgtatgcatcaaaggacactatcaagagagtgaaagacagcccacagaatgggagatttgcaaatcagatgtctataagagactaatatccagaatatataaagaattc

SEQ ID NO: 197919 - DNA, 1000 bp, Homo Sapiens
ggaattgttgtaaaaattaaatgaaataacacatgtgagatacttggaaaggtatcttgattatagtaatgactcaaaaaattaattattattatctgttgtagtaatattaatggcaaaagaagaagctgattcaaaacgtaaattagcaaataaatattttaaatagctaagacaaaaagtaacaaagaagggtctacttgccatatcactatggaccagttgtttaatttctataatccttgtttttgtgatctgtaagtgggaatgacgctattaccctatcacttttatcatcctggttctcaattactccatttcacactttcttttcttttccttctttctaatcttgtttaataccgtttcacatatagtaattactgacatctttttcattccttctggaaccctagatcattgctgtctgaatcatcaactagtatttcccccacagatctcaatttttctattttcctctcacaagattgccagggaaactttttctttccttttaaaaatatagatttaacatattcatctccaacccttcagaataaccaaaaatttttaggcacctccaccctatgctgtattcaccaaggtggcaataacttttactgatgcatcacacaggaccacaaagacagagcttgccttggagaagtaggatgagcattcagtagctggctttgactagtgcctgtggctctgcccttgatgccatttgcccttaatttctacaatgagattttagtacttttccctagcagtgttacctccagtacaattgctattgcttttaattctcattacaattctgctaacaagtcacatgacaaaaagaatacctcatctaccccatggtagtttagcctagccagcttcttcccaattcagctcatgccccagaacacacgcatgcttccaaccctcccaaagatcaggagcttcccagaatcccattagagctccttccagccttagattcccctgcttt

SEQ ID NO: 197920 - DNA, 1000 bp, Homo Sapiens
atcccccacattcccaccaccttgccagtcccctcagtagcattcccaccttacagcctgggaccggacccttccctgcacaccgagctgcacttctacagagctctcagccttgctgcgggatccagcagccaccccctcctgagtaccccaatccccctcctctgaactcctctgtcccactcacatgggagcagccacctcatcttacagaggaaggaactgagggcagaggggtggcccaacttggccggagtccggcggggtgggagcagcagggctaggccttgaatgcaggtctctggattcccgacagggtgcccctggcccagctgccagtcccccttgcctctgctgagcccatccttgcagggcccaccacctgcctctctgagtctgcatcacatctcctggagggtagagagcaccgctagcatctttctggggccctgggcgtcccgcgtggcaatgggcataccatggtgcccagcaaccctcagcagacagaattagcgactggctttagagaccgaccatgtctccgagaagactctgatgaactgagggggcgacttggcagactcaggttggggagctgaagagtcaccgtgctacagtggaaagaaccctggcctgggagtcagggttgagtccatgcctggctgggctatacatcagtgaacctggagatgtgtccccttctctgggcttcaggttccccatgagtccaacaaggggctggaggaactccctgacctctggtgcccctgcagctctagcaacccatggctttaggcactaccagtgtccccagcaagaccacggacagagccgaaagtggcagtgcattaccccttgctcctgacagatctgcgtcagcctctccagctgctcgtcttggatgaccttggccttctcgtactgctggataaccatctccatctccagcttcactggcaggacgtaggctggaagacagagacagccctgtaaagaattc

SEQ ID NO: 197921 - DNA, 1000 bp, Homo Sapiens
ggctgagaaaggaaaatcgcttgaactcagtaggtggaggttgccgtgaaccaagatcacaccattgcactccagcctgggtgacagagtgagactccgtctcaaaaaaaaaaacgaaaaaaaaagtaatgctgcaatgaacatgcacacatcacctggggaacacaccactcagttcctttgattacacacccagcagcagaattcctgggtcatgaggaaggcgcatcctgaagtgtaataattcctgccacagagtcttccacagcacattctcagacagtgtccattgtccttgccaaaacttgatgttgctgggttttttttcccctctctctggtgagggtgtagagtatctcaccactgtggtgtgattggcaggcactgcttcatatgcttattggacagctggactccctcttttgtgaaataccttttcaacttctcttgcctatgacactgagttgtcttccctattttgttgatttattgttcttttttttttttttttttgagacagagtttcactctgtagcccaggctggagtgcagtggcatgatctcggctcactgcaacctccacctcccaggttcaagcatttctcctgcctcagcctcctgagcagctgggattacaggagtgtgacaccatacctggctaatttttatagttttagtagagagagggtttcaccctgttggccaggctggtctcaaactcctgatctcaggtgatctgcccacctcggcctcccaaagtgctgggattataggcgtgagccaccacacctggcctgatttattgttctttacatgtcttaaacatactgctttgtctgttaaatttcactttaaaattggctttcttggggaggtaatatagtatgatttcatttagaaattaaatttcctcaggccttacaccaaaataagctccaaatggataagaaatacaaatgtaggaaatgcaataatacaaaacacttaaactggtgaattc

SEQ ID NO: 197922 - DNA, 1000 bp, Homo Sapiens
tccactgacaacattaggcagatcagcaagacagaaaattaacaaagatattaacaaagatattcaggacctgaacttagctctgaatcaagtggacctcagagatatctacagaattctccaaccaaaaacaacggaatatacattcttctcatagccatgcagtacttactcaaaaattgatcacatcatcggaagtaaaacactcttcagcaaatgcaaaagaaatgaaatcacaacaaacagtatctcagcccacagtacaatcaaattagaactcaagattaagaaattcactcaaaaccacacaactacatggaaattgaacaacctgctactgaatgactcctgggtaaataacaaaattaaggcagaaatcaggaagttctttgaaagtaatgagaaaaaggagacaacatatcagaatccctgggacacagctaaagtagtattaagagagagatttttatcactaaatgaccacataaaaatgccggaaatatctcaagttaaaattctaacatcagaacgaaaaggactagagaaccaagagcaaacaaactccaaagctagcagaagacaagaaataaccaagatcagagcaaaactgaaggagatagagatataaaaaaattcaaaagatcactgagtccaggagctgatttttttgaaaaaaaattagtaaaatagctagctagacttataaggaagaaaagagagaaaaatcaaataaacacaatcagaaatgctaaggggaatatcaccactgaccccacagaaatacaaacaaccatcagagaataccataaacaccatacagtgcatataaactagaaaatctagaagaaattgataaataactggacacatacaccttccaagactgaaccaggaagaaatgaaatccctgaaccaaccaataacaagctccaaaattgaggcagtaagaaatagcctaccaaccaaaaaagctgtgagagacagactcacagctgaattc

SEQ ID NO: 197923 - DNA, 1000 bp, Homo Sapiens
gttatgatttcagttattttgcttttgctgaggagtgttttacttccaattatgtgatcaattttagagtaagtgccatgtggcatcaaggagaatgtatgttctgttgttttggggtggagagttcgataggtatctattaggtccacttgatccagagctgaattcaagtcctggatatctttgttaattttctgtctcgatgatctgtctattgacagtgggatgttaaagtctcccaatattattgtggggagcctatgtctcttcctaggtctctaagaacttgttttatgaatctggctgctcctgtattgggtgcatatatatttaggatagttagcacttcttatttaattaaaccctttacccattatataaaggcactatataatgtccttctttgtcttttttgatctttgttgagttaaagtctgttttctttttatttttttatttatttttattttattttattttattattattacactttaagttttagggtacatgtgcacaatgtgcaggttaattacatatgtatacatgtgccatgctggtgtgctgcacccattaactcgctaaagtctgttttgtcagaaactgggattgcaacacctgcttttttctgctttccatttacttggtaaattttcctttattcctttattttgagcctgtgtgtgtctttgtatgtgagatgggtctctctaatatatcacaccaacgggtcttgactctttattcaccttgccattctgctgttttttaattggggcatttatcccatttacatttaaggttaatattgttatgtgtgaatttgatcctgtcctcctgatgctagctggctattctgcacacttacgtggttgtttcatagtgtcattgatttgtgtacatcagtgtgtttttgtagtggctggtaatggtttttcctttccatatttagtgcttccttcagaagctcttgcaaggctggcctggtggtgatgaattc

SEQ ID NO: 197924 - DNA, 1000 bp, Homo Sapiens
ttcattaacaaaataccctacttcaaatgaaattcacttttgctattttaatgatgttataacccaaggacttcatttattatttggggtgcttctctttctctacacacacatatacacatgtgtgaatatattatctatcatacttagcatgtgatttacaggtcaattctatagaaagaaatagggttggctgggcacagtggctcacgcctgtaatcccagcactttgggaggccaaggcgggtggatcacgaggtcaggagttcgagaccagcatgaccaacatggtgaaaccctgtttctactaaaaatacaaaaaaaaaaaaaaaaaaaattagccgggcgtagtggtgcccatctgtaatcccacctactcaggaggctgaggcaggcaaatcactcgaacccaggaggtgggggttgcagtgagccaagatcgcgccactgcactccagcctgagcgacagagcgagactccgtctcaaaaaaaaaaaaaaaaaaaaagaaatagggttaccaacaatttttaaaactcactctttcaactagcctccttcttaatctaataaaacttcaaaataagaagagatgtatatgaaatgaaccaaataattgctataaaccaccttttgatattttgtacttaaggaaaagtgattgattccttctttgcaataattacccttttaatatggtggatacctgtcccccacctcactaagaatggttcagaaacaagatactgtgaaataattgtcatcatttaccttttttctgtctatactggtttgtatatttgagactttaaaataccctaaagaaaagtgactattttaatttttctaaaaggtgcataagtatatacttactgttgttattagtgtcaagtgatgactgccatgttgagtctgcactttcacaatttgaaatactggttctactacactcatcagttttcaaaatgtcatcagcacagttgttagaagtgactgaattc

SEQ ID NO: 197925 - DNA, 1000 bp, Homo Sapiens
cctgacttcaagctgagacatcagcttctcctgcccttggactcagacttggatatggaatggaactgatgcctttttatctcctgcttctcagctgctcagactcagacatgaactgtaccattggttgtcctgggtttcgatgtctcagtctctgtaatttcatgagtcaattccttatttaaaaatctttatatatatctttatacatatatacagaaaaatgtgtgtgtgtatgcacttgtgtgtttatagatctatattgaatactatatatatacattatacactgtattagtacacagtgtatagtacatacactatagtgtgtatatgtatactctatatactatagtgtttatatatattatttagtacatataatgtatatagaaagacacacccataggtgtgtatagatacagaaagacacacccataggtgtgtataggtacagacagacacacccataggtgtgtatagatacagacagacacacccataggtgtgtaaagatacagacagacacacccatcggtgtgtatagatacagacagacacacccataggtgtgtatagatatagatagacacacccataggtgtgtgtatagatacagacacacccgtaggtgtgtatagatatgcatatatctctctctatatatataatagatacatgtgtgtatctatatctatacatagatacacacacacatatagtattagttcaatttctccagagactcctactacaaccatcagtatcaccaacaaccaaatctttctcaaatgtttatcaccagaaagcaattttagccttgcactggatattacaaccttgaatagaaaacattagaggcctggaaacatggtgtatttaatttcttttgtgctttacctatttcaacaatttctggactttttaagacagaaactattcaaccaacttttgaaaaatcaaaagaaggaaatgagttaaaggtttttacctggaattc

SEQ ID NO: 197926 - DNA, 1000 bp, Homo Sapiens
atgcagcaattaccaggatatgctgccctcttcagggtttttaagggaaaactcaccagttaaaattggctgaacatttaaaagtctaacagtgccaacgtggcaaggatatgagcaataggaaagctcacacacttctggttggggtgttatttaatacatctaggaaatttaaaaattgtgcataccctacattccagcaatcccactcttatgtaaatatctagaaatactcacccacatttgcacaaggagctatgttgtattgtctgtgacagcaagagattagaaacaattcaaaaatccattagctgaccaactggggtatttacctaccatggcatgttatacagcaataaaaagtaacaacgttactttaatcaacacagatacatcccaagaatgaaatatggagtcaagttgcagaaggatatatgatacaatttatataaagcttgaaaatgcacaaaatacatacagtaaagtgccatttatatggctgaaaacatacaaaaccaaaactgtgtgtgtcataaaaacatacattggaatgacaaacaaaatgagaaaacagggttgggaatcataaattcaaggtaacagttacctctgaggagagaatgagagaaaggagataaagaggacataggctattttgattatagatgttaggttttatttctttagtgtgataggtacaagagtcttcattatattattatttatacttactattgtagacctcaaatatttcattaaaaaaattgaggtactccgagtcagattcaactaaaatgtatgaagcacttgccatgtagataaagcagtgcttttccacattgggcagtgtaacagccaacactggagaagtctatgcttagaaatgtaattgaatcccattatctggcaacttctgcattgtaccctcagatcctttgttagccagtgtgatcccacctgacctgctgccggatactgtgagcttaccactatgactgat

SEQ ID NO: 197927 - DNA, 1000 bp, Homo Sapiens
taggaacaaggggtgggtcatcggagaagcccggggtgcagggtgtgggggcaactaaacgccatgagaggggcctggggagtctaaaaagggcatgggagggggcggggtaaccagagcgtaagaaggatgaggagagaaaacgagcgcagaatgtaagagcactgaggggacaagggcgaccaggtctgaggcgaaggagcaaccccggggacgccagaaggggcccttgtgggcgggggtgtggagaggcccggcccggcccccttccgccaggcagcatctcagcttcccccacactctctacgagcttctcgggagcgggagaagcacttggggtcgttacccaggcggtcgcacaggccccgccggctccgctcccgccgctatcgccagctgaaccaacacatgcaactcgtctccccggccagggccgcccgagcgcccgaccgccagcagcgctcccgcgagacaatgagcctttatcgcgagattccggccgccgctgggcggatgtcgcgagaagccggaagacgggggcggagaaaaattgcggagcgtgcgccttgccctccggtggggggcgtggccaagaggccgagaggcgggccgccggcaggcggtgctcgtcacccgttggagaggatgaatcctcgagatgggcgtgccgaagggaacgtgacttgcagacgcagagagcgcacctgagtcacaaatgactccctattaatgagtccgaggatcatcgcctcggtgtctgcggtgcatcctggagtcctgactaacctccagctactgcataaatcactcccgtgcggggagattgcagccggatagagcgtttggtcgcattttaacaccatgcactgaattaaaggaaggtgttctccctccctccctccctcccttccttctttccttcctctcttcttttctctctctcttcgccggatggagcgtttggttgcgttttaacaccatacactaaattaaaggaatt

SEQ ID NO: 197928 - DNA, 1000 bp, Homo Sapiens
caaatagtcacagttaagatggaaatatattttcaaaagagagagggcgatggagatcattttttttgttagccctcttgatgaacagatgtggcatgttgaataccaagtatttggtacgtgtatttgaagataatgaaagggcacacgaatccatctgtgttctagtctttgggccaatttaactttcagagccctcccttctgagctacatatatgcagatgctatagttctagtgtcagagagaagagctaatacaggaaagttttcataaacggtgttccttggagcacaatgccatgatttatcagaaggtgctaaatgggatccggagacatctcttgaaggctgcgctcttttcttcttgcatgtggatatcatgaacatggatatgggcttatctgccctgataagacataactcattaagcagaaaatgaactgttttgactctgtgtttgaccttgtattaatttttctttgcctatagggaccatatttatactgttgatatagacacatcacacacggaagaaatttattgtagcaaagtaagttgttttaaaactatatttgtaaaatgaaggacctttggatagttcttgaacagaatatgtattttaagtgcattaagatgatgtagctaatcataatttagagatgccaacatgcattttgtgaaatcctaattagggaataggttaggatttgatacatgttcagaaacagttatgtacttcatattttattcatcaaatatatgtgtacatatacattttgaagttttacataatttctacatttcttttataaaaatattgcctcatttatccaggaaaacatcagttttcataagtaaaattttgttccacaaatgtattctacaaaggtttcaatgttatatttccatgtcttgcagtattaagtttgatttgactgctgtggttcaggaacttgatcgttacccatttcagacagacataaagtataacctaagctt

SEQ ID NO: 197929 - DNA, 1000 bp, Homo Sapiens
tcctgggttggcttttttgttttgttttgttttgtttatttgtttttgaggcagagtctcgttctgtagcccaggctggagtgcggtggcacagtctccactcactgcaacctccacctcctgggtcccagttcaagcaattctcctgcctcagcctcccaagtagctgggattacaggcacatgccaccatgctcagctaatttttgtattttttagtagagacacagtttcaccgtgtgggccaggctggtcttgaactcctgaccttgtgatctgcctgcctcggcctcccaaagtgctgggattagaggtgtgagtgaaagcacctggccgggttggctcttatctatttacttgatagccaggtttggagtcattagtggctgttgcttactccttgaacaaacatttttgagtgttgtgctgtacaggccactggatagatagcgatgaatcccacacagtcctgtcctcagagcccacatcttcatagatctataaattaatatttgcagtagagtatgacaaaaaaactccaatagaagtgcctccagggaagatggtaccaattgaactggttgctggggaggtgtcaggggagggttcatggcagaagcctcattgaaggatctcagaatttcatgcctcctgggaggttcagtccaagacacctacctccatctttcagtgcagagggcacatgaggggacctgccaagatgaagccagagaggcaacagtggtcaaatgatagaaggcctggggcgggaaggggcaggtaaagatttggggctttatccaaatggactttattgtagttgtattcatttgataccttttgtaagttccttgtttagttattacatgattatcataaagtttgggagcataatggttagaaagatatcacagacttaggaaaaggatgcatgttcctttaatttggctcttttaatggactgagagactatgcaacgctcatggctggaggacaagctt

SEQ ID NO: 197930 - DNA, 1000 bp, Homo Sapiens
ctcacacctgtaatcccagcactttgggaggtggaggcaggcggatgacctgaggtcaggagttcgagaccggcctggccaacatggcgaaaccccgtctctactaaaaatacaaaaatgagcctggcgtggtggtggcagatacctgtaatcccagctactcgggaggctgaggtgaaagaactgcttgaacctgggaggtggaggctgcagtgagccgagactgagccactgtactccagcctgggcgacaagagcaagaccctgtctcaaaatgaaaagaaaaaaacctctcggggaatgaagggaacatgtacactgtactaacgccagaactctcagttgggtctgcagtgtggaggtttcctagcagagcctttcttcctagggctctgcagtgtatggacaggaaaaccatggcatggtccccaccaacaccccagcactgtccccagctgtcgggaaaacctggggcctgcggggatgggaggagaagaggagcctctggggctgcagccaggaacaagggacaggaggggagacagtgagccaggggtcgcccccagctgaggggaacaacctaaaatcactagccttagcctgtgccgacagcagagagagcgagccctgagcagcttccagtccaggccctgccttcaacatcactcactcattcattcattcattagccacagaacaccttctgtgtacaggccctggcaagacactgaagacccaaccatgaccaagcacctgccctggttcctgtccctgggaacatgcagggggagaggctgccacggagcacagattcacccagggtgcctggcaagcggggtgagaaaggagggtacatgttggggtctcagcaggagcagggccggaggtcccctagagcacctttgctggccggctggagggagacgcctgtgcttttgggtctccactttgcctgtctcccagacagggctgcctcccctcacccccagccctcaagctt

SEQ ID NO: 197931 - DNA, 1000 bp, Homo Sapiens
gagaagatatagggaaactgaaacccatacactgcttgtgagtataaaattgtaaaatcactctgaagacgtgtttgccagtttcttataagtgtttctcacttaataactaagagggtaaagaattttagtcagaacccctttactctcttaagtactctcttaattaagagagtaaagagttttagtcagaacccctttactctcttaaggagcccaaagagcttttgtttatatggtaattatctaccatatgtgccatattagaaattaaaactgagcaaaattttaaatattcccttatgagttcattttaaaataacaaaagtaacattttaatgagaaattacaatatttgataaaacaaagaattgatgagtgaaaacattttgcatttttacaaatctctttaaaatctgctttaatagaagacagctagatttttgtatctttctctgtgttcactctcctgtttttgtgtgttgaagtatatgaagaagatgtgaccacatagagaaaggtagttaggaaagaaagggctattttaatagccattttttagacaatcgtggctatttttgtttgatagtaaaccaacacccaattagcagtagattcttaaaagttggctgcaatatggaatcaaatcatatcaatgaacttttatttactcaattacattaaagttcattggtcctccttttactttgaattcatttttaccccatatatgattttgtaacaccaggcagtgatcatttagagaatactggttctctgagttatatgggtcttccaaatattggctcatttcattatgcaatcttttgatattgcatttgttaatatcaccagcaatatcatcaggaaagagcatgagtactaaaaagctgttaatctcttggtggccaatacatatggcttaaaattctaacttttgtttgaaagctcaaattgtgtcactgacaacaaacatgattttccttaaagtgacaagctt

SEQ ID NO: 197932 - DNA, 1000 bp, Homo Sapiens
cccagcctccaaaatatataactatttttaaagtttaggtgaatgagtgaatatagtcttaatgctaaagatgaatagtgaaattataagaataaaggtttatgggaacacatggatttgacacagtattttttctaatatacattaaaataaaatacttattttttaaaaatgttaacccaagtaccagtttgaatcatctcatgcaagtttgggaaatagcaatacataaattagggtcggggacttcacgctagccgggctctggctatggtatttcctggttgtgaggctttgacctggttacttaacctctctgagcctgagtttcctcttcagtgaagtggagataatgacccaacctcatcagggtgttgtgagaactaaatgtatgagaagtgtttagaatggtgctgcacagagcgctggctgaacacacaatatctagttacacaaatcaaacaggctgcaattaaattccaccagaaggctgggtgcaccacggcactccagcctgggccacaaagtgagactctgtctcaaaaaaaaaaaaaaaaaattccaccaggctttcctgagcacctactatgtcctggaccctgtaataaagactaagggtccagaggtaaacaagaacagtccctgccctgatactgctaatcatctaactgggaagacagacaagcctctatgtaatcacaacccatggtaaaaggggcatagtaaaaggatgctacaaggggcacaggtggtccagaggaaggagggaatgctgctgcctagggcaaagtcatggacagcttctaggaaaaggtgctggttaatttgggttttaatggatgaataggagtttgccaggcagacagagaggaatgagaacattccaggcacagggaacagcatatgcaaaggtatggaggcctgaagtaggaaactactagagcataaagtgcaagaggttgatggcgatactcccaggtcctacctttaccccaagctt

SEQ ID NO: 197933 - DNA, 1000 bp, Homo Sapiens
tactgctgatggtctcaagaagctcaaatttctatccaatgaaaagggcatgaagaggccgggcatggtggctcacacctgtaatgtcagcattttgggaggccgaggcgggcggatcacctgaggtcaggagtttgagaccaggctggccaacgtggtaaaaccccatctctattaaaaagtgcaaaaattagccaggtgtggtagagggctggtaatcccagctaactcagcaggctgaggcaggagaatcgcttgaacccaggaggtggaggttgcagtgaactgagattgtgccattgcactccagcctgggtgacaagggcgaaactctgtctcaaaaaaaaaaagctgcgtgcagtggctcatgcttgtaatcccagcatgccaagactgcgccactgcactctagcctggtgacagagcaagactctgtctaaaaacaaaaacaaaaacaaaaaaaggctgggtgcagtggctcacgcctgtaatcccagcactttaggaggccaaggtgggtggattacctgaggtcaggaggtcaaaaccagcctgaccaacatagtgaaactccatctgtactaaaaacacaaaaaattagccaggtgtggtggcgcatacctataatcccagttactcgggaggctgaggcaggagaattgcttggatctggaggcagaggttgcagtgagctgagattgtgccattgcactcctgggcaacaagagtgaaaatccatctcaaaaaaaaaaaaaaaaaaaaaaaaaagaaaaaagaaaaggcatgaagaaagcaaatgtaagggtactgatgatctgctactaataaaacaaacaaatggaaattctggagttgaaattataatacaataaatttgctggaggagctcaacagcaagttcaaaatggcagaagaatcagtgaacttgaagatacagcaatagaaatagctgatctgaagaacaaagagaaataacattgaagaataatgaacaaagctt

SEQ ID NO: 197934 - DNA, 1000 bp, Homo Sapiens
atggttcaactagtctgtggaaaaacctaataaactaccagtgtcacacaatagaggacatttctgtgatgaccagatgatttatctattcattttcacttttttttttttttttttaaagatggagtttcactctgtcacccaggctggagtgcagtgacacgatctcagctcactgcaacctccacctcccgggttcaagtgattctcctgcttcagcctcctgagtagctggggtcacaggcatgcaccaccatgcctggctaatttttgtattttttgtagagatggggtttcacgatgttggccagtctggtcttgaactgctggcctcaaggcatccgccccccttggcctcccaaagttctggggttacagatgtgagccactctgcccagccccattttcacttttaagtattaaaaataccctttgataataattctttgaattttttttttttttttttttttttttttttaatttatttttttattgataattcttgggtgtttctcacagagggggatttggcagggtcatgggacaatagtggagggaaggtcagcagataaacaagtgaacaaaggtctctggttttcctaggcagaggaccctgcggccttccgcagtgtttgtgtccctgattacttgagattagggattggtgatgactcttaacgagcatgctgccttcaagcatctgtttaacaaagcacatcttgcaccgcccttaatccatttaaccctgagtggacacagcacatgtttcagagagcacagggttgggggtaaggtcacagatcaacaggatcccaaggcagaggaatttttcttagtgcagaacaaaatgaaaagtctcccatgtctacttctttctacacagacacggcaaccatccgatttctcaatcttttccccacctttcccgcctttctattccacaaagccgccattgtcatcctggcccgttctcaatgagctgttgggcacacctccc

SEQ ID NO: 197935 - DNA, 1000 bp, Homo Sapiens
agttaatatttttctttaaataggctttgaaaatcaacctttattttttgggaattagatcttggtgatggttgtacagccttgtaaatgtactaaaagcccctgaattatccatgttaaaatggtgaattttatgttttgcaaattatatctacattaaaaaatgtaaaagccattaaaaatgtaaatgctgaccaggcgcagtggctcacgcctgtaatcccagcactttgggaggctgaggcgggcggatcatgaggtcaggagctcgagaccatcctggctaacatgatgaaaccccgtctctactaaaaatacaaaaattagccgggcgtggtggcgggcgcctgtagtcccagctactcgggaggctgaggcaggagaatggcgtgaacctgggaggcggagcttgcagtgagcggagatcgcaccactgcactccagcctgggcgacagtgagactccgtctcaaaaaaaaaaaaaaaatgtaaatgccattcaactcgtatttatttatttgtttgtttgtttgtttagagacggtctctctctgtcacccaggctgaagtgcaatggtgcaatcacagctcactacagcctccacctcctgggctcaagcaatcctcccacctcagtctcttgagcagctgggatcacaggtgcacaccaccacacccagctaatttttatatatttcttgtagagatgaggggagtgggtctcactaagttgtccaggctggtctcgaactcctgggctcaaccaaccctcccacctcagcctcccaaaatgctgggattataggcatgaaccactgtccctggctgtggggctgcaccttagataatccaggaagacttcatggaggagatgacattggatcaagatcattgctttaatcgacatcaaatgattaataagttaataattcaaattaatacatttgaattaatatcaataattaaatcatgtctattaacagacattcaaacacaagctt

SEQ ID NO: 197936 - DNA, 1000 bp, Homo Sapiens
ttgaaggtgaggaagagggagagtgggacccacgatgacactgagccagagagttttagtttgaatgactgatgggaagatgagatatggagccctagaagagaagctgtttggaagtaagaacatttatgaatttagttttgacccatccctttactgaattagtgagcctcttccagattaaaccagcccgtgtgccctccattgtcctgaaggggcttgggtgacaagaagatagaggagacagaagtatataccacaggataggggctcgggctcccatggcctcttcctcctctgtaagaaaaggactgcatttgtggaaaggggaaatgaggctccaactcctttccaggagatgagatgttgtttcctggaaatgtctgttcccagacccccattgggaatgatttgctgccagccctgtcgttgagtaaatttcttcattttgttaggctgaggcggatgggggcggatgtgtgttgactgtggagtacatgaacatgtgggctcagggtacagatgggaagaggcccagaactgggtgacacatcatattttccccacaaacattcaaaaatgatgtgtgcttttcttaggggaaaaaatcaaaaggaaaatactcaagacgttataattctgattgctctctaaattggaaaaggttttattgttttgggtttttttgtttgtttgttttttgagacagagtctcgctctgttacccaggctagagtgcagtggcgcgatctctgctcactgcaacctctgcctcctgggctcaagcgattctcctgccttagtctcccaagtagctgggaccacaggtgcccactaccacgcctggctaatttttgtatttttagtagatacggggtttcaccatgttggccaggctggtctcgaactcctgacctcaggtgatccgcctgcctcagcctcccaaagtgctgggattacacgtgtgagccaccgtgcccggccgcgttatcttaagctt

SEQ ID NO: 197937 - DNA, 1000 bp, Homo Sapiens
aaccccagcctctctggagcctgaggcaggaaaattgcttgaacccgggaggtgaatgttgcagtgagccatgatcacaccactgcactctaacccaggcaatagagcaagactccatatcaaaaaaaaatatatatatatatatacacacacacacacacacacacacatatatatatacactatttacttaaaatgtcttcaaaagttcatactataattattaatacctcattgaagagctaagttattttgtatataggaagaaaattaaaacatgggtaggagacaaagatttactataagtgaaaaaatatttcttcctgggagaaaaactgcacttccatatcttattgaaaagcaacaagatattcataagaatgatattggaagctgcatattgctttagcattgaaatgtctataaaatcatggccagtcacacagcagcaatacagttaaaatgagtagatattaccaaatccctcagaagatgtcatagaactttcaaagtgacagatttgtgagacctgaagaatgattactcagttgctaaatgtccatctgtcacaagctcttagctaactttttagagatgtttaactttttgtggttgataattatattttttataaaaatgaatcaatatgccttgaaatgtcactcttgatctcaaaaatgtaaaagagatcatgaaagagcttgtcactttgaaattaggcccaactaccaaaggctaaaactgtataaagatctttagattcttaatgtagaaaagatttaatcttatagtttgagatgatgaaaagtaatgtggtaggtaggcattggtaaggcaaaatgtatgcatttttaaatcacttaagaaaatgtaaatttaaactaatagttctcattttaaaaagctcccattaaattgactcaactattgtaattaacggatttcttaaaatagaagaattgtagcagcaactattttacatatgaggaaactgaagctt

SEQ ID NO: 197938 - DNA, 1000 bp, Homo Sapiens
gcattccaggcactgtgctaggagccagagagcactgatcaatcatattctttctaaatgtcactttctttgcaatttctctaccataatccagctcagtcctttttcacctcacttctgattaactgcaaactttgtggtatcccttgttcttcctgtttaatttatggatccacattactcatcctaaagcacagttttgattctgctactctcctcatcttccctcttggctaactgaattaaatccaaactccctatttactcagagcccttttaagatggttgcaccctattctcctgactcactatagtcatgtcttgaataccagtctttccactgcaacttactccctctgcctccctgacttgctacatcccttttcaccaaaaaagccagtttaagtccctcagcaaccacaacaaccacttcatcccacattgctcttggaaagatcctcctgttaaaacacagattaaaaaaaaaaaatttcaggtgatatatgttgccacacttgtcaattttcaaagaaatagaataccacttttgggaaattgatcttttccaaaggggaggagtttcacctatgtttttcgtttgttgtttgtttgttttttcccgagatggactcttgctctgtcgcccaggctggagtgcattggtgcgatctcggctcactgcaacctccgcctcccgggttcaagcaattctcctgcctcagcctccagagtagctgggattactggtgcctgccaccaagcccggctaatttttgtatttttagtaaagatgggggtttcaccatgttggcaaggctggtcttgaacttctgaccttaggtgatgtgcctgcctcagcctcccaaagtgctgggattacaggcatgagccaccgcgcctggctgtttgttggttctgtgttaagcagggattttatcctccctactgtctaccatagtgcttcctatatagcaacagctccacaattaatgtcaagctt

SEQ ID NO: 197939 - DNA, 1000 bp, Homo Sapiens
cattatgaacgaaacaccagagattgttaatggatggtacaggaatgctttgccatggtaatgaagtatctttatacaagaaaatgcaggatgagcatctctaatctaaaaaactaaagtccaaagtgatccaaaatctaaaacattttcgagtgccaagatgataccacaggtggaaaattctacacctgatctcatttgatggattgtagtcaaaatgctgtcaaaacattgtttcatgcataaaattattaaacatattgtataaatcaccttcaggctatgcgtataaggtgtatttaaacataaagagatttcaagattagacttgggttctatccccacgataacttgttatgtatatgccaatatcccaaaatccaaaaaaaaaaaaaaaaaaatgcaaaatctgaatccgttctggccccaagcatttcagataagagattcttagcctgtaataacaagggggactgttccatgtgaaaaaaaaaaaaaaaagcaatgaagtagtagaggaataacaataaaacagtttataatttactttatatacagtcctgatctgagagtttaaagaatattgtaggtcaatcaaggaaatcattccaaagatcttcatgcatagtctattgggtataggataatctaataagtggtagactacattttgtttttatacaattaattttcgaggacttaattaggacaagcagaagggggaggtagaaaggaaagggtattctgtaacccatgataagactgatttttctacctatgttttactgagacggggaatcaccttcctggaggagactgaacgttcatttcggggaacactttgcatggatttagctaagaccttctatgtcattctaaacaaatgccctagtcctgacagtcacaatatcatttacccttaactagccttagtttatcctcctataggtgatgagtggtgatattttataatcatgatgggatacttaatgtgagtttt

SEQ ID NO: 197940 - DNA, 1000 bp, Homo Sapiens
gctggtctaagagacaagacactgagttgtgttacagcactatgatcaagcttgcttgtgtccagattgttcttccaagtcaatattatagctgaaattttttaaaaagaaaaagttacctcttagagacctgtcaagagtgtaaattacttgaacactaagtctgtgggctgtcttttctgagcctggcttcagtttctctatgtactccatttctagaatattagtaggcaccagagaaagaatccactgttatcttccaaatcagcatcttggcctcgcggggaaagagcccacccagcaggtttttaattgcctgtatagctaaccattcaaatatctttgctgtcttctctttttttgaatggcatgactcatcagaccaccaggtaaaaagccccaggtcagcaacccagcagccagggagtgcatacataatggttcttaaagtctctcatttcaagtttttgtagtttgctcttgccaagcagaaagcaacttttacatagtacagatttattgagataccacaagcctcacccagttgagattaagcctaatatgaaaatacaaattggttttccatgctaagaaaaccaaagctatggacatttcctcagagcccaatatttcaccatatggactaaagcctctgtcttagttgtaggtcatatgtcaacaggagagttgtttatttttttaaccatgtgtcacatgacccaactacatcatctgtagtaattttctggagtgaaccagacaactaggaccctctttcaaacacaaatcccgagagaaggtcaaattggcagctgttgtgtttctctgaatgggctgttgtaatttaaatgtctcattccatggggagctaaggaaagtgacataacccagaagaagctcggaagtgagagtgtttgtgggggtggctgccctcctatcctgagtctctggagtcaatgaatgtgcttcaggagtagtcctaggagctcaggacaagctt

SEQ ID NO: 197941 - DNA, 1000 bp, Homo Sapiens
atccgcccccacaacgctcctgccgggtctctagcgcctcctgcgtccaggcccccaaggtgacagggagggagctactcccagggccgacccgcccgctcccgcgcccagccgctctccccggcgcccctttgccgccatccccgctcagcagaggggctcggcgaggaccacgaccagccacggggcagctctgtaaacctgtgatatgacaggcttatacggcacctccaaagtgtgactgaagctgagcgtgcagggcgcaacggacgctgcccccgcgaggccgtggcgggggctcccagtgcagtcactgccgcttcacttccacatggtgccggtctccagttaggtcccctggcgtttccgcgccctgccgccctcgcagggagccccggccctctcaagagggtggagaggatgggggagccctcaaccctgctacgctgaggggaagaagggctggacggcaaaccggtgcccaccgcggggaggcgggaagggtgggaaatcctctccagctccccaaaagagtgaaaaggagggagaccccgctgtcctctgacccgcgtactaaaggagggaccccccgggtcctctgaccccggctgcgctctgtgactgtgggggagggtgggagcaggccccgcagcccactaaggggtggaggaaacaggagggtggcagcgtccctgcccgctgaccttgaggtagtggagaggagctgaggagccccgcagtgctccgagccaggtggggcggggggagtggtgggggtaggactccctccctccaccccttaggctgtgttctcacttcgtagcggggagggccgtccctcccaccccacccacgctgcactcgggatagggcagaggaggtggacgacctggtggctgagtgtgggaggccggcgggcgaggacgaccccgggccggggcgcagcgggagcccctcagttcgccactccccccaccgtacagcccccgccgtccccagc

SEQ ID NO: 197942 - DNA, 1000 bp, Homo Sapiens
ttgttccaccagtattgcccacaatgggggagaggtaacttctcccccagaagccaaggtgctaatgaaaagtgggaatgacttcccggtaagcctctgaccctaaacaaataaatatccactgcagatctctacctggtaatactgataacagagatgggttagcaggcagagaatggagaagaacatttagctctgtctgtttgcatcacaattgtctgatttgcagagactcacagcttttcctaaaaaagtgaaaacatggaaagaaaaattacaaagacatatctaaattcagttgagcaaaatgatcactgaaagctttaggtctaaggcaaaactagtttgagggtccacttacaaaagttgagttgatgctgaatttcttaaagatagtggggcacagacttttctgtggcatagaactttctcaagggtagaaaagcagacatttcaccctgaggcgactgagcaaggatgatactttggttcacacctttaagactgcatcaaagatgccagccttgagtatgtgcaatacttgagaggcaaagaaataaactcactccagtcagccaagagcatagtccagctgtatgctggccacatgcaatttctgaacaagttatgtcctttcttctgctcattataattaaggccaaaaagtctttggatcttgtgggcatatttgtgcatactttcatcacatactctgtacttttattaatctgcaagaagttaaatcagggctcttgagagcaaacttaagaatattcttccttttagttcttaaattatggggagagcatgacttgtagtctcacttctttatttgctggtagtttaaagctgaaaggaaggattgagtcttcaaaaacaaagtcttccctctcagttggatgacacatgtcaaaagggtaaatgagtgacagagaaggaaagacacagggaggtttacttattttattaatcagactttctgaaagagaggtatgaattc

SEQ ID NO: 197943 - DNA, 1000 bp, Homo Sapiens
tgaaaaaagaattgcaggacgtctcaattacctggtccatgcccactaaatgccagtcaagcagtacctttcctcaacagtgacagaagcagcaatacctcccacacatctccaaaatgccccctaggcttcccaagcaatcacctttagatcctatcgtcactctgggtggcacaaggtcccaggccaacttgtagtggaggaatagggtataatttccccttgaaatcagctcaaaatgttctcttggtgcttctttatggactgtttctagtacgtggcttttcacgatgactggttctttcactgtccttgattcctgaatttcctgaatctcctggagcctggcatttgttcttgattgacattcggatggttctgaaccctccctgtatcctggacaccagttttgtttaggttggtactctggttctctgcatgcccattcttgctaagccggtcatgatttccagctagtttcagcagctcccctgttcccacggccattttcacatgatatctcccaaaggcttttaaaatgaaaaccttttacactggctacgttgggttcatattaaagcaatcctttcccttactcaaggaagtaataattatataggccaaattaataaaccctcttgtgcaagttttatatatgccaacaactataaaaacactttttacaaaactgacattaactagtacaatcattataatgtagctaacattaattcatcgtatctaaaacccttaagcatcttccataacctgttttttcgactccacttcttcctgcattcccagagctggatcttcagctgccacgcttcttcctcgtgtacaacagtagttcttaatctgttttgagtctggaccccttggaggagctgaagaactctacacagatcctttccctggaaaaatacacatttgcttagcattttgcatgcagttttaatgaagggtgtttcatagaatatacatacatatatatatatta

SEQ ID NO: 197944 - DNA, 1000 bp, Homo Sapiens
aaagaaccactgaaagaagcaaatatataagggctctgtagactttgaagttacttatttgttttctttttctgcattaatacagcataacagaaagttcagtttgggattatgtcctgcctggcacaaataagttgatcattggagctatgcggaaaagggcaaatggaaactgttaattgctcactgatgattatgacttacgatgctatttatttcatttcgtccctccttgagggaagaatatattccagctataaaaggacaaacagacgacatccattcttatgttctcttttgttcagatttattctaaacaaaaagacaattattggcctagaagtgagcttgtcaaccaacaaaacaatgcaagcctgatgtgttgatggaataaaatgaggtaaattgactcaaaagtgcagatttcatattgaattggtgagtagaatatgaggttcatcttaatctgagacccattaaagtcagtgtggactttgtcttgtattggtggtggggttggagggggtgattacgttgtaattagttatgagttttatgttttagaacatagttttagaatttagtgataatgaagagcattgtttcttaaatctgatgttccttagaatcaacctgaaatcgtgtttaaagaaagacttttggccgggcgcagtggctcacgcctgtaatcccagcactttgggaggccgaggcgggtggatcacgaggtcaggagatcgagaccatcctggctaacatggtgagaccccgtctctactaaaaacacaaaaaaattagctgggtgtggcggcgagcgcctgtagtcccagctactcgggaggctgaggcaggagaatggcatgaacccgggaggcagagcttgcagtgagccgagatggcgccactgcactccagccggggagacagaacaagattctgtctcaaaaaaaaaaaaaaaaaaaaaaggaaagactttattcagtagatctggggtgaattc

SEQ ID NO: 197945 - DNA, 1000 bp, Homo Sapiens
cctagcacgtagttatctctcagccaatgccaggtgttactgaatttaattcatctcttgctttgcttaccttaatacatctactttgtgagaaaaataatagaacatctttcagttatagttttaaaaagatttttcatttaactatttcaattatttatttgtccatatgccttatctttattgcttttaagtctgttttgttttataaggatagcctgagctgtctgaatactatcaataagctggtgtttgttattttcagggaatccttcctgtggattatcttaacaacactgatctcttcaaagcagagagcatgtttacaaatgcagtacagattcttgaacagttcaaggtaaaaaaaaaattcaaaaaggcacgcacaaaaatggacaatactacaatttaaatattgaatatatttagggaaaatatttgattttgtttttaactatttccctgtaatttacctttaaattttatgtatttgacttgtgtttcacatttctgaagggtaggttctatggctcagtctgaggacataaaattgtgtttgaggagtatgactgcatgtaagattaccacatatgcttacaaagactacaagtcaattctttaactattagaatttgccccatagaaatcatattagagattgcaacatttcttgtcattccatgtatgttatgagattccttaagaatttaaagaggtgaccctttgactaaaaccttctgttattcttaatgcttttaagaataagcggtttggcttgttttattttcagagttaaggaagtacagttttaattacagtatgttactttgcaagattgatatgtttaattctcagcttattgagatagtaagaaaatgttaaatttttctttaaatatttatgaaacaatatagtaacataaaattccatttattttcaaagtggttaaccatccctaaagaatcattttaatggatgtttatatttcaaaatggaattc

SEQ ID NO: 197946 - DNA, 1000 bp, Homo Sapiens
tcttctggtttcactgctgctattgtcaccctctcccttttctgtaggtaatttatgttctctctgacaatttttaagaacttctttttgcctttagtgttctctaatttcacaagaatatgtccaggtagggatattatatttattcttcttgagattatttggcttcttaaatctgtgggttgatatttttcagtggtcttcaaaaatgctgaatcataatctcttcaaatgtgattattctatcctccatgactcttaacctgttatattttctacttcttgtcttctgggtaattgccttagatttgccacttctctcttcaaatgtgtctaatctatcattgtatccatagaggttgttgttgttgttgttgttgttctaagacggagtctcactttgtcgcccaggctggagtgtggagtggtgccatctcagttcactgcaacctctgcctcctggttcaagtgattctcttgcctcagcctcctgagtagctgagactacaggcatgcaccaccacacccagctaatttttgtatttttagtagagacaggttttcaccatgttggccaagctgatctccaactcctgacctcaaccaatccacctgcctcaccttcccaaagtgctgggattataggactgagccactatgcctggctccattgagtttttcacatttataagttatattttgttccttttttaatgtttttatagcctcctgtctcatgctgatattttcaagtctgttctttattttttatgtagaataatcatattaattttataatttgtgtttgataatttttaaatctatagtggcatgtttctgttatgctggttcttgctcatgccttttcttgcagatttaattatttctattgtgagatgttcattttctctggaagtttatttgtggaagttctttgaggcctgaaataaagtgagtttcctctagctaccatctgattgcttaaggttttctggaattc

SEQ ID NO: 197947 - DNA, 1000 bp, Homo Sapiens
ttctgtaaatacgagatgtttctataatatcttgtactagattggggactggggtgttgggtggttttcttctgtgttcctaatgctccctttaccttttagctattcctgcatgtctttgccacagagggactctatctatactctcgcctcttcagggatagactctctttacttgttactctgtgctaggcttatggtgagatagggttttctttgttgtcttgctgcaacctcaatcttagacagatataaaccttagggtggggctgtctcagcaattctgctcttccttcctacggcaattaaattctgccttgtatctgtgatggtcttggacaggagattcctgctctcccctccctcagtgtagcagacttctggttggtactggtataggattctgggcctggaatagcttctttattttatctcagaactaggacatttttgcatctacccttcccacagtaccaaaggattttctcctgtgtccttggtgctagagttttcctacccctcttccagaggcatataagttttgcttctagtctttctataagagcaatggattttgcctgtgccctgtgtgtgggaggatgcggtcccctcccctcaatgtcttaaggcgtttactgcatagaaaggaaggatccaggggaagtgggtggggctttgttcctgtcctccaacagcagctgatcttgtcctgcacacccacatacctgtgcctctgaaggagcagcccccgtttcctgcccactcctaatatgtctcttgagagccctcagtgattttgtgagtgagtgtgactccctgagtttcccagttattccaaacttacatcctaggccacacttggactttaatgatttactaacattttatctgatagcttcatacctaatgggggccacatgtttttcctgtgctcaggcaaaggtgagaaacgccatgtgtctcgtgtctccctggagtgcctgctccctctttggaattc

SEQ ID NO: 197948 - DNA, 1000 bp, Homo Sapiens
gaatccacatgttgccagtttaaatgtaaaagaccaaggagagaggggacttgatttgttttgaagactgtgacttcacagagcctgctgatttcagtagagaaggcagtaagatgtcctatgtcaacttccatgttcttaaaacaatcccatttctaaaaattggaaacccacaccaaataaactgtctataattttgtaatttacttttttttttttttaaccaaagtctgttaagcctcaggataatgttgtaacttattaaacatatctttgtttggttttgactgcttctggttttaaggtagtgaaataggattggttccagccgttttttctgtttctgtgcttgcaggagtgaaggcgttcagctgcagtgtgtgcaatgcttccttcaccaccaatggcagcctcacccggcacatggccacacatatgagcatgaagccttataagtgtccgttttgtgaggagggtttccgaactacagtgcattgtaaaaagcacatgaagagacaccaaacagtcccctctgctgtgtcagccactggagagacagaaggaggaggtattttccatttgttgattcaaggtgtattaacccgatgctaatttaggaataaatccattcacaaatcaccgtgagtattttgacgtggctatatatagattagttcagtagcaccctgagtttttaataattttattttctgattatgaaagccatacatgctcttggaagaaaaattcagaggtgcaatgaagaaaacatctgctcttacaaatcaccacgcgctgaattggcattcactctcacactgtgttcttcctttcatgcttgggcgcgcatgttgctagagacttgaatgtttttaacaaatatggtatcttgctctatatagtgtagtatgcttaattttttgtctactgaagtttattacaggcatatttaatttattgaacacaggcctacatcagttcagatgactccgtggaattc

SEQ ID NO: 197949 - DNA, 1000 bp, Homo Sapiens
gagggacttttataacattcttctttcgactccggcttccgagcccaccacccatcttgcctccttcgcctccgccctttgttctaaactggggaggggggaggggggagagaaaaggacacaaaatcaccgcccccccgtcaaatccttaaatttccaatcttccgcaaaatggcctggaatccatttcactccataggggttctatcccccaccgggtggaggccagctttccaatctcccacacaagcaggatcctttcccacttctgaaagtcttcaaacccagtcaccccaaatgcaaacatcgtgtgaaaccccattaatcaggtaagaaagtagggagagctctgactcagctgcctctaattttgggaggagaaagagaaagtgagtttctctttcatcaagtaccccaaaataacagcgctccttcccttcagcccgctccaaccgcagccttgcctttgttgaaagacccctgtccttcctaggaaggggggcggggaggacaggctcacattccgaagagttctgtccccaaaactgttcgaagattcttttgtttgacgtgcacatgggggaggggaaggagcccgctcaggccacccggcctcctcggaccccgctcaggccacccggcctcctcggaccccgctcaggccacccggcctcctcggaccccgcccaggccacccggcctcctcggaccccgcagaatacccccaaagcccatgggcgtctcctaaccgtgtaagtccggggctccgggggctaggaggggctgctccaagacaagggaagctgcccgccagattggggccaatatcgggctttcccaacccaagcttcctccgaaaacaaccccctcaaaactgagcatccctactagaaaaaatccgcattttccaggaggacggggtgggagagcttcggggaacaaagcccggtcctcccagctctgaggccgaggcagggcgcacctcctcctgggcgaattc

SEQ ID NO: 197950 - DNA, 1000 bp, Homo Sapiens
acaccaaacacattctctactatactatagtgatttgtattcatagcttatctcccccttctcaatcacaagtttgtggagaacaaaaaagaagtttgttattcattttacatacctacatagcacctgacgatatctcaaataagagaaacctcatttttaaattaactgcacactgtaaagaatgatctacaagttttacctgcaatgactattaaaaagggctgagttgacaatcacgactgtgaaatgagtttcaccttcaaaacccagcttcttggctctatcacatagctttaaacaatatccaatgcttccctttttcttttggtggttgttctgtgttttgcctttagaaggaggatggaaagaactgaggaagcagtaaaagcattcaggccgtacgagcatatagaaaaaacttgcaaagaaaaatgaagaaacgcctgctcattagccatctgccacttcaccaatgccaggaaattccgggcagctgttttttataaagtggataattcacataattgtgttggggacttccagctatgaagaactgttagaacatttgaaaattagtgttcccaagttgtactgtgatacaaaagcccagtgaattcttcaaacttccacctcttacaggaatctgagaaaaccagataatgtttacatctacgcatggggaaggaaggcttggcagattattggtatcgaaaggaattctttttagttagtttttaaccctacctgtcttgtgaatgtgctatgtacaggctctttgtaagtcttcaaccatgcagcaaaatccatctagccactcaaagattggtaatagcataattgtctaatgtgtgtcttttcaggaaattgaaattgatatgttgtatctccctcatgccaaaattttataaaaatcatttctaagcctaatgacatgtaaactgaattaccccctccaaatatttactctaaaagcaagtggacaatttctgtagaattc

SEQ ID NO: 197951 - DNA, 1000 bp, Homo Sapiens
ggattccatctctacaaaaaaatttaggccagatacagtggctcacgcctgtaatcccaacactttggaaggccgaagcgggcagaccacgaggtcaggagatcgagaccatcctggctaacatggtgaaacccccgtccctactaaaaatacaaaaaattagccaggcatggtggcgggtgcctgcagtcccagctactcgggagactgaagcaggagaatggcatgaaccctggaggcggagcttgcagtgagccaagatcaggccactgcactccagcctggctgacagagtgagactcagtatcaaaaacaaacaaacaaaaaatttagccaatcaggctaaattactaggtgggaagcctgtgttcccagctacttgggaggctgagacaagagaatcacttaagcctgggtggtagaggttgcagttagctgtgttcctgccattgcattccaacctggacgacagatagagaccttttcttgtttttgttttgttttgttttgttttgtttgagacgaagtcttgcactgttgcccaggctggagtgcactggtgcaacctcggttcagacaacctccgcctcctgggttcaagtaattctcctgcctcagcctcctgagtagctaggattacaggtaggcgccatcatgcccatctaatttttgtgtttttagtagagacggggtttcaccatgttggtcaggctggtcttgaactcctgacctcgtgatccaaccgcctcggcctcccaaagtgctgggattacaggcataagccaccgcagctagccagggagacccattttaaccacataaggacccagctaaaaacccttccctggttctgtcaccatcagattaaagcctaagctcctgtatctctgtcctgtactttttctctttaataaccaccctccaggctcgggagccgatgcctgtaatttcagcacattgggacacttgaggcgggagaatggcttgagtccaggaattc

SEQ ID NO: 197952 - DNA, 1000 bp, Homo Sapiens
tttcaattgtgtggccttgccaagctactaaagatctgtttcagtgtcctgatctgaaaaatgtgaataataacagtacctacttcacaggactctgatgataattaaattaatatatgtacagtatttggtaccatacttggtacacaatgaatgtcacataagttttagttattaagtgtatcctttctcttggctgacctagaatttacatagaagtaaatcatattatcatcagggtaagagtagtacatttaaagttcaaaaacactaaaaatattaactaagaacaaaattgctattaaaacattctacaactacttgaaacccctttgactagaactgaaggatatacatcctctttcgtaccctctttgttattttctactaggggtcggggtactaggctcaactataatctcagcatacgtttatagcgccataagtacttgggtaaatctctccccatctctgggtcttatctttaaaatgagtgattatgacattctagatgcctttccaagaggatagtataattttaaaagctcagatctttgtttcagcaaacaactttgttataagaggggagggaagattgtgaaagagaagagaaatatgataaaaagacacttcaaaccactgaaatagtccaaaggagagatgatgagagctacgggtagagcagccagaatagctggagagaagaaaagatttcaagaggttaccacaggctagcctttctttccagggacagtgaaaaaaacaaaaccatcaaaattcatgtattattttattcaacaagtatttactgcgtgaggtattatatagtatcaagtgacagtaattgtatatacttttttaaacattggaaatattcttctataaccataaaaataaatattaacaccctcatttaataaatgtagacactatggctcagagaggttacctaacttgattgaagtcatactagtagatgacagaattgatacttgaattc

SEQ ID NO: 197953 - DNA, 1000 bp, Homo Sapiens
tgaattaatgcttgtaaagcatcaaaaacacagcacatgcttaaacaaatgttcctttattatgttctagaccggccatcctatagtgcagtagtgaggatttttaggttggtgcaaaagttgttgctatttttgccaacacttccaattaatattttgctcacttggtttctttgtcatcaagtgatatgttagtaattattaaacagtaatacatgttttaggttcattagttaactgagagatagttgcctaaatcattatgtatctactcctactaaggagaggagtagatttgtgtataagagggaaatcatgacacttagttttatgtgcagttgaatagaatcatggatgttttcatgtttttacagcttctgtaacagtggtcacttattttgacctcattattttgaatggttatttgagtcacattttagctgtatactaactaatcactataatgactaataacttaaagcagttacgttgataatttaatctatgattaattgacaattaaaatagcacattataattagataagatgcaatatattcttgcattatcttatcatctttgaaacagagatgtctcatgatttagcttttttatatatatgtttttattatactttaagttctagggtacacgtgcacaacgtgcaggtttgttacatatgtatacatgtgccatgttggtgtgctgcacccattaactcatcatttacattaggtatatctcccaatgctatccctccccactccctccaccccacgacaggccccagtgtgtaatgttccccttcctgtgtccaagtgttctcattgttcaattcccacctgtgagtgagaacatgcggtgtttgattttttgtccttgcgatagtttgctgagaatgctggtttccagcttcatccatgtccctacaaaggacatgaactcatcattttttatggctgcagagtattccatggtggatatgtgccacattttctta

SEQ ID NO: 197954 - DNA, 1000 bp, Homo Sapiens
ttcagttttgaatgtttggatttaaagtatagtttctgatccatttccctttttacatcatgagtatatttcaaaggagtaacatactggcaacagctagaccaagtgttcagttatagcaaatctgccgtttacaaattctttaatctgttatgcaaggaattctcatacccatttgtcactttaaattacaatggtactttattttaataatcacaagatttaacacgtaaaaaaaaaagatagcactaataaataacaaaagtggaatgcttatcaaagtaacgacataatgttcagttgagaatcagtcacttcaacagagtaaagctctaaagacaccagacgaaccaatacttgttggaatatgccatacaactttcttactgtggggattacaggggcagccctggttctgtgtggtcagagttatagtcagacagattcagcacaattgtgtttcagactaaattgtttttgagacacggtcttgctctgtcccccaggctggaggtcagtggcacgatcacagctcactgcagcctcaatctcatgggctcaagcaatcctcctgcgtagctagaaacacaggcatgcaccactatgcccagctaatttttgtatttttttgtagagacagatgtttcccaggctggtctcaaaactcctggcctcccaaagtgttgggattataggtgtgagccactgcactaggcccagactaaattttgaagttgtggatcatctacataagatgtcgaggatgcccctcctggaataaattaaaacctgactgacttctagaatttccagtagccaatatgggtgttcttacattcctgaaaacagcaaaatgaaacctaataggtgctggtattcacctctgatgtatcaggtttactgtgtgacaagtcttaatgctcctaggtttacattgtataggcagcagagtatttttaatgtgttcaagtagaatacggggaaaattaggatcaaatga

SEQ ID NO: 197955 - DNA, 1000 bp, Homo Sapiens
ttatatttatttgtattaatcaaattcataattcataaatatatatgtgtgtgtgtatatatatgtgtatatatatacacacacacatatatatatgtatatggaatctcacgctgtcacccaggctacagcacaagcacagtggtgcaatctccactcactgcaacttctgcctcctgggttcaagcgattcgcctggctcagcctcctgagtagctggcattacaggtgcccaccaccatgcccggctaatttttatatttttagtagagatggggttttaccatgttggccagctggtctcaaactccttatctcaagtgatctccccaccttggcctcccaaagtgctggaattataggcatgagccaccatgcctagccttaaaaaagatattcttgagggcccacaataaagcaagattcaaaaaaattatcttctgtgttttcatcaagaaatctggaacatatggcaaagaataattttaccaggagagttactttggaatcttcctgagaccatccaagaaggtttaaacagggctgctgatgagaggccaagaggaagaaaaaaagcacctgccagcttggtctccccagggacaggaccctccacaaacaggggtgcaggctgcttaccagtagcagctggacaggaggccagccatgtatgattttaagattttaattaattgtaattgcctttttgagggagtctattgttaaactaataagaacagatgctacacttgatcttagccaaaaggctgacaagcaatggaagtccattgttaaactgagaaaagtgggtgggcggtcatttttaaggagtcagtaatgattttaatggctatggtaaagaaactgttcagagtaaagcctaatacataattgggactcaagtgtttgtttaattcatctgattgagaaaaatgataacttggataatgagattaagggcattgacaaggatatatagaaagaatattaagaagaattc

SEQ ID NO: 197956 - DNA, 1000 bp, Homo Sapiens
tcccaagtagctggtactacaggcgcctgccaccacacccggctaattttttgtatttttagtacagacggggtttcaccatgttagccaggctggtctcgatctcctgacctcgtgatctgcccgccttggcctcccaaagtgctgggattacaggcatgagccaccgcgcctggcctttttttttttttttttttttgagacaagatctctcactctgtcaagcaggctggaatgcagtggcacaatctcagctcagtacagcctcaaactcctgggtgagtctcccaccctggcttccgaaagcgttaagattactggtgtgagcctggagtactattttgctacttagaaacctttagtcctttatatatttagcaaatgtgtgaaaaaataaatgaatgttttgttattggcttgatggtggacatttatggaatggctcggttagtgacatgacatgaacaggtgttttgtttctttcccaattttttctgtcttcagttttccctcattttttttcatactatatgcgtatttgtatgaatttagtgtttcataaaatgatttgtgcttttcttttagaatgattacggacctgaagccaaagaacaagatgcgctagtggacagattgctgaccaggggcttgagagctgggttctattttccctcctcaaactgactttgcagccacggagaggtaagtgctatttccattttttctatcttaaaaatggtagtaatataaccctcctggagttggaggatttgttggctaattcttgaatataggggatgcaggatatcaggtgattgagagcatacaggcttcataatcagagtcctgggtttgaaactctttacgatgatatactagctgggtaatatggggcaagttactttaacctgtctactcctgtagtcctcacttgtgagagaataacaccaccaatctcagagactattctccgttaatgagaatgtgttttgtaaagctt

SEQ ID NO: 197957 - DNA, 1000 bp, Homo Sapiens
ggttggctccatatttttgcaattgtgaattgtgctgctataaacatacatgtgtatgtgtctttttcacataatgacttcttttcctttgggtagatacccatatttcaattttttaaaaaagagttggaggaggtgagtagattgatatcacatctgtgctgaggtcccctagacttgcagggggaaggaaaggggttgatagggagactcctgaagagtatgacaggcgatgggggcaccttactcagtggctgcgtagtggccaggcccccaaatcaggcctgcagaatagaaaagggaagggagagcattgggctggaagatgttggtgcagcttggatattctttctgcattcttactggacgttttggcgtaagtggcattccagcttcctttgaatttggatgaggaagaacaggaaggaaggaaggaggggaggagggatcatctgtcaagtgattagcagaaatagctttttgtactttacagaatctcactcatttttaaaatttaaatttacttaaatggtgatgtagaatgaaccatgtgccaggcactgctctaagcacattgcatgagctgactcctttattcttctgacaagtagcaaggtagctacttttcttacttccccttttacacacaaaggaattaaggaactgagagcttgatgattttttcacacagctgatgagaggcagagcagagatcccaacccaggccccagagcccactctcttaagggcggtgctatgctgttgttcattcattcatcctgtaaatgtctattgagtgtggactatgtgctaggcattttgcaaagcactgcaaattcagggatatcagcggctgatgaccctatttcagtagttgtgatgtatgaagcaataaaataggcccacctgagtgctagttgggaggttctatgattattgcactttacaaatgaaagaggggttacccagcctggaattgggcaagtctgggtgggaattc

SEQ ID NO: 197958 - DNA, 1000 bp, Homo Sapiens
tttactacagaacttctcaagtcttttagtataatagtatgcattgtgagtttctcacattgactggaccaatgactgtttcttttttctcttttgtcttgttttgttttgttttaatggaatgcatttctgaggactggcattctgatgaacgtactttagtaagcactgaagaaggaaacacaattgataagatggtctccaaatgacatatcagtcagactatgacctgtttattgtgcatacttttcaaaagtatcattgtttctgcaatggcagtattatgaatgcactgctttgttaactcagcaagccaagagtagtagttaatagtttagcacctctatggctgaatgattccattctaagtaggggtcgcagcccaattctggattcagtagctaaattctatcacagcaggtggagtaattgctttagcaaactacattcatttattcccttaatatatgtgtgttataaaatgtctcttttgggaccaagaagcacaaagctgagactgttgcctcaaagtgatgtttgcaaattggggcttaatgcaatccacaggtgggaaagatataaggctctggctttcctgctctgtctgttgtggtgtaagaagcagctgaggccacagctggagttcttgttactttaatataagaagtctttttctctcgactgtacttggatggtgcttttcataaaatgacacagtcaatttgttttccatgaaagagctataataatcgattgccaaaaatccacctgagtagtaccaacctactactactcctgacctcagccccacaccgaaacagccacccaagcctggccttttttcttactggtctcttttcttgatccccattttttctcattccttgatccccattttttctcattctaatggtattaattctagtttacccttttcaatcatgttaggtagactttaaaagtatacaatgaatctctgcaattttcctatgatgaattc

SEQ ID NO: 197959 - DNA, 1000 bp, Homo Sapiens
gaagtggtctgctcatagtttgtgtgccaggttgctcatcagtattgatactgtcccagaacaggttgtaggtataattcagagactgtcctttgcaaaggaaatgaccagcatttcaactgtatgtcttcctggaagggtagattctgctatatcttctttgtctgcatcaaaagactcaagaggaatgtggacacatttcatatcccatttgtagagtaaagcttcaagtgaccagtcagcacttaaaaaaaaaaaagttgttcttttaaagtcatgccttttctgttttgcttcagatgtattctattcttaaattatgtatcgcatgggtagggtagagtaaggcttaagttacatataaaaagtaagggtcatccatacttgcctcctaacttgataagtagaccacaattggaccttgggattcttgtgcatcaaaaaatatattgtagccaaaatgtcttcaaaatctgaggagaaaggatttatgaatagattttcatatagcatcactggccaaatgtactattgagccaaaaaagcttaccttctggttcaaagaacacatcagatgcaaggataatatcttgtggtggtagagccagaagatcccaagatatatgaccccatgttagtcctaccacctgcagatgtggcaggttattcatttggcagctttgccgacagacttccagacagtgaggcagttctgagctgtctgacagtattacttctgcaccacatttggcagccaaaattcctggaaggctcactccagctccaatctaataagttatgaaagatggcatttcacaattatacttggaactgcaaataattgggaatcttagtactttttcattatattcttgcatttttaaataagcatagagtcagtctttctggatttgtataaaatgtaccgtaactgaacattactataaacatgacaaaagtacattccttatgaatctactctgctaaaaggtaaaagctt

SEQ ID NO: 197960 - DNA, 1000 bp, Homo Sapiens
caccatgcttaatgaatatcatattttatgttactgaagtgattcttatgttaacaataagatcatagcagaaaaaaaattcacctaatcagcatggtgatggtattagaacatggggcctttgggagatgattaggatacaaaggctgcaacctcatgaatgggatcagtgcttttgatcaggctcttagaaaagagccccagagagctgccttgtcccttctgccttgtgaacccacatagaaggcaccatctatggggaaggagccctcactggacaccaactctgctggggccttgatcttagactccaaaactgtgagcaatcaatttctgttgtttatatattactcagcctgagatattttgttatagcaacctgagcaaactaagacattctctgtaaaggaatgtccaccttctggtattaggatcttaatataatttctttgtttttcataagatgaaaatcctccttggtctgtggtccatagtgcagtggttttcacagatggccgatgacttttgaattttatccaatagataaaactttaattgctctaatcaactatgaaacatgtctgtcagatgaaacctgggtggctaactggcctcaaggtcacaatataaaataaaaataagtacaatattaaaagaagtccaagtcattagaagacatcacatatagtaaagctgttcacagaaacagacctatgcctcatgagtacacagagcgtgcatgcagtcagatcaggaaacagttcattcatttcactgggtgccaggccctggggatagagcagtcaagaaacagataaaacatcctgccctcaagatgcttaaatcctcatcctactattaacactgaacttactaaatgaagagcgacacagtagcgagagagagtgtggttatatgtcactttgctgacaccctgccacagccctgatgactgctgatgcacacagcactgctgtgaacagttaagggaatggaattc

SEQ ID NO: 197961 - DNA, 1000 bp, Homo Sapiens
actttccaccttatctgtctgggaactaatttagtctttatgttggctgctttcttttcacttttcaggctaagatttcctttctcttggaaatcagacgtttacttggtcctgcagctctctctctgtggaccagtcttttttgttgttgttgttgccagatactcaccgcctctactgtttatccacccatttcctttataactctgaaaagtagctcctgcctctgcttgattgctgttttcttgaaagtgattacttctggcaaaacatagtggtcattgcttagttgtaatgccactgtgatgttccactccccccggaaaccaatctcttccagttcccaagacacaatacttttctactgaattggagttccttagcgggggtcttagttttgttctgctattcagtgcctttgtccctatcctagccattagctttcctatagatccttgatttcctcatctgttgaaaaagaaatggctagaaaatcttttagattctttcaagtttaaatattcgatgattttaatattctaacagcatgtctctgtgacccagcagtctattgggagctgaccccacttgatttaccaaactctttcccattatgcctctgcatgcacctatgttccaggcaggtcacctcagtctcttctgtgtgtatcatgcttcttcccacttcttggcctttatttctgccagtctctgcctgaatgctttaattcctcctttgtgcttttctaattcctgtccatccttcaatgttcagctcagatttcattttttttttttccccatgaggttgtttcagactaaactctgctatctcacttcttggtatccttgttacctggagttttacagaaccacacagtaagttttcttcctttaggaggattgtttgaacacagcttggctttgttttctttttttcttgtctttttatcaaatggagtgcatactttctgaaaagcaaagaacgctatttgaattc

SEQ ID NO: 197962 - DNA, 1000 bp, Homo Sapiens
gtccgctgggggtgtgcaaaggtgagcattcctgctctatctctatcccctctgagccacgaccatcagctcctcctccctctcccgggacacctgagaaaccggctgtgacacctaccctcccttcacgcccacccctcaaggctgtagtttggtcagccagaggaactctccgtctaggagctgggtgtgtgtgcagaccccatcagagagagagcctggggatcctcctctctgcctctatcccctctcccatcctgcccgtggctgtgcccaaaggcagctctcgatgtgctggggatggacgggaacactgctcacagggctgggcatgctggcacgcacctgtaatcccagctactcaggaggctgagatgggaaaatcacttgaggccaggagttcgagactagcctagggaacacagtgagatccttgtctcaaaatttttttttttttaacaaaaagaaagaaacaccgttgacagtccctgatcatttagcccacaaacatggacttgagctcctattgtgcccccacatggtcctgggcactgggcaggcaagtctggaatgtagactctgccctcctagagctcactgtccagggtaggtggagaagaaacccaccacctccattcaacctgcagacagtgaaccttgtgtgccaagcaccactgtaggcactaggggtccagatatgaacagaacagcccaaatctctgtcctcaaggagctcacatttgagaagagagagacagaatggaactaaaataaataagcaagtgacatagcctgtagaagggaatgtgtgctagggagaaagatagataatgcagggaggtgccagagagtgggagtgtgggagttgcgatcatatcacaaaattcactggtgctgtggacagtttgggggctgtagaagagcagagaagggacctctgacccctccctgagctgtgcttgctctcctgaagggagttaagaatggaaatggggaattc

SEQ ID NO: 197963 - DNA, 1000 bp, Homo Sapiens
tacagagtacttgcacagtttaatagaaaaaagtatttaaaagacacagtaattcaaataatatggtactggcactggagtattatttgtacaatgacgtcattttaaaaccaaagtgggtagtttactcaacagatagtgctaggggcagttggttaattacttggaaaaaattgttagattgagattacatattacatgtgaaagtaaatttcccatggatcaaagttaagtgcaaaacatgaaccataaaaaaaactacaaaataacatttaaaaaaaaaaagataatctcctgattttgatgaacgtatggggaaaaaggcaagctggagtactgctgctggcgagagaagccagcactgatttctctctaaaaggaaatttgacagtagaaattaaatgcttatccctggcccagaaattccacgccagaaaatatgtccaatgagacaattagagatgtgcaatttggaattcgctgcagttttatttatcattgtgaataattggaaataaactgcagaccaccagagggatctttcaaaaatgtaattgagattatgtcacttttctggttaaaatccttacatggctcccacagcctcctgataaagtccaagctccttagtgaaccatggaagaccctcaagacttgctggctcctccagctgcatccttgctgccattactgctccccgggcccatcctcctcgcccctcacccacctcagaccaccttagcaacctgcgtggcctacatgggccagtgagcctgcacacaagcctctattccaaatacctgacatgctgctcttctgacattgtaggacactctaggatctcagttcatgtaccatctatttccggaaaccatccctgatcccgaataacaccataacgtaattataatgcattgcaaccttacaataccatcatgcagtcactcacttctctgtctactccattagataaacccaaggatgggtgaaacttgaattc

SEQ ID NO: 197964 - DNA, 1000 bp, Homo Sapiens
tggtcccagctacccaggagattgaggtgggaggaccacttgagcctggaggtcgaggctgcagtgagctgccatcgtgccagtgcactccagcgtgagcaacagagtgagaccctaactgaaaataaaatgagagtaaatgaaataaagtatgtaaagacctgcacacagtgggtagcatgtcacagttaggtaaggatgtccagagcttgcacacagtaggcacactccatgctgaaagacattgtgtgtcttttaatattcaacctgtaaataccaagaaggcagggaccttgcctgccttgctatctttatctccactgcctgcacacttcccgaaacttattggtgttcagcacttacatggggagtgcttgtatcaacacttggcacatgggtctgagaagaggtccagagaaggggagcagcccctctcccaagcagattacagtggctggtgtcagttttggagtctgcctgcctgagtttaaatcctgggtttgaggctgggcatggtggctcacgcctgtaaccctagcgctttgggaggtcgaggcaggcggatcagttgaggtcaggagctcgagaccaccctggccaatatagtgaaaccccgtctccactaaaaacacaaaaattagccaggtgtggtggcgggtgcctgtaatcccagctactcaggagtctgaggcaggagaatcacttgaatccgggaggcggaagttgcagtgagccgagatggcgccactgcactccagtctgggcgacagagcaaggctctgtcttaaaaaacaacaacaaaaaatcctggctttgtcactgccttgcagcgtgaccttggggaaaatactgaatggctatgtgcctcagtttccttgtgtgcaaaatggggatgacagtatttactgcatagggctgcttgctatgaggatgaagtaaattaatattactagaacagtacacatggataagataatcccttggatttccaagagaattc

SEQ ID NO: 197965 - DNA, 1000 bp, Homo Sapiens
tataggtcaggcacagtggctcatgcctgtaatcccagcactttgggaggctgaggtgggatgattgcttgagcccaagagtttgagaccagcctgggcaacatggtgagacctcatctctataaaaacttaaaaaataaaaggccaggcatgatagcatgcacctgtagtcccagctacttgagaggatgaggtgggaggatcacttgagcccaggagttggaaattatagtaagccatgatcacactgctgtactccagcctgagtgacagagcgaaactgtcaaaaaaaaaaaaatgacatatgtatggatgttgataggagcattattcataataatcaaagactggaagtaatccaaatagccatcaactggttaacaaataacagataaacaaaatgtggtattgtcatacaatggattacaattaggcaattaaaattgacaaagtacgaatacatgcgacaacatgaatgaagcttaacgaacgtggtaagtgagagaaaccagccacaaaataccatatgactgcctgaaatgtttagaaaaagcaaatgtctagagacagaaagcagatcagtggttgcctggggctgatttgggagtggggattgactgcaaatggacacaaggggactttttggagtgatggaaatgttctgaaaccagacggtggtggtgattgcataactctatacacctactaaaatcattgaattatacacttgcaatgggtaaattttatgatatataaattatgcctcagtgaagctattaagcaaaaatgattgaggaagacttctgtagaagttcagctatggagtcatctgcaggctataatatcaagtttaaaaaaattaaacaaggcatagaacagtgtactgagtgagcaaacaattgaagtataaaccaaaaaataataaaaattatttatctatagggagagagaagaaacagaatggaagaaacatggaaggaagcaagattcctctgaattc

SEQ ID NO: 197966 - DNA, 1000 bp, Homo Sapiens
ctccattgccctcttcccccttttgctgttattagaataaacatcatatatgaaatcacgccactgcactctagcctgggcagcagagtgagactcctgtctcaaaaaaaaaaaaaaaaaaaaaacccaggctgggtgcagtggctcatgcctgtaatctcagcactttgggaggccgaggtgggaggatcacggggacaggagatcgaggccatcttggctaacatggtgaaaccctgtctctactaaaaatacaaaaaaaaaaaaaaaaaaaatagccgggcatggtggtggcgcctgtagtcccagctactcgggaggctgaggcaggagaatggtgtgaacccgggaggcagagcttgcagtaagctgagatggtgccattgcactccagcctgagggacaaagcaaaactccgtctcaaaaaaaaaaaaaaaaaaggaagcaagctgggtatgtgcgtttagaggtgctgtacattttcagcattataaatgaatagagatgagtggcagtagtttttttggtccatagatttttggtatcttaactagttttggtctcttccactaaagggattgcctgttcaacgttgttaggaatgtaagtactgaaggcaaattgcctgggtttgaattttgttctgtcccttgcaccctgcctggtttcaaatcctagctctgcttattaagttcttttaaggtgatgatctttgagcaaatgtcttaggttctgctttcccagtaaatggatacaatagttgctaccttgtgaaagattcatgtaattgaccagcgtttaccaagtagcatcagtgtttagtttcagtcattggtgattctgcagttggactgtgagggggtattggggtggggggtggtgtgtgtgtagcacttaattgcaggcaggaaggaaaagatacttttgataaccgacaggcagcttttctctgcttttgtgtcaaaagggaggaagggagtttggagagggaaatgaattc

SEQ ID NO: 197967 - DNA, 1000 bp, Homo Sapiens
tccctgttgtcaagaacttctaggctggttaagtactcaagtgtaattcataagagggacgcataggaggaattcgtaggcctcttgccctgggtggggcagggaagatggaaagcaggtgctggctgagcgaatgatgagcaccagtaaagctagccaagtgtagaggagaaagtcagggccgaggcccacaggggaccagagtcgttgtgctcaggacctgaaagtggcccagagtggctggaggctggacagaggagagagcagaggaaccaagggggtcgaaggtgtgcccgtggatggcctcacctgctgactttttctgcagtccacggagaccacattgctattttgggtggcatctgataacaaaagtaaccatcataaaactgtttgatgaagggagagaacattggccttcttgacttagacaaatcagaagattagagtgggaagcaagtgattagagtcatctaattaggtattttagaaatccaatgcccagagaggttgaattgcattctggggtcacactgtgagttggtggtaatgcataacttgcttctaagttcttttttctgttttcataatgatagaaattttatattaaatttcaccaagaagtggtgaatgtataaatgcaaaaaataatgaataacaccattggcaatgtcctttccagtgaaagggaagcagatctgactttaaagagattgttcacagaagtgaagagggggagggagcctgttgtcccccagacctgagaggttcctggctctccctgggcacccgatttgtcccttttagtggcttgttgccttgtcctgtaaaatggcacctccagggatcagggcagggaagacacaagataccgcacataaaatgtccacgatgcctgatactgagtgagcacctgtgaatatgggagcttctaatgatgataatgatactggcaataatagcgagcactgaatactaataaggcaggtggcaagaattc

SEQ ID NO: 197968 - DNA, 1000 bp, Homo Sapiens
cgatgagctttggggatgagagaaagggttatcatgatagcctgaagcaacttagattcattgctctggatctctgatggcagaatacatgtttgggaagtgattccacacgcaaattttggtctctgaaaaaggctagagcaagaaataaatacaagaaaaggcattaaagctttttactccagtaacaacaaaaaccaaaaatttaatttttgtaatttcatgttattgaaaatctactccaactacatgttttgttattttttaagcacataattgctgcagcggcagctgtgtgcactggagggaatggaattccgtctgtcgttcacgtgacttttcttcccctccacagcccccagcaagggtccccatgatcttccctccacagcacccagcaagggtccccatgatcttccctccacagcccccagcaagggtccccatgatcttccctccacagcccccagcaagggtccccatgatcttccctccacagcccccagcaagggtccccatgatcttccctccacagcccccagcaagggtccccatgatcttccctccacagcccccagcaagggtccccatgatcttccctccacagtccccagcaagggtccccatgatcttccctccacagtccccagcaagggtccccatgaacacaattaaaaccactgcactaggggccgggcgcgggggctcacgcctgtaatcccagcactttgggaggccgaggcaggtagatcacgaagtcaggagatcgagaccatcctggctaatacggtaaaaccccgtctctactaaaaatacaaaaattagccaggcgtggtggcgggcacctgtagtcccagccacttgggaggctgaggcaggagaatcgcttaaatccaggaggcggagcttgcagcgagcggagatcacgccactgtactccagtgtgggcgacaatgcaaaatacagtctcaaacacacacacaaaaaaagatgggaattc

SEQ ID NO: 197969 - DNA, 1000 bp, Homo Sapiens
tggccaggctggtctcaaactcctgacctcaggtgatccacctacctcagcctcccaaagtgctggtattataggtgtgagccactgcaccctgcctaaatctgcagtttaaatgaaaggtgtgggtaaagtgaccacagttgtcttcactacattgctggcaccatacaacaaggtctacaagccttgaaatgaaggcctgaaataaaagaggcactaaatggaatcattctcccaaatatatgcagactacagctaaaacagctgcagaaatgctttaacttatttcagggataagagatgtataccaggtactaaggctgtttgaggatatcctaacactgtggttgatatcagggcaacagttgcatcctttcccaccattccccttggtgctactttagagagagaaccctgtgatagaagggccataggtctgggccaagaagcagttctgttgttcttggatgtggggaggagagggagggggctgggtggaacttgggcaagcctccataccatctcagcaaagatgcagcccaggctccagatgtccacagctgtggaataatatttgcagcccaggaggatttcaggagctcggtaccacagggtcaccacctgagggacgggaatagggaggggcggggtggtttatagggtatggaaattcccgcatctcagttcctcaacactactctgcttactcttggcctcttaacaagcagtttccttccctccatcatctttcccctcccactgatttccagtccatagttctggactgaacccctaatttgagatcttcctggaaaaacttgagacaaattggtcataattttatttctaaattttttctttttgtagatttgtagagatggggtctcgctatgttgcccatgatggtctcgaactcctgggctcaagtgatcctcccacctcagcctcccaaagtattggtattacaggtgtgggcccagttagcaacacagtatgaatt

SEQ ID NO: 197970 - DNA, 1000 bp, Homo Sapiens
cactttaaatatgtgaagtttattatcagtaaactgaaatttataaaatttattaccagcaaacaaatgaaaacttgcacaagaagtaagtgatataaagatagaaaaaatactaaatttcagaaacacctaataatttatcttcgtgaaccctagttctcaccatatttttaggtgaatgctagaatgcagcaaaattacacatgttctcaatacagaaagtgggtttcacaaaccacactaggcatgcccagctctgtcctggagttgggttagggagtaatatagggccagtggatgaggagcacaggcccagatactggggctcactaacctcaggtatgagctcttagatacatacaaagcccctccacgtatgggtttacttcaccatctgtaaatagagaaaccattgacccctaaaaatatgatttacacaaatatgtaaaaatgtaagagagtgattagtgcaaagtgtttatcacagcacaatttcctaataagacagcaagttttccaaacaccatcattgtcatcagattcttgcagggcatcattaccttatctgggcactgccctctgctcaggcgtcccaccccagagcttgctatatagtaggtgacatgcaaatagggccctccctctcctgatgaaaaccagcccagtcctgaccctgcagctctgggagacgagccccagccttgggattcccaagtattttcattcagtgatcaggactgaacacacaggaatcaccatggagtttgtgctgagctgggttttccttgctgctattttaaaagttgatttatggagagctagagagattgagtgtgagtggacatgagtgagagaaacagtggatatgtgtggcagtttctgaccttagtgtctctgtgtttgcaggtgtccagtgtgaggtgcagctggtggagtctgcgggaggccttggtacagcctcggggggtcccttagactctcctgtgcagcctctgaattc

SEQ ID NO: 197971 - DNA, 1000 bp, Homo Sapiens
ggctgcattgaacaataagaacacttggacacaggatggggaacatcacacactggggcctgtggtggggtgggggcctgggggagggatagcattaggagaatacctaatgtaaatgatgagttaatgggtgcagcacgccaacatggcacatgtatacatatgtaacaaacctgcacgttgtgcacatgtaccctagaacttaaagtacaataataataataataataataataataataataataataataaaaatgttgggaaggtgagtgggaagggggagttgtccaatctcagaaatgggacttgccctggacgcccagatgaagagcagacagaggggttctttacagccatgtggttttatgagccagcattaatcactgcctgacgatggcttcccctgattagtctggggtcaatgtgtttggggttttcaccagccggtccctgaagcccgcagccagctctttcatgagctgcttgctttagtttccactgacatcctggagacgtgcttgatagcttacccagacctggggctggagggagacctgagctctgaactaccgggcatgtcctggctctgctgttgttctgtggccacactctgtggcccgggacaagcccctgtctagtactaaaaacttttgaaagccaattaaccattctgtgtttccttacatgtaaaacaactcggccttacagggtgatcgagtccatggatgctgaagtgttcttttaaaatgtgctcttctttatcaaaaagtacagattaagaaaaaaatcttagtctcttttcattttatctggaagggattttcccccctaaggcaacagcttagaactgtgcctctgaaactctctatggcgaaggatcaaggtttgtttgttttttacttattgcagagtgatttgtggtctctctcatgtgattagaatgtagcgcataccccatgagatttcagtgtgagtcttaccacagtggaattccgcg

SEQ ID NO: 197972 - DNA, 1000 bp, Homo Sapiens
aatcctaaagcatcagttgccaagataaaagcctcaacatcaggtaaggcatacacagcatctgagaggtaccaataaataggctctaataagccagaaccgtatcaggggagtctatggggaaagggatttatctcctttttttgttcaaaaagacaattaatcacacacctgtctactatttgctccaaaaacgcaagaggccgggacaaccccactcctatcttagtttttccttctcctgtgacccaaaagcacccttacttaagtggcagaaattaaaagaatcacgttttctccaagcatggctaatgtactttcttgcaaatgtaaaccatgtgggcagaagtgcacattaccttctaagcatttccaggtacagatgctccttagcatgggattaggtcctgtcctgataaatccatcataagttgaaaatattattaagtcaaaaatgcatttaatactcctaacctacccaacatcacagcttagcctagcctaccttaaacatgttcagaacactcatgttagtctgtagttgggcaaatcatctaagaacacaaagcctattttataataaattgtggaatatatcatgtaaattgctgaatactgaactgaaagtggaaaacagaatggttgtatggatacttaaaccacagtttctaccaaaggcatatcacttttgcacaattgtaaactcaaaaaaaatcttaagtcaaaccattgtaagtaggggactgtctgtgcttagaaactatcacagacaaagccattggctattcctccttcaactgcagggctacaatatttccaaggccttaaatgcttaatgtcacattaataaacttttgttaattacaaacaggcacactgcaaacgtgaaaagctacgtgtcaaaataatggctggcagcagttttcttcccaggaatatctagaatctgacaaacactctgagtcagtttattactctataagacaattaccaagaattc

SEQ ID NO: 197973 - DNA, 1000 bp, Homo Sapiens
tgtattctaattatatgaatctcggtcattcctttatgacatttctgaggaatactatctcaatcaagaaaagccctaattgcactcctctcctatcccggtgagagagcacagactcgtgcctgctccgcaggggtggaggctggaattcagtagtctgagtcggggatgcctggagcaggaggtggtcaggggcattgtcctttccaagtcaggaaggcagacagcacctgctgttggtgccaaggttactggacaggctgcgagggctctgtctgtctgtccgatgttcacaggccagctccccggaggctcagcactcagcccagcttctccgagatgcaaaccaggccactctgaggctgcctacaaactttctgctgagtgccgacagctgcttcctgctctgcggggagttcttccagatcctgatcaaggcacagagaattgatctatcagattaaccaggaaggaaagagtgggagagcgagtgtgggaggctgtggggctgagtgttttctgcgtagcagtcccctcccttctgacttgagtattaattgctacattaccgctgccatgtaagaaagacagtcagcaaagcctgggagagctccagctcctccctccctgctctgctcaacttcactctcctcctcggttcccttggagtaccttgtgccccggcagtgctgtcccggccctggcatcctgaggtcctcccgtggtgaggacttaagtggacagcaggagtgggtggagagagggagggagagtttgccctgcaggctctctggatgcagaagccagactcgctgcagaggcagctgtgctgttcccggagcctggcttcaggggtgcatccgtcactcagggttcattcacccaggcaggctccaagttcctggggtgcacaaggtgggcactgtcccttctgggtgctgacagcagagcctggctcccctccgccaccatgagcggctgctccaaaagatgcaagctt

SEQ ID NO: 197974 - DNA, 1000 bp, Homo Sapiens
cctgcctcagcctcctgagcagctgggattacgggcgtgtaccaccacactggactaatttttgtagttttaatagagacggggtttcactatgttggccaggctggttgttttgttttttaatttgccaacattgtttttaagagtaacattgtagcccgttgtgtcattgttacataatttattgagtgatctgttgtttgaaatttaggtaatttataacttttaatgtttatataaagcagtgttgtgaacatcattgtatcccagtttttacatgttccttaactttagaataagattttagcagtagattttctgggtcatacaaatgtactttttaaagattttattttatttatttattttattttttatttttttgagacggagtcttgctctttcgcccaggccggactgcagtggcgctatctctgctactgcaagctccgtctctggggttcacgccattttcctgcctcagcctcccgagtagctgggactacaggtgcccgccactgcgcctggctaattttttttttgtatttttagtagagactgggtttcaccgtgttaggcaggatggtctcaatctcctgacctcatgatctgcccgcctcagcctcccaaagtgctgggattacaggcgtgagccactgcgcctggccaagattttatttttttaatttttattattattattattttttaagatggagtttttttcttgttgcccaggctggagtgcaatggcacaatctcggctcactgcagcctctgcctcccgggttcaagcgattcttctgcctcagcctcccgagtagctgggattacaggcgtgcaccaccagcctggctaattttgtatttttagtagagacagggtttatccttgttggtcaggctggtgtcgaactcccgacctcaggtgatctgcccgccttggcttcccaaagtgctgggattacaggagtgagccaccacgcccagcctttaagctt

SEQ ID NO: 197975 - DNA, 1000 bp, Homo Sapiens
ttgagacagggggcaaccaggcgctcccggggactagggggccgagagggcatcagatcttccaggttctggttgctgtaacggggtgggagaggtgcccgcttgttttccatctccagggggaaggggaagcccccatagaggccattaggctctggcatcacgactggggttgagtggcggtgagccgagggcggcagagggccctgagtcacttcggagtgggggtattcccagcgttcgttcctggagtaagtagggggccagaccatggctccgccagggtacactgaaagggaacagcaagatagggtgagctcattttctccccggaaggtttcagctggctctatagcaactatatataacctagcgagtggtggagatgggagtgggtgggcataggcccatctgtgcaggttgtctctgttggcttacgttgataacatagaatccaatgggacaagctcaaggctagaggtttgacctaaggccagcccatcttgcaaatccctgccactaatctgagggtcagtgaacaagggaaggatttggatgtctccatgcaacccacccccacagctggatacagtaactccatcccaagtcctactggtgagtttcatccccttaactgaaggaaacacacacacagtttggactcactcacaggtgtgatggagtctatcatggagagtgatgaaatgagatgtggctcggaaatcaggagaccaggagcccttggtcctagccctgcctctgctactgaatagttgggttagttagaacaagtcactgcatcttgatgggcctcggtttccgtatttgacacatagtgaaaatacctatcataactgctaatgattatgccaaaacatgaagtgctttactaatgcacccccttttgagccaaagatgagaagaaggtgatattccccctctaggtcagccaggtctggcccaaggctgctgcacttccacactgggcaaccagaagctt

SEQ ID NO: 197976 - DNA, 1000 bp, Homo Sapiens
aacttgactcactttatcttcatgggagtactctgaagtagagtcatctatatgagcttgcgtgatctactctctgccaggctccactccaaaagttttacacactttacttcagatactccttacaacaactctatgagtcaaggtaatgttatcaccctcattttagaggtgggaaaactgaagcatgtggataggttaagtcacacaagcaataggtgatagagctgggatttaactagtggatctagcttcagagtctgtgattcttgttactttgtgatgctacttttctgctgtgctgtaatattattcaagacacagaggtaggtatcaaaactcaggtctgactccacacagtaggtattctggctacagtcatacaccataaaattgagactttgaacttgatctatagaaccatcagaagttgttaaggagtttcgtgaaggaggtacaatggcccaaacagggagaagtagaaaaagagaaagaatgaaggtggtagattcaagtaggaagttgcagacatctaggtgagggtgaagagtgtacagatcaatgactaacatgggaataaagaggtcagaatgaattgagtcaatattagttgccagtctgcaggaaagtatcatcaacatttgggaaatggcctgatttcagatattctaaaagaagtagaatgggtcaggcgcggtggctcacacctgtaatcgcagcactttgggaggctgaggttggtggatcacgaggtcaggagtttgagagcagcctgaccgacatgaccccgtttctactaaaaatacaaaaattagctgggcgtggtggcacacgcttgtaatcccagctacttcaggaggctgaggcaggagaattgcttgaacccgggaggcagaggttgcggtgagactcgatcctgccactgcactccagcctgggtgacagaggaagactctgtgtaaaaaaaaaaaaaaaaatagaatgagataagcacaagctt

SEQ ID NO: 197977 - DNA, 1000 bp, Homo Sapiens
tctgcccactccttaagcggggtatctttaattctcccatgtattaatctgatgtatttctcagatggtcttaatagtaagtcccgtgtttattattttggcacagcctgcctgagtgccctggatttatgtactcagctgcctgcctagggggctctttctttccagtctcagtgccttcgatgttcccagatgcctgtccccaaactcctcccatgatggctctttctcatccttgagggctcccttaaatattaccttctcgaaagaccttccctgaccacgttatctgaagtaactcccatcatcaccccacagggttatgttctcatctcggctcttgcttacagccattggaatactgaccacattggcaattgacttagttggatacttgtttattggtgaggcctaagtactcatctatctcatttatcactgtgtcccttgaccagcatgggatacacgtttgggatactggctgaatgaaggaataaatatcccgtggtattcagtgcacaatagatcttcaataaatgtgaataactgagctttaggggaaaaaaggggcaagtataatataggttcttgtgttttccccgcctcactctcataagtacaggtggttcctccctcttcctggttcctggagtcaaaaaccccagggccatcatggaatatttcttcttctctcagagtcaatggctcatcaacttctatcaacgtcatatccttcatatctctcaaaggcacaatctcacttcattctttatctagccctgcaaaatcttttaaacagactaccccaagaacttattaactggcttgcaggtctcacccccactcccagacctaaaccccagtgtggctagacatgtcttcccagcacaggatcaaaaccaaactccctcatatgccaagcgcctcagctctcctccgcagcttcaccacccactactcatcttcatttgtaatgacagcagtaatattaacagctaaa

SEQ ID NO: 197978 - DNA, 1000 bp, Homo Sapiens
cgcctcggcctcccaaagtgctgggattacaggcatgagccaccgcacccagcccaaccatttgattttaatgtggttatttctatggttaaatttaaaattcaccatcttgctatttttttattcatatcatttattctttgttctattttttcttcactctcttgttttgaaataataaagcttcttctattttttcttcactgtcttgttttgaaataatagagctttttttaaatcattccattttacctcctttgtttgacttttagcgataactcttcgatttattagttagggtttatggtgtcttatacttaccacagtgtgctgtcaagtactagtacacctctttacatgcagataatagcccaacagtacacttttgtttcctcctcccatccattatttctttgtgatgtgtcacttctgcatatgtcataacacccacgttatcttatttctaatattgctttaagtagtcaattacattttaaatagttgtagagaaaataatctcatacatacccacgtattcactatttctggtgttcgtttctgttaatgtagatttccatctggtattttatttcttctgcttaaagaattttctctaatttcctatcaggtagatcaactggcaatgaatcatttcaccttttctatacaggttgagtattgcttaactagaatatcccttgggatcaaaagtgatttggatttcagatttttttattttttatttttgaatgcttacatatatgtatgtgatgagatatcttggggttggaacccaagtctaaaacttgaaattcatttatggttcatacatactttatgcaaatagcctgaaggtaactttattcaatgttttaaattttgtacgtgaaaccaagtttatgtacattgaaccatcagaaagcaaggaagtcactatttcatgtcattgttcagaaagttgcaggttttggagcattttggattagggttgctcaagctt

SEQ ID NO: 197979 - DNA, 1000 bp, Homo Sapiens
tgatagctgagcccactgtgactagccctgtcgctgcactatcccttgtgtttccctggcctccatccacactttccgtcttacactccccttaccatacccaggtggagtttgccatacaacccttctgagaccctgggaaatgtctgtcaccaagataatgaccattaacatcaattttcagttggttttgtgattgcaaaggggaacagcttgagaagttaaaaactccagcatcttttactgagtatgtcaagagctatgtagatgcattgtcttatgaagtcactgacagcccagtagggtgggtagctttcccagttcttgagttgtcacctaaagcccacagtgctaaggcaatttccagcatcctgaccctctgagcattgcctgcaggccctgtctcactggccaccagcaaaatgtgaactaggggacgtgaatgtacagctgaagccaagctgctccggggcttctccggaccttcagttgctgatggctcaagggctcatagctaacaagttcatgagaagaaattgctgcagtgtaacaccatttcctttaaaaaattgggagcaactgtgttctaggtcagtctctctaagtagataattcttactttgcaagctgaagtctttaccaggcagtgaacagctggtttacataattaaaggtacctgtgaattagttttgaaaaaatcaatgaactgtatgaccctgtgacagctcttatatatgtggtttaagatacatttaatgtcaggttgataaacatgcacatatctatttagctattaatttacttacaacacatcccacttggctttctagtttaatgttaaacttaaatgtttttaatatgcttttggataattgaagtaaatggaaaagaggagaactttcctcactcaagcaaattcttctctacctttcaatatttataaatccctgggaagcatttggtagtaagactttgcagctcgatgtacaatgcaagctt

SEQ ID NO: 197980 - DNA, 1000 bp, Homo Sapiens
atactaactaatggggctggaattcaagctcagatatatgtacattcaaattctataattgttccactaatctttgctatctacctctcacaccgaacttggtgactcatggatgtagaagatgcaagagataaaatcgctgaaaatagcccgaacattgaaacctaataatgtgattcttaataaaacagatctggccactgggaaatagatgtttggatcatttctctccggatctgggctttcacttagtctagtagatgtggtccgtcataaaaccattgcaggcttcctgaaagtcaaattaggctttctgtggggtcactaaaaccagagctggtcccaaacattgggactacttcctacaagatttagcacctgccacagccaccagattggactgatccagcactctaaactgatctgaactgtgaaagccaaacagccttagcaagtctattcagatcgtaggatctaatatgcctcagtcaaattccagtttctgctcttgctagttgtgtaaccttgaattaggtattcatccttttgcagctcattctcatttgaaaaatgaaatagtgaaatatatctgcctaagagctactaccaataaagactaaataaaataagacagataaagtacccagcataatgagcactttacaaatgcttctttaaaaaaaatgatagtggtgatgatgatgaagatgatgatggtacaaatgacagaggaagagggagaggaagaggagaaagagaacaataaaaactcagattctctaagcatctggatttcttggtatttgtgacaaagcctgctttctgcttggtagcacgctttctgtagtcaagggataataaacaatacaaaatgagactctagctggtttattcttttaaggaaagaagttggttctctcaataatagagcttatctctcaattatacaggaaactgacttcctcaggagtttggcagattcagagcttgatataagctt

SEQ ID NO: 197981 - DNA, 1000 bp, Homo Sapiens
caagacacatttttgcaacaggatgtcacacatatgactaactgggtcactaaaaaatgttttagttttcaaagtggatcctttggaggaattttttcccctcatacatggaagcaagtcatggaaatggtagttctttccatttccaaagctgaattccaaggcaaataaactttatattggtaatagttacaagagagatgatcatatttttatctaagtgctctacaaaacaaaacttgagcaacttatccaaagtttattgggatttttaaaagttctgttatctttttagtgtctagaaaaatgtccctcctactcataagattttggacttagtttcttactaacaacattctctcttatgtattccgaggtccaggatacagaggctgaaactctgactggttttttgaatggcattgagtggattcttgaagaagtggaatctaagcgtgcaagatgattctcttttcagatcttgggaactgaaaccatttgaaatttattactaaggtcgtgatgtgaatatttgctcagtcagcccaccttgtcctgcctttttgcagataggctttcatttggacagctataactgctgtgttttttatattatttttactctttaccataaatcaattacaagaaaagagtttcagtcctagtatttagccccaaaatgaacctttaaacatttttttggtaatttttatattttctgtctttttaaaaatattaaattctggaaaaaacaagtttgtgcctctcattccctgagtttctattcttttgggtataaagattgccttagtgagaaatagcaaatttgctaaactttctattcagtcttttcaagggttcataagtggttatcagaaaagaaatttttatctattcttaataaatacactgcttaaagactgaaaaatgtactggaattgcatttaatattatggccatacaatctgtcttttattatgaaacagtagaaagcaagctt

SEQ ID NO: 197982 - DNA, 1000 bp, Homo Sapiens
tcatgtccttgtacaccgccaccagagcaattgagtagtaactaggtgcattatcaatgagcagtaatattttgaaaggaatcctttttctgatcagtaggtttcaacagtgggcttaaaatattcaaaaatcatgctgtaaagaaaggtgctgtcatccaggctgtgttgttccatttatacagcaaggcagagtagatttagcatcattcctaaggactctgtgattttcagaatggccagtaagcattggcttcaacttaaagtcaccagctgcactgacccctaacaagagagtcagcttattctttgaagctttgaaaccaggcattgatttctctctagcttccaatagaaggttgtttcatccatattgaaaatctgctggccaggcacagtggctcgcgcctgtaatctcaacactttgggaggctgaggtgggcggatcacaaggtcaggagttcaagaccagtctgaccaacatggtgaagcccagtctctactaaaaatacaaaaattagccaggcgtggtggcacgcccctgtaatcccagctactcgggaggctgaggcaggagaatcatttgaacccgggaggcagaggttgcagtgatcaggccactgcactctagcctggatgacagagcgagactccgtctcaaaagaaaaaaaaaaaagaaaatctgtttagtgcagcaaccctcatcaacaatcttagctagatcttctagataacttgctgcggcttctccatcagcacttgctgcttcaccttgcattttcatgctctggaaatggcttatctttccttaaacctaatgaacctaccactgctagcttcaaacttttcttctgcactctcctcacttctctcagccttcagagaactgaaaagagttagggccttgctctagattaggctttggcttaaagatatgatgtggctggtttgattttctatccagaccactcaaacttgctccataccagcaataaagctt

SEQ ID NO: 197983 - DNA, 1000 bp, Homo Sapiens
ggagatggagttttgttcttgttgcctacccaggctggagggcaatggtgtgatctcggctcactgcaacctgcacctcccgggttcaagcgattctcctgcctcagcttcctgagtagctgggattacaggcatgtgccaccatgcctggctacttttgtatttttagtagtgacggggtttctccacgttggtcaggctggtcacgaactcccgacctcaggtgatctgcctgcctcagcctcccaaagtgctgggattattacaggcgtgagccaccggaaatgtagatgaggcattagttaagaacacattaaaagattaaatattttcagtagtactctcataaaataaataattaagaagtatgcattttcttacttaggagaaagtaaatagagaaccgggaatcagagccaggggatacgggtttaattcaagttcttttgtttactaggtattgactttaagtaatttaacttctgagtcttggttattaattggcaattattttatgggtggctgtgaaaactgtaattattgcatatataaacacgttattttaatttttaaatttttggtagaaatagagtctttctatattgcccaggctggtctcaaactcctgggctaaagtgatcgtcctgccttggcctcccaaagtgctgggattacaggcacgagccaccatgcctagactaaacatgttattttaaagaacaacattaatgtgtgtttcattctaaacatgagactctaatactgctgagggatgttataaatttcataaaaatagaaactgacaatattgagaaaaagaaataaagtgaatgatatagggacttgtaataaagcagatacatcatattatctcagtaagataataataatgaacattaaacatttattatgtaccaatcactttaaatagcacattattaaattatcttaaagcctattcattattatcctcactttatgaatgagaaagctgaagctt

SEQ ID NO: 197984 - DNA, 1000 bp, Homo Sapiens
gttatttgagagcaaggtagggactctaaaattggctgtagggtttgtgaactctaagagggccaacagcagaggaagagtaactcatttttagcactgagttctctaaatgccaaactttcactttatctttggctaacgccactgacttaactgtgtttttatggaaatcagggagcaatcagagtccatgtttggatgaaatctgcacagcgtgagcagcccacaggagtaagttccaagatgggagcattaggcatagaggtctggtatgccaggattaggaagccagagtgggtaaaagggtcactttagcagattgattagcagaacatgtagtagactgctccagagtcccagaaattacttgggttggagaaaacctacagaaagttttgacttcctttccttgtggggatttgggagcctaaaggtgctatggctaggatatgcaaagaaatatgaccttattttgtgacttagctggtgaagtgggacatttaagctacaaatataatgaatattagaagagtactttacagcctgtggtgacatacattagccctgacttttctcctctcataatagaaattacacttaccaaaagagatagaaaagcactttgcaagaaaagttaaataatgttattcatcattgttaatgataaacagtaaccacaacaataacaacgacagcaagcttaccccgacaataacaaacactgcaaacttatttgttcttgatattttctggacacccacatctcttattttaatctttgttttgcttttaaaattatccaactcattttagtgtcaactttagttgctgcattcatcaacttggaaagcccgttgccttggacagaagtgtcattcgatatgtttgatatattcagctctgcatcagtaatctatttgcaaaattgtccaatttgaaagtgacacatttgattcaggtgactttcctttctctagcacagtagaatttgaaggaattc

SEQ ID NO: 197985 - DNA, 1000 bp, Homo Sapiens
accttcctcccccacccccccccaccccttctcttgctcttcgtcttaccgtgtgatatgtctgctcccacctttgccttgcaccatgattggaaatttcctgaggcctcctcagaagcaggtgctactatgctttctgtacagcctgcagaactgtgagccaattaaacctcttttcttataaattacccaatcccagatatttctttatagcaatgcaagaatggcctaatacagccttcttgtttcctcatcagtagagctgatggattaatgtttagacagtacctttgctatctttacttataaattattcacacacttaggtagactagaagtagagaactttaaaagtggttcatataataccatgtgaatggaaatgattacaagatcatctgagtggtgatctgcaccactgcactccagcctgtgtgacagagtgagaccctgtcttaaaaaaaaaaaaaaaaagttatcctaaagctttactacgacatgtctaagtgtggatttctttttatttgccccatttggaatttgtcttcccaagtctgaaaatgatatttcatcccttctgaaaaacattcagccattatctctttcagcattgtctttcccatcattctctctgttctttctttgaaattcttggtagttaaatagtagactttctcagtttatcttgcatgtctcttaaattcttttgtggtttccacattttccataagatgaaaatatcttggtttttctaaagaatttcctcattttgactttctaggttactaattctcttttcagtagagtttaagtcaatatcactttaaatttctagaagtggtagaaattactacttttttcttgaacttctattttgatccttttcaaatctgcctaattatttttgagtgtctttttccttatctgtactcttctgttaacataaatatattttttaaattgcattttcgatcatttgagtattgcgttattatggatc

SEQ ID NO: 197986 - DNA, 1000 bp, Homo Sapiens
ataaagacattgcagaaatgaataggtgattttagtggtttgcctccggggattttgttgttgttgttgttgttgttgttggagatggagtttcctccttgcccaggctggagtgcaatggcgcgatctctgctcactgcaacctccgcctcccgggttcaagcaattctcctgcctcagcctcctgagtagctgggattacaggcatgcaccaccacgcccggctaattttgtatttttagtagagacgaggtttctccttgttggtcaaactcccaacctcaggtgatctgcccacctcggcctcccaaagtgctgggattacaggcgtgagccgtcgtgctcggccattacgtaactttttaccattttgtatgatatgcctttttgaaaatttgttaccaattttaattaaaaaaaaattttttttttgagacagagtcttcctctgtcatccaggctagagggcagtggcgcgatctcggctcactgcaacctccacttcccaggttcaagcgattttcctgcgtcagccccctgagaagctgggattacaggtgcccaccaccgtgccctgctaatttttgtatttttatggggtttcaccattttggccaggccgatctcgaactcctgaccttgtgatccacccaccccagcctcccaaagtgttgggattatacatgattccagcccatttttggttaagttctctgaagtttctggccaggaagttgttggaaaagtgtgtaaatactaaatactaaatactaaaatactaaagcaccgtttagtatttaacttcatgttaaaagatgaaaatcttttataaattttcagacaccttagttttcattgttactccacaagactttgacatttaatgccaatagaaataaataggactctgaatacctgaatttttgtgatgtgcagtatattttggttagacatagtcttaaaacctgtattttgtttcatgagtgttttattggaattc

SEQ ID NO: 197987 - DNA, 1000 bp, Homo Sapiens
tgaatgtccaaaagcttctgaatccaaaattgagcctggatcagtcaggatttcccagagaaacagcaccaataggatgtgaatgtgtgtatgtgtgtgtgtgtgtacatatatgtgaatatgtacatgcatacacactcagatctgtttcaaggaattggctcatgggattgtggagcctggcaagtctgaagcctgcagggaaggccagcagctggaataggtgggagttgatgctttagtcttagggcagaatttcttcttctctgggaaacctcaatttttgctcttaaggccttcaagggatgaggtgaggcccaaccacattatgaaagataatctgctttacttatagtctactatttgtgaatgttcatcacatccccaaataccttcacagcagcacctaggttagtatttgattaagcattgggtactatagcctagccaagctgacacaggaacctgaccatcacacctactctgtcccacaggtacatatcccaacacctttccctgctttacttctctccttaacacccatcaagagctgacattctgtatattttaccctccccagtgtcttacaccaagcccacttcattcatttatgtagtacctgtttattctcttgaaaacatataagttggtagccttccagtgtgagtatccccaagagaaaatacgcatcaaaaattaggaacttagaaatgatagttgaggtggaggaacttccagcagtggcagctcaagtggccaagacaaggtgggtcaaagtcagggtgatggtcatggtcctagacgtggcaagaaggatgaaaaggacaagaaaaataagtactaacctcttgtaccaactagagtggcggaaaaagaagaaaaaacaaagggacaagatgttgccagtaaactgccactggtgacacttcacactcagtgtcggttaaaattactgaagttagagagaattaaagactaccttctcatggtggaagaattc

SEQ ID NO: 197988 - DNA, 1000 bp, Homo Sapiens
ttaccccaatttttatagattgttagttatatagggtttcatataaatatcagcctagtttgtcttccagcagggccatccttctgttctgttccttacagttactgaaacattgtgtatggattactgaccatcctagttcgtggtcttctgtaactgagatgactcattattgtgctattgaacaagagagatctgaatgctataatttggttctaattttcatcatgtttgttaattgatctgcttcagaagtgcaaaatagaatcacttggtcaacatttttttttaaaaaagacatgcagataggaagggccaagatggctgaataggaacagctcctattcaggagctaataggtctgcagctcctagagagaccaacgcagaaggtgaatgatttctgcatttctaactgaggtacccagttcacctcaccgggattgtttaggaagtgggtccaacccacagagggcgagcagaagcagggtggggcttggcttcacctgggaactgcaagaagccaggggacctccctcccccaggcaagggaagccatgaaggactgtgctacccggctgggttactatgcgtttcccacagtttttgcaatctgcagatcaggagattctctcgtgtgcctacaccactggggttctgggtttcaagcacaaaactgggtggctgtttgggcagacactgagctagctgcaagagtttttttcataccccagtggcacttgcaaccccagtgagacagaaccattcactctcttggaaagggagctaaagccagagagctaagtggtctcactcagcagttcccactgccacggggcccatgaagcttgaaattctcgctgacagctcagcagtctgaaatccaccggggatgatcgagcttggtgggggaagggacattcgccattattgaggctttggtaggcggttttcccctgacagtgctaaggaggatggaaggtttggactgggcagaattc

SEQ ID NO: 197989 - DNA, 1000 bp, Homo Sapiens
ataagaacagtaccaacggatagtgctaaaccattcacgaaggatccacccgcatgagccaatcacctccaaccaggtcccatttctgacatttgaaaattacaacttgacacaagatttaggtggggacacagatccgaaccatatcaggcaccttctccccctcttccttgctcctgccttcaggatatgatgtgcctgctccccctttgcctttttccatgattggaagcttcctgaggccttcccagaggcagaagccactatgtttcctgtacagccggtagaaccatgagccaattaaacctcttttcttgtaaatgagccagtctcaggtatttctttacagcagtgcgagaatggcctaaaacaaatgggcatgttccctcctagttccagctgttgttcccaaattggcctactacaattttaccattttcaggtttgtcatatgtcctgttgttttcttccaagttctcttgcacaggtgagatgtggataacacataggtcttatggctgttggtggtttgtcctgttttggagtttgcagggattacttgtctagctttttgtaaatgtgattcatgagtatttgattttgctatctagttctgtctgtttttatgtggatatccaggaagatccaaattctatgctgcctccactgaaactgtcttcccagaaatgtattactttttgtcattaaaaaggaggtataggaagattaatctatgcactgcatttggaaaggtgtttgtttgtttgttgtttatttttaggttgcagtgatggcagggagccaatgttgatttctgatatgggaggatgatgatcagagctggtcatctgaaagattaacttggcagaagtttgaagattgaagaaaagtagtggagtgagaaggccaattctgacagtacatcagcagtccaaataggagatgataatgagggaaaggtgagtgggaagggcaaggaaaagacagctgtggggaattc

SEQ ID NO: 197990 - DNA, 1000 bp, Homo Sapiens
ttggttagtatctgtttaaatgtttagtatctaatttaaacagttgttctgccacattcctttttcttcttggagtctggttaaaaaaaaagttgcactatttcccatgctgttttctgtttttcatcctttttcctctgtaccaacctatatattttcttctgatctttcagttcactaatcttccattctgcagttaaatccactttttcaggacttcattttattacatttttttcaatttagaatttccatttttttaaagatacagtttctggcaaaattcttgttacctattttcttaaacattttaattataattacttgaaagtcttgtctgtcttcagtatctgcattatatgtatgtctttctggtttttcatcttaacttttagccatttaatcctgatgcctgtagtgtctacttagtttgactaagtggtagacattgtacatgaaaaactatggaaactaatgttattgcgtccagaaagaattgttcttacggatggtatagggttagtacatcttgtaaaggctgttctatttctggtttgcccttatcatgaaggcacagcccttcaggggtctcaatggaaagcctgaaattcattcttttttctcctagcactatcaaactactggatttgtagttaattttttagccttttaggaactattttctgcttagcgtctcagctacacagccagcttaggaactggcaactgccttgaacggaaaagatgtggagaatgtcgggttaattatagtatgatcttggctcctcaaatcttagctgctttggttgttctccagtgctttcaaacagttgtttttctgttttgtattactattttaagttttatccaactagggtggttagtctgatacaggcaacatttaggattagaagtttccaattcctattttccatgattacttttaagacattctcaaagcatgaaaatatagtctttatctttaataagtgttaagctt

SEQ ID NO: 197991 - DNA, 1000 bp, Homo Sapiens
caagggaagctgggacaaactgtacctggaaaaacaggacactcccacccaaatactgcacttttcccaaggtcttagcaactggcagacaagtgctattgctgaggctcgagtaggtaaacaaagtggctgggaatttcgaactgggtggagcccactgcagctcagcaaagcctactgcctctagactccacctctgtgggcagggcttagctgaataaaaggcagcagacaacttctgcagacttaaatgttcctgtctgacagctctgaagagagcagtggttctcccaacatggcatttgagctctgagaatggacagactgcctcctcaagtgggtccctgaaccctgtgtagtctaactcagatacatctcccagtaggggccgacagacgcctcatgtaggtgggtgcccctctgggatgaagctgttctgcaatatttgctgttctgcagcctctgctggtgatacccaggcaaacaggtaaacagggtttggaagagacctccaacaaacttcaacagctctgcagctgagggacctgaccgtgaaaaggaaaactaacaaacagaaagcaatagcacaacataaacaaaaaggacatctacaccaaaaccctatctgcaggtcaccaacatcaaagaccaaaggtagataaaaccacaaagatgggaagaaaccagagcagaaaagctgaaaattctaaaaatcaagtgtctcttctcctccaaaggatcacaggtcctcaccagcaatagaacaaagctggacaaagaatgactttgacaagctgacagaagtaggcttcagaaggttggtaataacaaacttctctgagctaaaggagcatgttcgaacctatcgcaaggaagctaaaaaccttgaaaaaaggttagacgaatggctaactagaataaacagtgtagagaagaccttaaatgacctgatggagccgaaaaccatggcatgagaactttgtgacacacgcagaagctt

SEQ ID NO: 197992 - DNA, 1000 bp, Homo Sapiens
gatccattgttagtctgatgggcttccctttgtgggtaaccggacctttctctctggctgcccttaacattttttccttcatttcaactttggtgaatctgtcaattatgtgtcttggagttgctcttcttgaggagtgtctttgtggcattctctgtatttcctgaatttgaatgttggcctgccttgctaggttggggaagttctcctagataatatcctgaagagtgttttccagcttggttccattctccccatcacgttcaggtacaccaatcagacgaagatttggtcttttcacatagtcttatatttcttggaggctttgttcacttctttttactcttttatctcagaacttctcttctcacttcatttcattcatttgatcttcaatcactgataccctttcttccagttcatcgaatcagctactgaagcttgtgcattcatcacgtagttctcttgccatggttttcagctgcatcaggtcgtttaaggacttatctacactggttattctaattcgccatccatctaatcttttttaatgtttttaacttctttgcattgggttcaaacttcctcctttagctcagagaagtttcatcatctgaagacttcttctctcatctcatcaaagtcattctccatccagctttgttccattactggagaggagctgcattcctttggagggggaaatgtgctctgatttttagaattttcagcttttctgctctgttttttccccacctttgtggttttatctacctttgttctttgatgatggtgatgtacagatggggttttggtgtggatgtcctttctgtttgtcagttttccttctaacagtcagaacactcagctgcaggtctgttggagtttgctggatgtccactccagaccgtgtttgcctgggtatcagcagtggaggctgcagaacagagaatattgctgaactgcaaatgttgctgcctgatctttcctctggaagctt

SEQ ID NO: 197993 - DNA, 1000 bp, Homo Sapiens
gaggtccctaagaccacctctgggttctgtgatttactaaaataactgagactatagttgtacttataacaatattacagtgacaagatacaaaacagaatctgtaaagggaaatggctcatgggcagttgtctagaggaaaccagaagcaagcttaccagagtcctctctgcatggtgttacataagactcaactcctctagcattgaattgtgatactacttgtgaaatgtctacaatggaagctcattagcaaccagcagcacaggttcttattgagattgattatgtaggtatgtgtctagtacatatcaagattcccaactctaagaagagcaagtgttccaaataagctgcattgtagagtttaggcgcagtgaccactcctacccattatggaaaggtggtaactctctcaaaccccatgttccttgactccagccaaaggccagtgttgcaaacagctctttttaaagttagcagtctgacttatgcctgctatgttaactttttgtgcatgtggtatcagaaaagtagggcctgcagtcttgtggggttttcttaaactatcaccagataatagttcatctctaagataattatttgtaaaagaaaattcatcagattacatttttaaatatttttataataaaaaataccataggtaggccttccatctaccctcgtgtgtgcctgggtcctcaagttggtcacaggatgatattaacagctgatttgtttttattgttcatatttatgtctcacagactgcatgagtatttgactcccaataaaactgaatattgaatacctagcttcatatgtagtacctgagcttttgtgtggccagtatttcttgccacttctcacgatggactgggtctcttttatgtatatgaccctggcaagttcactatgttaactttgaaattgggtacattattataattgggaattattgcagagtctcaatctctgtgtttgaaaaatgagggaagct

SEQ ID NO: 197994 - DNA, 1000 bp, Homo Sapiens
cgcacccaccactcctcttgtacttattagtattagttccaggcccagtgctaagtcaagtattttgagaggttggtccatgaataataatgtcatcgaagcacaataattaacagaacaggagaatgctccctgaagaggagacacagctctgcaaggggagagaagccctcacctttcaaacgcatctgatacggatgcttgaactttgatttctaaaggtgggggcgaggtaaaatgaattacactttactagcaatgtgcagggagacacagcctccagtctctagagaagcagactttaattgttaaactcccagtattctctggtggatggcaagccatattcgctgtcctgattctgctgaacacaggtagtacttttttttttccatggttggctataattttttttctcctgtctgttatcattattgcatttatttatttatttatttatttatttatttatttatttatttaactatgcagcactgctcatacatagaacacagagcttcgtagccacattggcaactgataatcacctgcctttctgttaccctacagcacccaactgcaattctggttaggcagcatccacaattaagtttgctcccttctctcaatgcctcatctataaaatgcaaagagagagagttacacttagtgctaggtggagaacaggattttccctgtgtttatttactttcatgccatctccccacaaagtagattttaggcagcctgtagaatttataaggaaataagtattagatttagagttaggtttaggggcaataaaataaaaataaacatatatattaaataaggtaaataattaaatataataaaaataaacaatgtgtaaacttggtattctgagatatgtacagggagaatttgtaaaacttcttggaaagagtaacaaatgtatatctgtgctacaagtagaaatttaggaaaggcatagatgaatattctactagatacagaattc

SEQ ID NO: 197995 - DNA, 1000 bp, Homo Sapiens
actgatctaatactgcatgaaaaggcttgttttaaaattaatcatatgattactactgcctttttttttttttgagacggagtctcactctgttgcccacgctggtgtgcaatggcatgatctcagctgactgcagcctctatctcccagggtcaagcaattctcctgcctcagtctcctgagtagctgggattataagtgcccaccaccacgccaggctaattttttgtatttttagtagagacagggtttcaccatgtaggccaggctggtctcaaactcctgacctcaaatgatctacctgcctcggcctcccaaagtgctgggattataggcgtgagccaccgcgcctggccgattactactacctttaaaacaatgttttctatctgaggatgttgggataaaatccactctaggtatacattacaaccaagggcaacccctctagactagaatgctgcaggttatatttgcaaagagggctgtttccttttcttaggaattttgatcatttggacaggattccttcttgaaaggaatcagcactgaggcccttatatggaatatttccatcactccctagggttggcctgtgccctttcacagttccttccatcctccatgcctggctgtgggcaacccctgatctgccttctgtcactatagattagtggcatttcaagaggagcatttatatatttttaaaaagattcctcagagttttaactccaaaagctgccaagaaaattagattctgctaattgcatcatcagcaaacactgaaatctgttcattcaatattggcttccttctgtattcaatgaactgtcttttctttaaaaaatatctttaagaaatagtttggtacctgcaaaactttgatcactttttttcttttttaacaggtggtgctttgcatatcagttgatgtatctcaagactataaccaagtagagaatgtcataaaacaagtaagaggttgggctaattggaattc

SEQ ID NO: 197996 - DNA, 1000 bp, Homo Sapiens
tgttcccaaattttctctcccttcatcctcccaatgttctggctcccaacatgtgtcttcaaaactgtgactaactcccacaacaatcgcttaattttatcttggtatcatctctctaactcctatgaaaatgtcacctgaaatctttccttatcaggtatgtgaggctgataaacatcttctttgcagccttattatttaggtatcatacaccagagcccagaaaagtaaatctttatatttcactattcagtcaaatgttcacagattctcctttcccttttgtttccacacacttcttaacacaaagagataaaaattaacaggttgcaatataattaaacctgatgattaaaaattatatttgaggcttaatttaatatgacttaagctgaattttttaaagaaaaatattttatcccatattccaggtatattcttagatcactacatctgatatatgtcagcaaaaagcaattagaaacaaaacaaaaatttacctttaataaaataattttgatgtgcttgctgatgaaagctaaatctatataaaagaatttcagcggtatgtaaaatgctatcctatacaaatctattgctctgtgtgaaacataaaaacacaatgccagtaattgaaggagaatgttctaattatattgaaaaaataagtttgttatgtttatttacacttataacatgtttattcaccttgtttttgttcatgtctttaaattttattatgatttcatggtagccacatacattgttttccttaaaaaattaacttacatagaagtaattttttttcttgaagtaacatattggtttagaattaggctgattactaaatgagcattaaacttcatgttttttaaggttgagtttgttaatataactaataaacatagagtaaatgatgctttttgtatatagatttcaatgcatttctgactaacacatatactcatgtaatcatcaccacaaagaggttacagaattc

SEQ ID NO: 197997 - DNA, 1000 bp, Homo Sapiens
ttgaacctgggaggcagaggttgcagtgagccaagattgtgccactgcactccagcctgggtgacaagagtgaaactctgtctgaaaagaaagaaagaaagaaaaagaaagaaaggaaagaaggaaggaagaaaagaaagaaagaaagaaaaagaaagaaaggaaggaagaaaagaaagaaagaaggaactaagtgaagaaggaaggaaggaaggaaagaaggaactaagtgaagaaagaaggaaggaaggtaggaaggaaggaaggaagatactaagtgtctccatcctacaactagcaagtgatagaaccagtatcatacccaagaccacctctctgagagtgacctctcctggcttacactgcatgcattccctcacctgcatgatctcagcatgcttttcaatgcagcctccaaatggctttgtagaaggtctgatcttggctcctagatgatttcttgcaagtttcagtcaagttcttcagacacatgtgtctctcttgcctatatatgttcttactattttcctaggatgatttggaagtggtatagtttataaagaatttcaaaaaggctccataaatgccaacaattatagttatgaataacgtgcattaagcccctgaattgatttgacatagaactaattaattatcttttttggcctttttgtccatgttatagattttaatacactactaatgaagagttcattattgaataccaatattgaatgtccttattccatcacgagtttggatgctatgtagaggatatgaaaaaggaataagatgtgattccttagtgagcaaaggaatcttcctgaatcttcctgctttgatagtttttgtttttctactagtcataatttattttggcctaacatagaagtctgacttttcaagtaaaaaagaaaggttaataacactatttaacacaatgctgaaccacgtcttagtctagaatattatggcttactagggaaagattgttgaattc

SEQ ID NO: 197998 - DNA, 1000 bp, Homo Sapiens
aataaaagctctcctccatatgccacaagaagagaactgtccctgaggccaagatcaatagatacttgttgatttgactaattggttgccaagagattctgagtttatccttagaaaaattatctgtggtgttgactaggccaaaagggatctttgaagcaaaataaactcattttcaaaaatcaaaaacagcaaattacccgcagcttcgtaagttatctgatatgcaaataaggcatgcgttaggattgggaaaatacaaacctgcctaaataaagacagcttgtcctatgttttcgagacaatgctatacatttctgtaggttcctgctatttcttgtcattagatggatcgtgtgtctggcagtaccaaaagcagggaaaaagatacttcaggcagattgtttttatcaccttggaataatgccataaaatgaaggaaaccttgactacatcagaagcttaacagaggaaagcaaagaaatataaacttcacagtaatctgtaaaatggaggtggcaagggcagtttcccagatttaactggagatctaacagattggcactggaggtaaagagctctgaagtaacttcttgtttgttcctcaaacccagaaatgcatgctcctgtggcttctatgggttttggaaatgagcagatggtcaataagatttctgtgcctgtgactagcatacatttaaaaaatcctaaattcctgccctcaaccaacacacacctaagtacatttggggtcaagtagagtccatggcccttactggaactatacaaatccctggacccaataataaaacatctttcagaattacatgtcaaacaatggtctgtatttcctcaattttagctaatattgagacaggaagacatcaaaaaaaaattaattgttgctgtcagcaataatagcatgatcttggcaagaaaggagatcaatacaaactacaattttcctcaatcaaatgtttgctaattttttctcaagctt

SEQ ID NO: 197999 - DNA, 1000 bp, Homo Sapiens
agagaaaaattaaaatctgaagacataatgggtaatagttttccaaaactgacaaaagacatcatgccgcagagtcaagaaatcctacaaaatgaataaaagcatgaatagatgataaagattttttttttttttttttttttttttaaagacagggtctcactctgtcgcccaggctagagtgcagtggtgtaatcttggcttattgcaacctccgcctcccaggctcaagcgattctcctgccttggcttcccaagtagctgagattacaggcatgtgccaacacgtctggctaatttatgcatttttaatagagactggatttcgccatgttggccaaggctggtcttgaacttctggcctcaagtgatccgcctgcctcggcctcccaaagtgctaggattatcaggcgtgcactgccacacttggccagaatataaagatttttttcaatgataaagattaaaaaaatactcttaggcataccagtacaaatctagaaaccttaaaagagaaaaatggcaggttgcctttaaaggagtagcaattagactaacagctgatcaccagaaaaaaacggaagaagccagaagacaataaataacgttgtaaaacactgaaagaaaataactgcaccctagaattatactcgcataaaagtatcctagaagtaaccaggaagagtagcatccacttgtaggcccagctcctcgggtggctaaggcaggaggatcacctgagtccgggagtctaaaggctgcagtgcattaggactacacctataaataactaccgcacttcaacccggaaaacaaagagagaccccatctcttaaaaaaaaaaaaagaaaaaaatctacaaaaatgaaggcaaaataaagacattttcagataaacaaaagtaaagtttgtcatagatgactcctcactaaagtaaattctaaaagagtcttcttggccaggtatggtggctcacacctgaaatcccaatgctttgggt

SEQ ID NO: 198000 - DNA, 1000 bp, Homo Sapiens
ggtttcttgtacagtgactaatcttaagtgttctttgaattaatgacagtgaccagtttgtcattaatgtctgtctttgaaggagggcgtattttgaattttgttatctttgttatgtttttcatgttaaatccgccagaaatttaaatgttttatcagtgtgttccgctgatttgctcctcttcttcattaactgagttttctaacaatcatcactcctatttaaaatggatctcgttctcttaatggattactcacttttggtacaattggaaaatgttttgttatgctttgctatatttcagaatgatttctacatatttaagcactcaccttatcatttttgtgttccattatttttaaatccaattttctctctagtttttaagtaaatttaaaattgaccacaaaaggtaaccgttacacatttccaactcaggagcctgtgatttcttgttttactaacattttccaaagatgtctttacaacgtacagttaaaacagtatactcccaattcacccttccttagttccatcccccaaaaaagcctgggctaccccaggattgcctgacatgagggatagtatgaagaagtaaaagcaggaatgaagacagaggttttcctaactcgctgcaatgtaaacactttatgtttcagtttaccacaacataggcatgcctagggttccttccagggtcttgggaaaggtccatttaagttgggaccctgaggctgaagctttgtaagtttcacaccttaaatccacctttgtgtcccctggtacagaattctttggaggtgggggttggggtgtaggactcttcattcttctgctagggtggggtggggtggggacagtctcccagtgataagcagttagggagatgttagggctctaaactattcatagttttcaaccaatcaccctgatctcagcccttggcttcacctaacttctagaggtacttagtaccaactcccaaacctttgagaattc

SEQ ID NO: 198001 - DNA, 1000 bp, Homo Sapiens
caagtgagatttatcttaggaatacaaacttcaacatacagaaatcaatgtagtacaccatattattagaataaaggacaaaaacaacaagatcatctcaatgcatacagaagaagcatttaacatttggcaaaatccaaaactcttagatgaaaacattcaaaaagccaaacatggactttttcatcctgagaaaggacatctatgaaaaacccgtagctgatatgttgatgcaaaatactgtaagccttcccccccagagatcacaaataagacaaggatgttctgtctcatcacttctattcaatcttgtactggaggttgtagccaaagcagtaggcaagatgaaataaaaagcatccaaattggaaaggaagaagtaaaacaatttgcagatgacatgatcttgtatgtagaaaatattaagggattcacaccaacatattactagagctaataaactagttcaatgaggttgcaggatacaagattaatatacaaacatcattggtttttatacattagcaatgaacaacacaaaaaattccatttacaacagcatcacaaagaatacttggatttaacatcattaaaaaccaaagataatttgaataaatataaagaaatttcgtgttcacagattgggagataatattgctaagatatcaatattcaatgtcaaattgaactcctatttcataccgtaggcaaaatttgctgcaaatggatgacagacctaaaagtaagaatgaaaataaactcttagaagaaaatgtggatgtaaacctttatgacattggactaaacatttgattatttgatataacactaaaagcacaagcaaccaaagaaaaaatagacaaattgtatttcattaaaattaaaaatgtgtgcctaaaggacactatcaagaaagtgaaaagacaactcacagaatgggaaaaattgtccaaattatatatctgataagggtctagtatttcgaatatataaagaattc

SEQ ID NO: 198002 - DNA, 1000 bp, Homo Sapiens
aaagttcaggctgagcgcagtggctcacgcctgtaatcccagcactttgggaagccgaggtaagtggatcacttgaggtcaggagttcaagaccagcctatccaacatggtgaaaacctgtctctgctaaaaatccaaaaaaaaaaaaaaaaaaaaaaaagatagctgggcgtggtggcgggtgcctgttaagtccagctactcagtaggctgaggcaggagaatccgggaggcggaggttgcagtcagccaagatcatgccactgtactccagcctaggcaacacagcaagactctgtctcaaaaaaagaaaaaaagaaaaaaaggaaagaaagttcaaatagtactaccagcaggataggggaaggaaataagatattaactctctggtctaattatcttattagttgttaccccacaaagtgagaatgtctattgcttaaatccttggaggaggtccacacgggggatctcctggtccctaactctctcccttcattcatcatgacctgcagtcttctgatattttctttcctatttggtgtcttgtattagagtctcttttgagatgtgccacatcttcggtcagaaaaaaatactattccagttgccacttactattcatttttcaaaattttaatcttcagagctgctggaattctctgaaaatcaatgacttcttctgcccagtttctgctggttttgtgcagggaatgaggtaaagttaggtgcagtgtttcatcaatgtgggacgaatctgtgggggagtttccactctgggaagtgttgtacattttcctaaagttactgaaaccatgtatcttacagccttacatgtcttctaaaatgtacctaactgacatgatacaataaattgtgtctaattaacacaatttcaccctaatttttttgcaaagtaataactctgacccaaggagacattttcatcatatttcccatctacacacacactctgtctctcagtgctcaaggtgaattc

SEQ ID NO: 198003 - DNA, 1000 bp, Homo Sapiens
gatccgcccacctcagcctcccaaagtgctggggttacaggtgtgagccaccatgcctggccaagatggtgtttatgttaagctattgtgcaaaaaaaaacttttgtaaagaaaatatatcgctgtatcttaattccatatactttcctgactactcttctaccataattgcaaaaattctatgatttctctgtataacatacccatcaaatcagagtgggtatattcagtggcctgaaggggactcaaggtgaagattctcctctacatctgactttagaaaagacgttccacctgccttgtggttcagaaatctagtttcacacagttcatttcaagttagagggaggcattcaggatgtgtctggactagagcagcagtttctgcacatgctcccctctgtcctcattaatttgctgatgcataacttaggaaaagtacactaaaggtctgtttttcttttgccctcacaccagagaacaggctcattaggtccctccaccaagaggtttaggtagcatcaatacaaatgttttaaactcaccatctttactaagcactttatacaactgggagtccctcataaaaatctggtggccgggagcggtggctcatgcctgtaattccagcactttgctgaggtgggtggatcacctgaggtcaggagttcaagaccagcctgaccaacatggtgaaacctgtctctactaaaaacacaaaaattagctgggcatggtggcaggcaactgtaatcctaggtactcaggaggctgaggcaggagaatcacttgaaaccaggagacggaggttgcagtgagccgagatggcaccattgcactccagcctgagggacagagtgagactctgtctcaaataataataataatataataataataataataatcatcatcgtcatcatctagccagcttcactacaattatgtaggcaacaccaggaaaacactggaatcacagttgataaaaattaatgaattc

SEQ ID NO: 198004 - DNA, 1000 bp, Homo Sapiens
tctattttaacccctgaaaataaatacctagccttgtgttcagagctgatggtggggccacaggccagaatagaatttaatcatttactctggctctctttggtttaatagatgccatatctggcagcttaacggggatgtgtcctagttccatgttaaaaacaaaaattaaaaaaaaattaagaacgcttctttatgttctgtttacaactgtttttaacatacatttgaaatgttcatcttcctgtctttctgtgtgctggctctgaggcacccagcatcctctctagttgggagtatcccgctgtccccctctctttctgaggctgtggttttccagtgggtgtctctggcccaaatagccctatcagaaatgaagcaacaggctgggtgcagtggctcatgcctataatcccagcactttgggaggccacggcgagtggatcgcttgaacccaggactttgagaccagtctgggcaacttagcgaaatcctgactctactaaaaacacaaaaattagctgggcatggcgatgcgtgcctgtagtcccagctacttgggaggctgaggtgagaggatcgcttgagcccaagaggttgaagttgcagtgagctgagattgtgcctctgcactccagcctgggctacagaacaagaccctgtctcaatcaatcaataaaccaagcaacagccagacccacacttagactgaccagtcatgtgtttgggtaggagacggttataaagtgtcatttttccgtttgtgctatataggaaaaaatagcttgaatggcagtgctaataaggataaaaggagttgacattcgtcaagcacacacttggttcccttacaaagcaaaggcagtttggaataaaacaataaaaagtaaactttgaaataaaataaatggaaaatgcattgtaaaaatatcagtttggaattgacttgaagagttgccagatctcttccctgcaccacatttcacagtttacaaagctt

SEQ ID NO: 198005 - DNA, 1000 bp, Homo Sapiens
gtctctactgaaaaatacaaaaaattagccaggcgtggtggtgggcgcctgtagtcccagctactgaggaggctgaggcaggagaatggcgtgaacccgggaggcagagcttgcagtgagcggagattgcgccactgcaccccagcctgggcgacagagcgagactcctccaaaagaaagaaagaaagaaagaaaatagcttattttgaagttgattttgtttacaaaacaaaaagatggagggggaggtctatcccattagaaagcaagccataatatttgtcacacaagtgtgacagtattcagttatgtccctgatgaagaggatctggttgaaacaagaaagcctcaggacctttgtgaagcttgctctttaatgggttcagcctcagatgaaattctaagaactcagggcagggcagagataaaggaataggcatcacctaacactccgccatcagtggtgccaagtaataagcactatgaagtcctccatgcaatggtgtcaagggcttggcagccagcagcacaggtaggggctcggagcaccatctaccatcctccagctgggaggttttgctctcattgtggagacacaagcagagctggctcaatatctgtttgtcctgccaatctgagcctgattgtggaagaggctgtggggcattgtatgcaggaacatctggcactgccaaagaaactgagacataatagatagtaggttcgcttttggccagagaccctatccctaactttatttagagaccacaacactgaaccaaattggatacctcttgactataatgtagctcttttgatcctatctgctagaaagaactgctccctctgctaggccgtcacagcactggaatgaatcctttcctccatacttgtgtattctgttaagtggtccaataagttaagccccttgagggactcattaatttgcatagggaaggtgttcaattcatgttaggcaattctgcctggtatgaagctt

SEQ ID NO: 198006 - DNA, 1000 bp, Homo Sapiens
gctaattttttgtatttttagtagagacggggtttcaccgtgttagccaggatggtctcgatctcctgacctcgtgatccgcccgccttggcctcccaaagtgctgggattacaggcgtgagccaccatgcccagccaagaagtgtttttggttttgttttgctttgcttctttttgagatggggtcttgctctgtcacccaggctgaaatgcagtggtgcagttagagctcactgcagccttgacctcctggtctcaagcgatcctcccacgtcagcctcccaggtggctgagaccacaggcatgtgccaccagacctggcaagtttttctactttttgtggatatggggtctcactgtgttgcccaggctggtctcaaacctcctgggctcgaaagattctcccgctttagccttccaaagtgctgggattacaggtatgaaccactgtgcctggcccaagaagcatttttatgcctttgtttttgacttctgctgaccttaccttccagcctgcctcccagtcctgaacacattgcagatggcccacaatcacctggagaccgtggaggacattcagcatctacaagagtgtttgaggctttgtgtccttgacctttcgcacaacaagctgagtgacccggagatcctgagcattctggaaagcatgcccgatttggtaaaaaacaaaaacaaaaacaacgaaaaagcaccacaggaaaccgcttctattattttcatcaaatatcaagtccttttgtcttttctctccttcctgccttccttccctttttcacacttttttcctctttgtgtttttagctggagtatctgaaatgccagttatcgtattattttacccacaaatagttcagtgtgtgcctctaacagataaggactttttttttttgatatagagtttcgctcttcttgatcaggctagagtgctgtggcatgaactccgcccactgcaacctctgcctctgggttcaaggaattc

SEQ ID NO: 198007 - DNA, 1000 bp, Homo Sapiens
tgtgttcatctgaaagatgctcccttgcctcagaagagttctgcaacaggttggggaggcaggagagagctagacttggattcgggaggttgggacccttcctggctttgtcatttcttctttgggcctcagtctccccatctgaagggtggtgagaagttagctaactgtaatatccttttttagttttaaaagtttgagatctatattcacctaaactattcctcactttattctcctcacccaccatatctagaagttctaaacacaattctaaaaagtttaaatctgtttttctcttgtttcatcttagtggcctgggtggcagaaccagggctttctgcgtagccccagtagttggttttgtttttttttaaagagacagggtcttgctctgtcacccaagctagagtgcaatggtgtgatcacagctcactgcagcctcaaactccagggctcaagtgatcctcttgcctcagcctcctgagtagctgagactataggcatgcaccaccacctctggctaactttttgaattttttgtagagacagtgtcttgctatgttgcccaggctgttcttaaactcctggcctcaagtcgtcctcctgcctcagccttccaaagcactgggattacagaggtaagccactgcatccagcccctagtgttttaagtagaccaaaatttgtgccatttttctatgactatagcacaatttcaaacatgaagaccccagtctagcaagtctttgcatggcttagtttttaagactttgggctaaaaggcaggctgagcaagttggataaatgcctttgtcttccattcacagggttatagacagagtcacaaataaagccaccaaacccagggtgtatccaaagtacccaccttcaccagtgctgggccaggctttgctgaggacacagtgtttgtggggaggacaggagctgcaggccgtgggggaggctgatctgcagttggaggagttttcaagaattc

SEQ ID NO: 198008 - DNA, 1000 bp, Homo Sapiens
ttaaacaagatgccaataaatggagagataaagcactgcagtggatagataacatcacaagatacccgttatccccaagattatctatcgattcaatgaaatttcaatgacaattttaagaagtctttttcagggaccttgatatgttgataaaaatttatagagaagagcaaaagtccaagtatatccaagaaactaagatggaagagcttattctgctagatatcaagattttactgagggcaatgtagtgttgacacagggatagaccaactgaccagtggaatacaatagctcagaaacgaattcaggcattaatggaaacttgacgcatgacttgatatatcacgttggagaaaactggagaaaagcttataatgtactcagacaattttaatccccataaagacaaaacaattaatttgggtccaaaccctacacaattgacaaaaagcagttccagcaagaaaaaagacaaatgagcaagcaaaacatgaaagtcttgataagaatatatagaacatctttgatacttagtggtagaagaggatttcctgaatacaaatgttgcaagtcaaagggaaaagattggtttattaattgaaagacaccatgaagaaagtgaagtgaaaagacaagcaacagaattggaattgttatgtgcaactaagtaactactataaaaagttaataaaacataagaaaaatacaaagcacctaacagtgggcaaaacatattgacagacattttatagaagaggaaatgtaaacatcaaataatattcaaagatgctctacttcattaaaatgtaataaattcaaaataagacctcattgacgtaccattgactttcattttgtgtgtggttgtagaacaatgggaatccttaatgcactgttcatgtgagtagaatttatatttataaatacagtaaacttaagtttaacttagttgttttaatactaaatataaaatgtgatattttatctaaatgaattc

SEQ ID NO: 198009 - DNA, 1000 bp, Homo Sapiens
ttcctcagcttaaaattagacaaccttctttaataaatattgctatttttattgatgtcttcctcttaaccttcccctaaaagattcaaatcaatctacctataatgttagatcagatttccccttccactgcacagagtcaagtactctgtctgtagaagtatccttagataggaaaaggcatgagaagagtatctttttagaaaaaattttttaagaagtagtatccttagagacattacctttgtcccaaataattaagaaaagcaacatactcattcatgttatttcatgtaccatttaacttacttattgtacccttaaaatacatcactgttctttatctctctaccttcacactcaccagcacacacacagtattataaactcccaggagggcagagatttttgtctgttggttcactgatgtattataatgcctagaatagcatccaggagatagtaggcactcaatatttaataactgaatctgtcttaagattcttctttctggccgggtgcggtggctcacgcctgtaatcccagcactttgggaggccgaggcaggtggatcacaaggtcaggagatcgagaccatcctggctaacacggtgaaaccccgtctctactaaaaaaaatacaaaaaaattagctgggcatggtggcgggcgcctgtagtcccagctactcaggaggctgaggcaggagaatgacgtgaaccaggaggcggaggttgcagtgagcccagattgagccactgcattccagcctgggcaacagagcgagactccgtctcaaaaaaaaaaaaaaaaaaaaagattcttctttccaatgaaggacttcttttacagatggttccatctttgttcattctagcacaattagtttctccctcccatgtcttttttcctcctcctctaccctttcctttgtttcttctatgcatgtggttaagagggctcttccgtggtctgtgccttttatttattttgtagaattc

SEQ ID NO: 198010 - DNA, 1000 bp, Homo Sapiens
tgcccggctaattttttgtatttttagtagaaatgaggtttcaccatgttagccaggatggtcttgatttcctgacctcgtgatctgcccacctcggcctcccaaagtgctaggattacaggttgtgagccactgcacccggccatgaacccgggaggcagagcttgcactgagccaaaatcgcgccactgcactccagcttgggctacagagtgagactccgactcaagaaaaacaaaaacaaacaaaaaaaaaaaacaccttagaggatttgaggacagacacaatggaactattgtcaacattgttgctacaaagaaaagggaaagtgaagagagaattcaaccacaaagaagggtaaagatgagaaaactatttagcaacagagccaaaataccgaaaacaaaagaaaacaaaacaaaaaagccaaaaaaaaaaaaaaaaaaaatcatacccttcctctggactttacatttccttgcatcattaaatctcctttactatttaaactggttttcgcagggttttctcttatttgcagctgaacgtttcctgtgttaatcattagaacgcatttatcaagtgttatttccactagctatttattatgtttataaatgcaattagaaatatctcttaagctgcttgatcacatctctgcaaagccagccctaggtctaacaaaaatgtttccagttcaaaaatatccttttattttgcttgggccaatttgagttaaatttactgcatttcattattctctttttatttaaatcaaaattaccatctcaatctattgtaataattggtttattcattatctagcccaattggtctataagctctgtgacagtacgcactctcctgtacatcaccatattgctggcaactaaaatactcccttggtctataggagatacttgaaaaatatttgcaaaataaatgaactagtaaaatgtatcatatctctagaaaatgtgcaagaaggcagaatgaattc

SEQ ID NO: 198011 - DNA, 1000 bp, Homo Sapiens
aaaaaaaattagtcgtagggtggaacgcacggttgtcatgcgccagcaagagagcgccgggcttggtggcaggcggctgtagtctgagctacttgggaggctaaggcaggagactccctcgaacacaggaggcggaggctgcagtgatccgagatcccgccactgcactccagcctcggtgacagagaaagactttgtctcaaaaaaaaaaaaagagattgactactatcttctactatgtttactaaagcagaagacacgtgaattgacaaaaacatttgtgatttgtcatttcggaaaagagtcacagagcaattacgtaatttacttaaggttagataggtgataactggcagaaccgagattcgaatctaagcagcctaattccagaacccatgcaggtaactgctacgtgctgcttcatgttgagttgttaaaggattcgtgatgttgggatcaccctggtaaattcagtagcgtaaacgttgctgaaaggcagacactttccacacttagccgttggttattattctgccaattacagcttacagagttcttatctacaatattttgcaataagttaggagctacaggctgtacatacaagaaatttcaggctgaagtggaattgctacaaaggtcgaagcaaagtgctggggactatcagaggaactgaaagattgcttttgggtttggagatcacgtgttgttgttgttgtttttggagacggagtctcactctgtcacccaggctggagtgcggtggcacaatctcggctcactgcaacctctgcctcccaggttcaagcgattctcctgcctcagcctccagagtaactgggattacaggtgcacgctgccatgcccggctaattttttctagtttagtagagacgaggtttcaccgtgttgcccaggctggtctccaactcctgagctccggcaatccgcccacctcggcctcccaaagtgcaaggattacaggcgttttttaaagctt

SEQ ID NO: 198012 - DNA, 1000 bp, Homo Sapiens
gccagctgctatgcttagggttcgggatacaaatgtgaataagatatagtctctcccctcccagccccacaatcaaatcagaggatcatcacataaagaaaagaattctcagcacaaggacggggacacatacaccgtagagtggtgcatgggaagaactgactcattcctcttaggactgctgggaggcttcacagaagaggagccccttgggctgggtcttgaaggatgagtaggagtttgccagatggatctgtgggcaggggcgttccaggcaaaggaagcagcttgtggaaaatcacaaaggcatgaaccagcttggcacattgtttattgtttggggagctataaatagccgctgtgtggagaaccgagcatgtgtaggaggataatgtaggattaagctgctgggcagagggtcccgtctgaaaggccttgaaggccaggctaaggatattcctccagaggctgatactactccaaaatgtccaatgaagtagcactcactaatactcactaataatggaagctgaatacagaggagagatgagtcatgccacaatcagaggcgcaaggagagttcgccttttgcatgtgggaaatttctttgaaatatcttgttttatgttaaaaattcatgcagaatttttcattctactttttttgtttgtttgtttgtttttgttttgttttgttttgtttttgagaccgagtctctctctgttgcccaggctggagtgcagtggcacaatctcggctcactgcaagctcggcctcccgggttcaggccattctcctgcctcagcctcccgagtagctgggactacaggcacccaccaccacgcccggctaattttttgtatttttagtagagacggggtttcactgtgttagccaggatggtctcgatctcctaacctcgtgatctgcccgcctcggcctcccaaagtgctgggattacaggcgtgagccactgtgcccagcccgatttctggaattc

SEQ ID NO: 198013 - DNA, 1000 bp, Homo Sapiens
cacacctggcgaatttttttgtatttttagtagagacggggtttcaccgtcttgaccaggctggtcttgaactcctgacctcatgatccaccagccttggcctcccaaagtgctgggattacaggcatgagccaccgcacctggccattatactctatttttttggttgtattatttttttttctccaaatattttcaatctatggttgcctgaatctaaggatgtggaaccggcagatgcagtaaggcccagctgtagagtgaatgcacagagcaggggctggataatcacctgggacaagcagcctggcgaaggggagagcatacagcctttggaaccagatttgggcttaaaggcttgttccacacttacgggctacgggtcactgaggatgctgtgcccggggcccttgttctccttccaagggccagtaatagtcaccctccaagggacggtgtgatgagcgaatgtgacagtgctcgtgaacacctataagaccacctggcgcacaacaggtgcggattatgattattactgggggaaggaaagactgcatagaaggcagtgcctgagcacaaatcagaaggagctcacgagcataaaaggtgaggaaggctgttcccagcagagggggcagcaggcacctggcaaagaggtgtgacaaagaacagtgagcccagcaactgcacgcaggatatgaggggtcaggggagaggcaggggcagggtgtgtgtctgtctgatgggcgaagggggtaaattttttattcttaaggcaatgaggaataacgaaaaggtttaaagtagggtgagatgtgatcgtaccagcattatagaaagatcatgctggcagctatctggaagctggacagggtttattttgcacctgttaaaagagtccatggccaactttcggaggcaggaaattcatacctaaaagtaacgattatcactcccctagaggcaccaattctacatgtgacatgttctctccttgtga

SEQ ID NO: 198014 - DNA, 1000 bp, Homo Sapiens
cccatgcccattagtagtcaatttcattctctcctccctccaaccttaggcaagcacttattatttactctctgtctctatggatttgcctattgtggacactttacataaaatggaatcacacagcatcttacctttttttttttttttttttgagacagagtttcactcttgttgcccaggctggagtgcaatggcgcaatctcggctcaccgcaacctccacctcccaggttcaagcaattctcctgcctcagcctcctgagtagctgggattacaggcgctcgccaccacgcccagctaattttgtatttttagtagagatgggggtttctccacgttggtcagtctggtctcgaactcccaacctcaggtgatccacccatcttggcctcccaaagtgctgggattacaggtattgagccaccgcgcccggccagcatcttacctttacatctagctttttttttttttttttttgagacagagtctcactgtgtcacccaggctggagtgcagtggcaccatctcggctctgcctctgcctcctgagttcaagcgattctcgtgcctcagcttcccaagtagctggggttacaggcatgcaccaccacaaccagctactttttgtatttttagtagagatgggttttcgccatgttggccaggctgatcttgaactcctggcctcaaacacctgcctcagcctcccaaagtgttgggattacaggcatgagctaccatgcctagcacacgtagcttctctgatgtagcataatattttccaagtttatccacactgtggcatgaatcagtactttaacttttttatggctagataatgttccattgtgtagataaatcacattttgtttaatcccttcatcagttgatggatatctgagatatttccacatttcggctgttatgaataatgctgttatgaacgttcgtgtactagtttttgggcggacatgtgttttcagttcatttggaattc

SEQ ID NO: 198015 - DNA, 1000 bp, Homo Sapiens
atggtctcgatctcctgacctcgtgatccgcctgccttggcttcccaaagtgctgggattacaggtgtgagtcactgcgcccggcctacagctcttccagtcttatcagctcatacctcttttgtcaggaggccaggttaattcactttgtctagcctcaatggatgcatattttcctattgtgcaggtaaaaagcataagttcaatttttctaactcttccatgtgggcttggaaagaatgtatatttaaggattattgggtgcaaagttcttttttttttttttttgagatggagtctcattctgtcgtccaggctggagtgcagtggcacaatctgagctcactgcaacctccacgtcctgggttcaagcgattctcatgcctcagcctcctgagtagctgagattacaggcatatgtcatcacacctcgctaatttttgtattgttagtagagacggggtttcatcatgttggccagcctggtcttgaactcctgagctcaggtgatagccccatcttggcctccccaagtactggaattacaggtgtgagccaccatgcctggtggcaaagttctatatatggtaattaggttctaatttctgagtcatttttcaggtttgctatatgctaacttttttttcctgctttctctgttactgatagaactgtgttaactcttccaccatgattgtagtttgtgtctctttatggtgatgtcagctgtttgctttatgtattctgagacttgtttttaggtgcctgctaatttagaattgttgtgttaaacagttctaacttttaattcctatttattaaacctttatcattgtcttactctgtagtaacatgctatgtcttactctgtgttgtgtaaaattgcagccaactcactggcaagtcccagggcttcaatttttgtcctcctggctccacaaggccatcagaaatgctgctcagcttctcagccactcaggaatcctttctttttgttgtt

SEQ ID NO: 198016 - DNA, 1000 bp, Homo Sapiens
gtgattttaaccattttaagagtacaattcaatagcattaattacattaaaaattttgtgcattaccactccctattctgaagatttttcatcaccccaaacagaaactgtactgattatgcaataattctccatttcctcctttccctagtccctgatcacctctaattactttctgtctctatgaatttgccaattctagatatttcatgtaaatggatccagaaaccatctgttggttggcatctaactttctaactcattgcacttcacataatggattcaaggttcatccatgttgtaggatatattggaaatttattcatatttatgactaaatggtactataaatcacattttgttttccccattcatctctatttcttttctaaatcttctatatcttaatatcttagcacattgcctagtgcctagtaggtactccttaatgtttgttgaattagtgaatgaatgccagatattatgcaccttttatttattgtcataaaaatatgttgaaaatcaattttatgtataagtttgcagttacaattttatagtgagaaaacagggagtgaagtaactggtcatctacaccatttctttccctaaagagagacagggaaaggagcaattgactagaacatgcacagttgcctgaggcttgcttttatgatacagctttgatctattgcacaggtaagaggatagtgtttaaagggcaagatttaagataaacacaggttatagaagcttttgatactgttgttaaagagttcagactgttttatggaaaacaggtcaattttaagtattttgaggaagtgcgttatatgatatggtgtgtattctaggaaattatggatcatatatacaaggaattagagctgtaattcatattaatatgtgcatcagtctgtgcatggtgattttctacctgaagagttttacaggagcagtagttaatagagaagttcttagagacccactagtagaattc

SEQ ID NO: 198017 - DNA, 1000 bp, Homo Sapiens
ctctttctccctccctccctccctctccctctctttctctctccctccctccctctccctctctttctctctcttaaatacgtctcgaatgttttgtgggtatattcttcactcatgttcaatgcatcatttttgttttctgtcctcagtggctctcttgtttccaacacctccatccccacccccaataccagcttctgcccccagggtaggaagagggtagatttggtgattcactttttagggaaatatcattggccttctgtgttatattctcaggatgttaagtagtttggctaagtcagtgttggacttgtgacttgggtcatgtgaattttatttcttggtctgccactaattcatatggtgatagactatgttattgaactgccatacctcaatatacacagctataaaaaatgacagtagccatggcacgtttcaatcaaatgaccatctctgtcaacacaatgggtcctacgcagcataggtgcttgccttagagatggactccttggatttcttcatggaagcttgtgtacatatgcatatttgggggtcagggagagggctcataagtttgataagagttcactgtgacctgtgtgccttggggcctcaaaaatagctgttcccaaacactgctctggggagccatgaagaatttttcattgatctatgacagcatgcagaaaatactgtaagaacaatttaaggggatttccacaaagctaaatttagtaagctttaaagactacactttatttaaaatatatattttctgatttttctgctggttaatttactattatatgatttactatttacttaataatatgatttactattatatgatactgttaatgtaggttagttctccctgcccctgccccagtggcttcccttagcaaaatctaaaagttagtttcaaaaagctttttaatatttgcacggcccatggaactaaatatttgggaattacagcttttatagagaattc

SEQ ID NO: 198018 - DNA, 1000 bp, Homo Sapiens
atgcctgacaaactttcaagatgagaggcctttctgatgtatgttccagggaaatttataaaatcggcaggtagggtagtgatacaccctatttaattatcatttagttttgccacaggccacatacaatagttagggtcagcttgcaggttaagatctaaaagttattgaattttaaatgaaagatgaacagctgttacagaaataacattacgccataacaactaccaatgaaatcattaacaatctgtggattcaacttgcttctttcccattctcattatttattatttggtagacatttgttttagggtttattacatttttgttaacttcttcattatgccattagccattttccctatttatgtaaatgttacccacattaaccttttcttccctggtgtaactttcctatcatggaaaggaagactggacggcaattaaattgcctgtaaatcccacaccaatttcctttgcagaaaaagcacactataaaaaatggttttgttgctagtacatttccaaattctatgttaacaacatttcttcagatcaattttcaacaaaaattgctctcttgagattaagaatgtcagttatatgctttgatgagtgagttcttttgttggctcaactgtttgataaaggttaacattttagtagtaaaaactgtgacactcaacagatttacattaaatagctgcttcccaacagtgacctaaagataactcctgatgatatttaccactgatgacttgtccaaatagctcctctggagtatccccaaagaatggcacgcatccaaccagaaattcatagaggataatccccatggcccaccagtccaccggctttccataaccctgcctcagaatcacttctggtgcaatgtattcaggtgtgccacagacctaaaagataattgcaatattagaataattggaatattagacatgaattaaaatgagcaagatggctagtcaccaattattttgcc

SEQ ID NO: 198019 - DNA, 1000 bp, Homo Sapiens
gtggccaaagccggatagggcacaggtgctgggctgacgcagagatggagtggcagagggggtctggggagttccagggctcagctgggaccctatgagaactctgctcccagcagatctgggtgtcctgtcatttcccagggacctgtgtgtgcagaaaatacattttgtggatacaggaatatcccagaggatagccactgtgtgaagggccgaggggtctccctggcagtgcctctaacaccttggcatgtcttgggattccagtcagccagccgggctctcctcggacaggactcctcttgtttctggccaaaattctggtgaggatggttgtggggggaagagataagtctgtgttgggaaagggactagggctcaattccagctcagcaaataaatattctgttcaaccctctgcctgccccctacctcccacgcccccactctcccaccccccggtgcctatcaggcgacttccagccttaaggaaactttgcagtgtgtcccaatcccctgagcacagccacacctctgagcctttgcccagacagttgtcccaacctgaccacctttcccctctccagctgcctttgtcaacccccaccctggagctgggtcaggtgccatctgtccccaagtcagcgtccatcatgtcagcttgtctatgttcatctggggtgagcctgagggcaggagctgggtccagggaaaattctaggacatgctggatgaaggaaacagtgggctcctggaagggatcaggggttgggagaggaccaactgtgtgctcagaccagctgttctgtgccagggcctcgaggggggcacctaggagcctcaggcccctcaaaccccacagcaaacagcaagagaacagggtgtggggcactctgcctgggctctgccggcgaggagcaggaactggacagaaccagagtgagctggagtgtctcctccttagcctgggccctgggcagcagggctgggaatggaattc

SEQ ID NO: 198020 - DNA, 1000 bp, Homo Sapiens
attagaggatgtggtacactgaaggtagccacagcaacagcaaaactcaaatttagctcaccttctgagtgaatcagctcaacctccaagcctgacctaagaagagatgtgccctaatttatcataaatagtatttctgtcagtctctacagttctacacatgatgtctaacattcagccaagcattatgagacataaaaaggcaagaaaaatgtaatggtggcaacagacccagactcagtgatgactcagatgttggaactgtcaggctgggactgtaattatgatttatcagtttcaaagatctggtgtgaaggtcaactaagtgggacccatcaggcaaatgcagcccacagcttgcctttgtacagcctgtgaaatacgtatgttttttacatttttaaagggttgtttaaaaaaaaaaaagaagaatatgttacagaaactatattgggacccacaaaacttaaaatatttactacctggttctttatagaagacatataccaacctttgtcctgggggaaaaggtgacaacatatataaacagttccagagagagatgggaactgtaagaaaaaataaaatgggaatgctagaagtaaaaaacatgtgacagacaaagaattgctatgactggctcattagtgggcttgtgaaaaaaatctgtgatcttgaagataggtcagtagaaattatgcaaataaatacaataagaaaaacatgtgaaaaatgagaacctatcatccaagagctataggacgatatcagatgattcaatatacatataattggagtctcacaaggagaagagagaaagaacaggtcagaagaaatatttaaagagataatagctgagaattttccaaaaatactgacatcaaaccacagatccaggaagcccagagaaccccaatcaggataaatccatttttttaaaagacattatatttaaacatctgaaaatcaaagataaaagaaaaaacacagtcttgaattc

SEQ ID NO: 198021 - DNA, 1000 bp, Homo Sapiens
tttgtatttttagtagagacagggttttaccatgttggccaggctggtcttgaactcctgacctgaagtcatctgcctgcctcagcctcccaaagtgttgggattgcaggcgtgagccactgcgcccagcttacatgacattttggttacccacctagaaccctgcatggcccattgtggacatttattcgagttggaaaactctgatgggagtccagatgggctcagttatgcttcagcagcgaacgactcccatatctcagggctaacaacaaaggtttatttctcactcaatgtatcacagattggctgtgattctactggaatattgtctcaggaacctgggctatcagtagcattgtccgtcttttagcagacttgggaacaagcatggaggcctccatggtggctgttagatctgcctgggggtcacacgcacctcctctactcccctttcattgccggagcaagtcacacagccacacctgatctcaagacatgggggaatgtgaacgccagcaagacagttgaccgcccttctttatacaacttttcccttatttctctcctgctcctgaaactcatgtacagtatttgacttttttctgatataaatactgtggcccaggagtggtggctcatgccagtattcccagcactttcggaggcagaggcgggtggatccctggagagcagtagttcaagatcagcctgcgcaatatgataagcctcatctctataaaaatacaaaaattagccggatgtggtgccgctgtggtcccatctactccagaggctgaggtgggaggatcacttaagcccaggaggcagagattgcagtgagccaagatttcaccactgcactccagcctgggcagcagagccagaccccatcttaaaaaaaaaaatctatatcatgtacccccagatatgatgtactgaaaagcacaccacattcttaccaaaaatgcataccttcatctaatcctgcacccttgat

SEQ ID NO: 198022 - DNA, 1000 bp, Homo Sapiens
actcatcttgccccaaagaaaaaaaatcttttattttctctacaaaataaggactacaatatcccagggaaaacattcttctctttcctagggtagtatggtgaacactgtttgaggtatatttcaaatgatagctcatctgcctccctttcaccccctcttctctacgaaggacacactactctcctaggcttcaaacggggactgtctttgactcttctctaatcctgacccccaaaccaatcactgacaaggcaactctgacttaccttcctgaccccttctctgtgcacctgctgggtaccatgcatccccatttcacagacaaggaaactaggagctgctttgcagatgagtgcatagcagggtgggcgctgagctcagctcttcccacagccatggagtagcttctctgccttgtcttggcttcctcacttggaacttctctccctgctcatgtacaggatccgaatgtaggcccttagcacttcctttgcaccatcgaaaaggctcttcacttgctctttgcttctttgcccaattaaactaaatcctcttctctgtgggcactaaagagtgaatgtgtcaaggtcaccaacgacctcctttttgctaaatctgaaggctacaactcaatccttacctgacctgacttgattgtggtactagacacaactgatccctttctggacacttctgtttgcagagtccacactctcctggttttccttccacttcttactactcctttctagtttctttcatgatttcctccttcctcagtacccctggtgtttccaaaggtggtttttcaaaaggttctatccttagcccttctcagtcaacaaaacctccttgggagatctcattcttcctatagttttaattaattcctatgttgccatcttaccccaggcctctctcctgagctccagacttacatcttaacttaccatttaccacctcacttagacactcctcaggcactgcaaatgaattc

SEQ ID NO: 198023 - DNA, 1000 bp, Homo Sapiens
ccaactaatgatacattgtatttgactgacatagtcctaacagacataggtttaaatttcatatgcaggaataaaattgaagttctataacaataacaatttttagagttattgtaacaattaactacatagttacccctattatcactcaataaatcgtagttgtttttctttagggagaaagctttaggggaaaagcatatgatgaattcagtcgtataaatgccccttaaatagacatcaagaccgtagaataaaccaaatcctgaagatgtatcacaagagaaaaataaaaattgctaagctcaatagaagtttatacaaacactgacatatacagaaatatgtgtgtgtgtgtactccataactaattctgcaaccctaaaatataagcacaggattaatacataaactgtaacttaccatgatttaagtttattgaaagagacagaattttctatggtccaaaggcagtcaaaggaaaaacaaaaatacctggcaggaggtgggcgtgtccacatcagtgtgatctgtgcggtgcatttccatgtatgtctgaagatagcagaagttgtagtataatcgtttattcaacaaagtatctgtcaaaaaggtcagcttttaattgaaacccaaacttgatcaaaaagaagaatgcctttcgtgctcttcatgaaatgagggtgctctgtgcattcagcttgaggaggaggtgccagcattggagtccctgggatctggggcctcagagtccctgggatctggggcctcggagtccctgggatctggggcctcggagtccctgggatctgggccctcggagtccctgggagctgggggccttggagtccctgggagctggggccttggagtccctgggagctggggccttggagtccctgggagctgggggccttggagtccctgggagctggggccatccatttccagagccacactgtctgtgagttctagattttacaattaaaggaaggaattc

SEQ ID NO: 198024 - DNA, 1000 bp, Homo Sapiens
gtggcatcactatgtctctcagaaggaaaaaaataaaggcacctttcagatgttcccccatcaaacacgaggtgcctacctactatgtgccaggcactagcacacttccttactgctcatcagatcaccagatcctggggatgcgctatcatcctactatcatcctgcttgcttaggcagaaagaccagttccttcatctctgaagcggagggagataacacactacccgcctgataggtgtcaggaaactctcctctaccagccaggagaagcctgctccaacccaacaaaccaggaactggtgtgcaaataactgggcacccgccccggcctacaaagcctccccagaggcgtgaacctgggccaggtcattgcctctccttagacctcagctgtaaaatgaggacttctggggtcccttcctgaggaagaagggctgtggcaactggaagggagaacaagaggatcccagggtcaagccacctttatctgcagttgccaaagtgcagagaaagggtaaaaagcagtcacttagagaacatgggctgaagtgccctgatctcctgaagagatcgggaggcaccagcaggctctcgtgccttccctgggagagcttccctggaggcttccccacaccttctgtttgtggagtgtggggagaagcctttacccagggcccattctattgcccagcccctgactccccactcccctgcttcctgttgcataggaaggctgatctagaggcaaaagtcagactagactgcaggtaggagatgaggcagctactgcaggagtccaggcaagactgtgataggacaagagttatggtcttaaaagagcaggcacgagtgggtgacacttcaaaggcagattcacttgacaaacttaaagaaggactctatgtttcgctttattagcccaaatgattggggaataaaaatggagaggtggtttagaggacaaaaaggggaattcagctttagatacactgaattc

SEQ ID NO: 198025 - DNA, 1000 bp, Homo Sapiens
ggacaaacaaagtgttaggaaatgaagagtggaatgaatgggttaaaatgtgatgaaacagagtggtgaatatttacatagaatccatgatgtgctaggcactatttcaagctatttgctcatacacttttaataccaatgacattaaaatgtataacagaaagattcatataaataaaaattacaacattgaaaataatattaggtgacactaaaactgtcatggaaatacacatttatataaaacataaagtaacatcaagtattaaataaattttagaaagtttgattactaatcagatgaataagtgattagcctttttatccagtaaacaaggcatacacattatttttcaaattccagagacaaatattttaaatattgaagtttaagacctaaaaatgtatcattggcttcatggaagtagatattcactaggtgatattttctaggctctctgaaattacatcagaaatatgtgaattagaatataacccataaataatatctggccacatacaaagtaattgaagatcaatttaaatagccattggattaagaaatagagactgaggtaaatttacagggtcagggaggatttaaggaggaagcactgacactggagcccaaggacctgggattacagaacagattctaccagtgctaactgactgctccagagaaaacatcaattctgttcatgtgcagctactattcatcaagaaagggattacaacttcagaaatgtgttcaaagtgtatccatactttgatgtattaatgaagtaatcacattctacacataagtactccatatggaatattggggagggggtgttccaaataaagagattgaggatttttcatgagaactcagtgtctgctagaaaatatctaagtaaaatattttacttaagtggaaagtgtggatgtttgtgcatcaaaagtttcaagaatccctaaaatatacaatggagatgaggagaaaatatcagaattc

SEQ ID NO: 198026 - DNA, 1000 bp, Homo Sapiens
ttttgttgtacatgtaatttaaaagtatgtagttctctttataagtcaaaaatacagaaaatatagccattacaatgacccttaatatatatttatttatcatgctcctcttctcccttgcctttttagaataaaataacagaataatgagaaccagatttttaaatgtcgttttgctgcaattttttttcaagcattatttgaaaagtgtttccatagcctttccactaactttactatttgatttgatcaagagaagtactttagcacatatggatattttgattctaatcaaatgtttttgttcattaattttttcttatacttgttttattttaggttctgaatagtcttttactgtattacttattcttccttaaaaatgtaatacagttgttttaaaaagataaccacactacacatattatttttattaaatcttcatcttctatcataaaactatgtacgctaattcattgtagcagtatgagttcagattctggagctagacacttacatgttctaactatggttatgctactgatttcagacatagaactttttggtattttaatttcctaatctgtaaactaagaataatgatcataatttaggcagtgcttactttccatcctacttttgagacttcctttgaaaatcataagtgaacacagtgaaatgaaggaaggaattctcagttttaatatttataatttatacaacttttttatgaatagttatataccaatggccatgacaggtcattggcttttccaatataaggaaccttgtagagggagcatcaaatagtaaggtgaagttctacaaggcaaggaaatgccagtcaagctttctttgcttcctgggattttgtcccattgtttgatgattgctccaaatggtcagtttctcaaccaaatccagcacttatgattttttttcctgtctacgggacatgtgtagaaactcttcctgatactccctggaggcctcaatcctt

SEQ ID NO: 198027 - DNA, 1000 bp, Homo Sapiens
cccatcttcttgataaataaattgaatctctgagaagttaataaaattggttaaaagtatgcacttatatatgtcaaaataagatattctttcttcctaacccatttttttctttcctcattcatcttttatttgaactacagaataagagatttttgtgagcattgaggttatataacaggaggtagtctcagtgttaaccagagaattttcctgtagacatttaagtttgtttgtttgtttgtttgtttttgatacagagtttcattcttgtcgcccaggctggagtgcaatggcatgatctcagctcactgcaacctgtctctctgattcaagcaattctcctgcctcagcctcccaagtagctgagattacaggcctgcaccactacactcagctaatttttttttttgtatttttgtatttttgcatttttggtagagatggggtttcaccatgttgatcaggctggtctcaaactcctgacctcaggtgatccacccgccttggcctcctaaagtgctgggattacaggcgcgagtcaccacacccttaagttttaaaacttaagtacatttaagttttaaaactagaaggaactaaagccccctccaatgctgcctaggacttctaagatctaatctggcacccaccaccccactaccacaaacacaccattctaacagatcctagaccctggaggtgggagataggaggtgaggggagcagagtggtgataagacttaagtagatgaagcagtggagaaggaggatagagacctagcggagaagagagctgaggtggttttaaaatattttggcaaattctttgacacagcttcttcaaaaggtgcagactaatttcctttcacttgaatgtggactggcagcagaagtaatggtgtgtgacttccaactctaggtcacaagaggtatagctttctccttgctctctcttctggaccacttgatctgaaggaagccagccactaggtcatga

SEQ ID NO: 198028 - DNA, 1000 bp, Homo Sapiens
tgttgattatgaatgtatattaaataaaaaattagtaaaactaatatatatttaatatgttataatttaaaacattataaacatgaaaagttaatgttttacttctttgtttaaaaaaatagtccagcctgggcaacatggtgacaccccatctctacaaaatacaaaaattagctgggtgtggtggcacatacctctagtcccagctactcaggaggctgaggcgggagcgttgcttgagcccaggaggtgaaggttgaagtgagccaagatcatgccactgcactgcagtctgggcaacaggggaagaccctgtctcaaaaaaaaaaaaaaaaaaaggagtgaccaatagaggtgaatactacttctaattctaatcattatttttcctagcttctatcatttatttatttgccctggtagtactctgatatagaaatgagaaagcttaaaataagagtaaaataatctttttaaaactcaatacaatatgccttttaaaagtggcatggagtaataatgcataggatggctgtctataatataatctataagtctgcctttctaaatcaatatgtgggtaacatttcccttacatctatcctatagagtattttataccaccgccagtaccaataaaaaaaaaaacttgctgagaagtttcctattgataataatatatatacttctctgaatgtatgccttacagtgaagcaatacttccattcctgcccaaatcagagcactttcaaacctgacaccaatcctggtacttagaaacctataaatgattatctcagccatgggctacataaaataaattaagttttaaagatcataaaagtaaaaccatgtgtctaaacatatggcatgttcattggcagtgtgaatgctcattatatgagaaatctcatccagtttgtcaggaaactgaatcaaatatttcctgccatgtaagccaaagagctcaaagcagtccccctaaggtttatggtgaatt

SEQ ID NO: 198029 - DNA, 1000 bp, Homo Sapiens
cttcatctctaccccttcctccttctccagttcacacctcattcccctatggcacagctccccatctgaatttctcctttccacaaacctagctgatatcttatattgcctgaaagaaaagatagcccaggctttaaaggaaaagcaaaccaagcacagaggcatcagccagcaccaatcctgcaactccagggcatgctaagggaccaagacccacgggtccaaactcctagactgatgcgcttttaataggcctccagttattttattttatttttttgagacagagtctttctctgtcacccaggctagagtgcagtggtatgatcttcactcactgcagcctctgcctctggggttcaagtgattctcctgcgtcagcctccaagtagctgggattagaggcgtacaccaccacgcccagctatgtttttaaatttttagtagaggcgaggtttcgctatgttggccaggctggtctcgaactcctgaccccaagcgacccgccggccttggcctcctaaagtactaggattacaggcgtgagccactgcacccagcctaggcctccagtttttctggcatataaataaattgttccctttgggatggcagaaactggcatttggatttccccttactttcccccttatttgtactcccacatttcatacatggtagctgcttgatgagaactatttctgacattgttcagcaaccccccccccaccccctactccccagaccaagtgtgaatgaatatgtactagatgcatgacgctggaggtaaagaggccgggggtctgtcttcctggggagaatgctgccggtgggtggggtgcagcccccaggggaacttcgtcttcttttgctcccacccttggtatctggtgtggtgagaccccatcctagaagagtggatctagtttgtgggtggagaagctcttgccattgtatcatggatatgaatcatttgtgtccttcctggttggctgaattc

SEQ ID NO: 198030 - DNA, 1000 bp, Homo Sapiens
tgtttttcatacttagagaggctctcattctccataagtaccttatttctatcattaactcttgtcttaattacccaaacacattgatgatgttttggacataattatgaattgtgatgactgtgcgtatctgccctcaaaaggcaggcaacagaaggctctatttcaatgtgttctgtgaatgccaaagataactactgagcaaaatatttactttttaaatggttatagatagagttacaataaaaattttgaaaaccatcagcatttctattgtatatattggcattctggaggagaataaatcataaaaagaaatatgctattggactctctgacctggttctaccttgacctggtaagtgcttttgtaatgacaaatcaaaaccttaaaatatagaatcctaacctccaatcgttagaaatgaccttaaagttttataatatagctcaatgcacttttgaacttcaaattataaataattattaactcattaaattcttatctagagacaactgagacaacagtatttattatcaaagatatttttgccagtccaaagacttagtggctttctgtttcatcagaatatttcttgcgatggttacaacaagagtggtttactagctacacggaagttattatagcgccactgttcatgctgattaaattgaggccacatcagcatttttttctatgaacattttttccagagttttatagtgctgtagtcaaacaaaaggatatagggtaagtaaacagcttccaaaatcttagagaaaaaatcatgactccagctccttatttcctctctccagacatctaatgcaagagagcaaaggtagcactaaattacaaacaaatctttgggtaccaataaaggaagcataaaatctgactgcatatatagctctacaaatacaaatctgtcttcagaacaaaagttatgaatcatctgtagcaacagcaaaagatttctctttgatggttggatgaatt

SEQ ID NO: 198031 - DNA, 1000 bp, Homo Sapiens
ttgctcttaagcccccactcttgggcaaggctctgtgctatgctgttttatgcacatcatcttctaacagcttctctgccacacctggagaagtgccaatatcattttcatggcacagataaggcattggatgctcatagtttaagtcatcaggtggtgactggaggagccagaaggtccctttgggcctgtcctctcaccagcatcaactgcaccaaaaagatctcattctgagtatcagggatgaacgcccccactgggtgatcaggcaaactacatgcattttaaaaaactatatcctgctgggtgcagtgcctcatgcctgcaatcccagcattttgggaggttgaggaggacggattacttgaggccaggagttcgagaccagcctggccaacatggtgaaaccccatctcacctaaaaataaaaaattagctgggcgtggtggcagccacctgtagtcccagctactcaggagactgaggcaggagaatcgcttgaacccaggaggaggaggttgcagtgaactaagattgtgccactgcactccaacctgggcaacagagtgagacactctcaaaataagtaaataaatataaaataaaataaaaaatatgtcctgtaatgaaattgaaagagaacactttgtttcttatctagttggaacaagtggggtggggacagacaagtgactgaccactctccatctgactcagtgtcagtagactctctcaaaaattagaagctggctgacatagtggctcacacctgtaatcccagcacttcaggaggctgacgtgggaggattgcttgagcctaggagttcaagatcagcctgggtaacatagggaaacccttctactacaagacatagaagaaaattagttggccatggtggcacacacctatagtcccagctactaaggaggctgaggcggtaggatcgcttgagcccgggaggtggaggctgcagtgagctgtgatcacgccactgaattc

SEQ ID NO: 198032 - DNA, 1000 bp, Homo Sapiens
ctcagtgtgcttggaccctccagagggcctggctcagagcacacagcatccagcaagtgttggctgaatgaatgaatgaatgaatgagtgaatgaatgaatgacatgaacatgtggacatctccgccaagtcctgtctatgagctgagacacaagtttccgaggtcccctttgagtgggtgttccttggtgggcagggctgcctctctctgcctcaaggagtcttgcagtcagaggctcgcctctcattcagcaaacagccctggtggaggacctgttgttagaaagtgtgcagcgctcctgggggcagcaggcacacatcagagaacatgggagggagccatggggcctgcgtaatatggggctaagatgagtgtgctgtcgtcactactaccctcatctgctgattaccgtgagccggcactgggtgaggggctggggattagcctctgcctgccctggggagcacacaggggaagagatgcaggtgaaggaaatgacttaggggctgaagctggaggcagaggagggtgatggctcagtagaagagcttgggagccacacagcctgattcatgctgcccaccacttaacaaccttgtgatctggagcagctaacttaatctccttgcatctcagttttccttctctataaaatggaatgctaagtatatttgctccatagcattgttatgaagatcaaatgcttgtaagatgcttttaacagtgcctggcacatcataagcactcaaaaaacaagccctgccactatgagttgttggatcattagttcagagcagccccagactaggcatgtagcaaatgggcaggctggcagcacaggagacaggcaggtggcaagggctgaggaactcagcctctctgaatgataagtggcttggcttcttgtgttcaaggaatgaaaagatctaaagaagtctggccagagggacactgagatgagcaatgtggttggaggagaggatactgacccaagaattc

SEQ ID NO: 198033 - DNA, 1000 bp, Homo Sapiens
ataaagtgggaactgtggaaatattcaggctcaaccctaatacttgcggggcgatttgttgagagtaaaaatggaggtccaagtaccatgtgtctcatctgtgtatatcaagtggcaaaggttttgttgttgttgtttgtttgttttgttttgttttgtgagacggagtttcactcttgcatgatctcagctcactgcaacctccacctcctgggtccgattctcctgcctcagcctcccgagtagctgggattacaggcgcctgccaccatgtcctgctaatttttgtatttttagtagagacagggtttcaccatgttgaccaggctgaccttgaactcctgacctcaggttatccacctgcctcggcctcccaaaatgctgggtacaggcatgagccatcgcacctggccttcaagtgacaaagtattaaataaaatatggtctatccttctacttggacaaatgtaccctttttttttttttttttttttttgagatggagtctcacgcccattgcccaggctggagtacagtggtgcaatcactgctcactgcggcctcaacctcctgggcttaagtgattctcccacctcagcctcccaagtagctgggactacaggtgcatgtcacacatcactaggcccagctaatttttgtattttttgcagaaactgggtttcaccatgttgcccaggctagtctgcatctcctgggctcaagtgatctgcctgccttggcctcccaaagtgctgggattacaggcatgagccactgcccccagccttaaatgtacctttttattggtcaaggctctccagagaaacagaatccataggagatatctctattcagaagagagagatttattctaaggaattgattcatgtgattttgggggtagtgagtctggaatctaccaggcaagctagcacgctggagacccaaggctgagttgatgtggcaactcaagttcagaggcagtctactgacggaattc

SEQ ID NO: 198034 - DNA, 1000 bp, Homo Sapiens
tcattggcaaatgtttgtgatatcaatttaaatagatgcatggcatctgtgaaatatgagatgctgggctccacagctagctatgaaataattttaaagccagaaactaccttgccaaaacaaattagttggtagactcttcgatctgaataacaatgtatatttttattttcaataaatagaaatatattaaatttctagcactgccacaacaaactaccataaattgagtggcttaaaaaaaacaaaaatttcctatctcagttttggaagctaaaagtataaatcaagatgtgagtagaaccatgttccctctaaaggctccagagaaggatctttccttgcttctttcaatcttctcatggtatcatcaatccttggtgttccttggcttgaaggtgcattaccccaatctctgcctatatactcatataaacctttttcctgtgtgtcctgtgtgtgcctctgtgtcctctcctcttgttataaggataaaaaatcatattggatttagaacccatcctactctagtatgtccgcatcttaactaattatacctgcaaagcccctacttgcaaatatggtcatattttgaggttatgatgaacatgaattttgacctagtatgggggtaggtttatgcttatttcatgcaattttaatctttaaagtatgtttaagctgtaaaattctgtgattccataattgtgagaccaaaaaataaactttgtctagcacaaaaatgcacaagttgttttctcaaaattagtgattttctcataattaaaatgtttattaccaaatcagttaatcctatatgtaaacattacagtacttcctcatgtttctggactttactcatgtaggtctttaatttcactacgctacttttacctcaggatagggcaaaaaagagaagtaaggaagcatctatattgttaggatcagagtgcaggaccgaggagaccaggagaggatactgatgagcaaaaaatgaatt

SEQ ID NO: 198035 - DNA, 1000 bp, Homo Sapiens
cacagatgtggaggggcaacccaccccttcactcaataactagtaagaagtactcaatacagttttgtggaattaaagtgtttgcttaaatccctacataaaaaaagatttcttaaatacatacttatcaaagcttataatttatactgttgatacaatatgaccgcacaatataatgctgacaccttaccattgatacaataattacaatagtaagtacctcacaaatgccaagtgaccaaacaaatatatccttctacttcaaaataaggcgcaattacacattttgctataggtccagaaacacctgttgattgaattaacagtcaaatgttacgactggttcttcaccaaagggtttgatttttgtatctgattgactcacatttcatccattatcaaacattttttcttgttgaggaatgcaaggttaaataatcaaatttaaatatgctttatcactcacatgaagcaaaaggcattattatttccatgttatatataacagaaccaaaggcaagagagagatgtgtgattagatggaagtgctccatgcatataccaagtcttaacttaccttcattggcagaatacttcactagtaagatgcgacttgagcttaaagcaatgaatatggcacctagcaggaatgtatacattgttgacaaggagcatattacaggatgactacagcactgtttttccattccactgttttttaattaccttaaagagaaaaacactttcatgaacgaccttgttggcagaccctaaacgcaaataccattgatcgtgaggacaaaaaaggaatttttaaaaaattttggctatgactatatcagcaccaagaaagttgaggcataaagaaactatgacaaaaggaaagtgaaaatctgataagagggagtactctggagacagaaaacgtagaaccagattagacctgctgacaaaggtagcaggtgagcaaatgacactttgcaacagcagaaaagaattc

SEQ ID NO: 198036 - DNA, 1000 bp, Homo Sapiens
ataaaagggacaaatagaaaactcagccatcagcaagaaaaggcttcttccacaggggcaacatcgtacattgctcttatcaatcactgaggaaggaggttggttactttctccatcttcagattcactagagcagttgtttctgtatgtgaatatgacatcgccagcagggtcctgtctttaaaaaaaattccgtaatctaaaattacttctcactggtttctgcatctgccacttggggaagccacctcatgaccaagtgtttcctacagccaccatggcccaaggctacctgtacaggatgcagcctcctgcagttgctcccactgtctcccaaatctggcgaacttttaggcaatggtaatggcaagtagccatggaattaattctgtgtggtaagaggcacacagacagatgatgagcagctcttctccttaaagaagtctgtgtctaattcctacgcgtggccgttgtcagagtatagctctttcccgttacctttactagccagaaacagcttgcttgctttctgaagaaagagaaatgacgcaccacagggtacatcagatgaatcagaaattacattgtttggacttcaaaacagtgtttactgactctgggcttaaacttctagtccactcctagaacagaaaccctcaaagttcaagagtggttttttttgtacaattgtttatacaaattcaacaaaggtaaaatcgcatcagggaaggtctaggaaacaccaccttacaacaatggcacttataaatgcagaactttacaactaggaaatagccatgttacaaacctaaatgagaactcaactcacacttcagaggagagaagcaaaagcaaaagaaaggctatgtgggagcatttattctacgtcttgactcactgtataaattagatctatgtaagtacaagagctcatgctggagcagaacctcctgagtgcaaaggctgaagtcgaaattttaaaatttgagaaaagtgaatt

SEQ ID NO: 198037 - DNA, 1000 bp, Homo Sapiens
tcaacaggatcagaaatgggattatttctactttagaggatagcttagaggaagtaaaaatgtgagaaaggtatgccgctgaaatgcctaaacaaacactcaaattctttaccacttgtatctacgttcaacttaagggggatttttatttggcagagaaagtacctctttttttttgttttgtgacagagggtcgctctgtcacccaggctagagtgcagtggtgcagtctcagctcactgcaacctctacctcccaggttcaagcaattctcctgcctctgcctcccgagtaactgggattacaggtgcccaccaccatgcccagctaatttttgtatttttagtagagacagggtttcaccatgttggccaggctggtctagaactcctgacctcatgattcacccgccttggccccccaaagtgctgggattataggcatgagacgccacacctggctggaaagtacctcttacaagaaaggtaatcccttctgcagtttggttactgtaccgtccatatcagcctctaagtcatgaattatgaaaattgcatgattattaatttcaggcatgtcatggaagaatgcttgaggaacaaccctacaattgtagaaatgcacaaacctgtgaggatcatctggatcacagttaggaagaaactgagtgattgcttctgctacttcttcatttgataaaacgtcccagagtccatcagtggccaagatcagcacatcatctgatccatgatcatattttgaaagatcgtagattcttacctgaaaaaaaacaagaatactaccacttaagaaattggaagcatattattctccctaacaaactgacttctgattccccttcccttttcctgcccagcctagtggttttcagatatgcattgtagggtacttgattatacagcgagctgtgtggccagggatagtctcccttggagacttgctatatagacacatggggcctaatacacatttgtgaatg

SEQ ID NO: 198038 - DNA, 1000 bp, Homo Sapiens
ggagaagatatttacaatcatgtagcagataaaagacttgtttgtagaatatacagtttataaaactcattttgaagaaaacgtaaagcccaatggaaaaagtaggcaaaagatttgaacacataattcaccaaagaagatataggtttcaaaaagcacgtgcaaaaatgctcaacataattcatattagagaaatgaagattaaaaccacaatgagaaaactgatccataccaagtgttggcaagattgtagaggaagtagaactctcatacactgtttctatcgatgtcatatcataaaagcacttcagaaaatagtctggcagtttcttaacaagttagacatacgtttattgtagagcccagtcattccactcctaggtatttacccagaataaatgaaagcattttatccatatgaccgattgtacacaaatggtcatacagtgttatttgtaatagaaaaagttgtgaacaactcaaatgcccatcaacacctgaatggagaaacaaaatgtagcatatccatacaatgaaatcccactcagcaattaaaagaaattaagtattgatatgtaaaaacatggatagatctcaaaataattacatggcatgaacaaagccaaacaaaaaagaggacatactatttttatgtaagactctagaaattgcaaattcgtctatagtaacagaaagcaagtactgttttcatgtacaagtctagaaaatgcaaagtagactatagttgcaaaacacagaataagtaacattctcttaatccctcaggttttttctcgcttcttgatttttattgtttatatcttattgggaatactgtgttctcattattgaaatgctaccaagaacaattttgctttccgtatctgttaattaagactaacttaggacaagaaaaatctccattaagttggatataactcagtgagatatttctgttcctctttctgcattttaaaaattcacatggacagataacaag

SEQ ID NO: 198039 - DNA, 1000 bp, Homo Sapiens
gttggcaagtggctcagttcaagccagtgatatgagcacttttctcagcagttctgggagagaactgctcttttagcagaaagcaaacagaagagatactttccttcccgctggaagttttattataccactgggaggcttggagctgtgcggccatatttgctaatgtaaaatggatacacttacaggcacagatctgaataattgcagagaaaaggagccaggccttagatacactttaccttgatgatgacttcatgagccttcatagctctggatgttttcagttacaagatacccacattctctgtattagtttgattttttggttatctgatatcagtttggtctggactttccactccttgcagctgaaagcctcttaattgatacaatgaggaaatgtgtggaatgcatctgcccagaacaaatgctccataactgttacttattagaaggactatcacactgcctcatgaccagggcaacacaacgaagtagtgctttcaggaaagcatcaccattcttgagaacataaccaaaggatggcaggaaggagaatggtcagggtcttactgtggcagggctggcctcggccaacatctgggggaccatttttagcgtctggattggcaaaacacccgggactgcttctggggattttactaaagatttcttgtccccctcatcactgtatacctgacttttctgtggcttctgttgataactcttaggaaatatagaaaggaagaatttttgcctttagttttatttggagttaggagaggttggggctaaggaggtggaacaagaagaatggatgggcaaacctcactctactacagcagcttctagcctgggaagtttcttcctccttctactccctttctctgaattcgaagagtcaactcatatgccagggtacctgatttattcactgtgttggtgatgtgatttgctcaggaatccattttattccttttcctgtccttaggaattc

SEQ ID NO: 198040 - DNA, 1000 bp, Homo Sapiens
tcccattttagagtaaaaaaaactaatgttggtagaattttgatgttacagcgtattaaaaagcaatatactctcaaagtgctcaaatataaactgatatgtgttagcagtgcacaggtatcccttattgaatggaataattactttctagccaagatccatctatgttgaaatcttgttaattaaattctgtttactgttttcctgatattactgatatatcaccatcatgttaagaaatacatgagtttggtcacaatcgtgagaataatgtttgccctagtataaaaaatattttggtgctcaaagtataaaaaatattttggtgctcaaagtgaagctcaccttagtattatgctatttgttcttcttgtacagtcctataattttaggcttcaaagttgacttagattaacattaatacctcaaaaaggaggagcataataataaattattatagcttagcatgtgtcacacactattctgagtgctttacatatatttaattcatttcatcctcacaacaaccatttgaggtagagacattattattatcatcctactaaaactgaggctaggaaaggttagataacttggatagggttacatagactgcagataattcagctgagattcagtggttgtccaaccccaacgcccatcctcttgcccctctaccaaatccaagttatcatcactgtcctctgagagcccagccccacagactatgattcagtaagaaccacacctcctcctggccctgctggaatctcccttttccacttcactgggtgtgtttgcatgtgtgtgcatgtgcatgctcttctcttccaagcccctcctcgttttgtgtaagttattaagcagagcatctgcagaaagggaatcagaatgtgctccaataacaacttgggttaaaagagcaacctttgtggaaagatgttaaaaataacttcaccttgtgtatgattgggtcctagagctggtatcaagcatgagg

SEQ ID NO: 198041 - DNA, 1000 bp, Homo Sapiens
tattaaaacctacgatttttaatttctttttttatgaatttttagtttggtgtataaatcagaattacattctctgatcttttacttttaaaattacagtgatgaactgactgtttaagaatcattctcatgattcattcgtctgttatgcctcctttttaaagcttcagcactgaaggtcttttgacaaaccaatatttataacagtttgacagcaggatgaggaacagcgtttgtctttgtaacagcttgaagaaagaccctttccaggacccagtcatgcagttacaatcttgacctctttcttatgctgggaacatgcatacagcagcacctcccatgtgttttcttgtcccattgactgtccattcacttcccatctgttttgcagtcttaaaggaacagaaggggccttcttataaatctgtctttgcaggtgataaatgatgcctacctctttaagagctgcctgggtggttttccttttcttagaacatttctgctttcctcctaactaaatcagggaaaaatacaattttaggaataagagaaaaagaagaaaagatgaatttttaaagcatttaattgactaagaatattttactgatcttttttaatcttcccaattaattgcctaaatcatattttttaaaatgtattatcgatatttagatttttgtcagggagtaaaatgaatgtattcattttgaaataatgtaactcttttttgagaaaacaaagccatgtatcattaatgagttaacatataaaataactttttaagttttttgtgataatttaagtgtggagcatcttatgtattggatacaaaagtaaaatatttcagagtaaatcattgtaatcttatggtaaaatctattcattttttacatttaaaaagatgatcataaatcccataaacatttatgcttttacttctgttgctgaaaataagtattgtaggaatagatattgatatcattgggttttctaagaattc

SEQ ID NO: 198042 - DNA, 1000 bp, Homo Sapiens
ctatccagctctgtattcgcctcccctctttgggctactaccctcaatattcactttatgttcagcagttcttgctagggtttgtaactcttttcttatctagacagtttcaccctgaaacaggattttgcatctgcacttgagcttgctgagacctgcctctggctctcagtctggagagaatgagaggtggtgaaggttagcttttcttgaggaggacgggcatcaccttgggaagccactgcttcaggtgagattattatactgtacaaccagcaagtagagtctagtcttctctggcaaaggtgaaggtgtcacatctttggggaaggagggcttacaggaatttggagtttctagatgctcagcttcatccacctaattgtctccatcccaagtctgagatttctacattttccctatcaggaccctaacttgacatagcatacttgccaaggctatgcatttcatcttcatggcagctccaaaacccttagaatcagattctgaacctgattttcacacagttttccctgatgttgcaggaaacaaagacctcctttaatattgccatagaagtcacctggcttttagagccattaatcaacttccttgaccctatcatttatttaaatgtctttagtgctgccattagtagccatcctagtccaaaagcctcataggtgacattgcttctgtattagtccattttcatactgctgataaagacatacccgaggttggacagtttacaaaaaaaagaagtttaatcaacttacagttccaggtgcctggtgaagcctcacaatcatggcggaaggtgaaaggcatatctcacatggtggcagacaagcgaagagggcttgcgcagagaaaccccactttttaaaaccatcagatcttgtgacagttgttcactatcatgagaacagcatgggaaagaactgcccctatgattcaattcctcccaccaggcccctcctacaacatgtgggaattc

SEQ ID NO: 198043 - DNA, 1000 bp, Homo Sapiens
gcaatgagtccctactggttttttttccccagccttaccccagccctacccagtgcttgatacaggcctgggcataaaggagttggtcatccagaggaggcctggaggtagcttgtgggtggtctgtctgtctgccctcttgtggttggtgctgctcaggtcccgatagacggtgggagttagaagcccaaggccctgcaccaggatgcagaaatggggaggcagcagttggtacaggaagaacatggcttcacacactcagtcccaaacccacctgcctcacggccaggcattgagattgcacccacctctctcacaccccattctcaagctgcacatcctcattttgtggctacacccgtgcacatgcgggcacacacacacctccaggtcaaggcagccctccatgttgatttcaacttgatttcatctgtataaatgccaggcacaaaaagcacagcatggagctgtccttcagaagcccgtttgaatttccccaaagataatccattagatagggagtgggggaggcacacaggacagaagaaacaacagaaatcccatctgtttaaggaaaaaaggcatttattaaatgattttcagttgagcccttggtcagtctctgcgaggactagagacccaaacataaaggccacaccaccaggacccaatcctaaagccaccctgcaggactggccatggggtcaccacggtactctcagccagcacactttctaccatggacgctgggcaccgggtgccaaccctgagtcccgcccacagctgcccctgggagagggggcccagcagctggcactcctgctggacgggggtctcacagcatctgcttcttcagacgcctgactgcaggctgaggtcccacgtgagcatatctgctagcagagctgaggtcacgtgactgagctctggctgccgaggagcaggaaaaccagtaagtggcagctgccttagaagcgagaaactcacacgtgaggaattc

SEQ ID NO: 198044 - DNA, 1000 bp, Homo Sapiens
cttctagagttaaatttctttttatttttcttgctatgttacactgtctgggactcctagtgcactcctaataaacatggtgatagtagatagccttatcttacttctaaattcaggggtagaactttcagtattttaccactttgagtatttcttactaggtcagtaagctatgtttgtttttaatcccaaagacttcaaaactttttttttttaaattctgattataactagaaatagcagtgttgaagttgtcttagatcttctattttaatttttcatttcatctttcactttggatgtgtagtattcgtagatttttattttatgtggaacattgagtctttacaaactcactacatttttttcagtaattaataagagaattactgtgccagtgtgacattggaggtattttggggtttcaattaattaaatgttagtgggattttcctttcgtgtttttcatgattcactagttttagtttgaacttttgatagtttatgtctgttgagttgattggtattacttttaagtgtgttgaatgttaacactttggcattactttagtttagcggttctcaatcagggacagttttgccccctaaggaatattttggtaaggtttggagacatttttggttgtcataactgagggagaggggtggtggtactggcacatgatgggtagaggccagggatgctgttaaacatcctatatacataggtcagcccccacagcaggcattttctggcctaaaatagtgctgaaaagccctgaactagtttactgcttcatttgaaactgaagctcacaaatgtgaagtgactcgccattatttatttttagtatagttactatacttcctacatttatgaataaaaatagttgtcataggtcaggacactgaggcatgcagaggttcatccatgatttaatttattgaataaacatttagcaaaaggtaccaggccttattttttttaagtagggaattc

SEQ ID NO: 198045 - DNA, 1000 bp, Homo Sapiens
aataaattcctccacctctctgggccgccatttctgtgtctagaaaatgagggaactgaaccttaaggccctttccaggaccaatattccaggagttcaagcacattctgaatgccctcgcaatgggtgttccaaatctcctatggtggaagtcaagcaccagaatgaactataccccaaagaggatggtcacctgactcccccattcaggattaggccttttaggggagacaaggctatactctgatctcacacaaccccctgctgactctaagtacttcctcgagcacagtcatttatttctgccttcctgcagagcaaagggtgaaacttgccttattgaagggacattgaggcacagagtgatggaaaagctcagagacatggacagctcatctctcccgaactcctgtgcttcgtcctcgagtctcctgcataacattgactcatgaggagctgtcatctgtcagaatgaatggcggaccctggaggagacctataaacaggccaacccctttttctttactattttgctctgagcttttgttgcatgtacctgccataggagcaatttgcccaggccctgcactcttgagaaggaaagctctccttcttaaaggaatttggaatcttcatcctttgtgtttttattacatctgatcatcatcccctcccagtgaagtgataacatctaataagccataacttcctggactcagaggcttggaactcagttgtgaatcaccacccatgatgttactgcctggttatcgcagtatgaagtgacatacaaataagaaaagtccttatttgtgagacttgagctttgcagcccagttttacattctcccttccctcccccttcagattttgcaaagaataggtctatgatgacagcctcagctctgcacacacctccctgggctcctaccttctcagctgcatagagttgtgactttcaggggttattaataatcacctgatctgtcttggggaattc

SEQ ID NO: 198046 - DNA, 1000 bp, Homo Sapiens
ttatttatttatttattttgagacagggtctggctctgtcacccaggctggtgtgcagtggcgcgatctcactcactgcagcgtccacctcccaggttcaaactgtcttcccacctcagcctcccgagcagctgggactacaggcgtgtgccaccacacccagctgatttctgtatttttgacagaaatggggtttaccatgttggccaggctggcctcaaactcctggcctcaagtgatcctcctgcctcagcctcccaaagtgctgggattacaagcatgagccaccgcacctggcctgttattttcttttaacttactattctaataaatatgtagtggtaactcgttgtggatttattttgaattttcttaatactgaaaccaacccaactgtcccatagaggtgatgtcgatggtttcttttgaataaacatagaaattgatcctcccagtcttaaaacttgagagagttacatttgtcttatctctgagttcccttctccggaaaccagccatcatgtctcccagatagtgtcaaggagctgaaactcaccagatctctgcatttggaaaatgagatgctggacccctcacccgttatgactgcctaacccaccacctgcttactgctgaccaactctttcttaggcctctctatttcctgtttcccacaagtggtttacatttctcctctgccatataagcccctgattttagctggttggggagatggatttgacactgatttcccatcacctcagctgcagcacccaattaaagccttcttccctggcagtacttgtctcagcgattggctttctgtgcaatgcatggcaggacctggactgaagccctggattttcagtaacatactcacgatgctgagcattttttcatgtgctccgttgacagccccgtgtctctagtaaagctcaaatcttttaccctttgctttattgggttttgggggttttttattgttatgttttgagaattc

SEQ ID NO: 198047 - DNA, 1000 bp, Homo Sapiens
gtggctcacacctgtaatctcagcatttttggcggctgaggcaggaggatagcttgagcccaggagttcgagaccagtctggggaacatagggaatccccatctctacaaaaaaattatttttatttaaaaatctcttccttaatgaataaataaatcaaatattcaacttcttcatctgtgaaagggaaaacctagcctttcaaagttattgtgaggctttcagatgatttatgtaaactggttagcacatgcctagcaaattacagactttcattaactaataatttaggtgctatcgttgctgctagttattcaatcaacctaaaagcagccccactgaaacaaagccagaggactggaaatgcagctcttaaagagtgttgccatcttgttgtgatgtattattccttctgcaagctgcctctgaggttccatgtcaatgaggtttatctccacggacatgtgggatgagagacgaagcatacaaagtggtgtgtgccaaaacttacttatggtcatcagttcttagaaaataaggtaaggccaagcacggtggcttacatctgtaatcccagcactttgggaagctgaggcacacggatcacttgactcaggagttcaagacaagcctgggaaacctggtgaaaccgtttctaacaaaaatgcaaaaaattagctgggcatgatggtgtgtgcctatggtcccagctactcaggaggctgaggcaagaggatcacttgagcccaagaagcagaggttgcagtgacctgagatcatgcaacagcactccagcctggctgacagagaccccatctcaaaagaaataaatagaaaacaaggtaaacaaattacatgagtgggaggatgcactaagtgtttgggagggggttataatacaattggttgcagaaagcggggctgggtgtagaggtggcagagcaaatatgaaaaatgggaaggaagttccaagggcaccttcatatgctttgcagaattc

SEQ ID NO: 198048 - DNA, 1000 bp, Homo Sapiens
tggtgggctggtcagccatgccaggcactcagagtcatgcctgcatgggggctccaggacctcgtcatcagcctcttcatccttactgtctggtctgttccaaaggccgcaggccccagaaagacggtgacactccaggaggttgctagacctggcgggccccagggccaggagtgaggggcggacgtgccactctgcactgctgtccctctccacccaggccttggggctcccagacaaccatgaaattacaaggcaggtttgtagatgcatagattatttagttaatgattatggttttaaatggttaattatggaacatcagatacctataaataagtgtgaaacatggactggtcctcttgtgtctgccaggggttgcctcctgactgggtgggagcctgcttgggggcccaagtctgctggcatccccgctctgtgtggctccatcccctcgcctgggggcagtggacggacaggtggcctttgcccgtagtgctccccagaccctgttgagtgcctggcaaagatgtaggtgggctgcacctccctttgtgtggaaggttccagaaggaagtgccaggtgaccaagcctgtgtctgtcctgggttttcttggctcttcacccaaacacttcccttttttgttgtttttgttttaataaaatttttttggacataatttcagactgaccccaaaattgcaagaataataggaagaattcccagacacctttcacccaggacccccatgtggcgacattccctgctttgcctttaatcctttcctctcattctctttccctgcacttcttcctaaactgtcagtgtgtggcagacatgacatccctttacctctccttcagtgtgtatttcccccagacaaggaatttttgtatcaagttatcaaaatcagaaattcacgctgataaaatcaaatctacagaccctattctgactttgcagtaatgtccttaagagtcagaagagaatccaggatc

SEQ ID NO: 198049 - DNA, 1000 bp, Homo Sapiens
ctgcaaggtgcttgatgccctgtgaggttgcgcccagtggggatccaagatcaaaatggctgcactgtcctggcaggaagctccattccccaaagggcctcacccctcccttgagcacctgccaggaatcactgaattgatctctaatcctctcatgtaactttaggaggaggaattaccattccccttttacagatgagcaaaccgaggctcagagaggtttaatcacacatctgaggttgtttgtccaaagttggtgggagaggctggatttgaaccctgttctgtcagcctacaaaatatatgcccctttccccatgttatgagcctcctgtgtatccatttccagcaccacatagtgatcaatctctgccctagcttggttcatgctggtctctacaaaacctttattactggtgcacgtatatgactgcactttgcaaatgcctttcacatacttcctctcttttgagatgtacaactaatctgtgaaataagcagggatttctgtctctacttgacacatgaagaaactgaggcccagagaagttgataaatcactttactaacctaagtcacacaggctatctgtgatggagctggagctgaaaccagggcctgctgactcccagggaggtgatgttggcccgtgaacctggggtccacttctgaatctgcacctgttttctgcatgcccttggatctgaaccttgccgtctctaggcttgtttctgcctttgtacaatgagtgattggactgagtgacctcgaagttctgagcagcgcagacacctcaggcattttggttggtgccatcttccttcctctgcacctggaaaggatagggaaggaagaggctttgaacctggatactgggccacccctgaataaagctaggccctgggagctgttccaccccagggtgctggtcacagtccagggcagatgaagatgcaccccattccactggccctctctggacctaggggcagaagaattc

SEQ ID NO: 198050 - DNA, 1000 bp, Homo Sapiens
acaacagatcaagactgtcaaaaaaaaaagaaggatcagcaaaaagagacatatataaactttaggccccagaaaatcctagatccactccttcctgaagatcttggggcccatgggaaattgtaaccttcctgctagggaataagaaaccaccagcttgtggatagctaagttcattgcatccctatccactgggagagggagctgttaattgtctgagaagcctacagtgagttctctgggtcacttttggacaattcttgaagtgcaatactgaaaaatgaaaaaaaaaaacaaaccctctctctttagcagtgtattacttaaaatgcttaaacactcaaattaaattttagaattgtaaattttagctattaaattaaatagaaaaacaaggccaaagaacacacacacacacatacacacacacacacacacacacacacacacacacacacgatagtattgtattccttttcaatgaaagctgttgtcaaaggcatttgaaccagagtgactccatcttgaataagggctgggtaacatgaggctgagacctactgggcagcattcccaggttaggcattcttagtcaataggatatgtacagttaaggaaacaagttaataatgtttaccgaacagactcaggacttaacagacacagaaaataacaaacttgggaaatgtcctgagtcccatatcttaagaacaaaagcattcttagtttaatatattactgcagaagacagtagttacacaaagattaacaatccgttgttacacgcccttgtaggacagcacatctccccattggtgtgttccccatttttttctttttatattatatataaacaagcctctacctaaggtggatgtgttcctcctcttgctttgtctgctcttgaatgccctgctctgtctatgtagtaaccattcttactattcctttacttcttaataaactcactttcactttactctggactcgccctgaattc

SEQ ID NO: 198051 - DNA, 1000 bp, Homo Sapiens
acttttttgctgaattaggtgagttttcaaatactgggagaatatttctccaattttttggtgctacttacaatatgacataatatgacacactttaatctgcattattaacattttctccatgcttttcttgtctatcatcaaaacaagaaatcaaggcttgatttgtagtgtttccaaaaataaacaggagtaatttctctttttctaagtaccttgttagatatacatgatatttatcagttagtagcataaatatgaatttgctggctgaaaattattactcttgctgtatatgtatgtttgtatgttttgatgtgtgtgcagatacatagttaagttggcctaccgtattactttttcacttatcaattgttcctataaacaaaaaggtgaattctactatggtgtgagactgtcagatatttcatcctgattagttatagtaaatcactttccctttctaggcctctgatttctcatctataaacttgtgagattgaattagattatctctaatgtttccttcagactctgttattcatggtgatgacagattactgtttttacatgtttgccgtttatcctgtgaaaggctgataattctccattctgtgatggcaggcttcaccgaccaatggtgtttttttctgtgcacttcagaggtttagcgatgtcaggctttgctaaatgacttgctttagctaatggactctaagcagaaatgatgtctgctattactgaccagcagcactaagggccatctgtggttctgccttctcttttcccactgccacaacaatgacaaagctccacatgaagactgctactctacctaaatcacaaatggaaaagaaggtggaacacacaggcaacctcccactgacatgtaaagtaacaagatatttgttgttgtaatccctgagaggatggatttttgttactgcatcataattttgcaagacctggttagtatatgaagtcatcaataattgaattc

SEQ ID NO: 198052 - DNA, 1000 bp, Homo Sapiens
accatagagttggtccccttgaggcaaggagcctggccttttgtacccccattgtcagtcactcactggcagtgggtcagtgataacccccagggaaggaacttctgttccctgaagggcaagggtaacctgccaagagcaactaatcccacagctagggatgtgtaccaccccaagaaggggatctgggcagggcatcacttattcactacacatgggaacactctcatatatgggttaacagctgcagaccaacccctaataatcctataacaagcaaagcatactatggaaagtactgcagcagccaaacaacatccatgaccttgtttgtaaaagaatatatattcaaagaataactaggaaaaaaaaaacacagctacagatggaaagaatacatctcctaactgggcttaggaaccctgtctcccctcacccaccctttgtgccatggagtggcagctggtggtggcttctgggactgagacaaggtgcccaataggggaagaactgaggatgttaggaaaatttaggataggtctagacagtctgggatgggacaagaggagccttgggttaaggtttatgtctgaggcctacttgcctgtctccttctttcttgcctcccactagccctagaaatatgcttgcctgcttatctttcctctgccaatacctgctgcctactaggactgctatcttccctagcctcctctgcagtcacctctgtccctcttcagacagtttttccaccacttttcatataacaacattcaacttcaatttccctgacattttctagtagtttgacagttaaataatatagggagggggaagagagtagacatccttcccatgctcttccccttcttaaatcaatttttaaaatttattttattttaaaatttttatttattttgagactgagttatgagtggctaatttttgtatttttggtagagaaggggttttgccgtgttgctcagactgatcttgaatt

SEQ ID NO: 198053 - DNA, 1000 bp, Homo Sapiens
gaaaagctatgtatttgagtcttcttatgtcagttcctagaagtcaaggcaaatttccaagaaagaagctctaaaaggtgggaacaaggcaaagataccaacctcagactatttttctaggacctaaggagtgcatacaaaagtctagaaacaaaagtcagaaacaaataggggctggacaggactttgttctctcctccagttagcctatcccaagcacagggtttgcattcagaatctatctaaagatgaatttcataccgcgcaccatgcaggaaagagatgctagatgctcttcatgcccaagcaattcacacgctcactctctcacctcgccaaatatcacaatatttaccaccgattgatggaagaacctccacagtccctgagtctaactccctcaccttacggatgaggaagcaggtataccgactctcagtttccacctcttccttttacctctgcgtcccacctcagtgtcgacgcgcagtatctaaccagaactctctcttcactttcaggaaatttgccccgcgatgttctgtgtgcaaggagcctattatgccagccccgggccaggaggagactgtccgtattgtggctttggatcgagatttccatgttcactgctaccgatgcgaggtctggttgacagccctgccctgccagtctgtggcaggcgttgaaaggctcgttcgagctaggtttacatagatgtagcaattactaaatctcagaacggccttagtgcctgtactcataggacttgggttttagatttgacactagtattccgagcacatgctgttgaataagtcactgtacctctctcagtctgcttgctcaccggaagaaaggactcaagtccttaactcctccaaatatggctgtgagagtgaaatacaaaattgtatattaaaggacattgtaaattgtgaaatactaaattagtgagaaatggtgttattgaacatttaactttggctctgaggctttggtt

SEQ ID NO: 198054 - DNA, 1000 bp, Homo Sapiens
aactccactggtcctagccaggcaagatcaattagtgatttccagagctgctctggccaaatgccctgaaggagagccaggtgagctgcttaacaggttttcatgtgactagcccacttctccccttggatgagataacatccaggacagctccaattccaaagattaaaaatgggaagctggggccacagtggctcatgcctgtaatcccagcactttgggaggccaaggtgggcaggtcacaaggttaggagattgagaccatcctggctaacacagtgaaactccatctctactaaaaatacaaaaaattagccaggcatggtggcatgtgtgtgtagtcccagctactcaggaggctgaggcaggagaatcgcttgaacctgggaggtggaggttgcagtaagccaagattgcaccactgcactccagcctgggtgacagaacgagactccgtctcaaaagaaaaaaaaaaagggaagctggggccaggcgcagtggctcacatctgtaatcccagaactttgggaggctaaggcaggcagaccatatgaggtcagaccagcctagccaacataatgaaaccctgtctctactaaaaaaatatataagaattagctgggcgtggtgacgcacacctgtaatcccagttacgtgggaggctgagacagaataccttgaacccgggaggtggaggttgcagtgagccaagattgtgccactgcactccagcttgggcgacagatcgagattcaaaaaaaaaaaaaaaaaaaaaaaggaagcaggcgataattgcatcacagctttaaaaaaggcaacaacagcccgagcgcagtggctcacacctgtaatcctagcactttggaaggccaaggcgggtggatcgtctgaggtcaggagttcaagaccagcttggccaatgtggcaaaactccacctctactaaaaatacagaaaaaaaaaattagctgggctactctggaggctgagggaggagaatt

SEQ ID NO: 198055 - DNA, 1000 bp, Homo Sapiens
acactttgcctggaacatattcccctccatccttctatcaaaatcctcctcatttttagctcgactctcctcaaaatcttctcggtgaaactgtccttagtgccttcgaccagaaagaacctgtcctctgtgctccagtggctctatatcttatttattttgttcaacgaatttatgctgagtgcctactatatactgggcattaatttaggtgctgggaatacagaagagaacaaagcagaagtgtaaatgccttaatggggtgcatatggtactgatgaagaataaacactccaataaatataaaaacaatttaaggtcagatcaatataaagctaaaggaaataaagggtggtgggctaggaagtaacgggaatggggatgtcagggaaggcacagacatgcaaagagccagaggaccatgactgcaaagagccagaggaccatgaccacaagcagaaggcacacgtgggccgaggctcccatcagggaaaagcatggcatttttgagaaaagaagggccaatgtggctgactgttgttggctaagggacgtgggatgaaatgagactggtaatatagaatggggccagactatataagcagtctgtgaaggattctggattttaatctaagtgccatggacaggttttaagcaggggtgcagtggtgtgatttgacttaaggtttctctggccgctgaatgtctgtaccagagttcgttctgatttgcacagtcatttctggtgaataaagctgtccttctagttatagtgtggtcctgggagggcaatgatattttattcttattcttatcagtgcctcatgcatagttctcctcagtaaatactcgtcaaattaaattgaaacatcctgcagcctctttttctttctcgcctgcaattgtaataattgtaattgtaatacttctaatctttgtaggaagtatgcagttgccaaccagctctgaacgagttctctttttttcctatttgaattcc

SEQ ID NO: 198056 - DNA, 1000 bp, Homo Sapiens
ggtgtgtggcagaaatgttgcagaaataatttacaatcggaccatagaaaaactgcatagttttaaaatgtggcaattagtaactccactaaaaaaggattatgcttgcacaaaaaaggagaggtggttttgtcaactacttgtcttgacagtgtgtattatctgcggagtcacagtaatgcaaatctgacttcctgatgaatgtagctgagtggaaatggggtttgctgtgtttgctgtccacattgctcagcatctgagatgtagccctttgtgagagagctggtgcccgaagggggtgtctcttctgcctgtgctctgttactcaggcctgccgttggtcactccatgtgcctcctcagtgtttggttgtgtccagccctactctatggcaggacagtctgctttacttcatttactagtttcctatcagccagtttttaggggaaatcttttctagaataactttgattctagtgtgttttctagaataactttgatcctaatatgttttaggaaaaatataaacataatatgccgggcatgcggtggctcacatctgtaatctcagcactttgggaggccaaggcaggtggatcaggagtttgagaccagcctgatcaacatgatgaaaccctgtctctactaaaaatacaaaaattagccgggcatggtggtgggcacctgtaatcccagctacttgggagactgaggcaggaggatggcttgaacccgggaagcagaggttgcagtcagctgagattgcaccactgcactccagcctgggcaacaagagcgaaactccatttaaaaaaacaaaagacaaaaaataaaattataagtgcctttactagtcttgtttaaataggctgattctttctctttttttctaatgccccctaggaagtaaaaagaaagaaaaggaacggccagaaatttctcctccatctgattttgagcacaccatccatgttggctttgatgctgttactggagaatt

SEQ ID NO: 198057 - DNA, 1000 bp, Homo Sapiens
tcttagattaaacctggcactccttgactaaatctagatgttaaacattgtttactctgggctagtgtcatgttttcaactatttttaactattaccttgtttgataagcaaacaataaaccttcattccagatgtccagagagatcattttttaggtctatcattttctcacccttagttgagaattcttgcccaaggcatattgatctgagatgctgaattctccagatgataccaaagagtaaaaagctaagattcattgcattgcatcacagttgtccaacattcaagacaaaagtttgatcgctagaatatttgatcacctgatcctaagttatttttttaaaaattattactactaccatcatatgtatcattacatataatgatgtatccgtataatgatgtataatgtaatgatgtataataatgtatgatgtaatgatgtatagtgatgataggtggccttccctagtccagaaacttttttgggtttgtactgaatattctttttttcattactatgaaaaaagaatattttttttcattactatgaaatttttttcattaatttactatgatgctccattgataacattaatggagcatcatagtaaattaattaaacaaatattaggataaaaaagacaaatagtaatattcattaaataattttctaaaacaaaatcgtttagaattgtgataaagccctttcattagtaacaaatccatgttcatcctagcaacagcatgatttatcaactttaatcatatccaattcaaactaaatctttacagactgaaaatcccagccttgtcactatgtaaggatatgaaaaccacttcttttcctgaaccacttcagtttctctcctttgaactatcttcctgccttagatcacaaacatcagcgacaaaagcacaaaatgccatctcctctgctgcctctcaggccatctgcagataaaatggttctgaatgaatcagccctatgaattc

SEQ ID NO: 198058 - DNA, 1000 bp, Homo Sapiens
ttttaaatgagatgtgatcagacattttaacagttttaaaaatgcttatattcccaagtgatagtgtctcctgctggaaatcatagcttttgattggctaaaaagactgaatatggcagtgctctacctcctaccttttacacacacaaaaatgaccaactgcttctgaatgatctttatagcttgttaatgatctgtttaaggttattatagtttataaaatgttttttgttttgcaaattctggctatgtaaacataaccataaatacaagaagacaagtgtacttctagggtctgatactttctttgttgagatattaatagtgtcaaattttgtatctgaggcattggaaaatgatcaaagaattcaaaatttaactttgatagagtagctctttagaagaaagaaagcatgtggcttcattacagaactccgcttaatctcaggatctgaatgttccaagtttaaataaattctcacaagcctgcttgctttctgattgccaagtctgaacagccacaagcaggatctgacctgtacctataaacatgtaaaccagcacaaatgaaatcactaagcgacgtaaaagcaacaaggaacaagcacccgttcattttaaagataatataaacaaaatgatacctgttcttcggctctttggtttctcagcgtcgataaatatctcctaattgcatggagaggatattttttgaaataagagaatctagatggaggcaacagactatccatagtgaggaaagcaagagggtccttgtctgcacctccttgtcagcaaccatatgaaattagaaacttagcaattcctcagatgcctaaagatttgtttgtagctcgaccacttccctcctacaaacaaagcaaatgttctccttgctgtttcctcttttgggtagagttcctggtgaaaccagacagccaagtatgaacactgtctagaagcgtccagaaatgcaatgcccaaagggcaataggaattc

SEQ ID NO: 198059 - DNA, 1000 bp, Homo Sapiens
catgagcgccacagtgtcagccctccagatgaagctcccaggtcagaaacagggttaaaatgcaattgctcccttaaaggcgtcctgcagttgcagcccctcccacagctgttggacccagggcaggggtgagggtcaaaggggtcaaggaagggacgctaagcaagaccctttcttcccaagtcctgtgagaaatgcaatcatgcttgggacaaggctcaggggctctggaattgccctgcaagctgacggtctcgcactacctctctaccacagctgcctcttctcatttctctctgtatttgtgactcgttctctctcctggattttcctcacagatgcacttgagcttcccaaggctagcaagctgaggggagagcttgccaagcacggtgcctgatacatgtaagcactctgtgctcataactttaaatacaaagaacccagggccccttaacctctcagcaaacaaaatgactctttctctccctagcggtcacagactcactgaaggtgtcagagccgtcagtacctgtgagtcaatgtcttggaatggtagaaaagtggggggcacaatggaagctgggagcatcactcttgagggtctggtgggtcaaagatgagcaggcaggggcagggatgtcacaaagaccctcttggaggctctatggggactcttcttgtgcccttcttccccatgaggtcaagagaactcaaaaggggcacattccatgtcactaaggagctcaacaactttctcctcactctggcttaatctccacaaaaactgtggcgattaatctgcaggtgacccctcacccccagggctggtcccagaagatcccagtgacaggacaagactattcaaacaatcgtgggtccccagtctgaatgcctgatttctcagctagtgctgtcaggaactcaaactaacacaaataagaggctattaaacagattaaatgtaaaggcctatatttagaattgaagcatatgaatt

SEQ ID NO: 198060 - DNA, 1000 bp, Homo Sapiens
gtattcaatattcatcttaaatttgatagttcccagcatttgctttggaatttttttttttttctgtttcctgtagcacattgtatgagtctgttctcatgctgctaataaggacatacctgagactgggtaatttataaagaaaagaggtttaatggactcacagttccacatggctggggaatccccacaatcatggcagaaggcgaaggaggagcaaagtcacgtcttatgtggccacaggcaagagagctgtgtagaggaacttccctttaaaaaaatatcagatctgatgagacttatttattatcatgagaacagaatggaaaagacctgccctcatgattcaattacctcccactgggtgcctcccacaacatgtgggaattatgggagctacaattcaagatgagatttgggtggggacacagcaaaatcatatcacacaggttcttctaggatagtcactcgacctgcagtctttgccatttctttcctttatagctgtatgttttgtctttcatcatattttgcatatgttttattcagaacttctgtagtagctattgattatgcttctctaacacctctttctttgcttttgaaatatgtagtgttctgcaccaggagtgggctgttattctttttaaccagtcagagcatttccatttcatttttcagttactgatcaaagggtttgttccatttaactcaatttataccaattaattttggaaaaatgtttcctggagattccaaatgtagaatatttcttgcaattctgagaaagctacaacagccctctcctttattgtgaagagagttgtgcacatgagaattctggaattcttgtagccactttgctaccgtcagggaagacttacagatgacactgtacaaagcagaattgagtttttgatgacagagttgaaccccagaactaatccacccaaaagcccagcccagccctagaatgttcagttaatgaacaaatgaattc

SEQ ID NO: 198061 - DNA, 1000 bp, Homo Sapiens
ggttataataatctcaatatgcaatatgaggttataatcatttctatggatttaaaagtgttaataactagaaaaagcataaaactgttcattcattttttttttttttttgagacagagttttgctcttgttgcccaggttggagtgcaatggcatgatctcggctcactgcaacctccgcctcctgggttcaagcgattctcctgcctcaggctcccaaatagctgggattacaggcatgcacccccaacgccgggctaattttgtatttttagtagagacagcgtttctccatgtttgtcaggctggtctcgaactcccgacctcaggtgatccacccgcctcggcctcccaaagtgctgggattacaggtgtgagccatcacgcccagcctcattctcttactcttttaataaatcagtatgtatcatgtgacaaacctgtatctgccaatatgacaaacccttgtcaataattctcctggaagatgcttctggcaacccagaaccagaaaataatttttccaaagagttgattatcttagactaaactaatgactcaagttggttttacaaatagggaacactctgtaaatactcatggacatatctaaacctgaacatacattctcatgaagcacaaaaatcatcatatatggttacagtccccaaacaaggctgcagaagaatttaacattcgtaacaatgtacagctagtataattacattttgtgcaacctcgtaattctttaacagtacaactgaagtgatgagaaggtacatactgatataaggtaacatagctctgtgttctagccaaaactagaactcaggatccattatttttaatctaggaacttttatgtgatgaccatttactaggaagggttgggagtaaaaagcataaggcaattgatatagagaaacaaggatgctttaaaaaaacaaaaacaccagtctaaaagaagactattctttactcacttgaaatggctctgaa

SEQ ID NO: 198062 - DNA, 1000 bp, Homo Sapiens
taacatactctggggtactgcatggcaacatgtggtaacatgaaaactgtgtggttatttctatttgaaaagaagaaagaaatgctggtatcttccagcaacaaagacgtttcaaggtaacacaagtatcttcaagaccaagtccacagagagaaagaaatgacatagaagatactttaaataacagttgaaaccaaaagtaagaaacgaagaaattctgaaaatttctatacattgtatcagatgcttaaaatatctcagaagggaccatcacatcagtaaaacagtaaaacaaaatgacaaccaaaaagccaaactcaacatgatagcaatcttattgacatggtactcagcaggaatgccagcaagggaaaaaagggaactgaaatataagttcagcacatgtggcaggagtggatggaaacaaaataaaatcactttcaagaagtgaagaaccctatgggaatcttctaaaaaggaagaaaaaaaaagtagttttaaagcaacagtaaaattttcatttgcttctttttatgagacaaagagttagaaatgttctttttggcaagaagcttattctacttgtctatagttaaaaaaattacagtctgacacatggtggaaaaatatcagaacaatgactcttaatgcttcaataaaggttaaaaatgcaatcctctcatcttatcagtggggaaaataaatctcagggggagaacaggatttgctgaaggtcctcaggtaaagggataaaaacacgtgtctcctggtactccaccccatgctcttccccagtactgctctgcctcttagttgtttgttttccttgcctacgtaaaagtaaaatgtgtttattgtgaaatatttggaaaatacataaaagttcagaagacagcattaaaatctcctgcaatcttactacccagaaataatgcaaagtttatcatatttcagaaaccactaatgaaaacttatactataaaaaatgtcttgagaattc

SEQ ID NO: 198063 - DNA, 1000 bp, Homo Sapiens
cttgataattattgaagagcaaaaagagatactgaattgaattatactgaagtatgtgtatttctttttaatttaattttttttgagatggagtctcactctgtcacccaggctggagtgcaggggtttgatctcagctcactgcaacctccgcctcctgggttcaagtgattctcccacctcagcctcctgagtagctgggattacaggcacctgcctccacacccagctaaacttttttgtatttttgtagagacggtgtttcaccatggtggccaggctagtctcgaactcctgacttgaggtgatctgctcacctcggcctcccaaagtgctgggattactggcatgagccacctcgcccagccgtatgtgtatttctcttaatcctactacaattaattgataatgttctaggaatatagaactatctaatgttttaactgttattctgaagagatgtgttttggccagagaaagtataaaatgaatgaaaaggtaagctaaaactcagttactctcccctacaggaagccagggtgttcaatcaggccaggcggccagagtaaaagcaccacctaatggcaccttattcaaattacaagaatagtacttcagaggcattaccatagcatctaggctttccttgcaaaccccagacgattaaatgatggcaaatgcagtattttgtctatatctgaccatggatgaaatttaccttaaggcagtaagaaggtttgaagttacctagtccctctattcatagctaggcggaatgtattaaccatgttttttttttttttttttttaaatctgtatctaatgatgttatgacaacttaaaaatcttgctgaccaaggacatgaaaaacctctacaatgagaactacgaaacactgatgaaataaattaaagaggacacaaacaaatggaaagacatcccatgcttagaattattaatgagaagccgggcacggtggctcaggcctgtaatcccagta

SEQ ID NO: 198064 - DNA, 1000 bp, Homo Sapiens
gaaaccccgtctctacaaagacacaaaaaattagccaggcgtggtggcatgcacctgtagtcccagctactctggaggttgaggcaggagaatcgtttgaacctgggaggctgaggctgcagtgagtcaagatcacaccactgcactccagcctgggcaagactctgtcaaataaaagaaaaaagaaaaaaagaaaagaaacaagaaaaataaaatatattatttgattgttagaatgaaaatttttcagagaaagtcgctgatgtgctatatcactgtattactgtatactaggtattttattccctgctgtcttttaatcaaaagaagtacaattaaaaaaaaaatttagagtcagtcagctcaatattggatttcaactgcacatttgatgggattcaatcttacagtttttgtctcagtcaacttgggatattattacattatttttctgaaatgaacttctagatgccagatactgcaaagattgcagagaggtgggtttttaaattcacttttaagtagctgcgagaagccatatatatcggagactccaggactgtctttccaaatcacataataaagattggaactaaagtccatagtgcttaagtagatacacaaaaaagtatgtttgcatgtgctgggaggggaaaaaaagtactaaataaaaatcatggaccagaaacatacaggtggaggggaacatcctgtgttcacaccatgaactcttggagtgtagaatttgtggagaaaagaaagcgagaagatactaacttctagcttggtgctgctaattccccaatctattcctggggttaaatcatgtgaagataggagactactttttccacttacaaagtatatcattgacagttagtacattattgggattttgtattaatgaactggaaaggtttctacaggaccactgtaagttctagagagctgcaaaaatgtgttttattattgccattattgctaaatgaaatagttcatg

SEQ ID NO: 198065 - DNA, 1000 bp, Homo Sapiens
cttgaaactgtacagtctacatgactgaaaagatgaaaaccccacattatatttaaaatatgtgaggtactcgggggacccacaggtgatggggaatcgtggctctggaactcaagagaatcagagagccagagatatttaaaatatgtgaggtgctcaggggacccacaggtgatggggaatcgcggctctggaactcaagagaagaatcagagagccatagatataaatcagggaataatttctataaacatgatttttgatactaatagatttaaaaaagccaagttccaaaacaaatgcatgccaaaaaaaaagaaaaagtggggaagttatgacagcaaagacgctggagtagacgtggttagaggcgaaaagtatcataaaaaacaaaagcacatgagacatcctctttttcttcctccacatgcataaattaaatccatcattaaagcctaatcagatatccatattgtccataaagacttctctaaagttcttgacaaatatgcaccttatcttatactttatctggattcttctattaagtatatgagaagtactttataaatatccattgactaaatcacattaaaaattctgaatctggccaggcaccgtggcttacgcctttaatccccacactttgggagggtgaggcggatggatcatgaggtcaggagttcgagaccagcctggccagcatggtgaaaccccgtctctactaaaaatacaaaaattagccaggcatggtggcacgcacctgtagtcccagctactagggaggctgaggcagaagaattgcttgaaaccaggaggtggaggttgcagtgagccgagattgcaccactgcactccagcctgggcgacagagcaagactctgtcttgaaaaaacaaaaacaaacaaacaaaaaaactcttcattttcggccaggcacggtggctcacgcctgtaataccagcactttgggaggccaaggtgggcagatcacttgaggt

SEQ ID NO: 198066 - DNA, 1000 bp, Homo Sapiens
ctgggagacagtgagactccgtctcaaaaaaaaaaaaagccgtgtgagctggcgggcgcctgtaatctcagctactcgggaggctgagacaggagaatcgcttgaagccgggaggctgaggttgcagtgagccgagatcgcgccactgcactccagcctcggctaaaaaaaaacaaagaagaagaaatggagtcctacgagcgagagcttccgcagcattctgtaggaccaaaataggcgcacaggttcccgagcgtgcgccgcctggcagcggaggagctggcagaggcgagccatagagccaagacacccagaacggactcgcctcccgcccgctcccggcggcctagtcagcaagctgcggatcggcggcaaagatgacatggcggtgcgccaatcaccgaaggcaagagagacagaaggaaccaatagtcgcccgagatggctcctggcggaagtcacgcccccaaactgtcaagcaaagcgcccggtggaaggggcccaggccggggggagggggctcccggcggcccgagggaggggaggccggccggcgaggacagcggagcgcgagggggctgcctacactcggccgcgctcgatcctgccctgatctaaacgccgcaaccccaagcccggccccggagaagagtctcaggactaaaagggctgttccagccgtccgtgctggcgcctggggatccaggccagttcccggtacccgcccatgcccagcccggcggcctagggcgttaccttgagctgagagctgtcggacactgttcacgaactgctccagggcagacgccatgttttcccccgggcggcccgagcggcgaaggcagcacgcgcgggaaaaggctgccgctctgggaggaggggccgcggcgatccacctgaggtcctcgcgagcggcgacgtcacttccgctggttcaagcaccgcgagactatacctagctgcccacccgttactgtttccatggaaacagcctgaattc

SEQ ID NO: 198067 - DNA, 1000 bp, Homo Sapiens
ccagacatgcgcagattgacttttctctcccagaggacgaattctttaagagcaagaaatggccggacacggtggctcacacctataatcccaacactttgggaggtcgaggtgggcggatcccctgaagtcaggagttcgagaccatcctggccaacatggcgaaaccccgtttctactaaaaatacaaaaaattagctgggcatggtggcacatgcctgtaatcccagctactcagaaagctgaggcaggagaatcacttgaacctgggaggtggagggtgcagtgagctgagattgagccactgtactccagcctgggtgacaagagcgagactccgtctcaaaaaaaaaaaaaaaaaaaggcaagaaatgtggggcattgatttttggatgcgttacaatctctagcatacactatgtgctcaataaatatttgctgactagctgagtgaattattacctactaacacctctataaggccattgtttggcaaggaatctgctagcccagagtccaacagagtctcttctgctcctatcaccctacccccaaaacaccactctattttcccaatgccttccaaatcaggaagcaggagtcctccactttcttgcccattcaccctccggcctgtatgcccgaaatattcagagtggggcttcccctgccccaccctaggaatgagaccctctgcagagcagccaccttaccatctagaacatactctgcatgcccagtgcacacagagcctactgggaaaggggccagttcaacctcccattcctctaggctcagcccagatgccacctcctccatgaagctgttttcccagctagaagtgactgctccctcttgagtaccctcagccatcccacccagctctcagtgatgggtccctgggccccacacactgttggaggccagcatgtttctgttgactcacttcgccactcattcttagaagcatttatacttggcattagagcccatggaattc

SEQ ID NO: 198068 - DNA, 1000 bp, Homo Sapiens
tatttttaaaaaatgggagggggcataatatttgctccattgaatggagctagaattatcctgattcttacagaatttttacaggagaatatgatatatataaaatagtggttttgattttctgttttataactcatgagctgtgtgattccaggcaatattttaatctctaaactggagatttatttaatctctaaattggagatttattaaaatggagatgattcctctgcctcatggggccgttaattaggatccagtgagagatgagtgctttgaaaactaaaaatttaccagtgtgcaatggatttattgttactagaagtttctcaagtggtaaccttttttttttttttttttttttccgagacagtcttgttctgtcgcccaggctggagtgcagtggtgcgattttggctcactgcaacctccgcctccagggttcaagcaattctcatggcttagcctccccagtagctgggattacaggcacctgccaccaagcctggctattttttgtgtttttagtagagacagggtttcaccgtgttggccaggctagtcttgaacttctgacctcaagtgatttgccctccttggccttccaaagtgctgggattacagatgtgcgctaccacgcctggccttcaagtgatacactattctaatcttgctttatctgactcctcatcttcccgtcttcccacatccaatcagagagtttttgtttttggcggtttttgttttgttttgttttttgtttttagatttagtcatctgctctttgatttttatctaaattttctcccttggataattcatttattgtcaggattttattacctttttgtagataatttctaaacctccactctactgtcaacttttgattgctctttttttcctttgcagtacctatcaaatgtaaagtctgaattttaatttttattagaactgagctcatggtaggcatgcaataagttttaacaaaaatgaattc

SEQ ID NO: 198069 - DNA, 1000 bp, Homo Sapiens
tctagtgggagtttccacaggagccctctgttctttgccggaaggcaatatgtctggtagggagacctttgaagaaatgactgccaagcaaatactgagctttacctatctgtgtcctgttaaatctctctcagtgggggcctatccatttcctgggccactgtgaaaaaccagcatatcctttctgtcactagacttctgcaaactcttctggggccatttgttccatgccacttgcacaaggggggaatgtggctctgccctgtatccctttaggctagaattgaagcccgaggtggttggccaatgacgtgacattgttttgaatgcctttattatatctaaacactttaaatgatattttgcattccactccatagtacacatgcttaatttaacacagaacccattttcctgtaatactgtctgttcccattttacagatggagaatccaaggcttagagatgtaaagtgttttgttcaaggtcacatagctagtaaatggtgataccaggtttggaatgcaggcagtctgattacttagcctttgctcctgataattccattcttcactgtggtatcctagtgcctcgaactgtacccagcaggttctcagtaaacatgcgttgggtgattctattggaaaagtctggcatcgggtgctaggaatgcaaccctatgcacacctgagccacctggatcaggaccaagtgtgggtgctgggaggctaagcgggatgtgtgctccttggtgtcctgcataaccagaacaggactccctccggtgtgtcttcagcacctcgcagcaccatcactctggccagctagtaattgtggcatactcatctgtctctctagctgcatggtgatctctggaggatgggccctgtattaagctcacctccttcttcctgaggcctggtctaactcatatatttgaaatgtgactgctcaacagtgggcttatggaagtcagcccaagtcttcagccagagaattc

SEQ ID NO: 198070 - DNA, 1000 bp, Homo Sapiens
aaagtgctgggattacaggcacaagccaccgtgcccggccttcagtttttgattgttttgaataatgctatgaacatttgtgtacacttctttttttgtgtgtaggcctatgttttcatttctctttgctgaatacttaggaatgaaattactgggtcatatagtaactgtgtttaacctttttttttttttttgagatggagtttcgccgtgttgctcacgctggggtgcaatggcgcgatcttggcttactgcaaccactgcctcccgggttcaggccattctccttcctcagcctcttgagtagctgggattacaggtacccgttaccaagcctggattttttttttttttttagacggagtctcactctgtcgcccaggctggagtgcagtggcacaatcttggctcactgcaacctctgcctcccgggttcaagcaattatcctgccttggcctcccaagtagctgggactacaggtgtgcaccactatgcccagctaatttttgtattttgtactagagacagagtttcaccatattagacaggctggtctcgaactcctgacttcatgatccacctgcctctgccttccaaagtgctgggattacaggcgagagccactgcgccagtcaatttttgtatttttagtagaaacggggttttaccatgttggccaggctggtctcgaactcctgacctcaggtcattcacctgcctcgacctcccaaagtgctgagattacaggtaagagccaccgcacctggctgcccgactaatttttaatttttttgtagagacgaggtctcaccatcttgcccaggcaggtcttaaacaacctgaaaaatgatactcccgacttggcctcccaaagtgctgggattacaggcgtgagccaccgcgcccggccgtgtttaaccttttgagagactgcctgccagtctgttttccaaaacagctgcactagtgtacatttccaatagcagtgtatgagaattc

SEQ ID NO: 198071 - DNA, 1000 bp, Homo Sapiens
gtgtgtgtgtgtgtgtattttagtagagatggggtttcaccatgttggccaggatggtctcaatctcctgaccttgtgttgtgatctgcctgcctcggcctcccaaagtgctgggattacaggcatgagccactgcacctggccagctatcttcttttatcaccctaacctccgactcaggaacatcaacccacagccacatttatttctctaaaccagagctgtcctctgagatccagaccctatgtccaatgacccactttccatcttcctttggctgtttcagagcacctcacactcatcatgtccaacaacattgcctggtattccagagtttcctattttgcatctggaaatgcaaactagaaaccggggcaccatctttaccatgttcctccctcttttcctccttttccaatccaccgccaattcttgtcaattcagcctctcaaacagccctcaaatccacccatttcccccctatcaccactaccaccacatcaaccaccatcttttgtcttggctactggaatagcctcctaactggtctctttgaaaccctaagcaattttctacactgatccaaagtatttttttccaaaacacaaatagattatgtgatcctgctgcttaaaatccttctctggcttcccttggatccttaatgtgttctacaaggtgttgcacaatttggccctgcaaccagcccactgtccttgtcatcttgtacacattctcctgcaccctgtattccagtttctagggttcactctgctccctccccactcatcacctttgcatatgttttctctatgtctagaacaccccatccctggaactacttaactttcattcattcttcagaactcaattcaaggtcatttctctggagaagtgttcctgagccccattctagattatgttcctttgttaatcatccttgcatttctttccctctgatgctcatctcagtttataatcagtaagacattaatcagca

SEQ ID NO: 198072 - DNA, 1000 bp, Homo Sapiens
tgatggttggggctttgccttgttcattgctcagtgtgtagaacagattctggcacatagaaaatactcagtagatacctgttgattaaatgattgactagatcctacctcagaggaatacctttgaagatgtataaaatttctttgaaggctataaggtgccgaataaccttaggagggttcactgcttggccttagtagcgttcatgattttggattttgaattgtttctatgtaaccctgaaacactcagacttacttattgcattcagggtgtagttcatagcatcagcagttctgccaggtttgtaaggaacacacatctgttagagtgtgaaggccctggaggaagaaaggttgagacaggttgatgtgcttttttttgtctcttatggctctttctgagatgtgtaccatgatgataaccaggaactttttttttttttttttttttgagagacagggtcttgctcagacactcaggctggagtgcattggtgctcactataaccttgaactcctgggttcagggaatcctcctgcttcagcctcctaagtagctagtactaccggcatgtaccaccatgcctggctaattttaaaatttagagatagggtcttgctgtattgcccaggctgggctcaaactccttgcctcatgcaatcctccctccttggcctcccaaaagtgctgggtttacaggcatgagccaccatgtctggcctgataagtaggagcttttgaagtggtttcacactgattttgtagttttgaacttggatgcttcttttgggtagttgatgcagtaactaatactggtgctgtctttcagaacagcttcatgtgaaaaaggcctgcttaagcctgtgtctttgggaagaacatctctgccgctgttacagcagatacagtaatagcaaagaaagtcttaaagatgatttagcccatggcaaggaaatatatgggactcttgtttgaatataaacactcacagaattc

SEQ ID NO: 198073 - DNA, 1000 bp, Homo Sapiens
cctgtatttttctttgctaacactggcagccctggggaggggcggggtaggcgctgcagtcagccaagcccctcagctcttgccctgagcctgtggggtcattaagaggtggattagggatacgtttaaatccgtctaacccatttgaatcttacttcctcactcataaaatacagttgtagagaggattacaggatgtgttgatggatacacctggcctggtgcaaacccacccatggaagtttccagtgctctgtgcctccctgggctgggtgtggggcagggggcagcttccctgtgccactcgtggtgtctgctctgcgcgagccctctgggggcacttgggaaaagagggaaggatactttgttctggttcccaagtggctctcgagcaattggcaggaaggtagagctgatacacatgagaaacccagggatcctgatggcgaaatggaatggccacaccctgtgttggaaacactgcctgtgactataactcagaaaagagagagaaccaggccgagcacggaggctcacacctgtaatcccagcactttgggaggccaagacaggcagatcacctgaggtcaggagttcgagaccagcctggccaacatggtgaaaccccttctctactaaaaatacaaaaattagccaggcgtgatggtgcacacctgtaatcccagctactaggttgactgaggcaatggaattgcttgaacccgggaggtagaggttgcagcaagccgagatcatgccactgcactccagcctgagtgacagggcagaactccatttcaaaaaagagaaaaagaaagaaaagaaaaatgagaggaagtgtagacttgaggggtttcatggaggaggtgggattttgcctgagtcagaagggagggcagtgtgccgatggtggggtctccccacggcgtgagcatcctcgccagtgctggggagggggaagacggctctagctcactaccttcccccttgtgcctgttgt

SEQ ID NO: 198074 - DNA, 1000 bp, Homo Sapiens
aagtgcaggcaaagttctctgagcgcttacagcagggtgtggtcacctcgggagaagtgtgtttgagccagcactgggagcccagaaaacatcttcactcagagatggtgcaggaggggcaacagacaagaagggctacagaggcctacgcagcagtaaaaggcttcccccccacccccacgagagcctctgtgcaggagggaaaggggacaaagataacagaacctttctctccagcttagcaagtggggtcaagggaagggcagggaaaaggagggagcgtcaggagaaaagacttctctgcgctctctgaagagcatgaagagggaggtgtgggtgctgttctgggacaatctgggtctgtcttgatccctgccaggaatgatgggaattctgtatattaacaagagttagggtccatggggaagggggatgggactgccacttacgccctttttcatgtcctcaagcccccacactccactgaatacgagaactgagggcatgctggggtctttccttccaagttctggcctgagatgaggtctggagaacaagaacggaagccctccacccagggactcaggactagcagatacagaacaacccaggagagctgcgaggagtgcattggtcatttagggtcatggccagtcccagatttgacccagaacaagtctcacttaccctggctcatgctaaccctcaggccatccaaatcagggccatgacccctccccaacccagacaccaggaaggaggaggagggagagagagggaagggccctccccgcagaatccaggctcttacatcagattcttgccctggacaggatatcctgtatttaccaggcggaaagtgtatggaggggaggtgaggtgggtggccttcagcagtaacatgaactacaactacctcccgaaaatattcctcttagacgcctgctcaagagtgggatcatttagaagtcagtttgagggtggggccagagctgaattc

SEQ ID NO: 198075 - DNA, 1000 bp, Homo Sapiens
cctacctcagcctccctaatagctaggaatacaggcgcatgacaccacgcccgactcatttctatttgtatttttagtagagacgagatttcaccatgttggccaggctggttttgaactccagaccttgtgatccgcccacctctgcctcccaaagtgctggaattagaggcatgagccactgcgcctggcctgcaattttcatcttttggctgcaaataagttatgtcactattctcagctgggggagtgtttaactcacatgttgcttcctctctgttacacaggttttaagatttatgaataggtactgaattgtatcaattgcttttttctttcttgattgagcagtgttttttcttatctttttatgttgataaggtaacttaacagtgattggcttttgaatgttgaacattgcattttggaattaaatcaactttgttgtgataaatgattaataccatattatatatggttgagatgggtttgctcctagttcatttggtagttttgtacttacgttcacaagagaaagtggagtctaagtttttctgtgtgttttttttttttttttttttttttttgccacggagtctcgccctgttgtccaggctggaatgcagtggcatgatctcggctcattgcaagctccgccttccgggttcacgccattctcctgcttcagcctcccgagtagttgggactataggcgcccaccaccacccctggctaatttattgtatttttttagtagagacggggtttcaccgtgttagccaggatggtctcgatctcctgacctcgtgatccacccgcctcagcctcccaaagtgctgggattacaggcgtgagccactgcacccagacttgtgaggttttaatatgaagtattaaagctatgctggttagacaatttgagaaatgtttcttctcctatttctgacagagtttatgtaagatgtgtgctatttcttccttaagcatttggaaagaattc

SEQ ID NO: 198076 - DNA, 1000 bp, Homo Sapiens
ccaagcccatgaggaacaagaatgttatgctaatcagacccaaggtaaacagcctgcagtgcacctcctgactgattagcactgaacccacttggaatcatcaaccacaggcacgtggtaattggatgttcttctaatacacatagtgagattgtaaaatgaggatgatatatgaggaaagtcagacggagaaactaaagttcagttcttaaatacaagccaagggaacagactaagtgaatggtacagccaggattggagcctggttttcacaaggtggtatgtcatgataaaacaagccaaagaaaaggttgggtagtgttttgaggctaaaagagaccaaagagtcttagtgaatcaaccttgatgcgatctgggtttgaaaaacctataaaaaaccttttgtttggagaaagtgggagaagttggatgtaggctggatatttgtgggtactaaggaattgtttgttttcttaggtatggtaagattttgtggttatgtagaagagtgtcttcattttatagaacgacctcaaagtagttaggagcagtgtatgtatgggtggttatcaatttactttcaaacaatgcagcaaaaaatatgtatctatattacatataattaaagcaaaacatgataaaaaggaacagttattgaatttagatagtatggatttaggaattcattgtattgtcattccaatttaatgtataaaattttttataacagtttataaaaacagtgcacacccctttaattaggtggcctgggtacatgaagtatctttttggatgcctagaacacaaaaagggacgacaacaggccacctaataagatgataccaagaactataccatgacggcgaaaaagaactgctgcaaaaaataatttgccaaggagaactcagagtacaaagccttacctttggagtagagggaaggagagtcttaagtaaagctcacaaaaacccctaactcatagatgcagtctaaggaattc

SEQ ID NO: 198077 - DNA, 1000 bp, Homo Sapiens
ttagctgggtgtggtggtgggtgtctgtaatcccagctacttgggaggctgaggcaggagaatcacttaaacccgggaggcggaggttgcagctagctgagattgtaccattgcactccagcctaggcaacagagcgagactctgtctcaaaaaaaaaaaaaaaatcctgccttgcccctgcaggcatttgactttgagaaacctgggccacatgccaaatttgaatccatgtactggattagttccagcgtctgagctgggcatgaactcaggaacacaagagtgcattgctgttagagagaaaggaaaatccaggagggtctgtgcatctggaaaaacaaggaatacagggcaagcttcccccagtgtcaggaatccaaagctcggataaagggtggaggaagcccagcagatcccccaagctctgcctgcttttgggatcctatggcccagagtagggaagagaaggcctccatctcggacatgcaggcatcacccatcattcctgctcccaagcgtgctaaactggcccagcagccctatttactgttccaaatgatagtttttcaagctttggtgacaaccacagccagcccctaacctttccgctggtgccacttaccatccctgaaatacttcctctttctacccgtttctgcctcattcctctaagcacttcaagatccagcttaaacccccaactcctctggaagccttccctgatcaatttcaccaacatggacaatctctacctcctctcaacttactacctactctacttataaatgacttatttccatctgccttgaatcattgcttatatctcttatgtgtataaatttcagcttctcaattagactgtcaactcctagaaaggaggtaccatgcctcaattcttattgcctggattccttagagaacatgacagtacctgaaatgtgtcactaattcactgattaattatccccagtagcatcggggaacagctgcacagaattc

SEQ ID NO: 198078 - DNA, 1000 bp, Homo Sapiens
ctctcccagggcattatttccctgtgatatccataaaggacccttatcttacctgcagcaatgcaatgcctatgaaaataccagcaacgatggttaaattgtcctgcaaccacttctcaaactggggcacacagcctttcgtgtagattacaatctgctggtcaacttccttcacaagagaagaggagagcacattgtcacagatagagcaccaggcacaggccaaagctcctccaacacccttcgtgctaagcaacaacatgagattccacttactggtttttgcctggcatcatagccacactgagtgttgatgacatcttcctggtgaagaaaggaaagagaaaagtgaaatttactcattagacagaaagcccacctagaaatgagcagaagacttctgttacgcattagtaataaaatgtgtatctgggcacaaagactgcagcactatgttaaacactttatatacatgatcccatgtcattattgcgacaatcttcagaagtaggtattaaaatatgccctattttacaaataaggaaaactaaggcttggggaatatcagaaaagacagcaagtctatcacacaggaggctcaagattcaaagtggtgccaacctcaagaagcttatgggatttagggaactggagacacagataaaaaacataaagggcacagtgaatcttcatgtatgctcttttggatggactgctactttttaatctatgtacttccatgttacttaaattgtttttcaatgagcttttaataattaaaaaacaaaacaatgccccgaccacataatcacacagacaacctgacgtctcacagggtctgatcagaaacatggttccactttttcgggttgtttattttccttctctgcggggtgtggggcagattttattagcttagagcgcaaggaatgagctagctctgcccagaggatctgtaggtgaaaggggaagcattaatgcctctgagaatacagaattc

SEQ ID NO: 198079 - DNA, 1000 bp, Homo Sapiens
tctcctgcctcagactcccgagtaaccaggactacagccatgtgccaccatgcccaactgattttttgtatttttagtacagatggggtttcaccatgttggccagcctggtcttgaacccctgacctccgtgatccgcctgcctgtcctcccaaagtgttgggattacaggcgtgagccaccatgcccggcctggttccacagttttgaatcaataattctttgggagaacattgcatcagtcttatgatgggatgagctttgctcacatagattgcaaaataaggaactctgccttataaagaaatttcttatgaagaaattccatttcagaacaaactaaagggaaaaaaaataatgacctatgggaatttcacttgatagaaattgcccttagtccagttgggctgctataacaaaataccttagactgggtaatttataaatattaaaaatgtatttcccattgttatggaggctgagaagtacaggatcaaaaaaacaaacagatgtggtgtttggtaagggcttgccctctgtttgcaagatggcaccttgttgctgtgtccttcagtggggacaaatgctgtgtcctcacatggcagaagaaactgaaggcctaggcagctctctgaagccccttttataagggcattgaccccattaatgagcacagaaccctcatggcctaatcaccacacaaggcccatcttttaataccgtcaccttggtggcttgagttccaacatacgaattttggaggaacatgtacattcaaactgtagcaggtatttatttaacacctactaagtgtcaggcactctgtataattcatatcctttaatacttataacaaccccgtaaggtgagtatttatgtaatttcccagataaggaaagtgaggtatagagagcctaagggattgtcaaagggtccacaaatagtaagaggaagaactgaaatttgaactctgagcattgattccaaagccttctgaatt

SEQ ID NO: 198080 - DNA, 1000 bp, Homo Sapiens
taccatttccatgcatcaaatgtgctaaataaagagtgatgtgcaaacccgcgttggaagtaaaggcagcatctcgtgttgtgttggacttgtctaaggagaggaactgacactgcttacctgttgccgaagacaagcaggaggagacccttgagaggtccctttagaagcaaagaggtttctcagtgggatcatttccacctctggtccatctgacttcacatgggaggaaaagccagaaatgtccccctaagctagaagaggggaaaaagaaaatgcacttaggaactgccgatgatagggaagagagcagggggcaacatgtccagatcttgcaagagacactcaggcagcattccaggctcagcctgaactttcgaccccattgtctactctaattactggaaccagcaggattaattcctcgacctactttccagttttgttttgtttttttttttctgccacagagcgataaggctgcactgggcttctctctgtcatttgaatgcaacagtggggttacatgcagactcgtgttagagccaaaggagggtctgatctttgaactgggggttcaagatcacttctttttagttgattctcaataaagagcactcgaacacatgaaaacatcccctactttgagaacagagatagcaatgaaaacaagatattattttatacctgctaaattagcatacaatttaaactgatacattaaaaaaaaattttctttaactaccaaatgctggtgaggttgaaagaaacctgatgttcacaagttgctgggtggcacaattttataatacagcaatatatattagggatcatttaaaaccatgctgtccattgattctgtaatctcattcctgggaagttgtccaaaggaaatgattccaaagaaggaagagctgtatacagagaccttcactgcagcatagagagaagagtgtcaaaatgactcatacgtaggctagcaaactcacgggccaaattc

SEQ ID NO: 198081 - DNA, 1000 bp, Homo Sapiens
ctcaatgtcaatgtagtttggtaacaacagagaagggtcatgccttatgctgtcagacattcatttgtaaaattagactcttaaaactgtttctatttttgaagtatctaagtatttctcattgggtgtacagacagcccaactattggatgataaatttggtctttcaaatggattttccttttaaaatactggcacagaatatttccctctatttgtcatgcaaatgtatcagtctcctcttctgcgctgactcacacaagagggcctgaaaatgggagggtccaatttatggccaggaaggaatgtgggagagccttaagcaccaggagctatgatctcagtgtatctcaggggccataaactggtcttaaatatgtgtataagaagttctctggtattgggaagaatgtaagagcatagtgcatgggttattggaacctacctctgtcatttacaaacagtgagaccatgatggattccattgtttctctgaggttgcttcaaaaagtggtaaaagacacatacatacagaaaagtgtatgtatcatgacagtatagcttgatgaatgctcatgaactgaatacactcatataatcattacattcatgccaagaacaagaacatgagcaataccccgcaagtttggctttgcgctcttctgattataactccccagcccctactaaagatagccagtatcctgacttctaacacagattagttttgcttgtttctgtagtttttataattgaaagtatatgggttgtactttttatgttgggtgtctttcatttacattgtgtctttcatttacattgtgtttgtgtgatacacccttaatgtgtgtagttgtagatcattttcactgccatataattatgtatataactctaggtgtttatgtggaattgaattccacatagaattgaaacttctgggttttacagcgtgctgtgttcggctttagtaaacactgccagcagtgtgtgagaattc

SEQ ID NO: 198082 - DNA, 1000 bp, Homo Sapiens
aaatatatgaaacaacaggtctcgagatattggaaatcagtcaatgaaggatactgatccctgatcactgtcctaatgcaggatgtgggaaacagatgaggtcacctctgtgactgccccagcttactgcctgtagagagtttctaggctgcagttcagagagggagaacttgggtacagtgggacaggccttcaactcttgttttattgaatttatgaacttcttaaattcttctatggcaggagacatctatggggaggctttgtttgttttttgagacagggtctcactttgtcgcccaggctgaagtacaatggcctgatcttggctcactgtaacctctgcctccttgattcaagcaattctcttgcctcagccttctgagtagctggtattacaggcatgcaccaccacacccagctaatttttgtatttttagtagagacaggatttcaccacgttggccaggctggacttgaactcctgacctcaggtgatccacctgccttggcctaccaaaatgctgagattacaggcgtgatccactgcgcccaacttatggtgagttgtcttttgtcccctgagttatatatcctttcaggatgggttcttcatctggctcatgtcatatttcttttctacatttttccccattgtctttcgcctaatgatcagaacacttatctttctaatgcttaatcagggcagctgggtagagtctttctttttaccttaagatagtatagaagggctctctttgacaactttcttagatgaagtagactagtttggcttcttctccagtgtatagctggaggcctgggtggtgtcttccatctacttttgtgtagcctgatatgatctggtgtgagatgaggccctcgctgttaacctggtttctactctttattgttgcctaggaacttccattaaatccactgaattccatgaaggaggcaaagcatccaggaataagacacagcccccttcattgaattc

SEQ ID NO: 198083 - DNA, 1000 bp, Homo Sapiens
gggaccattttttattttaccttgattctcccaaagcctaatttttgcatgtctttttctatttccttttctcaaaagcattgcatagaacattattccagttaatgaagggttccagttaattggatttcagtcttttctgactgcaaacatactgctttcagaatacattcatcttagggaattatgatctttcagaattttctttattcaaaagatttttttttcagatttcaagcttatgtgttcctttaaaaagatgtttattgctaataaatgaaaaattcacttttgctaacactgaactttaggaggtattacattgatctttatataagagacatcaggtataagaattcagatatctcaagctggggttttgtaaaagagctagaaatgctctctgatgagatgtttctcatatcactctataaaaagccaggctcataacattaaatctgaattaatttatgactttttcataggacttttgagataatattgccctggtttgttgtttatagatgacctacatacaagtatagagtttagtgaagggagcagataaataaaatgtcctttggcctatgttgaataggaacaagcaaactttagaaagaaaattgattgaataaaactttatcaaattctgttatgagtctccggtatgtctgtattttgtcttgttgagtccagaggagatccatgtgctttagatgacacaattgtataaatagcagagttgatatttattttaaaatttaggagactgacttaccttttttccgaaagttagggctattccacttccccaagtaagcaaggctaattttttattttctcaaaaggagctttaaatccaaataacttgaacaagtagttaactggaccaacagttctataccaaatataccaaagaggtcattgaatctgagatattatgaattaggaaaagtactaaaaagagaaccttggccactaaaaaacctgggctgaattc

SEQ ID NO: 198084 - DNA, 1000 bp, Homo Sapiens
tactttttctgaacttacattctgatttgttagtttctttttttaatcttacattgggcaaacgaaagagctctcataatactttagatttaattgaaggttggaacatggatagtttctttctttgtctggcttatttcacttaacataatgacctccagattcatccatgtttttgcaaatggcagcatctcaatatttttatggctgaataatactccattgtatatatttcaaacactcttaaatattgatatccccccctctgctattttattaaggttaggaaaaacaatttgtgttatctagtgttcatttaaaaatctaaacacagtttatgaaaaattattctggatttgagtctgaatttgggaaaggcaaaatcaagaagtgccgtcagaatagagaaaatttgcttatagcaagaaatagttataagcaatattgtttaaattacagcaataagtaacatggattattaggaatttaagattttatcaagaattaaagcacatcattttcttgataataaaaacttttgttatctgggcatacagcaactttaatagttcaataaaagaaaactctagtttcagtatttttatacatcatacatatcacaacatgttgtgatacataaaataaatatataaaacctcatatttcagtataagagtcataacttttttcttatggacaagccctactttattaatcattttaacacgtttcatttctctttttcagttcattattttgatactagtaaaccaaaaaattaagttcaattcttctggtgttctagacttagagtatacccttaaattgatcttatatacttattttttattctagcatgattaggacccattaactttaagacaaaatttttctcttttttcccaaaacatataattatcttgcatgtatattatcaaacatattattttacatttttttcaaaaataaatatgcaataaatgccaaatataaaaagctt

SEQ ID NO: 198085 - DNA, 1000 bp, Homo Sapiens
aaccttgtgacattgtggtggctggcaaataccgtgtcaaacaggaagtgttccacaagtggcagttcctcgttatgcttttcttaaagctcttttggaggtgtgcacaaattcttattctttttgtgcttactgccaaaaagggtttagggatacatgtgtcgtaccatcccattttccagtagagacattgtaattcatgggcatatcagttaagaattggatgcagctgtatacagtacaaaaattccaaataacagcagactgaatgagaatgtttatttttccctcatgtgaaaggagtagggagggggtgggccagggcttcagagcagttccacagtcatcaggaaccaggcttctgtgtctctgttgtaccatacaagcccagggcttccatgcacagtcccctctgaccccaaatggctgtgtagctccagccctcgcgtttgtgatgcatgctaccaacatgtaaaaggacaaccaggatgcctctcccagctgagtggcctccctctaggcagcttttcaggaagtttccacataacacttccactaatatctcatttgttcagtgaccatgtttagctgcaaagaaggggaaaaatgttttcttctgtttcaggcctcggtgtgcccagctcaaatgagggttctcttatgaaggagggaggggagtggatgtcggggtgggtagccagcattctgtgctgtaatgggattgtattctgtagggctctgaagatagcacttggggattgaggagtctggtctgggaagtgaaccttgtatgtagctctggatctagggttctaaacatcctgctttagaactacagccttgtaagtgatttttgaaacaactcattcataggcagagaactgtctatccttcaagcctgagagaaaatgaataatttacctctccattttgatcacctgccactgtagcattggtccttccaggcctgcgtgtgccctgggagggtgaaacaaagctt

SEQ ID NO: 198086 - DNA, 1000 bp, Homo Sapiens
aataagaggccggacatggtagctcacacctgtaatcccagcactttgggaggctgaggcaggcagatcaatttgaggccaggagtttgagaccagcctggccaacatggtgaaacctcatctctactaaaaatacaaaaaattagctgggtggggcatgcctgtaattccagctactcgggaggctgaggcacaagaattgcttgagcctgggaggcagaggttgcagtgagccaggactgcaccactgcactccagcatgggcaatacaatgagactcttgtcttaaaataaataaaaataagaaaacctgcaataagaaggggttgtaattaacattagaaatgcttcttggtaaaagatacttgcagagaaagcatttgtctccttaagttgaacacattaaagtttcctatataatcaatcactcacctatctaaattcttatttatactttcaccttgttttaatagtctccctattcctgcaaaaatactgttaacaggtaaaactaagtacaaacttcagaagatctaatgacaaagcaatagagttcctaacttttagtagattgaacaaacaagttttactatctccaagctcttaccagtgttttcagagctaacatttgttccatgtcttctgttagacagtctgtgataaatattaatatgtagaccacgttctgactacaatcttttatttcagaggaaccacagctgatacaggaatggtagtagagagaaagtatgaatgtgccaaagcattcaaggatatagttgcctagtaaagggtgccctaaaatgtactacattatgggatacacagtaaaagtttatgtatctgcaatatatatatatgtatatgtacacacacacatatacacacatatagagatatatatgttgagagaggactaaatgcatattatataggaaaggaaagatcaaatgtaccatagaagtttccaagctacctttatgcagatgaaaaggaattc

SEQ ID NO: 198087 - DNA, 1000 bp, Homo Sapiens
aaaagaagccttttcaagaaatggtgttggagaaacttgatttccacatgcagaagaatgaaggtggaccctatgtcacactaggtgcaaaaattaacacaaactggatcaaagacctcaccccaagcgctaaaagtatcgtacgcctaaaagaaaacattggccacactttcatgacatcagattggacaatgttctctgggatatgacaccaaaagcataggcaacaaaagaaaattagattccttggattacatctaaatgacagacacttttgtgcagcaaaaaacactgtgaactgagtgaaaagataacccatggattaggaaaaatatttgcaaagcatatatctgaaaagaggctgatatccatcatatataaagaacagctagaactaaacaacaagaaacccaaagcatcccatcaacaatggtcagaagactcgagcagatgtgttcctaaagaagatatcgcaatggccaataagcatataaaatgatgttcaaaatcactcatcatagggaagtgcaaatcaaaccaagaatgtgataccacacattaggatggatatgataaacaaacaagcattggtgagactagagggaagtaggaatgctcgaatatgatcggagggaatgtaaaaccatgaaggaacggggaaaatagtatggcgtgtactggaaaaattagaaacagaatgatcagatattcccgcagtttcatttgtgggtacctaccaaaaagaattagaagccaggagtggaagacaaatttgtgtacacccatattcatagcagcattattcacaacagccaaaatgtggaagcaacccaagggttcgtggacagatgaattgaaaagcacactgcagttccttcatacaatggaagactattcagccttcaaaaggcaggcacttctggccggtgcggtggctcatgcctgtaatcgcagcgtcttggaagaccgaggtgggcggatcacctgaggtcaggaattc

SEQ ID NO: 198088 - DNA, 1000 bp, Homo Sapiens
caatcttgagcatacagaaaaatggaagtacagaacaaatagctttttttattctttctttttttttttgagacagagtctccttctgtcacccaggctggagtgcagtggcatgatcttggctcactgcaagttccgcctcctgggttcatgccattctcctgcctcagcctcccaagtagctgggcgtggtggcaggcgcctgtagtcccagaaccaatagcttttttaccccatgaaccatttacaagtaagtagccaatctgatgccctgtcactcttgaatacttcagtatatttcatgcaaacattctcctacataaccacagcacaaccatcaaaatcaagacattaacctagatatatctctaccatcaaatcctcaaacttcattccagttttgtttagtgtctcaataaattaaatttaaaaaaattggctgggcgcagtggctcatgcctgtaattccagtactttgggaggccgaggtgggcagatcacgaggtcaagagattgagaccatcctggccaacatgatgaaaccccatctctactaaaaatacaaaaattagctgggcatggtggcgggtgcctgtagtcccagctacttgggaggctgaggcaggagaatcacttgagcctgggagtcggaggttgcagtgagctgagatcgcaccactccacttcagcctgacgacagagcgagactaaaaaacaaaacaaaacaaaacaaaacaaaacaaattggctgggcctgggattacactcctataatcccaacactttacactttgagaggcggaggctggcggatcacctgaggtcaggagttcaagaccagcctggccaacatggtgaaaccctgtctctactaaaaatgcaaaaattagctgagcatggtggtgcttgaacctgggaggtggaggttgcaatgagctgagatctcacgattgcacttcagcctgggtgacagagtgagactctgtcttaaaaaaaaaaa

SEQ ID NO: 198089 - DNA, 1000 bp, Homo Sapiens
gggcatggtggtgtatgcctgtagtcccagctactcaggaggctgaggtgggaggattgcttgagcccaggaggttgctgctgcagtgagctatgattgcaccaccatactccagcctgggtgacaaagcaagaccctgtctcaaaatatatatatttattttatatatttatatatcatttacatctgatatttatcacttatatatatcatttatatcttacatataagatatattaacattttatgtttattacacgtgaattatatatattatacataaaatgcatacacacactatatgatatatggtctatgtgagtatgaaagattttgaatttaaaatctaaaatgtaactcgacatctaaaactcagtggcttagatagccaaatctaagatggaattttatttacttagttggtggtttctcctcaaatcctttttcccctcaagctatttccaaggatagggattttcatcctttttacaggtggtagccattgtcagaagtgatgggataaggagtaccctgggagggctttaacccacttccctcatactctccatcactgaaaccaggacaatctcatgtgagatgcaacacaaacagattcaaagcctaatactacttatgcttactgcatgcctgttcactatgtggattatctcatttacttcttaaattagttttctattgctgccgtaacaaattaccaccagtgcagcagcttaaacaacacaaatttatttatcttaaagtatagccaagcatggcagctcatgcctatagtcccagcgtttgggaggctgaggctggaggattaattgaggccaagagttcatgaccagcctgggcagcatagcgagatccccatctctacaacaacatctatagatgggaagtctggtataagtatcactggactaaaatcaggttgttggtaggctgtgttcctttctggaggctgttggagaaaatttgggttgatgatggaatt

SEQ ID NO: 198090 - DNA, 1000 bp, Homo Sapiens
acatttgctagctgctagatatgaatagtcgtgattcttcaatagtactagctaggctgaattttgtgttagctctaaaaattgcataattattccgctttcaactacataaagtaaaattaactaatagattgagtccaagtaatatacaaatttctcctcaaagttatttttatgtatttcctgcctttgacttaaaaatcaattcaattctatgcaaaaaataaataaaatattaagccactagtatatgtcagataatatgtattctttaaaatcagtgatatagacacatttttggatcatagaactctgaaaatttatttatggctacagaggcagtggggttgacaatgacatgtgctttctcttagcgttcatctgtgatgcagagtagtttatttgttgtcagatatctcaggtacagagaagagcctaggcttagccttagaattgcccactgagataacatgggtacttagaaggggcctgaagggtaatgaatatccaacatagcaggtgagctgtttggaagcctccactcactattcagacctggggcaaattgaaatactatctttctgtcaatgatggatcacctatgcagtggtactataagattataatattgtatttttactgtacattttctatgtttagatacacaaatacttaccattatgttacaattgctatatagtacagaaacatgctgtacagatctgtagcttaggagcaagatactttaccatatagcctaggtatgtagtaggctacaccatcttggtttgtgtaagtacactttatggtgttcacacaacaaaattgcctaaagacatttctcagaatgtatctctgttgctaagcaacacatgactgtggtgggaatcaggattcaagttcctagggagagggccagaagaagtctagttcttaaaggagtttgaggaacactagaagtttttgaaacagaatctcaaaataaggtctgaaccatgga

SEQ ID NO: 198091 - DNA, 1000 bp, Homo Sapiens
tactgttaacatacgtggtcataaagaataccagatgcaggccaaatacatttgccatgagaaaaagataaaaatcaaaacttatggcttctcaatactgcttagtattaaagcacaatgctgcattctctactacagctgtgtagttacaagaatctatttgagtggccatgtgtcaaagataatggcacaaaaaggctgggtctatatggctcatggcccaacatccactgcttaacatgatgctttttctggattaagatcttcaagtcaggcaaaggctccggaggaggacagaaaaccaaagtgaagagatgcactaggtagggaggtttttgggttgtaagtgatagaaactcaactcccgttacctcaaacaaaaaggggaatttattgactctttttttttttgagacggagtctcgctctgtccccaggctggagtgcagtggcacaatctcggctcactgcaagctccacctcctgggttcacgccattctccctcagcctcctgagtagctgggactacaggcgcccgccaccatgcctggctaattttttgtattttttttttttttagtagagacagggtttcaccgttttagccaggatggtctcgatctcctgaccttgtgatccgcccgccttggcctcccaaagtgctgggattacaggcatgagccaccgcgcccggccaaatttattgactcttagaaccaggaagggttcccccaggtcccaggcagagagtggggatgcaagcaggcccagaagcaggtgtgagctgctgtgggcatcgctctgtccaggccgtcccctctgtccttggcttggctctaatcctgcagcatggcttacttcacactcggggaagcgtggaagttggccatgctgagcaactctcttaatggagagatggagtgtggggtccacaccctccacccccgctccactgcctgcacaccatgccaagtccaggtattctagggaatggaattc

SEQ ID NO: 198092 - DNA, 1000 bp, Homo Sapiens
taacccactttaaactaattgttctatgtggtatgaggcacctgtctcttcctagagaccactgcactccacctgtccctgagaatgactcctgactccactgcatacgagtccctctcccccaccttctacctggaaaactcctattcatcccatcaagacccagccctgggttgctcctgggtggcttttttcactctccttggcagctttaactgctgcctgggatgtgggctcagggccagtgccctggagggcccctgtcatagcccttctcaccagcactgagattggtcacctccgagtctggtgggcccggggcccccatgcaggtgcacacaagtgctgctgagtgactggtgatcatacagccaacattcgcggtgacattcatgcaccggggacttcacaattccccggactcgtcataagggctgctcggccccatcttacaaatggggaaactgagcctggggggttcagtaacttgctgagttcacacaaacagtgagtggatggctggatgagtttgtaaaaggaaggtcgattctgcatgatgaagctaaattggaacccaaaattctctcttccggcccccagtagaatattatgggtgcacccaaaggaatgtaaaaagaccagatgcccaggacacggggcggtgcctgatgaaacagctgcattagagagtgactttgcaactctggagagaagccactgaaacccagcgctcctataaatagcagctcttgcaaagcatcgggtgtgaattttcgtggtgttggcaaattcagagattgagaaatccagagacgttcatgttcccggagaaaggagtggggtggggagggaggtcgcaagcaatgccatcttcaggaacaaaactcctgcataacgaagcccaggtttctgtgttttcgtgggtgttcccgggcaccttcgggcaggtggccccaggcgatgttgtgtgtctctcctggctgtggacgaatggacgcct

SEQ ID NO: 198093 - DNA, 1000 bp, Homo Sapiens
ggtgaggacagaccccaggcagatgcagaagtgggatcccagccaaggagggtcctcgagccccaggtgccaggcaggccctcaccctccgtcctggaggcaaccagcagccactacagctgttagcagaggaggaccgggctccctagctagctgtgttttgccagctgttcctgctgatggtgggtcagaggggggctgaaggcaaggaaacctggtcacagatccagagcctcagcgagtacagcaaccccatctaccctggttgcccatagcctccagcagtggggctctgtactcccaggaaagctgaccagcctccagggagtaccccacggagcttggccccatttccaaggaccagtcatgacgtgttccatgctctttaaacacaatggacagcatctaccagccctcatttgcaggttcatagaactgattaaaaactatgtgtttctgcatctacagctttaagtaataaatagtgccagagcaccttaaattatttgcatttttccgtcttttagaaatacattgattttgactgcgaggggtgtgtggacaggggaagcccagaggggaggtgtccccagagttcagagcggtcctcagtggtcctcggggccccaagggatggatgccaggccgtggcatgggatggggaggcagcccgagcaggcgtggccctacctgggtgaacaggtccagggccttgtgcaagttggcgtgcatgcccgtggggggctcgttggtgatcttgatggcgttctccagaatgccctgggggatgatgtgggtctcggggctgggggcaggctccgcgctgatgaacacccggtagtcctcatggctgcccgtgctgtagtgctccagcttcttgtccagtgttcccagccaccgggccaccaggtggatattctgcagccaagactagaggctggttacacactttgcccagctcctggcccacgaggagagactggcacgtggctatgttccc

SEQ ID NO: 198094 - DNA, 1000 bp, Homo Sapiens
ggacagctatcaagcccctgcaaggattggcaagagccagacagcacctcagtttaagcaccagtggaacatccagcaggttatcaagacaatgtgtcaggctcctcagagcaaagggagggccgaaagaatcacatcaaagtcctgctcctcaaatgggaacccaaagccatgatagcatttgccaccatagaaacagggttcagtgtggtgatgagtcctgctctgtgaacctccgtctagcctcagcctacatatccagcatggagtggggcagatctacaaggaggaaagaacttctgtgaagagaggcattgcctaggggtgagggactttgcaggcccccagacctctagggcaagaccccagaacagtacctggcacatagtagacactcaatatcagttgagggaaagaaggaatggataaaagatactgagcattgatcccctcacctgtgaaatcagcccaataatatatcactgatagtctgaaaaaggctaaaattagttggcagtgttgtctgcagggctgagctcatgaaaagcactagagaagctatagccatgaagggatgaaggtctgggaaaaaatatacgtcatttttgtttatttatctgcagtgaccaggacattgcctttaattagcaatctaattatatattgggacattaaaaatgtacaaatggggcatgaggattttattccttgtggacaaggccacaagtgtattattcaccactgcatctcaggcaatgtaatccactgcatgtttaacaaataactgacatagaatttatttatttaattcctctcctgcagccaacagagtatctctcttcgggaaggtgacctctgtagttcttttcttcccccccaccccttggctggggttgtttttctctccaattatagtgaaagtgggtggaaagtattggttctctctgtccctgaaaggaattcacttacttcactgtcatggtccacagtgaccaagctt

SEQ ID NO: 198095 - DNA, 1000 bp, Homo Sapiens
gaggtgcccctacaatccttgtttgagaagggcacacacagtgcagatggtacctgggtcttgctgtgtgagttatctatggctgcataacaaactcaacagcttaaaataaccctcatgaatgatttcttttgtgtccgtgggccaggagtctgggtcctctgtgcagtctcaccaggctgaaatcaaggcgtcggtcaggactgagttttcatctgaggttcggggtcctcttccgagttcactcgtgatggtagaattcgattccttgtggttgcaggactgaagttcctgctttcttgctggttgtcagccagggcctgttctgagctcttacgggccacttgcaattctttgccacctgtcccctccacgaccaagcagtctgcttctgcctggccaggaggaggctccctccagctcagcatccctctgatgtcttttgagttcacctgattagttcagtgtcacccaggacaatctccctttgactgtctcaaagcccactgattagggatgttaatgacacctgcagaatcctttctgacctacaatgtaatgaagggttgcagaccatgccaccccaaaatacgtcactttggtaaaggatcattttgagctaaaggcaccttaaaacagcagacacaggaagggtgctctgacctctccattgattcctgaaaacaagagataaaacctgtgtgaaagatgccctccctgtcccagcagaaaaagaaatgttcttcagtgggagtcagagctgagaaaatgctgtacaaatggatcttgttaaaataattcttatcttcttttggcatcccacataatttagttactttcctgcaattgcctctctttgctcgagcaggtatagaaacattgtggttttgccggttctttctgttcatttcctaatgaggtttcctgtgttacataaaatttagattaaataaatcggtatgcttttctgctgttaatctgtcttatgccaagtgaattc

SEQ ID NO: 198096 - DNA, 1000 bp, Homo Sapiens
tctctgagcattttttttcattcgtgaaaaacaagtgggaaaataattctacccgagggagttatttgaagagtaatgaactaattgaataaataaataataaaaattaaataaaaaaacacacaaacacaaagaagagtaatgaactaatgatcttaagacccctaggatattccctgagtaggctcatagcagatatcattttctttatcatctcctttttctgtacttttttcttttattcattttaaattgcgttcctcatgctccaatgaagattaaatttttgtccttagatcttctgtatcaaacaaatcaaaatgtgtatgtgatactgctttacagtgtaacattctatgttgtaaagaattttgaagcaatcctattattaaataatgcaggtggagaaaagatctaaatcaactcaaagatattgctgggtttgggtcataattctttagcacagattatgatgtgtgtttggcaaatgtctgcatattttattttatttttttatctccactcattctcctatcatcagaacccacagtccatctgcctctgccgttgaggagcctaaggcaatagctacagcaattacctctcgtctcattattgccttctgcaatgccacttgggggactattttcatgttggcactggcagaatagacatttgcttaccaaaatttacccaagatatcttccttatttgtattcccaagtgtcagtgcttttatttttgacattaaaaaaatgccagtatttctggaagaaatataaattaaactgataattttttcttagcataaattcatctattcacaatagggaagttcatttgaaatacatgactttcatggggagaggagaggtctgtaacatggaacctgacatatatacatatgcataactcttatttaaatacataatatacgggccgggtgtagtggctaatatctataatcacagtaatttggaggactgagacaggagaattc

SEQ ID NO: 198097 - DNA, 1000 bp, Homo Sapiens
caccgcgctccgactggggatggaagtttttaaagataatttggccagtaggggcttgggaagtggaaagtgctgattggtgaggatggagatggaatcacacgggggtcgaagtgaagttttctcgctgtcttctgttcccgagcggggattgcagaactggttgagccaaataattggtctgggtggtgtcagctgatccatccagtgcaggggctgcaaaatacctcaagcactgatcttaggttttacaatagtgatgtgatccccaggaacaatttgggaaggttcagactcttgcagccagaggctgcctgaccctaaactgtcatttctaatcttgtagctaatttgttagtcctacaaaggcagacaggtcccaaggcacaaaggtggtcttttcgggaaaggattattactaattttgtttcagagtcaaaccataaactaaattccttcccaaggttggttcagcctatgcccaggaaggaaccaggacagcttaaagtttagaagcaagatggggtcagttaggtctgatttctttcattgtcataatttcctgttataatttttgcaaaggtggtttcaatgagactccttggccagcttcagtcagggagctgattcactctgtgcagctgtggcccaggagtggggttagggtcctgtaacagattgtgaccagggttgccatgtagctggggaggaggcagaggtctctaacatgggggcactatcttgtcctgcagagatatcccagtgagtgtgcactgtagagacccccgtccagacactccccaacctcctgaagggacagaggagcctcgcagatcagctgttttgaggccatcctccaagcagaagagctggcatgctcttgagatgtcccgctgggcatgggggctgagacccaaacgccttcctgcatggcccaaacctggctccaacctaggaccgcccccatccccacagcttcaggagcaaagccagtgcccac

SEQ ID NO: 198098 - DNA, 1000 bp, Homo Sapiens
aagtgatccacccaccttggcctcccgaagtgctgggattatgagcatgagccaccgcgcatggctgttagcgatgtgttaatgattggtttaatatctcttgtgtgcgtgcgtgtgtgtgtgtgcgcgcgcatgtgtgcgcgtgcatgtgtgcgcatgcgagagagaggagcatgccagtctgcagccttacccctgccctccctctgcagcgttctctgtaaactaatctcagaagtgtcatatcatcacctccgctttgtgccattggtcactcacacagactaactctgggacaatgggaagggatgatccaaagggatgaatgtcaggaggtgaggattattggggccctctttgaggccactttccaatgtttttgtagtctcagatctgaagttaggatggtttctctaatactacttttacttttttaaactttaaagttcaggggtacatgtgcaggtttgttatgtaggtaaacatgtcatgggggtttgctgtacagattattttgtcacccaggtgttaagcctagtacccattagttattttccctgatcgtctccttcctcccaccctccaccctctatccttcagtcagccccagtgtgtattgttgccctctgttagctcccacttacaagtgagaacatgtggtatttggttttctgttcctgcgctagtttgctaaggataatggcctctggctccatccatgttcctgaaaaggacgtgatctctctctctttttgtttttaacggctgcatagttctgatagtacttttggagaaatctaagaattaagaaataatctagcaatactatttttgctgttttccttttcagcatatatttctctttgataagttcaaaatcataaggttttttttgaacttgcttattcagccagcattttattttagctttttattatggcaaatttcaaagttcagaaaggagagagaacaataaaatgaacttccatgtactcagcat

SEQ ID NO: 198099 - DNA, 1000 bp, Homo Sapiens
caaggactaaatatgtataagtatatatatgagtatatgtaaatgagtatatatacctacaattgtaatgaacttaggatagtgcctgttacatagtatgttctataaaaatgttatctctgttattgctattatgagaccttttcaaaggcaaaatcctttatcagtcacctcccctattcatatagccacctcttagtggccatgctttgatagtctcttggtaaattattttcttcacctagcagatttatgaaagaaaagaaatgctgagagaagtggaggagatgcggtgatggcaattatcctgatgagagaaaaaatatacagtattaggtgtaacaaagctgggaaagcaatgaaaaaagaaaactgagtatggcagaaaatctgaaatgccactcatttaaatttctttaaagaaatcttttggagttctataattgatgttgcctcccctaacaggtttttataatacgttaagtttttaatttcagtactcactgatgggaacatgcataataatggcataagaagaaactactcctgcaggatatagaatatatacagatttgatctcattctgcaaatgcttcttcatgcatatttgttgactctggcatactcttttgaagaatgaggtgttttctttgcttctgttttggcatataaagaagagccactaggaagtctcaaagttataatctaaatgggcttttaagattatatatctaaaggccaaagactaaggcaataatttcaggtgtcatctgtccttaagtaaggttgtattgtgatgtattatgacataatccattaacataataaggtacctattatgttacagaggcagttggctgaaataatagttttcttatgatcatattaggaaattgtcttttacatattattggtttcatagctatagatgaatcaacttgtattttaccatcaaagtgaaatgtatgcaagaaatttaattacattctaatgggaattc

SEQ ID NO: 198100 - DNA, 1000 bp, Homo Sapiens
tgactcagactctcagcttccaagtcctgatgccctcaggccctctgcccaggacatcagtggtgcccaggtaagtgccccaccaggtgtgcacctgtgtgtatgtatgtgagacacagagagagacagcaccccagttcaggcttccccagccctgaccctgggatggaatctccttgcactgtcccatggttgttggcagtggtggcaggggcagcttggaatgctgggttcactggccctttctcttgaaaaacataaagaccctgagttctgtcccccgatttgcttcccacaggcctaccacagccccccaggaaactcggaatgtaagaggctgatggtcaggggagaagagagggaggcagggagggaggctcagggtgggacctggggcccggcctcttctgatcagacctcctgtatgccagggaacagcagatgctgcctctaaaggtgagtaaaggctggtccaaaggtagtgagttatcccaactgattgttcacagtcagttacagatcaaactccttgttctaccctttccccacttctcactactgcacttgactagacttaaaaaaaaaaaaaaaaaactaggtgaatgcaggcatcttcagcatgaatgcaggtggtcctgccagggcctgccccagccccagccctgcaggccagactccctcaggccccaagttactgaggatgtccctgaagctctgactccagctgagatcaggcctgaggggaccctcttgggcattttccggtgcctgcaccaaatcaggaagctcctagtctgtgccccaagatcacgcctcatttggaggtcacacgaggcctggctggtgggtcctgccagggcactggatctggagagtggaggaagcactgggtgccggggtttgggctcggggccatgtacgcctcctcctaccccccacccccgcagctgtcccctagaagccacctttgcccacccccaccccaccccaccccacccca

SEQ ID NO: 198101 - DNA, 1000 bp, Homo Sapiens
cgctgcctgtccaaagacaggactctcttccaatgctgagatctgtgactctctttctgaaaacatatcagagggcagctttcaggaaccactggattatctggggcatttcagtgcgagggttgctcagaagtctgcatgctcagataaggcagggagtaatggcattataattcagaatccacgtgatgctgttagtaaatgtgcttcatgtctaggcagggcgtggtttggtaactcaggcaccataaaagagggcgatgtagccctggcagtctgtgtcagagagtagctttgtacctaatcctgagggcatgatagttgctaaggaaccattgaaatgcaaatgaattgccaaatacttagcagcaagatatcagaaaagggtgaggaggagatgctctgaacaagttagtcaggtgagtgaaaggaaaattactttctcctgattgggaaaagaaagccacgggttttcatgcagatcagcagcattgtgctactgtgtttttttaaaaaaaaaaaatctgttctttttctgcttagctgggaatagaagaaagttggagccaagagcagggaagttggaagggcaaatggagccttcttctgataaactctaagtacattttagatcactctctctctcaaatgagaaagagatatccaaggtatgaaaaaagtagtctgcaaatgactttgaagatctgccatcttatacaagactcaaaacctaggggaaaaagtacatcaaaaactgtgaataaatattctactgatgcaaaatggaaattccaggtgagactaggccatgattgaaatagtgaaaaagaagggaaatgagccagctcattgtacctatgagtatgcatttctttcattcttgctctccaatggatatcaaatttaaatgcagtggttaaattcagatgctctggtatctacattggaaccaggggattacagtgagaaattatggctcttcgcccattgttcttctcat

SEQ ID NO: 198102 - DNA, 1000 bp, Homo Sapiens
tgcattattatattcatcccttctttctttccctattactatcttgatctcatcaaggcctcccattcctaccttattccctctttcttggtactcttttttgtcttccctgccctttctttgaatactaccaaataaatatcaagccttacttctaatttaatggaacctcatttttctcaactcccattctttcctccgtagtaacatttgttgtttttatgatcatgcattatcaaagtaattcatgctcattataaaatctgcaaaaacataaacaagtagaaagaaatgaaaaccatctgttattccaacttccagaggtagccattttcaatttgttgctgcatttccttcaagtctttttttaattaaaatatgtcttaaagaaatcaggatcatagtagatacattttgtttctagctttttcatctcgcatttcatcatgagcatttcactcatgtaaaattttaaatacatcactgaaatgaaaattggaatatctagaaaaacaggattaagaaaatgaaaatcaatcctagttttatcatcccaagataatcactttaaatattttgatctatttctggtctttttcttctatgaatatttttaaacgaaaactggatcatacactacatacagtttgtgagctatggggttctacgtgaaaatttccaacatttattcaacactcattgagtacttatccttttctggtttgggggcaaaatggcaaactagacagaaaatgtttttgccctctagatcttacattctagaggggaagaaagaaaatacatgaacaaataagacagatgtgatgctcttgggataaatgctatggaataaaagaaagcagggtgaagaacggagactggctctttatatagactggtcagaggagagttccatgagtagacccctaagaaaaaataaatagaaataaaaacattgtattgtttttctggattttgtgttatttgtggtatatttcag

SEQ ID NO: 198103 - DNA, 1000 bp, Homo Sapiens
acgtgcatttaaaaagcgccccaatctggagtgggaggtggggagctgctgaggctcacatactctttgggccgcgctatcactagcaaatctggagaagatccctgactgcaagaagccccatcattatattagagggaagtcagagacattttaccttggctttcctgtaggcagatcatagcacttcaagttctaccacaaagatacagctattcgatccccaggaaatccaagtgggggctctggtttgctgttggaactcctagtcactgaccctgattccttgtctcaggagtaaagctgcctccgattctcatagggaacacgtctcctcaatttgtattctaagccagctactgcctgcaggccctggtcaaattaacttgtccctcatgaaatagcctcaccctgggcatatcctcctggtggaacgcaatttgtacaagaaaaatgcaaatctatttatgcatctccaattcaataaaaactggaagacttactatgggttaattcaattaagaatttttcactctggacaacggtaaagacttgatatataaaagctgcacagtctggaactgataaagcttgcaatctatcttgttgagtaatcatggaaaggagaattttgtttacacctaagttgagaaacaaagttcctaaaatgcacttaaacaaatatttaacctaaccaaacatgtgtaaactttcttactatttcagctttccaaaacactgtactactaaaattggttttaaaaataaaagcatacttaacttgggctttctgtagtattatttgactgaaactatgtagagtttaaggcaaaaattcaacccaggttttggccaatataacaacaattaaacagtataaaccttggggtggggggaaatgaggtaaaggggagagaagaggaagacattgaagctcattagcctcagcactacagaaattatgaagacacctgattttatcaatgatttactgagaatt

SEQ ID NO: 198104 - DNA, 1000 bp, Homo Sapiens
aatctcggctcactgcaacctctgtctcctaggttcaagcaattctcctgcctcagcctctcgagttgctgggactacaggtgcatgccaccacccccagctaagttttgtttgtttgtttgtttgtttgtttttagtagagctggggtttcgccatgtttaccaggctggtctcaaactcctgacctcaagcaatcaacctgcctcagcctcccaaagtgctgggattccaggtgtgagataccatgcctggacagaacactttacttctggcactaaatgtgagggtttttttcatacatcaactgattctatggtatcagatgggtgttttatgactcaattcagttctgacacaatctacctggagttactattacagatcccacaggttaagggttcaagtcccacaagactgtttccacttcatatgtcaatcacaagctgcggtggtggggcagagtaggggtggtcaccagttacccagacttctgtctgatttgactacaaattggggtttgccattatccccttcccaagtttgataatatgctagaattactcatgaaactcagggaaatgcttacttacatttactagtttattatagaggatacgataaaggataaagatggacaggcagatgatgaagtgcacagggctagatccaaaagggtcctgggtataggagcttctgttaccatagagttggggtatgccaccctcctggcataaagatgtgcttaacaacctgaaacctctctgcacttcagggatttttatacagacttcaaaacattcaaaacataggcatgatttgttattcattcaatctctagcccctttctcatccccagaggatgagaggtgaagattaaacttccaagcttcaaatcattgcttggtcattctggtaaccagccaaaatccaggagcccaccaagagttgcctcatcaaaacaatagatatttccatcactcaggaaattccacagaattc

SEQ ID NO: 198105 - DNA, 1000 bp, Homo Sapiens
atgatctccactcctgccaccctgccttctcttccccagcctgcactgatggcctcatggggagttccctatgatctgttgacagaggaagagaacactagggcctggtttacagatggttctgcatgatatgcgggcaccaccccaaagtggacagctgcagcactatagcccctttctaggacatccctgaaggacagtggtgaagggaaatcttcccagtgggcagaacttcaagtggtgtacctggtagtgcactttgcctggaaggagaaatggccagatgtgtgattatatactgattcatgggctgtggccaatggtttggctggatggtcagggacttggaaaaagcatgattcaaaaattggtgacaaagaaatttggggaagaagtatgtagatggacctctctgagtggtcaaaaactgtgaagatatttgtatcccaggtgaatgctcaccaaagggtgacctcagcagagtaggactttaataatcaagtagataggatgactcattttgtggacaccactcagcttctttccccagccacccctttcatcacctaatgggcccatgaaaaaattggccatggtggcaggaatggaggttatgcatgggctcagcaacatggacttccacttaccaagctgacctggctacagctactgctgagtgcccaatttgccagcagcagagaccaatactgagccctcgatatggcagcattcctcagggtgatcagccagctacctggaggcaggttgactatattgaacctcttctatcatggaaagggcagtggtttgtcctcaccggaatagacactctggatacggttttgcctatcctgcatgcaatgcttccgccaagactaccatccatggactcacagagtgccttatccaccgtcatggtattccacacagcattacctctgaccacggcactcactttgcagctaaagaagtgtggtagtgggctcatgctcatggaatt

SEQ ID NO: 198106 - DNA, 1000 bp, Homo Sapiens
atttggcccatcatgttagatctaggtgcttcactacaaattttatatattcattctctgcaaaatgagggcctactccaggtttggggcctaggctaagtaaaaacaattccactttaaaaatcttgtaacctgggacttggaatagttacttcatattgaaaccaaaataaaggaaagcctgacaaatcagctcttaccctccccatgtcacagaaaagatggggagtgtgtaaaacagacttaagaggacaaatgatattttctatgatagcctcataataactgttgctagagctgagcttctgtctacattctatttatattctacaaatatttttatttggtagttcctgtcctgagaggtatacttaatacaaattctcaaacacagcattttttatagaataggtagcagtgatatttcaaaacttgagctacatatctaaaataaatcctcacatgtaatatttttggacttaagaggcaccaaagaacccattttctaaactgggagttttgtattgaactccccataggtgaattctgtgttcctaagacagtactgagatggagaatggtgttaagaaagaagggaaggctgggtgtggtggctcacacctgtaaccccagagctgcaggaggctgagccaggaggactgcttgagaccagaagttcaagacctacctgagcaatatagcaagacctccatctctaaaaaaaaatataaaataaaattagctgggcatattggtgcatacctgtaatcccgtctacttgggagactaaagcggaaggatcacttgagcccaggagtttgaggctgaagtgagctatgatcatgccactgcactccagcctgggcaacagagtccttgtatcttaaaaaaataaaaataaaaaagaagggagggaggtccattctgtctttacagactttcctggcatcagccagtgttcaagaaaagtctctgaagaagagagaaaggaaatgaattc

SEQ ID NO: 198107 - DNA, 1000 bp, Homo Sapiens
cacaacagttagtttttgttacttttgtgtgtagatccaagagcgattcctgcaaacaaagaatttaacagagagaatataaagtatcaaactcaactgttaatccaacaataaaaactgtgggacagttcaacttttcccattcttttgctttggaagaaaaagatacatttaccaggactcactaacgataacagctaacattggctgagtgcattgttctaagtcttttttttttttttttttttttgagatggagtttcactcttattgcccaggctggagtgcaatggcgcaatctttgctcaccgcaacctctgcctcccaggttcaagcgattctcctgcctcaccctcccaagtagctgggattgcaggcatgcgccattttgtatttttagtagagacagcgtttctccatgttgttcaggctggtctcgaactcccaacctcaggtgatccacccacctcggcctcccaaagtgctgggattacaggtgtgagccactgtgcccggcccattctaagttttttacaagtattcactcatcatcctcacagcaaccctgagggagagaatattactacccccatttattatctgaagagactggggaatcgagatttcaaataattttcccaggttacactagcagtaagtggaagggtcaagattcaaacaggcagtctggctccagagccttctactgcatctcaagataacatatcaaataaaaaatagcacaggggggcagagggaaggaaaattttaatatgtgtacagaagtataaataaaacaattataaaatataacttctaggagtgatttgcaaaactgagagcagaaacagtaaattcttagactccttatcaaaaacccatccttaaagattagaactcacttgcaaacattcaaaaaatgtaccaaaatgttccttggagatgtaggatacagtggatttgaccatgtttttgagtgtttctccaattaacatccatg

SEQ ID NO: 198108 - DNA, 1000 bp, Homo Sapiens
ccattcatttacatattgtctatggctgctcttactctacagccgctgagtagttatgacatatggtccacaaagcctaaaatatttactatctagccctttccagggttcctgactcctggtgtagccagtctctaaggtctcttccaggggcttgcaaggtgttatgtagacacataacagcacttcgaaaatttgaaataatcacacaaacggaagaaatggtcaaaaagcacatgctgggtcccagaagacagcagctctccttgctttatgtcatcaacagcaaacagctgctccaaggggtcgcaactcgactcatattagaatcacctggggagaattttatttgtcgtaacaaggtttgagggaggcacatttcacacattagcatgaaaacccaatcatcatgctttggagaatttttttttttaatgtcaatgcccaagacccagtgtctacagtttctgatttaattgctgtggagtggagacctggtatcagctgtttttaaatgctgtccagaggctgggcatgatggctcacacctgtaatcccagcactttaggaggccaaggtgggtggatcacttgaggccaggagttcaagaccagcctggtcaacatggtgaaaccccatctctatcaaaaatacaaaaacaattagccaggcatggtggcagatgcctgtagacccagctactcaggaggctgaggcaggagaatcacttgaacccgggaggcagatgttgcaatgagctgagatctgtactccagcctgggcaacagagtgggactatgcctcaaaaaaaaaaaaaaaaaaaaaaaattagccagcagtggtggcacatgcctgcagtcccagctactcaggagactgaggcaggagaattgcttgaacctgggagacagaggttgcagtgagccaagatcacaccactgcactccagcctaggtgataaagtgagactctgtctcaggaaaaaaaaaaaccatccaaa

SEQ ID NO: 198109 - DNA, 1000 bp, Homo Sapiens
caagttatatagcctctctaatacccaatttcctactttgtaaaatggggttgatatagacccccctcagggttgtaaagatgaaatgaactgatatatggtaagcacctaatggtgcctggtgggtacatagtcaatgctcagtaagtggtgttgattaggtcaatttttttttttttttggccagtactgatattcattcaatggctatttgcaaagtgcttttggttccacctgtatagttttatttatttacttatttattttaatcttagtcccaaatattctgagcttcccttcacctgtatgtttttttttaaaattaattaattaatttatttttgagacaaggtctcactctgtcacccaggctggagggcagtggcatgatcttggctcactgcaacctctgcctactgggctcaagtgatctttccaccttagcctcccaagtagctgggactacaggtaggtgccgccatgcctggctttttgtatttattttattttttatttattttttaatttttgagacagagtctcatgctattgcctaggctggagtgcaatggcatgatctcggctcactgcaacctccacctcccaggttcaaatgattctcctgcctcagcctcctgagtagctgggattacaggcatgcaccactatgcctggctaatttttatattttagtagagatggggtttcaccatgttggccaggctggtcttgaactcctaacccgaagtgatccacccgtctcagcctcccaaagtgctgggattacaggcatgagctaccacacccggccaatttttgtattttttgtagagacagggtttcaccatgttgcccagactggtttcgaactcctgagctcaagtgatccatcctcctcggcctcccaaaatgctgggattacaggtgtgagctaccgtgcctggcctccacctgtatggttttaaatgtacagataagcaagaatagaacacgaccctgg

SEQ ID NO: 198110 - DNA, 1000 bp, Homo Sapiens
tgtagggtgatttctgggttattaagaagaccctgtgatccccaaacacacctcactctgacctatagacatcaaaatcccataataagagtttaactattttggctttaaccaaacagggatttttaaagcatgttaagacttcttgccctttctccaaggtacaggaatgaaactaggggatgttataattttgacttatctttatctgaccatatatagcgtgccctggctttgcaaaccattgaggcaatgccatagaattgatcctcccaaggagtttagtccactcagcttgcttggggtaatataggcattggtcaggtcaatacccatgaaaaagtcattcacttacttattccacgaatacttattgaggacctactgggtactcagtacctagttccgtatttcctatgtaagatctgcagagtttacacataatgacacaatgtaaatcagattgtaactgtccttttgcaaactcataaaatgatataactatatatacatcatatgctactgttttggtatacacattagcatatcacacatttctaaattcatagtgggcagaggtcaggggtggggaaaatgattaattgccactcttacattggattccatctaaaacctgtctgacttgtatgtcctccaactctttggtagatgaggacatgttttctttggctgacagtgttattattattatttataataaatcataattccacctcccctatcacaggcctctccttctgggcatgtattccatattctccagtgcagtcttctgtctgagtgtccaacctcaaaaaatggctaggaaatagaaactgtatagtggttttatagcaaacttacttttgcccagcttctccttggcctgcacaaggtccatacttataagcatacaccaagcgagggataaagtcagatgttatcgctatgacaaatgcatttgtgataacagagagaattccaatgccttcaagaattc

SEQ ID NO: 198111 - DNA, 1000 bp, Homo Sapiens
tgtgctttaagccaccaccgtaaactagataaacctcaatatgtatcctctcaaagatgattttgaactttttcatgtgatactaaagaagattctgtaaatgttacatgaacaacagtcatttaaattattttgctgctgttgttgttaaagaatatgtgctttaagccaccaccgtaaactagataaacctcaatatgtatcctctcaaagatgattttgaactttttcatgtgatactaaagaagattctgtaaatgttacatggcagacgttaataatgaagcacttcaataaatagcaaataatcaatgagtgttagctgttatgttttaatatccctttgaatatttttaccaaattaaagtattaaagtttctataattttatttaaaaattaactataatataacatggatttaaaatgaaaaatggaataatttagataatttaaagtgactttctttatattaaaaacatactgtctatatttagctattaaacataccattaactaaaaaagagaatttaaattaccttactttatcagttttaacatataaaagttttaaaacacattttaacatctccaaaatcagaacattgcctattatcaagtgtgtgttaaaatctttaggattcaggtaggggtgatgttgttgttcttaccggtggatacataaacttatcatagctatttatgtatcacttcaagtgagttatgtgtatcaatggtactttacacatgccgagtttaatatttgtttaaaatgtcttctaaaatattatgttttggcattgaaatgaaaagttattgtacacacagaagggcctggcagaagagtaactgagcaaacattttatatcaatggagcaaatatcggctactggaggaagaactacagcaaacaatcaaatatttcacatggaccagtaaagaataccctgaagtaggtgaagctctgttacattctgttactaagatttccgcaaaagaatt

SEQ ID NO: 198112 - DNA, 1000 bp, Homo Sapiens
ttttttttttttaacattttgggatcctggaatgtaaagtgcaaagcatttaaacactgagggcacagagggaatggccttggaacagagaagctgtgatgaaggaagaggaaaggatgtttgctgggaggggtggatttggttaaatcctgcaccagcgatctcggctcactgcaacctccccctcccgggttcaagtgattctcctgcctcagcctcctgagtagctgggattacaggcatgcaccaccatgcctggctaacttttgtatttttagtagagatgggttttcaccatgttggccaggctggtctcaaagtcctgacttcaggtgatccgcccacctcaacctcccaaagtgctaggattacaggcatgaaacactgtgcccagcctaattcacttcttattaatgcatttcataaacattgagtttttttgtttctttatttgtttgtttgagatggagtctcactctgtcacctaggctggagtgcagtggcacgatctgggctcactgcaacctctgcttcctgggttcaagtgattctcctgcctcagcctcctgagtagctgagactacaggtgcgtgccaccactcccagctaatttttgtatttttagtagagaccgggtttcaccatgttgggcaggctggtctcgacctcctgacctcaggtgatccccccacctcggcctcctaaagtgctgggattacaagcatgagccaccgtgccgggccaacattgagtttttgtttttgtttttttaatgtgccaagctctgttaggtacttatgtcctctttcatacttagggcaaagctatgagatatgttttgtcctttttttttttttttatagcagatgaactgccaaagcctgtaagtaccataagtggtttggccaaagtccaccagagagcaggaggaaggatggagatcctgcattcaatgaacaatatgacactaccaccttgagaagatttttgcaaagaattc

SEQ ID NO: 198113 - DNA, 1000 bp, Homo Sapiens
agcacttacaacctaagtgagttccctgaattggctcatgtaatcctcataaccattctctttaaatattgctattatgccccattttacagacaagaaaactgtgctctgaggtgttaagcagtttcagggaggtcagaattcccaactgagcagctgatcattgcactccacttgcccctcagtgaggtctgaattcagagtccaggcctgaagtcactgttctgtaaggatggcccttgggggcggttcaggagtccaggccggcactgccaggacaggcctttggaacccatgacctctcccaggctggagaggaagctggcaccaccaaggaggcacaaagatggggaagccagggagagcgaagtggcctcggggacagaaggcaggagacctggcacttaatggatgagatagagagaaggtgctactggcagcgacagaaaaagaactgtcagggccaggacatgcagaagcctgagaccccaccatctccagcctgcgaggacactggaagtaccaatttttggactgcaaaagcctctcacttaattcatagaagcattattttagagggaggtggaatgggcgactgggcacctcaggcggctgctggatggggggtcctcagagctgcaagcctccgccatcccttgccatcccctgctgccaccgggcctccgatgctctgcgcctttgtcattccgcatcccacggtgccagctaagtcactcagctgtcacaatgaggcctggagctgcaggatacaaaataactctggggagacctctcagaggcgaggcgggggtgggggcggggtgggaggcggtggggaggggaagactgggccccaggggcgcggaaaggagcaccagctgcctcttgcaagttgctaaattagttgggctgttgtttttcctttaatttttgtgtgaattcaagaataggtcgcggatgtcttggcagcttgtgaatgagacccttcctcaaagaattc

SEQ ID NO: 198114 - DNA, 1000 bp, Homo Sapiens
ggcaaagtcagtagcaactgaccatggaaccatgaaacagaaaattattccctcttaaaaatgtacagtctgctctgtaaaaatagagttgggatctgacttgaagtgaacctggcatcacaaaaaccaaacttgccaaggacctgccatggtggagatcacatgcagggcctccaggtccacagaaaacaaggcagtcaccactcaagccagaaatccagtaagtgggggcaatccctccacgcagctttgacccttagtgcaggcttacattaatgaccaatctctgaacccacagaagagggaaatgttggttccgtatattcatgaagaatatctgattaggcagtaggtggagagaaagtaatcatcagcagaacataactccttccactatgtaatacaactgaacattcacacatgttctgtttaaaaaacatggaggaactcacagtttcttgggagggcagggttctatttgtttaatggagatggaagaatggtctctgaggatactccctgtctgaggtctggtgcagaggagacactaaattttcagagcagggacagcatagggtgaaaacctctcctttaattatctgatgaagtggagcacaagccccctgctggcaagcctatcaaagctacctccctcctacattcataacgagacccaaatagttttcccactgtatttcctttcacaaacatatatagcttatatatgacaaaatggtccttgtaaagcaataaacctgggtttctgacttccaagaataaggttattttaaagacaaactgtatactggccagaaggcatgtaaagcatttgcagtggtaaaaagctaaaaacctcagactttgggccattgggcttggagacagaaccatcagaaaaccatccaaacgggaacgtctggtgagaccacagggcgtcccaacagctgcatgacgagggcaaccccaatgccctggctcaccccagtgctgcgaggaattc

SEQ ID NO: 198115 - DNA, 1000 bp, Homo Sapiens
ataggagaaataaggttcttagtttcaagagaatcaattccataacttccatatacactttctcctaaatctgatgtgcctcagaactagtgtagtcaagtggacctagtagttccttgtccccatttcccctttcacagtgccctttatcccactttaaaagagaacagaatacccctctccatctgaatgctgaaacgatgtactgcctgaaagtgtaaaaacctgcaaggagctaaagagatcatctgcaataatgatattgctgctaagtagctgaataattttaccaacaaacccttttaaaagttaacctgtttaacattaattttttttctggtaaattgaaggagaacctattgaaactattcattgaaaaatcattacaaataagatcactaagtgatgtatgacatataatttgggaagctttcaaataaatgagtaacactgctaaaacacttcctttcactcaccatctacttatgtgaataatattactcaatgtttacaacataaaagcaaaaactagggataaatgatctaatgctgaacttgtctccttctaggaatatataaaattcatttgtgatatataaaccaattttttaagcccagttgatttttttatatttaataattatcaaaatttaaaagtatttatttgattatacaaaaatattaatgataatttggaataatttttaacactgaggagcattatggtccagaaaatttaacacaatttaaatttttataaaatttgttgcatggaaatatgatacagtcatcatcaataaaagatattcacacataatatatattacatccaaataaaaatctgtatcagaattggaaaaaaaattcaagttcaaagagaaaaaagaatgatgtaaaatttcccattgtaaaaaatgcttgttcgtttttttaatgttttgatgggcaatggcaacaaattactatggtatttatgaatattggatacacttaagaattc

SEQ ID NO: 198116 - DNA, 1000 bp, Homo Sapiens
gctgtgcgctggaaactacctgctaggcataactcattaacgttaaaaaaaaaaacaggctgagagactatagaaagggatctttttgactgacattgttgtctgggtgaactcaggtgttagggaaacatttacattatctgctcaggatgctgtgatttggtgattctctccaaaccaaatggtacccaagaatcggggcttacacggggtttcactgtagacagacaacgtgccttgagatttaaagggtatcatttttttataatttgttttccttccctagagtctttttcctaatatgtataaacaaaataactcaaaattcattcaaatgcattttcaggaaaaaaggaaatatgctgttttagattttagtcttagaataaattccaggtggaggatgaatgggtcagtgggtatgaattatgttgcctgatatctgtcttactttcccaaaagctgtaccagtcatatgaagatacaactttcatcccgaacttgctttatgtgctgtccttaaaaaagagagaaatctttcttgttgattgtaagtatatacaacaaaggcttagaaggaaatattatggtctggtcagggaatctcaggcatgtagctcagaatcctggtcagcacagcttaggaaaagcatcttaaagatttttttctcagcccagaacccctcttccaaactgctctaggttcaagcaaaggttaccctcccttggccaggggacctcttgctgcctgccagccagggatgtctggatcttcttttgatcttattttcccccctcaacccagagctatttaatctctcctgggagagacagaggcatttgttatttggccatcaacagttaactgcttttgtggtttacacacataaacagaagacaaatcaaaactacactcaggatatcacactttctctgtaaaacctgagactttaacaagaacttactttaccttctttcacataaatcatcccttgaattc

SEQ ID NO: 198117 - DNA, 1000 bp, Homo Sapiens
ttctgtgttagtttgtttacctgtctgctgtttgctttccagctagaaggtaagtgtcctctcccattcactgctgtctcctgagcccctagcgcagtgtcggcgcacgtagatattcaacaaatacttactcaatggatgagtatgggaatgaaaggaagaaatactccaggcatgaatttttgccgtcctgaatctaaaaccaatttacttgggcaaacactggcctatgactgagatctctgcatttgttttacaaagacagtgttcaccaaatccaagttagaagacttagagaaaaatactgaagttattccagtctgcctggaagccaaaagtggcatcattctcaccttctgtgataggactaccttctcaaccaagactaaattttcgctttaaactgttgaatcagtgttttataaaagcactccactttggctacataaaaagaccctcaacagtggtgtttcccccccacctctctttttacagtcagggtctccttccatcagtccattgctggagggcagtggtgtgatcatagcttaatagtggttatctccattggggtgatggaggatgattttgcttacttcccttatactttgtcattttttatatggacacattttacttcttcaaatttttaaataatgtttaattgtggcaaaacacatataacttaaaatttagcaccttaaccatttttaagtgtacagttcaatagtgtcaaatacattcacattgttatacaaccaatcaccaggatgcttttcatcttgcaactctgaaactctgtacccattaaacaactccccatctccctctccacttcccccagcccatggcaaccaccattctgttttttttctctgtaaatttgactactctaggtacctcacatatgtagaattatacaggatttgtccgtttgtaactggcttatttcacttattgaattcaagattcatctatgtggtagcctgtgtcagaattc

SEQ ID NO: 198118 - DNA, 1000 bp, Homo Sapiens
tggctccactgcttcacagccaccttattaacaaaagttctttattaaaaacaaaaaactataacactatggctcagccatttttcttttccactcacaagatagggataacaggtgctccccataaacagtgggtcctatgggtactacatatttagtagtaaactctgggggagtcccggccaaagcagggagagcggggtgtctgtgatttggtaacacagctaaggaagataccccttggggaatttccacttgactccagaaacacaaatccagaaacaaattcagtgagagtggggcatctgtgatttggtaacacagttaaagaagatactccttggggaatttccacttcactccagaaacacaaatccagaaacacgaattcagtgagagtaagttaggtttttcttttattattattattattaatttattcatttatttttaggtagggtctcactctcttgcctaggctggagcgtggtgacacggtcttggctcactgcagcttcgacctactgggctcaagtgattctcccgcctcagcctcctgagtagctggtagtaccaacacgcatggttaatttttgtattgagttttcttcagaaaatttcttaggattaaagcacactttagggaattattcataaatttacttttatcgaagaaagtggagaatagatcaactcctgagatgtctcattgagacatgtttttcaatttcaaattgaagataattcatgtcctgtttgcttctccttaaatattttccctgaactaagggttttcgtaaagatctagtacttagttgattctcctctcagtactgtcgtttcattctcagggaattcctttgaaaaacaggatgcaaataaagcagcctcccacgtcctgtattttacctctgctttccataactgaatggagtatcagaaccacgaaggcaagttattctgataaactctttgtgattcaggtagggattctgaattc

SEQ ID NO: 198119 - DNA, 1000 bp, Homo Sapiens
gaaagatggacaaaaaatgaagaaatgtaacctaagataaattaagggacattaatattcttctactttagatgaaaatcatttttaggtactttgaattatacatacagcacctagcacagtgccacctacatgtaaactataggaagctatctggtcttatagttgtttctgacacatttaatcacaatattagaaacattgatgaagtttttatagtcctttgaaatttaagcagttagccactgtatcttaggaaagaaatattctagttgtgatttttttttcttataatcttattggtgtcaattagaatttaccattgaaaaaataaggatgatcagttttatacttatgtttaagatgtgagccatcataatatattatacattttgatagattaccaagcccactgtttttactgcagcgtgtataaacatttagacataattttaaggttcaatgaatgtgactatcctaaaaaacacagacttttaattaaatacttatttctttagttcctatataactaggaacttgccttcttttcagtagactgttaaaagaagggctttcagctcaacataaactgtattagtcacttaatatcatacactgaaaaattattttgaaaagatacttgggattggggacatttatgataaaatttaaccagaagatggcagtgatgatcctcctatactccctgcaacggtaatcaaaaagttttacaaatgtcatagcatgaaatgtgcacgttcagctgttgttatataatgttaaaagttgaggatctaggggaaagcacttgctgtttattttatatactatgaaaaatgtgtatttttctataagaagggattaagaatattttgggtgtctgtatctttgtctgtacacttcagttttttctgaatactggggtaaggaagttcccataagtcttgccttgtttatttgcatgcatcactttatgttatgcataatgtctagaaggcat

SEQ ID NO: 198120 - DNA, 1000 bp, Homo Sapiens
agtataccaggattctacggacacacaatatatttttaaataaaatcaaagtatattgttccatattgtcatcagatacagatactcatagatccaatgtcttcatcacagactcactaaaactattctaaaagaatagccaattgtcaatgcctctatgtattacttgacaaaatacactgggcaaaacagtgatgatctgcaagtcccctttggcagtatatgcatttgggtttggagtcagggactttcttttcccttcaggaaaaattgaaatctatttttcctgggtgggaacaaggaggtcaatagtgcccccagaaatgttacctttactattaagtataaaaggtttttttctaggaaaataaatagtcccactcccagaatgccagcagctgacactgaaagttcaggcaagaacaagaaaccacagaaaccttggagatgcactgctaagtcgctacaaaacaactttagggaatattttctaccacatttcttctaaatcacaatctgatagtgtttttcttatattccttctctcgataagctgaaccagatattctacatctggtcagacattgggcagtagctagtttcaggaaaaaatatttcaccctcattggagaattaaaacttgcttaatttctggaaaattaattaagtatttctcaattacggtagatattttcatcttattggtttttatacaggaaattttgatggaggatagtgaatggcattaccttcttgcttggttaataattaaggagaacattcagtcagtcagtcaagaaaacgtattgtatatcagcaatctgcaaagcatacttcttggaagaaacagaaaattaaacatcataagtcataaaccatgttttcaaatagtttttagaattttttctttgcctttactcttaaaatccattataaagagtctaacattagatttttcttatatcctgtttggcacactccgagctttcaacctgaattc

SEQ ID NO: 198121 - DNA, 1000 bp, Homo Sapiens
agtttctcaaatttttcttgttttttgatgaccttggcagtttttttttttgtttttgtttttgagacagggtcatgctggtgccccggctggagtgcagtggaaccatcgtagctcactatgacctctaactcctgggctcaagtgatcctcctgcctctgcctcctatgtagctgggactacaggcacacaccaccatgcttggcgaattttcagatttgtaaagataagtcttgctatgttgcccaggctggtggtgaacttctggcttcaagcgatcctcccaccttggcctcccaaagtgttgggattacaagcgtgagccactgtatctgactgaccttgacagtttaaggaggtactggtcaggtattttgcagaatgtccctgatgtttttctcatgatcagactggggttaagagttttgaggaggaagaccacaggggtaaactgccattttcatcacattgtatcagagctatctcctagcaacatgatttatcattgttgatgttgaccttgatcttttggctgagttagcatttgtcaggtttttccactttaaagttactctttttccccatttctagactgtactttttcaaaggaagtcactatggatagcccacatttaatgagtgggaagttatgctctgaattcttatatttattttatttgatttttttgagatggagtttcgctttgtcacccaggctggagtgcagtgacgcaatctctgctaactgcaaccttcacctcctgggttccagcaattctcaacctcccgagtagctgggattacaggcgagtgccaccacacccggctaatttttgcatttttaatacagacgggtttcgccatattgcccaagctggtcttgaactcctgaccacctggctcagcctcccaaagcactgggattacaggcataagccacagtgcccaactgctcttaatacttacagatggaaaatccacataaattatttggaattc

SEQ ID NO: 198122 - DNA, 1000 bp, Homo Sapiens
cgtgcccagccccctcagtcttctgtgaaaactgagagaggtaaggaagctacagaagaaaagtttaaagttagtagaggctgaatctcaacagattttcaatgtagatgacacatttttatgttggaagaatataccatctaggacttttataactggagagaaattgttgggctcagtggctcacacctgtaatcccagcactttgggaggccgaggcgggcagatcacctgaggttgggagtttgagaccagcctgaccaacatggagaaaccctgtctctactaaaaatacaaaaaattagctgagtgtgttgctgcatgcctgtaatcccagctacctgggaggctgaggcaggagaattgcttgagcctgggaggcggaggttgcggtgagccaagtttgcgccattgcactccagcctgggcaacaagagcggaactgcatctcaaaagaaaaataaataaataaataaacgtaactggagagaaatcaatgcctggcttcaaagcttcaaaggacaagtcagctctcttgttaggggctaatacagctggtgactttaagttgaagccgatggttatttaccattttgaaaatcctagagcccttaagaattatactaaatatgctctgcctgtgctctatgaatggaacaacaaagcctgaatgacagcacatctgcttacagcatgacttactgaatattttaagcccaccattgagaactactgctcagaaaaaaagattgctttcaaaatattactgatcattgacaatgcacccgatcacccaagagctctgatgtagatgtataaggagatgaatgttgttttcatgcctggtaagacaacatccattctgcagcctatggatccaggagtaattttaactttaaaatcttatttaagaaataatatttcataggctatagctgccatagatagtgattcctctgaatctgagcaaagtaaatgcaaaacattctggaaggaattc

SEQ ID NO: 198123 - DNA, 1000 bp, Homo Sapiens
ggaatatgagaaagtctatctacatggggaattggggtagccatcagagaggaggcaagctgacacgagaagggtgagtgggagattatcatgtgtgtgtgtaggatgaagatgtctggcaatgagaacagaacaagaaaagtatgaaagcctgagggagcctggagtagcccgggggaaaagtaggttagtgttgttaagtgtaaattaccctgaaagcaggaaaggctggtgagaaatggtagagagcccagattataagagccttgtatagcaggcaaatgtatgccaatgtttttcccactgtataggttgtgggggaagttattgaagaattttgaagagagaagttccataatcactttggtatgtttaggttctgaaagaagattcacaatattctgattgttttgttgtttataagttacagaaatggcacgcacacccttttgttcctaggggtttcaatagttcttgttgtaatagaattgagggatgccaaaagcaatatttgaactaagtgatacattagaattataataagaatctgtgagcagatttttagttaacaggtttttaataggctgtgatgcaatccctaatggagaagctttaattatgaaagatagcctgcctctaatggaaattcagctgggtatgtttttattgctcagtgaattaaaaggtttatataggattacattgttaagattcttggagaaaaacatataaacaccaaatgaaaactttgcactcttttctttatcttttgcagcaaagcggttaatattccagaaatgaaaatcatttaaattttgcataatttttataatttcaggggttaagcatctgaaaggccagaatgaatcagcattccctgaagaagaagaaggcaccaatgaaagagaggagcagcgggaccattaattactggtctgcagcaagaaggcttcttggaaataactgaactattaacttttctgagtataccatggaattc

SEQ ID NO: 198124 - DNA, 1000 bp, Homo Sapiens
gtggcacaatctcagctcgctgcagcctccacctcccaggttcaagcaattctcctgcgtcagcctcccgagtagctgggattacaggcatgcaccaccacacctggctaattttactttattttattttttctttttttgagacgaagttttgctcttattgcccatgctggagtgcaatggcatgatcttggctcaccacaacctctgcctcccgggttcaagtgattcttctgtctcagcctcccgagtagcttggattataggcatgtggcaccacgcctggctaattttttgtatttttagtagagacagggtttctccatgttggtcaggctggtctcgaactcccgacctcaggtgatccacccacctcaacctcccgatgtactggaattacaggcgtgagccaccgtgcctggcctaacacccggctaatttttgtatttttagtagagatggggttttaccacgttggccaagctggtctcgaactcctgacctcaagtgatctgcctgccttggcctcccaaagatctgagattataggcatcagccactgcacccagccttattagagtatattgttataattgttttgtcttatacatctcatgtaccccacaaacatatacacctgctatgtacccacaacaatttaaaaaaattaataaaatttaaaataaacctcatagcatatatagggtttggtactagctgcagtttcaggcatccactagaggtcttaaaacgtatcccctgccaggtgcagtggctcacacctgtaatcccagcactttgggaggccgagacgggtagatcacctgaggtcagtagttcgagaccagcctgaccaacatgaagacaccctatctctactaaaaatacaaaaaattagctgggcatggtggtgcatgcctgtaatcccatctactcaggagagtgaggcaggagaattgcttgaacctgggaggcggaggttgtggtgagccaagatcac

SEQ ID NO: 198125 - DNA, 1000 bp, Homo Sapiens
ttaacgaggtaagagttcagggcctacacaatgagcaccaggtttggggaaaacacagctgagactcctagacctcagtttggcaaagaagtgtgtcccaccctaggttacctgccttcaaggcagggccagcttcatgggcctatgatctgtgctgtcacacagggccctgtactccaaagggccctgtgtttggtgtaatgctcacttgttaccattttgaaattcttagtaatttttgaacaaggggctgtgttttcattgcatactgagccctgcaaattatgtagctggtcctgatcctagggtgggaagagagagcaaagttcagaccacaggctgaaagattcctctttaggaaacccgtaagctctcagaactcatatgattctaacagagttgaggggttgggaagaatgcctcctcaccactgccatgtccaatgagactgggattttttgccaactctggcaaatgggggctgaagcaaatttgatttgattttggaacacaaaggaatgtaacatttcttgcactttagtgttgcagaacaaactctgaagccttccatgaagattttattatgtccgtcttgtgtttagagttctgtagtggctctccattactaagaaactaaactataaacctcataggaaagcattcaagattctgctgatctaacaagatcttagtcctgctgtccactaaatcctctttgcgaccttaaactctagttccagtagttaatcttccatccacctctgtccttatccacctggaatccacaccattccaaacagtcaaccactgatacgagtttttttgtgagtattcagaaatttaaaaaatttatacaagtaaataatatgcactttgttttcctttcttatatatatggtagaatactatacccattctcttctattcttcatgcattctcttatgctactgtccttgatctggaatatttttctattccatctccatcattaattcaaac

SEQ ID NO: 198126 - DNA, 1000 bp, Homo Sapiens
ttagtcttttagttcatgaacttggtatgtctatctgtgttgttagatctttgatttctttcatcagtgttgcgtagttttcagcatgcattctgtacatgtagatttacatctgagcatctcagtttttttttttttttttcagtgatagtaaatgagctcatttattagctcaaggagttctttttgttttctgtttttttgggtagtttccttgagattttacatagacagtcatatttatcctttttttgagatggagtctcactctgtcacccaggctggagtgcagtggcgcgatctcggctccctgcaacctctgcttcccaggtccaagcgattctcctgcctcagcctcccaagtagctgggactacaggcatgcgccaccatgcccagctaatttttgcattttttagtagagacaaggtttcaccatgttggccaggctggtctcgaactcctgacctcaggtgatctacccaccttggcctcctaaaatgctggaattagaggcgtgaactgctgtgctcagcctgtatttttattttcattccgttgtgtgtattttaatttcccttgagactccctcttttacccatggattattttgaagtatatttttgggtttctaagtatttggaagatttctgttatttttcttttattgatttctagcttgattcttggtggtcaaagaaacatactatatgtgatttttttttatttccataggtttttggggaacaggtgatatttggttatatgagtaagttatttagtggtgatctgtgagattttggtacacccatcactcgagcagtatacactgaatatgattttaatttttaaaaatctttttatgtttgttttattgccccaaatgtggtctgttattgctgtatgttctgtgggtagttgaaaagaatatgtatttttctatatttggaatgttctgtaaagtcacttcacttctgttggttgatggttttgttgaattc

SEQ ID NO: 198127 - DNA, 1000 bp, Homo Sapiens
caggcgcccgtcaccacacccagctaatttttgtatttttagtagagatggggtttcaccatgttgtccaggctggtctcaaactcctgacctcaggtgatccacccgcctcggcctcccaaagtgctaggattacaggtgtgagccacagcacccggccacctggcctcttttcttttcttttctctttctttctttcttttttttttttttttgacaaagtctcactttatctcccaggctggagtgcagtggtgcaaccccagctcactgcaacctcaatctcccaggcacactgatcctcctgcctcagcctcccaagtagctgggcttgcaggtgggtgccaccacgtcacattaatttttttgttttttttttttggtagagacagagtctcactatcttgcccaggctggtcttgaactcctgggctcaaaggatcctcctgccttgcccgcccaaagtgttgggattacaggcatgagccactacgcttagcctgcaaagagtttatatattaaagtgaaacttcttattaaacagagaatttttttaaagcattacaaggttcttattggttaaaatggaaaaaatatttttatttctgttcatctcttggtggacttgaaaaaccctccctaaagataaacactgcgtggcttctaagggctaccagtggaagtgaaatggattaaaacaccccgaggtgtcttggttctctgtcctacgactctgcgttttctattttcatcttcctatgatttgtgaaaagtcctgagctgaaccttaggtgtaggagtgccctgctcattgtgcaaccttgcaaattgctgggtcctcccaaagaatattgtgaaattttcttaaaggctgaaggtgtcatgatttccttcacacctcttgaagaaaatgagttcaaattggaccttgagaagtttactctgattctctaatatctcatagccacagtctaaatcagagagagatattgaggaattc

SEQ ID NO: 198128 - DNA, 1000 bp, Homo Sapiens
caaaatatataagttaagcctacgacatcctcccctatgatgcagtcaatgttaggggtattttagtgagctcagttttttttttttaagagatgggtctcactatgttgcccaggctggtctcgaactcctggtcttatgggatcctcccaccttggcctcccaaagtgctgggattacaggcgtgagccaccgcaccccgccagtgagcacagctgacaacaagctgcttttcaggtccgtgataaaaggaaaatattataagattaatgagatttactaattagatatactcgctgataatgtgttttattttaatgaaaagccatgagatttataagtaccctcctctgcatcaaaacaataaacctgaaatcctaaagtctaacattatgtgtaattatttctagaaaaaaaaagttatacctgccgtaaactttggcatatattttgctaggaagacacttcagcagttacacttagtaacaaaacaaagatccactgcctcactccagttaacacgtgcctcttccagaaataccagcaaccagtaatgtagatgcttccatttaaagggaacgttgctggagtaaacaacagatttttgcatgattcaagtatcctttaactaatggcagcatgaactgatttttcaacctaaaaacaacagttaaactggttgtttaaccatcaggttaaactagttttttgccagctttcttaaattgaaactgtgcacttaaaaagaaatgcaacataaacaatagggtgagaatataattaaatactagctaagaagatacagttttgtaaaaagtatacaaagaaatcacattgggtgacagacaacgtgagcatcccagaagctcatctgtggaggactcatccagagaacacggctctactgccctggaggcagtgggcattccctgagagccgattcaggctgtacaccccatggagtcagacacacctaggttcagaccttctttctgaattc

SEQ ID NO: 198129 - DNA, 1000 bp, Homo Sapiens
tagctttatttggccctttccttgcaggctatgtctcatgggccttggcacatctagttggtccactgagtggccatcaagaaccgcactgtggaggccgggcacagcggctcatacctgtaaccccagcactttgggaggcccaggtgtgtggatcatttgaagctaggagttcgagaccagcctggctaacatggtgaaaccccgtctcttctgaaaatacaaaaattagccaggcatggtggcgcacacctgtaatcccagctactagggagcctgaggcaggacaatcacttgagtccgggagacagaggttgcagtgagcagagatcatgccactgcactccagcctgggcaacagaatgagactctgtcaaaggaaagggaaagggaaaggaaaacgggaaggggaaggggaaggggaaggaaaatccaggataaaagctaaactaaacaggatacagcaggacattcccaggcaagctgaataggtaatttatgtaccctaagaataaagctctagaacaaggtctggctctcagtaaggaataggtaaagactagcgatttttattggtttagccttcattattgttgttgctattaccatggtaccagttttgttcatttattataaacagttcactgagctttataactactgtcttgtttaattttccccaaagcccaactgctgcattcttttacttctatctgcatggcccttcaaggcatctgagtgggtaatccctggatttagtctggagtctgaatcactacactgtgctttctcttcctattctctattcctgtagttgttttagtatgaagcactatccactggatataatctgacatactatcttatatattccagatgtttatgttagtcacctccaccccaagattagaaatctcttgggagcatggaccaatgtatcaatcacagtttttagatgcaagcaacaggaaccaactctggctaattaaagcagaaacag

SEQ ID NO: 198130 - DNA, 1000 bp, Homo Sapiens
tgcgaattgtgctgccataaatatatgtgtgcaagtatcttttttcatataatggcttcgtttcctacaagtagtgagaatgctggatcaaatgatagatctacatttagttcttgtaggaatcaccacactgttttccatagtggttgtactagtttacattcccacgaacagtgtaaaaaatgttcccttttcaacacattctcaccaacatctattattttttgattttctgattatggccattcttgcaggggtgaagtggtatcacattgtggtcttgatttgcatttccctggtaattagtggtgttgagcattttttcatatatttcttggccatttgtatgtcttcttttgagaattgactattcatgtccttagcccacttttgataagattgtttgttttattgtggctgatttgcctgagttccttgtagattctggataatagtccttcagttggatgtatagattgtgaagattttttttcccactctttgttccatggctgatgagtagaatgcatattctgtagttgttgggtagaatgttttgtaaatatctgttaagtctgtttgttctagggtgaagcttaagtccattgtttctttgttaattttctgtcttgatgacctgtctagtgctgtcagtggaggattgaagtccccagtattgtgttgctgtctatctcatttcttaggtctagtggtaatagttttataaatttgagaactccagtgttaggtgcatatatatttaggatagtgatatttttctgttggactagtccttttatcataatataatgtccctctttgtctttaactgcaattgctttaaaatttgttttgtctgatataagaatagctactcctgctcacttttggtgtccatttgcatggaatattcttttccacccctttatcttaagtttatttgagtccttatgtgtcaggtgagtctcttgaagatggcagatacttggttggtgaattc

SEQ ID NO: 198131 - DNA, 1000 bp, Homo Sapiens
ggcaagtgagggagagtagagggaaaaagaagagtctatctagctaatcgttttaaacatggatcataaaccattctctaaaattggaactggcagttgaaaaatatacttccatctatgaaagatttaaggtagcccaataacctttattaaccatgcatatttcttttaggtgaaaaagctcacctaaactatattaatttattgaatgaaaattttgtttcattaaaaataacaatatagcatgatgcaatttatatgaaattgtttttgatctcattaaatttattcaaatagagacatagagaaagccatgtctataatgaggtttttctaaagttaacaatggcagtcgatggagtttgggaagattttatactttccctttaacatttgtgcttttctgtattacttaaatttttatattgattttttgtattcaaatgaaattatgttttcaaaaacaatgaagtcattttaattagaaagtatatagagtgatttttatatgtttacagctacttccagctataaacataagccagaatgtatgcctggttaaaatttttataatccaaatatacatatttaagtattcttttgcccctttgttccttcaggtctcctttttctttataagtacagacaaaattaaagaaaagctctgcccaggcattatagacttcctattatctagcccctttctgccttgttttccctcaggcaaatattcttgttgaagtgactactttttgtgcctgaaccccatcctccctagccctttcttactacatgaagtaaggcggctgcctctgagtgtgagttcccggtgcctcctttcacctcacttcagcctatgccctccgaatgagtcagtccagcgctcaaactttttacttatcaaagtcctgtttctttacagtttccaaatgtcatatccactaaaaagttttcttgtttgattctagcacatcaatttttaccttttttttctgaattc

SEQ ID NO: 198132 - DNA, 1000 bp, Homo Sapiens
atccttccatctcagcctctcaaatagctgggaccacaggcacacaccactacgcccagctaattttttgtatttttagtagagataaggttttgccatgttgcccaggctggtcctgaactcctaatttggcctcccaaagcgctgggattacagtcacgagccacagtgcaaagccaagctttttatcacagtagcttttccccccaccttctgtagataatcttttttgtttcttaagaacatacttggagaaatccatgtgactataaacactttggaatgagttaggatggttttcaactcatttgggaattaaggataaatggcaagtcaggagatacatacaatagttagaatatgttaagtagcctctagaaaatcaataaaaatggagcatgactcatgcgcattgacctgtagaacagtgattctcaaatgtcttagttttgtagtttttaccttgtttatactcttaaaaattaaagagcttttgtttatatagattatagctatcaatatttactgcattcaaaattaaaacaaaatttaaaatttaagtattaactcatttaaaaataaagctatttcatataaacataatcttttttgaagtgaacagtaactattttctaaagaaaaaaagatttgcaggaagagtgacattgtttttgttttaaaaatctttttagtgtctggcttaataaaatacctgtgaattctcatgaatctgcttctcttttcaacgtgagtctgttgaatcacatgaagttgcctctggaaaactccactgtacactaataagagactgagaaaaaggcaaatgaaacttcatgtttttgtgaaaataattttgagttggctgatctcatgagagagtcctgggggagccaagaatctccagaccacacttgtagtactgccacaggaaataaacatgttaactagattactgcctcagagctcatgctttggattccgattgcctggattggaattc

SEQ ID NO: 198133 - DNA, 1000 bp, Homo Sapiens
atttttgattatgccttgtgaccttgcatatgaacttcactttaaagggtcccagtttcctcattgttaacatgtaaggattagactagattactggatttttttatcttttcttctgggcacagttctttatttaaataaaattttatgtggaaaatctctatcaatatagatgaaagaagaactgctctgattgaagttggagtgagaaaaagaagaaattactgagttaatgagttaggtatacttaaagatacttatctttaaccaggaataagataagaatatgtactaaaatactgatcctatacctttcccttttgtatcatttgttaacattttcatgttgcatgggaaagaaaataaatgacagattcagaaaatctcgtatgttgaccaaatagtcctattgactaagttataaagaactatcaaggactcatgcaaaggcagataaattagttagtattcactgaagcatttccttggagtaggttctacttgaactgcttaaaaatgttatttcatataattttcataactcttttatctccactttacaaaaagaaagaaactgagacagaaacattaacttgctcaaggtcacatagcttagtaatagacccagttttcaaactatatcacctgatttcagagactagagtcataacactttcctttgcttcccttattcgctgcagagtagtttaaagcggtggctctcaacttgagtatgcatcaaaaccacctgaaaagcttgtaaaccatggattgtaccttccccactccagcatgtctagttcaatgtatctggagtagagcataagaatttacatctttaagttctgaagtgcactacttgagaagaaattatgataaacaaccaaactattaaaagtaatttataaagcataaaccattgctgacattttaatgaaagtttttaaagtaataaatgaaaggcaaggaaggaaagtacagaacaacatgtaagtataaa

SEQ ID NO: 198134 - DNA, 1000 bp, Homo Sapiens
tggcaactttcttcattaaaattaaagccagcatcaaattccattagccgtactctgggcaccttgcattttttttttaatacatattgtttcttttgttaactccctctccacccataagaagttgtcagagaagttaaatggaaggaattgtttgctaaggccagagaaccattcactgttgttgtggggaaatggccattactggcccggtgagaacccccatcctgaaatctgcaactctccccccacaacctccccccccccccccgccttttgttccatcccctttcaaaatgggagcatattacctctaaaaacgacacactattttggatctgcagctttcagataggaacgactaattggtatgaggccttctagtttcttattttttctgagcagttttttttttttttaaagttcctgcttcccttttctaactgtatttccatagctgactataccttaacacaatagtaactcaatgctcagagagactcgcatttgtccggaaggccttagagttattttcccgaaggcattacttttatctgtagaacaaatttcaacctttgaaggaaaaaatcgagctttgctgaataagttctgaactattgtctgaaaagccgttgcctgcccttcacagcactgtgtacagttcaaaaggctctgaaatgcctccgccctggagctgctcctctttcgccagcaagaggcaacaaacagctctgattctaggacaactcagttcttggctgtgcgcagcgccttccaccagcaagcagaggttgtatggccactgcgaatgtctcttgtaaaggaactaggctgggatcaccatccccatgggttaccttcccctcccagcccagtctcataattgctttcttctgtcctcagtaatgctaagtttaggggctaaaccttcatctcagtttgttttcttcttctcctcctcctcctccttttaacttgtatcttacactgaaagaaacac

SEQ ID NO: 198135 - DNA, 1000 bp, Homo Sapiens
aatacatggatgtatttctggacttattattctgttccactggtctatgtatctgtttttatgccaatgccatgctattttctatagcatagctttgtaataaaatttgaaatcagttagtgtgacacctgtagctctgacctttttgctcaaagtttctgtggatagtaggggtttttgtggttccagtgaattttaagattgtgttttctatatctgggaagaatttcattggcattttaatagggatttaattgaatctgtacaatgagtggtattgacattttaagaatattaattcttccaatttataagcatgcaatatatttctgtttctttgtgttctcttccatttatttcctcagtgttttatagttttctttatagatctttcacttcagttatatttgcttgtatgtatcatttttgtagctattgtaaatgggattgctttcttaatttctttttcagattgctgtgggtgtatagaaatgctatacacaatatacaacattcttgcatgtcgattttgtatatttcaaacttactgaatttcttcttgagttctaagagttttttgatggactctatagggttttctaaatatagcatgatgtcatctgcaagcaagataatttgacttctttctttccaatttggatctctttttatttatttctcttgcctaattgctctaagattttcaatactatgttgaataaaagcagtgaaagtgggcactcttattttgttccagatcttagtggaaaagctttccatttttcccattcagtataacattagttgtgaatttgctatatatggcctttatcattttaaggtatgctcctttcatacttaatttgttgatagtttttatcatgaagaaatgttgaattttattgagtgttttcaagcatctattgaaatgattatacagttttatcacgtgttttagtttgcatatgttgaaacgtccttacctccctggattgaattc

SEQ ID NO: 198136 - DNA, 1000 bp, Homo Sapiens
aagtttaccttgttttaactaattgccagttcagagtcactggagattccattttaaattaatggctgtgaggtattaaatgcaaacatgtatctattgagaaattagaaagagaataagaaactaaatttcatttcatgacagtgctctcagttcttggttgcctgatacattaaaacagtgggcagcaaactatggtccttacataaaatctggcccaccgcttgttttttataaataaaattttattggaacatagccacgcccatttgttaaagtgttatctgtgctgctctcttattattataaaagggaagagttgaatagtttcaacagacaccataaacctgcaaagcctaaattatttattatctggcccttcacagaaaatgtttgctagcccctacattaaaaggtacctactgcacgataatattctgtggtggttcttaggccaaacctagttttagctagagggtggtcttcgtgttcttattgcctcccaatccaaagtacacatgtttagcaaataaaacacaactttggcattttatttcagtcccttcttctagtcactgtgactcctagcacatttctttggacatagcctgcatgagttgatgaaattcaggattaattttgggaactgatgaaacatggcttcatttggcattcctaggcttcacgattcatgctttctttgccactggactttatttagataattttcttggctcataatagctacagggaatttataggaagattacatcgtccgttctctcttataccaaaatattgttaatgtggtgtgaaaagaggaaaataaatgttaatttattcttaaaactagaatcttcgtatagccagtctcctctctggataaaggagaggactgacctagctggcccctaaggtcactgtatggttctcaaattttgaaattaagaggaccgtggctgagagggagtcctctttcagcaagaaaaatacagaattc

SEQ ID NO: 198137 - DNA, 1000 bp, Homo Sapiens
gcaagaaatagggtatggtatttattcatgcaagatagagttttgtaaaatacatggtaactttaggatatattttgtatattatttcgaacttggtatatgagcccattaatactattttatttttctacatgacaaacaagaaatatggataatcctagaattttttttttattgtaaaagtaaaacatatcaaagatggggaagttgaaggaataaaataccataccattggcagtgcaatggtttggagcacagactttaggatctaattgactagattcaaatttcacctgtgccatttactaaaagcatgtacttggcaatgctattttacctgtctgggccttagttcctttatttgcaatgtggagatcatgttaatagtaaccataccataaggttgttgtgagatgaaatgagaattcaggtaatccatctggctgtattcactaagtattcactaagcattgctagcatcatttaagactaccagctgatgatttcctagtgtgcttttcctcatgtattttttcacatttgttataaaaatatatgtatgtacatagatagcaacttgattttctttcttttaaaattaacatgtaataatgcttattctttataactacaacgttgctaaacactctttgtagtcacacacaaaaaaaatgcagacaacacactggctcaaaaatcttgtcctggtcatagtaaccatttaaagtgcttttcctagagcatctgagaacactgatccaagtaactgagagcaacccttttcatctgtgagaaggcacaatgttacagaaaattagatgcttgtcccaagggaaattagatattcattttcacaatgtgtcttctgagggcacttataatgggttcctcatgctggctgcctcagtgatagctatgtgacttaagccagtgtctcttagggaaactcccgttttccctcgtcatcagttgctatcttgtttcacccagaatggaattc

SEQ ID NO: 198138 - DNA, 1000 bp, Homo Sapiens
ggcatgaaggacatgcactaaaatgtaatctaatcttcaggatcttcagaacattacttcagtgctcctttagacattatttttcatttgtgatggtagtttcccagtacggtaaggattgcccacatttttatgtcctctgtttaggcctcaggcttaggaagaatgaaaccaaacactctggtgattggatataagaaaaactggaggaaagctcccttgacagagattgagaactacgtgggaatcatacagtaagtgatggctttcaagacgtgttcttgtttataaagcactaagcagggcagtacataacttgtactgcacataacactgttgtgtcagattaaattgcctgagaagagtacattcccctggtactctgacttcttttccaaggtgaaaaaaacaccaccaataatagagtttgagggaatcagagtgtcagaggaggcagggtgagagaaacgcccgtgtcagagaaaaaagtaaatgtttagagttacaaccttaaaatctatttacaagattaaaaggaaagcacagctaagcaaggagaaatttttctttcaaaacacctggaatcttgggttggctggtgtctccaattcagtcattgtcttcttctgagcctctgataattcgttcactatcccagagccctatatctccctctgctaagaggctcccatatgccaggtgcttctgctaccaggtggagcatcattggcttgtgcacagaatgtgagtttccggtggtacataacctctaatagctaaatatttgaggagacttaggatgtaagtaataatgatagatcttaaaggactagcaggctgcaggctaatgtctttaacatgtattatctcatttaattctcataagaagatttcgaaggaagtactaatattttttcccattctacaagtggagaaaaagacattaaaaattaagtagcatgctgaaaaatctcagcatttagtgacagagctggaattc

SEQ ID NO: 198139 - DNA, 1000 bp, Homo Sapiens
gatggacattggcttgtgtcctctttggcatatatatatacacacacacattatatatatatgtatatatatatgaatgctgctaatgaacattcatgttcaagattttatgtgaacatgttttcatttctgtagggtgtatacacctaagagtggaattgcgggtcatgtggtaattccacgttttactttgagaaactgccaaacttttccaaaggactgtcactagtttccattcccactagcagtgtataggggttctgatttctccacatcctccccaatacttgtctcattttaattacagccaccctgtggatatgaaatggtgtctcactgtagtttcgatttgtatttccatgtgcttactgttcatttgtatatctttagagaaatatccaaattctttgcccattttagaattggattgtcttttaattgttgagttgtgaaagttgattccaatacaaatcccttttctcccattctgtgggttgtctttatacccacttgttggaatcgtttacagcacaaaggttttcattttgaaaacttttgtagttcatccagcttgtgcttttggcgtcctaagaaacaattgcctggcccaatatgatgaagagttgcttctgggttttttgtgtttggttggttttgtttttgtttttgtttttgagacagagtctccctctgtcacccaggctggaatgcagtggcacgatcttggctcactgcaatctccgcctcccgggttcaagcgattctcctgcctcagcctgccgagtagctgggattacaggcatgagccaccgtgcctgtcccttgctcctgttttttcataagttttacattctaggtctatgatgcatttttagttaatgtgtacccctgttactggtggaaggtatctgagtcacgtggcaccaaaatatgtcagcaggagtgaatctatatgggtctgcagcaacctcagttcctgcctcctcagaagaaagaattc

SEQ ID NO: 198140 - DNA, 1000 bp, Homo Sapiens
ttactggctctggggattagggtatgaacatatttgagggagcattattccacctaccaacaatagtgatgcaaagaagtaaaaagaattaaaaatccagtttggtggtgatcacagctatagttggggcagcaaccgccagatatcaaaagaagcatggccaacagtgccagaaatggcatccagtgtcttgtgtttatgatggctttgccaggttgcttttagggtatgattttgaagatggctctgaatgtcagcattcacttcattttttgttgattttatgcacctggattctatagctttctctgaattcctctgaatttcagataaaaatccataaattacatttttacttcagtgagctaaagttggtttagattgtttacaactaagcctgactaggccagcaattggtaacagcagggctggcaggaagcagaaatgcaagcaaatggaaagactctgagatcaaatgtttgtactagttaggggtaaaaatagaaaatccagcttgtatccgggaatgagaatttggaagtccatggaaataggattaatcatttatgattacattgagtgatttgcactttaaagacaaggcttaaggagataagtggcctctactacacaacagtatgtttgaatttcatgagaaattgcaggactgcatgtgaatgtggctgctgtgaatggtgatgaacagaaagagaatgacaagttcaaatccctaacttcttgatttaagacacagaagaaaatctatgccctttccctgactatgctaaaataaaagcatactatctttctggaaaaaaagaaaaaaaattcatatttttgccaaaggtttgagatactaaaaaccaaatacaaatcttaattctgcagatcaccagacttcaacataaatctaaatggattttccaattctctatttgattctctataattgggaaacagcaagaccctggaaatttaaatggggtttatggaagaattc

SEQ ID NO: 198141 - DNA, 1000 bp, Homo Sapiens
cctgagtgtttcaatcccccttgaacccaagtcttatagaagcaacacagatgagcccagatgaatgactgcacagagtgggtgccacttcaggagaactatgagtgtagggaacccaacttttttatgaatggtagtaagcatgcctgctcttagctctgggaggaaatcggctataagcaaatctaccttttgctctggatggatacactatctctatcttccaaggctgttcaacctgtatatatccttacaaatatatcctataacaaagggcaattatatgctagccatgctagcaagacagagaaaaaaatcactagagtatggtagggaattttttacagaattattgtcattggactactgtattttcaaaatatatctggtacatgtacagatttatattagaggcccacttaatagtaggtatagatagattaattaaaatctatacccactgtttatagggaaaaaaactgaatgaaatcatcatttctattagtgacacagttgtttgaatggccaattttatgtaactacagaatgatgcaatttcattaaaattgattattatatagttataacatgtaagtagcttgtttgcattataaatgttgatagttgtgattcaaattttattgaatggtaatcaaatgttccaaagacaagaacacataggtctttctcggtaaatataatttctattcaattaccagaaactcttctctagttcagaaatctaacttgtgaattgttcaaggtggaattcagctaatattacaaacctctacgtatggtgtggtatatttattgaataaaactctcacagaccaaataatctctattagtactctctatccaagaagaaccaaagtgaaaacaacctatatactgtgttgtaagcataattcttccatttttgtttgccctaagtgataaaaattcctgatgtcttcatctgtagcatgattttcctagctgagtttagtgtggaatt

SEQ ID NO: 198142 - DNA, 1000 bp, Homo Sapiens
actacagccctgagttcctaggcccaagcattcctcccacctcagcttcctgagtagctgggtctataggtacatgacacgccatctagctaattaaaaaaaacaaaaattatagaggtagagtctctctgtgttgcccaggttggtctcaaactcctgggctcaagcaatcctcctatctcagcctctcaaagtgctggggttacaggcatgagccacggtgcccagcccctgaatttttgtaaattgtgtgtttgccatcccatctcaagctcagggagaatataatattccttctacatgtttaaaaacaggtaatatattaacctaagaaaaccttgctttgggattagaaatgcagaaccctttgcatacattgctgctgtatatctaagcttttggccactggttctatataatcttctgtttaatgatctattgtcctactttgatttgaagatgatgttttgaaggaaaaaaaaatcccatgatttgtttcatagaattgagatttgagtcctggctttgttattgcctagctgggtgaccgttgggcaggcttctttgttgtttatacctcaactatttcatctgggcctgtaaaagtattcccttcggacactcttgattcataattactttctcaagatcatcactggcattcaacttggtcctgtgctacatcagtgcaacctcctcaggcccacatttttatcctggtaacatctctctgtttttcttaactgctttttcctctaccccctcatgcacacacaagctgtttggttggataattgaaactaaaaattgtacattcttgaaaatcctaagatatttctaaatggaacctaagttttttcctctctctgtaccctacaaatattattgcatctgctaaatagctttctggagcccaacttcaaatcaagcatcttggaaatagcagaaatatttaaattgcctctgaattagttgtgaaaataataagacataagatata

SEQ ID NO: 198143 - DNA, 1000 bp, Homo Sapiens
ttcaacttatttttcactaggatcatttttcctgcaaaaaggaattagccaaagagagtataatgtgctgatagtgcagtgaggaaaatgtgtaagatttgaccttactttcatcccagtcctgccacagacaggcttggattcctggacaagatattctctggatgagattcacaaacatgactacatcaggaaccaggatggtgacatgaaagtgtgaaacaggaagagtggacattggcaagcaggggactcacttctgttctaaagggggctgcgctactcagccccagcaagttgtttctaagggaagatgcaagttaagtgttaccaagtctttccatttttaaagagaagtagaaatttcctttttggggtgaacattttcaattattattagcatctaatcccaactttttgttcatgtgattattatttatattgtggggcttaatttggcccccaggacaccagtttgcaatatctgagttaaatgatttctaaaattcattcaattctaacactctaaaattctaagcgatctaatttggccaaaacatgaaaatactcccttaagatgagaagcttctatttgaatgtgtgtttatgtcaatcttcctcttcctgaatcctcccattttttaattaccgctgatacccttggtcctggcagcttactctttctattctgacccatcctagagttgacgtctcaagaatttaaataactctggctagtacactgtatttacaatatataggggatcccggtgttatgtcaaaggaaagccttgtcttaacttttcagaagggaatggaatgtacagtacggtgtggcctataaatcattttcaaattagtattctgtacatctggagaagagtacatttctactcatgcataaattgcctatgaacacatttcaaaaacctatgcttaatcttagcaatgaacatttcaaaaagtaaattaatatcttcaaggggaagaaatacagtat

SEQ ID NO: 198144 - DNA, 1000 bp, Homo Sapiens
tgaggtcagcagtgtgagaccagcctggccaaaatggcaaaaccacatctctactaaaaacacaaaaattagtggggcgtagtggcacatgtctgcaatcccagctactcagaggctgaggcaagagaattgcttaaacctgggaggcagaggttgcagtgagccgaggttgtgccactgcattctgccctgggcaacagaacaagactctgtctcaaaaaaaaaaaaaaaatttatgctgattgttttccctctcttcagtgcttcaccagagcaacaagcagaagccacagcaagaagcttagccccaaagaagtcaaaagcaccggctcctaaacggagtcaaagctgttggaatcacaccctagtgtcttgtaaaactaatatttatgaacatacatttaacaatccttggctttttatttaatgacaagaaactaaaaactaagatctctatttgctaataaaacttagctactggaggccttcaccgtaagatgacaaggcagctggctatttcattgtggaaaagccagtgaatttgtaggtctttcctgtacctggtcaactacccagagaagacatatctactctcctgcctattggcattctggcagttaaacagaggaagtggtaggaagagggaatcaccattcagcatagagaattttacttaatcctgttcttaatgtagagtcttacctccaccctcaactatgcctggtattagtaggctcaagcccagaacctctcgtttagcccctctagagaatacatccacagtgttctgatggggaaggagagcacagtttgctcctgtgctaaggaaaaggatctgcttctcagatttttaactaatccctgttttaggctaacccagagaccaatgtcccaaaaagaacccaatgcttcaaattcctgagcctccccagaagtctacagcacaaatcagcttgctttttattggcttccttcccaccccaccccaaggttgtgaatt

SEQ ID NO: 198145 - DNA, 1000 bp, Homo Sapiens
atgagacgtttgccacgtaaaataaaggggatagggcactttaggtgtaagaagaggtaggagatggccttagctcttagtacatcacaaccaagctgggaagatgaaagaacagctgggtcagggactggaagataataagcaggcctgggtttgatggtcacctttgccatttactgtactggctgggtggctttaggcagggaacttaacttttctgatcttttaattttttatttataaaaattcatgcattgtgtatgaaatggatacattagtggccgggtgcggtggctcacgcctgtaatctcagcactttgggaggccgaggcgggcggatcacgaggtcgggagatcgagaccatcttggctaacatggtgaaaccctgtctctactaaaaatacaaaaaattagccaggcgcggtggcgggcacctgttgtcccagctactcagaaggctgaggcaggagaatggcgtgaacccgggaggcagagcttgcagtgaaccgagatacgcccctgcagtccggcctgggcgaaagagcgagactctgtctcaaaaaaaaaaaaaaaaaaaagaaagaaagaaatggatacattagtatactgaattttttgcaaggcactgaggagatgagatttgttattgttattacgggtataagggtatgtatgtgtgctctgtgtgtgtgtgtgtgtgtgtgtgtgtgtgtgtgtgaagaagaaacattccttccttgcttccgtctaattttcctaacctccctaaccacaaaaaccttccagggcaacatctatattatttgtgcttttttgattgaaagtgttaggaacttaaactcttacacacacacacgtgcacgcacacacacacagacatagggagggggaagaatatgaatgagtgaattagcgaatgaatgaacttagtgtctcatttaaccaaacaacagagaggacaggcattgctctggtttcagggaagttagacccaggatc

SEQ ID NO: 198146 - DNA, 1000 bp, Homo Sapiens
atttatattgcaggagctcatttttactaagaatcctagagccagaataggagtagattctagagaaaggccccagtgatccattacgcatggccagaactctaaggagctggcttggcatcctccagatacaacatgacattagcaaaactactggactcttctctagagctgtatggccttggcctttttataagtaagagcaaaaagggggaaaatattctgccactacactccctgaagtttaggtacctatttttttgtttgtttttatacacagtaatattaagtgtagactagtatctaatgaacatcgttgttaatatggcagctactgtggctcaatatcaatgttgtgccttttgagcttctgtagttcctgtagttttttactctagcatttaggatagggcttgcccaaactgatttttgcctcagtaacggtctacagttgaagaccagcttggtgtctgagagtctgtttaagctattccaaccaaataatataaaaactgcaagtctttcctaaattttcatatgtgatagtttaatcatgttgttctcttggacttaagctgttcttgtttttgttttgttttgtctattttttctagcagtttgtttttttacagccatatctatgataaaagaccatgatggaggctgggcacggtggctcacgcctataatcccaacactttgggaggccaaggcaggtggatcacttgaggtcaggagtttgagaccagcctgatcaacatggtaaaaccccgtttcctactaaaaatacaaaattagacgggtatggtagcacacatccataatcccagctacttgggaggctgaggcaggagaatcacttgaacccgggaggcggaggttgcagtgagtcaagattgtaccattgcactccagccttggcaacaagagcgaaactttgtccacaccacccccccacgcccccacaaaaaaagaccgtgatggataagacagtgaattc

SEQ ID NO: 198147 - DNA, 1000 bp, Homo Sapiens
tggatgccatgcttatcaaaatagtcattcgaggttggcagtgttaccactagttgtaaatcattttacctgagagtcagaagatattttccatggaaatgacattgtacattgtggttatatcttcaagccagtccaaaaacaggatgttgttttatgtggcacaaatatttgtggtacatgtaaaacgtttctggaacagaatgaagcagcagtaatacgaaaatgaatactatttcaccatatgccaataaaaggcgggtggagagtctcaaggaaacataagcatcaccttgttccttaaggtcaagcactcagagagccggtggtgctccccagagtccaggaccaagaagatctggaagctctttttttttttttttttttttttggatggagtctagctctgtcgccaggctggagtgctgtggtgtgatctcggctcactgcaacctctgaccccctggttcaagtgattctcctgcctcagcctcctgagtagctgggattacaggcacacgccaccacccccagctaatttttgtatttttagtagagacagagtttcaccatattggccaggatggtctcgatctcctgacttcgtgatccacttgcctcagcttcccgcagtgctgggattacaggcgtgagacaccacacccggcctgatctggaagctcttatgttagagttggcaacattgcaagaagtaagagagattactgctgaaaatgtgttttctccccccatttaacaatgttaatagtgaaatagtgagagaaaacccacgtgccaacaatatttatatataggacatttatgtaaactaatacattaacagcaatggatacctacatggaacctagctgctgcagtaaagagttgctactttcattagaaaaacaacatattcaaacagtgagcagttgaaataacctataaaaatatgtattacagaatgctgtcatacactgaagactaagtcttcagggaattc

SEQ ID NO: 198148 - DNA, 1000 bp, Homo Sapiens
aaagcagaataaaaatgtaaattctagtaagagcagacagcaactagccaccacatagaaaggaaacgctggtttttatatgagacagacctgtaactcagggtgacaccaagtaactcaaaatgtggtatttcgatgggttttttgctctcatgcaaagcccaacattatgagtaattgttacttttagatgatatttcatatttcctgccccaccctgtcagcacatggcaaggcggctttttctgtgcctatgtcagggagcatgctatgagtggccatgtgccttatggaggggacttagcctcccaagggccatcttggagtcggctgggatcaaccatgctctgcttatcagccttcctctacatttgcctcatttatccaccatgatttgattttgcatttgcccccttgggctttgcttatccacaatggaagcgctgtatctcctctgtgattcttattatttatttatttatttttttttttgagagaatcttgctctgtttcccaggctggagtgcagtggtgcgatctcggctcactgcaagctccacctcctggggttcaagtgattctcctgcctcagtcttccaagtagctgggactacaggcgtacgccaccacacccggctaattttttatatttttagtagagacagggttttgccatgttgcccaggctggtcttgaactcctggcctcaagtgatcacccgcttcggcttccctaagggctgggattacaggcgtgagccaccacaaccagcctctgtgattcttgctttgcaatttctactgttgttacaggaacatttcaaagcccttcaaatttaaagtaacctgaacttggataaagttccaagtttttccaggagatgtgagtgcaaacctcagcaacaacatttttaacaatcaccctaatgaggcctctccacagatcctgctgtggtggttgtttggggtggggaacatctgagcagatgccctgagaattc

SEQ ID NO: 198149 - DNA, 1000 bp, Homo Sapiens
gaggccaggagttctagaccagcttgaccaacatggcaaaaccctgtctctactaaaaatacaaaaaatagccaggcatggtggcatatgcctgtagcctcagctactcggtaggctgaggcatgagaattgcttgaacccaggaggtggaaactgcagtgagccgagattgtgccactgcactccagcccaggcaacagagtaagactctgtctcaaaacaaaccagaaacaaacaaaaagcttctttctaaaacaaagaaaagctaacaagttgcaagaaattgtcaagggtcaatatcccttggtagaaatccagagagaagagctcagcatttgggccacttttgtcaatcagaaaaggtagttaaaacactgaggaggctcggcctttccaagggaagggtaactctggaaaaccaccccatactttagaagtggaattttgattgactaaaccctgaaagtaaaagtaaacaaaaagtaaactagccttcccctttactgtagctcagtttcaagaaatctgggtgattcagaaaaatctcaagcactaaaatggattacaatggtcctggattgctaatgtccccacacatttgcaaaagtaaatgaaaatcatttctaaaggaagatgatatcatcctagtactaaaattgctccaataaatttttcaagtacagtttctaacacacaatcaaagataaccaggcataacaagaaataaaataagaacaaaagtaagcaggaacaatagaaaacagaaagaggctcacagatactccagatagtggaattattagacagagatgagggggaaaaaactatcttactatcatcatagggttaaaaactgaactcaaaaatttcagcaaaatattggaaactataaaaacagacattgaagattcaggaactaaaaaacataataacacaaattaaaaactcaatggatgagtctaaaaacagagtaaataaataagacaagttagaagaattc

SEQ ID NO: 198150 - DNA, 1000 bp, Homo Sapiens
aaaacaaacaaacaaacaaacaaaaatatatatatatatatatatatattttttttttttttttctggaaggcaggtgtggggatccaccctctcttgtctgcccaaaacaaaacatcgtatctgtttgtaacaacatcctccaggctcactcatatggccacaaatgacaggatgtcattcttttttatgactgaatggcattctactatgaatatataccacatttgctttatccattaatctgttgttggaaacctatggtgactccatatctgagctattgtgaatagtgctgcaataaatatgagggtgcaggtgtctcttcaatatactgacttcctttcccttagataaatgcccagcactgggattgctggatcatatgataattccattttcagattttgaggaaacccccatactgttttttatagtggctataataatttacatttccaccaaccatctataagagttcccttttctcagaattctcacagcatttattttttgtcttttagtaatagccatttaactggggtgggataacgtctcattgtgattttgatttgcatttttttggtaattagtgttgttgagcattttttcacatatctgttggccatttgtatgtcttcttttgagaaatgtctatccatgttcttttttgagccccactctgttgcccaggctggagtgtgcagtggtgcaatcttgggtcactgcagtctcaacctcccgggctcaagccatccttccacctcagcctccctagtagctgagcctacagtgtgtaccaccactcctggctaatttttgtattttttgtagagacagggtttcaccatgttgcccaggctggtcttgaactcctgcttaagcagttcttccacctgagcctcccaaagtgctgagattacaggcatgagccaccacacctgactttttgcccactttttgatgggatttggtttttcactgttgagttgtttgaattc

SEQ ID NO: 198151 - DNA, 1000 bp, Homo Sapiens
tggggtattgttcaagagcctggcagaattttattcagatgtttgaattggagcttacatcctttctgagatcatttcttccatgtataaaattgagttgcgagccacttcacaaggttttgtgcagagcaacgataatagctactgttcaggaagtgcttactgtgtgcctaccacttaattctcagcccaagccttattattaaccccgttttacagatgcagaagctgaggcacacgaaggttaaataattggtggtcatacaattaacaagtatccagaactggaatttgaatgcaggcccctgatctaaagtctgggcttatctcctctatggatgtaaagtgcccaatgctatcctgggcacatagagccttggaaaagtgagttgaatacgtgtgaatggatttttaggggtgcttaacattgggagaggtttccagggtctgggatggaacatttggtgcccccacggaaggaagctggtgagagtctcagcccagcttctggaaaagattcctgcaggtcctgaggcagagctgcttcatcttccttctcatcagcacctccctcctgcgcgcagggtgatgtgagcagagcccaggaatgccttatgtggatcggcagaaccgaatctgtgggtttctggacatcgaggagcatgagaacagcggcaagtttctgcggaggtacttcattctggacacccaggctaactgcctcctctggtatatggacaacccccaggtgagagggtcagtgggaaggggtggggcgactgggtgcccatcactgcgccagaggaatgcacacagggttagcctccaggcctaggctcgtgagcaacacaacctgctgatcagcagggaggggacaaccctacaacacacacagacacacacacaaatgcacattcacgtgcacacacaccacacacaccccatacacaccacacacacgcacacacatgcaccttatacacacacaccacacacacac

SEQ ID NO: 198152 - DNA, 1000 bp, Homo Sapiens
agaagctataacctttcattttctattcttttaagaataattaaaagacttaattaaaaaattctctataccattcaaagtccttttcctctccaaactatcataatgctgatttatcagataagcctaactataccctaggctgtaataatcttttctctgtattctgactttgtgaaaggttgaatttgtttttaatggtaaagtgattattcctacttcccttttaacttgcacaggcatttctaatttattaaagcaatgaaactgttctttcttttccccataggagagaagaattatgtaaaactcttatattgagacattatgcacacagaacaaaagagaaataactaattttccagaactaaaatacatttaactatggtattttaaaaatacttttagtgctaaagatatactgattaggatcaattaatttgaacaggaagggaagtttcaaggaaagatatgtagaaactctacaatttttaccaacctttgaaacacgaatgtggcaagtgctaagtaattaagaatggaagatggtattccaggataaaggagttaaacataaactgtatgtaacatggtgttgttagaatgtgaggcatacaaaagatgtaaatggagctaaacctgacaaaatagtgttcaataacttttcaatataattaaaatgttttttgaatcctttcctaggaaccagctctatgtatgcaatgtcaaatattcatttagaaatcagtttttcagaaatgcatgagaacatagcagacatttctgttctatgtgttgatatagtgacttttgcagcatcattgcattaccatgaaaacattcaatatctgtttttaaggtaatttaccaagtgaatgtcaaagttctctttgatttatttatgtcaaggcttagaatgttacagaaagataacagaatgtgaaaatcatgttggtcagccaagtcaaagctggttccacaggcaaatcacatggaattc

SEQ ID NO: 198153 - DNA, 1000 bp, Homo Sapiens
tgttttctattgagaaatcctctcttagaggatttcacaagaatgtttcttctctgatagttatattccaggtcagaaatccattttttttagacaaggtgttgctctgttgcccaagatggagtggcacgatctcggctcacttcaacctccgcctcccaggcagcctcaagcaatgctcccacctcagccccccgagtagctggaactacaggcatgcaccaccatgcctggataattctttgtattttttgtaaagacggggtcttgccaagttgcccaggctggtcttgaactcctggactcaagtagtccacctaccttggcctcccaaagtgccgggattacaagtgtgacccacgattcagaaattctttaactcactttatggcgcttctcattttagcttatgatccaggagcagagatcctattccctacactggtattcacttgattaacactttgaccaaaaaccctccccataagtttgtatccttgatattaaatcaagatgacaattcttacaatttttttttttttgataaagggtctcactctgtcacccaagccatggtacagtggcacagtcatagctcactgcagccttgacctcctgggctcaagtgatcctccttcctcagcctcctgagtagataggactacaggttcatgccactatgcccagctaatatttcaaatttattgtagaaatagggtctcactatgttgcccaggctagtcttgaactcctgggcttaagtgatcctccttcctccatctcccaaagtgctgggattacaggtgtgagccaccatttccagaccaattcttgcagtttttgaccctcacaggcatgccatatagaacttggacatttcaaattctgagttattgttgacaatcagagattatatgctgttagcctaaaatgcaacattttatatttacattaataaatttctcacaggccaacaaatctaaaaatagggataacagtt

SEQ ID NO: 198154 - DNA, 1000 bp, Homo Sapiens
accagcctgatcaatatggtgaaaccccgtctctactaaaaatacaaaaattagccaggcatggtggcacatgcctgtaatcccagctactcgggaggctgaggcaggataattgcttgaaccagggaggcggaggttgcactgagccaagatcacgtcactgcactccagcctgagtgacagagcaagactccatctcaaaaaaaaaaaaaaaaaaaaaaaaaaagaataagaagaaaagaaaacaggttcactatcctggcatcctagatgctctagtacctggccccaaacagagttgttatcttatcccccacactcttatacattctccaaagacttgctgaatttggcactcattttcctaggacatgggctttcctattatatgacaggtaactgttttccgcactgaatgagcttgccaagccatttcagtttttgcaatatatctaccaatcaagactgtttttagataatgcctcttttgtgaacccattcttgatcactgtcttgtctgaagcccaataactcactgttttctcacctctacaactcctcctgagccagaagaatgtgttttcaccttggtgaaactttctttgatccccaaatccaggttagattagggcctccagctgtgttatctcagacattaggggagaaccctcatctctctttgacttcctttttctatagacaccactgagagaaacatatttggtttctttctgtatccctgacttcattcccatggaagaaagactgaagcattttatttgtgggctggggataaggggcttagtttatcttgaccgctgcttttcttagctcctccctgattctctactttcagaagcttgactgactgcaggaagtatccattgcgatctgctttccaccgggtaacaagagcttcttcctttccaggaagcttcagctgtcccactctgccagaggctgggtaagcacagtacactgaatgtgctgggctgaattc

SEQ ID NO: 198155 - DNA, 1000 bp, Homo Sapiens
tcaagtttttttcaaggatctttactggaacagtaaattgttaaaggactaatattaagtctaatttaagaccatcaacattttttttttttttgagatggagtcttgctctgtcaccccgactggagtgcagtggtgttatcttggtttactgcaacctctgcctcctgggttcaagcaattctcctgcctcagccaccagagtagctgggattacaggtgcacgccaccacacccggctaattttttgtatttttagtagagacggagtttcaccatgtgggccaggctggtcttgaactcctgacctcaagtgatctgcccgcctcatcttcccaaagtgctggattacaagtgtaagccactgcacccggccagaccatgaaatttatttatttattttttttttttgaggcagagtctcactctgtcgctcaggctggagtgcagtggtgccatcttgtctcactgcaacctctgcctcccaggttcaagcaattctcctgcctcagcctcccgaatagctgggaatataggcgcgtgccactacacctggctgatttttgtatttttagtagagacggggtttcatcgtgttggccaggctggtttcgaactcctgacctcaggtgatccaccggccttggcctcccaaagtactgggattacaggcatgatccaccgcgcctggccacaccattaaatttttagaaaagcacttctataatgtagaatgaggttctgagttattaatccctccccaaagatgtcatgatttctttacacaaaagcattctctaaactatgcacattcttatgacagaaatggaacaactcacatatggttgaacagactcaggctgactccaaacagcatatggatgataccaaggataacagacatcttcatcttaaaggagttcaagaacgtcagtttattggtagcaatgttccaaatctgtcataacccgagaaaacaaataggtattataaagaattc

SEQ ID NO: 198156 - DNA, 1000 bp, Homo Sapiens
ataaaacattcaaacaattattagaacacaaataggtacattaaataaggatataagccattacgcaattgcattttccttttaaaagtggcatcatagacacaatgacttacataaaaattttaaaatcaattttgttttaatccaaggcacctgtaaaacacttgctggtgtgagagaagtgaacaaattcaattatacaaaatagtacagaaatgaaagaatcctggcagtgattgatttttccacagagcaaacctttttgttcagaaatgagctccttaaagtcaatgattttgagaaaaaccacacttcaaatatgatacacatcatgtgaactactttgctgagtgattttcaagcaaagtatatcactaagtataaaagataaaaggctcatgctcatgctgtttcataatagccatctccatttgtagtaagaataatcagaatgattccccttgaatttcagcctgaaaaatgtatactgcatagatctggtattcctttaatgcacaggcacatatgaccatggactttataatactggatttggcagccttttatctcaagaggatttctcaagtttcatagtttacaacttaaatattcctctgaaggtatttaattttttttcatggagcaagagtaaattctgtgatgatgaagcctctgaaacatgaatttcaaaatgttaacactacaaaagaaaaatgctagagaagcattttctgtgttgaaatgactgaagtaaagtgagttatcactggcatattctctttcagtgttctaggataaatatcaacataaaaagcaacgccagactgtttgcacacacagcactcgtttggtattgctataatacagagttcttcagaaagtctttatatatagattttaggtcgttagcccaatctgtaaatgacatttgagagcaaacctagggaggcttggaataattcaacagtactattttataagatagtattgtttggaattc

SEQ ID NO: 198157 - DNA, 1000 bp, Homo Sapiens
tttttaatattattattataatagccgaaaaaaggacattttaaagctgcaattcctcagcctaaattaattgaatcagccatgcgttaaatattatactgtgctaaaatgaaagctgcagctgaattttggtgtatatacttagcagacagcaattgaaaggataaacatcaaattttgaaaaaaaagagtgacaactgctgtatcttttaaaatataatttgtttttctatcctcttctgctctctgctcttattgtttcctttttgcacatcctcatttaaatggtctccttggctcttatttagagaatgcccagccactctgtaggcatcctccaagcctgtcttcagaatattctcaatttctcccctagagctctccctctgaaagtgaggctggccagcttccactagactatgaatgttcatccattaggaactccaggtcaaggagagttctagaccttgctttggcaagaattctagaccttgcttttctggtgctgtttagaaaagttatcaagtggaaaggtctaatcactctatagtaactagcttttaagtaatgtctgaaatgcataaagcaacttttaaactcttaaaaatctagctcctgcctatgtcttagacctcacctcttagctcccttctcctttgtacttacctcaccgattatactcaggttctttcagcttcgttgactctctcttattaatatcttagggctcactacttctctcttaacttggcaaccttcagatgtcagcttaaccactgtttcctctttcactgcctaggccagatttggtgcctctatttatagaacttgcatctggcagataccacatatgcctttgcagtgctgcatccccagtgcccaatatgggcctgacatgtattaattaattttcctgtagaccaagcaatgatgaaagggattcagtaaatataggaaatcagcaccataagttaatagaaactcctccctggaagaattc

SEQ ID NO: 198158 - DNA, 1000 bp, Homo Sapiens
ttgagtctgtagtgagccatgatggcaccactgcactctagccccagcaacagagtgagaccctgccctaaaaaataaattaaataaataaggaatattagcattattataagttctcaatggaataatctcctcagaaagtcttagccccaccccacctagattaggggttcctcttgcttttttctctgcacagcacacatagctctcatctagggcactgtattttaattatctgttcatgttgtattgtccatcccaaaggacaataacccactttgatgagttttcttagtcaccttcatattttctatgccgggtgcaaagtttggaggatcacaggtttttagatatgttagcagacttaaaataaactgatacaaggaagagccctctgtaaactgcaagcaccatgagaaagaatggctatattattttcctcctttaactgaaattacagtagcattgcattcctaaatgtggtgaccttgtgatttttattgcagatggcatatctttgaagatgtgaatttttttatctcttcatggaaactgcagcccatatttcagaacacatttacatcccagattttagtgttagaaaaaagtgtatgtaaggttagttttaagagacttaatacagtgaattcagggtaatatataattctgtatttcaaagaatatttgtccccattaggacttttacaaaactggattcataaaaagttacaaaccaccatcatatagaggaagaaccacctttatttccaagggtttctgtccagtgactgataaagctggaaacagttaccatgaactcctattcctagataccaatcaccagaaaccactttcttcttgagcaagtcctctactaagggttcatttattccatgttcagtaccgtgatttcaaggcccggaatgtaaagccaatcacaggattttcatcaaaagtttacttctggacaccagccgtcaatgttcaaggtctagaattc

SEQ ID NO: 198159 - DNA, 1000 bp, Homo Sapiens
ggcttggtggcccatgccgcttgtcccagctactcaagaggctgaagtacgagcacatccctacatatacatcttgggtgcctggggttctgggtttttttttttttttttttttttttgagacagagtctctctctgttgcccagtctggagtgcagtggcacgatctcggctcactgcaacctctgcctcctggattcaagtgattctcttgcctcagcctcctgagtagctgggattacaggcatccgccaccacacccagctaacttttatatttttagtagagatgaggtttcgccatgttggccagcctggtctcgaactcctgacctcaggtgatcagcctgcttcagcctttcaaactgctgggattacaggcgtgagccactgtgcccagcatgtgcccgttctgcatttctaacaagctcccagataatgccagtgctgctggtccatggaccacgtttgaccagcaagggtccaatacaaccagacactgtgttatgaacattggcaatgtgggggttggagatggtgagtttaaaaagaacaacaaagttttagaaaggaacacccagactctcaaagctcagctttagtgactacaggaaaatacactacagttatggtggagggttgcctgttcatacatattattctaggtgcacaggaaaaggaagaacaaattatttccctgtgtgaaccacagaaaaggacccccctgatatatttctttgcattccagccacttccctccttagtgactaatgccaacattttttttcctgagttctgaagcaaaactacgccaaggccacctccttaagtcacacctccttatgggcagggggaaccccatcttcttatgtacccacaaatgccactgcagcataactacatcaggtcatttcatcagattacattgcacagatgtcagcctatctggtccctctgagcccacctgcttggagaaaccatcccagaaacgttgagaattc

SEQ ID NO: 198160 - DNA, 1000 bp, Homo Sapiens
gccctcacggtatttacttcccctggatcctcgcctcctgagaagctggtcttgggctgcggtcggacctcgccgcgagctccagacccgagtttccgagcccgcgcttcccggcccgcaaccctcccaaccgcgtagcaacgccgctcctgccggacacccctggcccctccgggggtcttagtccccgggcccggaagtccgcaccactgagaggggagccgatccctggcgctcctagaacggcgcaggaagtttcccaggcggggcctctcgcgacttccggtcgcggcgggctggcggcggtgcaggctttgtcggctgatctgtggggcccgcgccggcggggtccagtcagcggctgcagggtcgggctcgcgccgtcctctccccgcccgcgccgggtgagtggcgcgttccggacgggggcgggcaacgccttagccgcagccccggctggctccggagcccggccgccttgccagggcacagtccgccgagagggccgggcggggtccgcaggccgctgcccgccccgctagggcgtccaggagcggggccttggctagtcagtctcccggacgcagccacggccgcccccgcgaggctgcggcgtctctccagcgagcccgcctcgggcccgagcctggggtcttgtccctgaggagcgccgtgtgggtacccctggttccctctccttccccccgccctgagcccaggccggagagccgcgggcttgagtgtccgtgtcgcagtcttcaggtccgccaggcctgcgtgaggttgatgccgcagacatgttttacggtgtggcaggactgggtgtgggcgttcccgcggctgtgcctgaaccctgcctccgctccctggggcctcgaggcctctcggtgctggaggagatgcagcgccagcatcttctgtgctgttggggataggggtggggagggaaacatgatgagcagaattagaattaagtacaagacttggacctggagaattc

SEQ ID NO: 198161 - DNA, 1000 bp, Homo Sapiens
cttgagaatatgggtagtatttgtgatcctgctcttacaagggaggcttagtaacttgcccaaggccacataatcttttaaacattctttgaaaaattgatacacgcacacatgtccatttactctcaaggtgttgctataatagcttgaactggcagtctcacagatcaactgaaatagtttgtgttccttagatgccttgcagcttcacttaggtatgatactgagaagcgatatgaaaaaaaaagtaagaaaatctgtctgcacccatgctgagctaagctataaccctgaccaaacactctcccaaaggctggttttgtttgataaagttaagaagcaaaacatgacagcacatggttaagacaaataactaaaaactgaaaaccaaaaaaacacgcacgcacaaaatcaaaaacaaaaactccaaacaaaaactcccaacaccccccagctggagtgaaagctctatatacaagcggttcccagcaggctctctggatgacaccgtgtcatggcttggctctgatttgcttgaagtcaactctgggtgacttgttcaaaacttccaaatcggctccccactgtatgtgaaattattgtgttccacagaagcaaaatacaacacactcaaaatatgccaatgaaacaagtaaaaccagtaagaaaatactttgaaagtacaaaaggaagccatgtccccctcaaagcccgtgggtagggcctctgtgcatctgctagtgatgctgccattccttttaaggactttggttgatactcaaacaatgtaagaaaacaagctgcaggaattctctgtaatagtatttttttcctttctttttcctttttaactaaccaatattaacaacctgctcaccagtccaaatcataagatggcaggcacacttaatgacttctagccaataaacatcaaggcagtcagtagagcatgacagcttatagctcaagctctggactcaggtggacctagcttgaattc

SEQ ID NO: 198162 - DNA, 1000 bp, Homo Sapiens
agctcagcctagcccacattactgacccacagaatcatgaattaaataaatggttattattttaaagactatgtattggggtgacttgttatacagctaactactagtctcagttaactttctttaaattttctgactcctacaaaaatttgagttatttactttcaagaatagcactctattttctactcaaaattaatgtatgttaattatagaaaatttgaatagtactgaaatgcaggaagaggaataaaaatagtatatggtatactactgtaaaataaccttaataaaattttagtttatctgttaccagtacattttctaaatatagaaacatttttatataatttgatatatttgctttctttctttttttattattatttcttttcttttttttttttctgagactgagtctccccttgtcgcccaggctggagtgcagtggtgtgatctcagctcactgcaagctccgcctcccgagttcacgccattctcctgtctcagcctcccgagtagatgggactacaggtgcccgccaccacgcccggctaattttttgtattttttagtagagacagggtttcaccgcgttagccaggatggtctccatctcctgacctcgtgatccgcccacctcagcctcccaaagtgctgggattataggcgtgagccatcgcacccgacctcttttcttttcttttttttttttgagacagagtcttactctgtcacccaggctggagtgcagtggcatgatctccgttcactgcaacctctgcctcccaggctgaagcgattctcatacctcagcctccccagtagttgggattccaggcgtgtgccactgcacctggctaatttttaaaaattttttagtagagacagggtttcagcatgttgaccaggctggtctcaaactcctggcctcaagtgatctatctgccaccatggcctcccaaagtgctgggattgcaggtgtgagtcactgcgcccg

SEQ ID NO: 198163 - DNA, 1000 bp, Homo Sapiens
tgtaagttcagatttctgggtcaacaattttcttttcttttcttttctttttttttttttgagatggagtttcactcttgttgcccaggctggagtgcaatggcacaatctcgactcaccgcaacctctgcctcccaggttcaagcgattctcctgcctcagcatcctgagtagctgggattacagatacgagccgccacgcctggctaattttgtatttttagtagagatggggtttctccaggttggtgaggctggtctcgaactcccaacttcaggtgatctgccctccttggcctcccaaagtgctgggattacaggcgtgagccaccgtgccaggcttgggtcaacaattttccaagagaagggcctatccatattcataaacgccaacagttcagcaaaaattttggaggtcttgctacatggtaagctcttgctgctgggcgcttaggatacaactgtgcacaggacaaatgagggccttgcctgcctgcagtttcatatttaacagggcaaacagaagatgagacacagaaatactaaattgaattttctttcttttcttttttgttttttagagatggggtcttgctatgttgcccaggctggtctcgaactcttgacttcaggagaccctcccaacttggcctcccgaagtgctgggattacaggtgtgagccaccagaactggcagagttttctttctgcattgtagtacagtgcatctacccattcattcactcattcattcattcagtaaatttttagtgagcacatcccacctctcaggccttgtcatgtgggcagggaaaacactggtgaagaagacagtcatggtctgcatggctcttacatatgagttgtgaattattagcatattgttttgtagatgcagctgtaatagatttataaaattgagccaaatattgtcacaactaggtgtagtttgggaaaatacttcttgatgaatctccctcctttcttccttccttccttc

SEQ ID NO: 198164 - DNA, 1000 bp, Homo Sapiens
agcatctacttttcctatgtattcttccctcaacatgctgtgttccccaccatttattgacacttttactctaaaatgatacaatagtatttttttgcataatttccacagaacagctacaaaaaacacgttagtgtatttaaaggactgaataatccatggatgtggttataaataatcgttcagaatatattggtagataacagatcaagctaagtcttattcttaatattttttcatctttattctagctggacacacttttgtatttttcaagctaatcaacatctgtaaagagatacaaatgtctcctcaatttctgtttttgcaatattgaaaagaatatgatcaatgactaatttcaggtcaaccacctgggaaacactgcatttatggttaagagtggcttggaaacatcagacctcatggcatggtgctgtatcttcagatcacttaatactctgactgtattaaataaataatatttatttaatttaccccaggttttcatgtgggacatttgttttctgtttagctattttactgctttttttttttttttaacagtggtttgaagtgttttctgcacattttgtccccttcattgtagctctagaaatttatttacactaagtatcagatttagttttggagatagataaacttaggattatattttttctactctattttctgatgtttgattatttcttaaatcccttgatatacttgtgagttaaaacctgtatatttaataagtaatttagagctgctggataatttactgtccctctttgctaggaagatagaatgtaggtgaacccacttaatctaataaagggcctactagacttcatcttgagtcacagttttgagaataatttgttcatttgtcatttgtccccaaccttccctgctccaaggtgtagtcttccaggggttccaggtgctagagaagtcatagtggctcctctcccatcttcctgtgtttcctgaattc

SEQ ID NO: 198165 - DNA, 1000 bp, Homo Sapiens
ccaagagagacatattgatcttacttgatatgttaaagtcatataggaaacactcccaaatataaaatggtgtttaactttctttgggttaaatatttatatttatattatatttatattaatgtgttattagtatgtattccaaattgtatgagattcttatgattctgatatgtctatgttatcagtagtaattataattattatgtaaaattgttgaaagccacagaaataaccaaatttccttggcaattgtgtctttaactgtggatgttctaaaacttttgtcatccacaaacaattgttttatgttgatcctttcaaaattggttcaaagtcatctcaggattctgacaggtgctcttgaatgcaggtttctgataactttggagacagtgccaatggaatagagagaaaacttccaggactctcagggagagctgatgtgttcatgagaattgctgacccaatatcaagtagaacagaagttaattgcatggactgaactaatagaaaatttaaataattttattactttttttgtttcaaactttactgattctttttttgtttttcaaagtcaagaaaacctttttttcatttgaactatttacagcttttaacaactgagtaaaatatattcttgtgagcaaaatttgaaacatatttctttctccagaatttggaaactatttgtgagtattcttaatttatggcaatagttattttcataagttcaataataataatctcttttcttctgtaagaggacacactgaagacactggctattttaccaagtctttggttgcaacgatattttcagatatgaacagatggctttgaggaattgggattgatgtacagagcccataaaagccctttggaaaaactggccttctatcttgtccttcacagggttcttgacctgtgataagtaaagattgtcactttctgacaggcccgggaacctcataggacctcaagaagagaggaattc

SEQ ID NO: 198166 - DNA, 1000 bp, Homo Sapiens
agttctggacacgaagactattttcagaaacccatccaacaaactgaccccggctcactgtggccggatcctctcaccccaccttgctggagacctttctgtaggcctagtcatgtgcttaaggacttgcctcatctgaaaatgagactgacaaattgacttgggagatatcttggacacacaatggctctggaatgctactttctgttcactagagaaaaggagagagaggaaagcaattggggtgtttgtgtgtgcgtttaaataagtccccctccagttgtggatgtgggtggtgagggaggacagtggggtcacccaggcacgttggggggacccagcaaggccgcccaggggacacggactcttggaagtcagcgttgttgtgcctaatgggcttttaccccatatctaaccctgattctgtggtctttccaaagaagttcatgctagagcctggcacggggctgggcacaaggggatattccttgaacgctgttgctggtttggcgactggccccagatgcacacatttaggtaaatgtttgacctcttaaacaccctggagcaggtactgaggactcaaaaataaataaacctgcttccagtgccccaggagcttagattctacagggggggggatggaggaaagccttgaacataaatgagtgtaaaagacatgtttcagatggtggaagaggcctgcccaaagggtccatgtagaaaagaagaaaggattgttccagccaaggggcttggaaaatttccctagaggagatgatacttgagctgggatgcctgagttgataataataaccatctttccggagaacttgctaggagcaggggactgtcctaggcacggcgcgatctcggctcactgcaagctctgcctcccaggttcacgccattctcctccctcagcctcccgtgtagctgggacttcagccacctgccccaacgcccggctaattttttttgtatttttagtagagacggg

SEQ ID NO: 198167 - DNA, 1000 bp, Homo Sapiens
tatactttgcttggaacagaaacagtcacaataaagaagtatagagggagagatcttaaaatcgggtgcttgggagactatcttgctgctctggtcacgctaaagtgggtagagagaggtggttctaaaaagtagttgaatgtccttgggcacccagtggtgaggccctggagcaaaataggggaaattttgactgattcccttaatgccctccccatcctaaaaatgtggatttcagggctcagccttaggactggaaaaggccaatttgagattggtcagacttgagcacctcgcaaacagctatcgcaagccaagtcactgttgcccagaaaggaaattagcgtttatcacatttcagtgaaaatgatgtggcccagttaatttagatttcctttcatttacaatagacttaaaatcctatttagctataatccagccattgtaaaattggttacaaggatcctaattttctgagatattgaagccccccgttctatcacagcatcttgattttatccgttttcatccatcgttaaatttcttatggctgagaatgccagaggtgacctacctttccaatccgctgctgcattcagcagtaactggattgagattggaaacatttattttattcagtgccttatctgttcttttccactgttttaaacactactgagggtcagactgaaaatccttctctgattctaactgtaatcaagcgggaaatggttttattttattttaaactaatatggagcctaagaagaaagaatcatttcatacagtggcattgaatggcccattccgccattgcttaaaatgtacagttttgcatatcttatcatcaagcctacatttacatgacctttaacattgaaaatttatctgacctttttccccatttaaattgatgtgtttctcatttgggagcctgttaaaaccttaccatctttaggggtctacaatcacaagtgatctctcctcttcatgtgaattc

SEQ ID NO: 198168 - DNA, 1000 bp, Homo Sapiens
gacatgagattttgttgcatcagcctttgatttcttggaacatttcaagaaatgtcatcttttttagtcttgggacacagaggcatgttttaaatacaacttattttttcatgttactttgttctatttagtacatttacagttgtgtttcaaatatgtcttcagagataccctagcctttcttgtatgctctcactgactctcttaacaaccattgtaaaacaagacttatattttgatagtcgctgttacattacttgagaatagcccccaaacccttaggaatgtatggcagaatggaatgacttcaagacattatccgtcgattttatatgggtgtagagaggcagaaaaaaactaggtttgtagactcattgtatgataagctattttagtgtattacaacaacaatgtgctgaagaaaagtctgagtttttgaaaagcacaagaatgtgctcaaatgttgtttaaaattatcatgactttttaaaaacctttgaatgaagaaaatatctggaaaatgatcatcttactccagtactcttttggtaagaagtgccatacaggcacatctttataatatgcttgttataaatcatttggaacatttgaatattttgatctagcacttgagtgttctttcagtgcagtgttagaatcattcgatgtagtaagagatatataagttttttttaaaaaaacttctatttattatgatttcatcttaagtattatgtcattttggaagtattccttggtctcctaaattgagttctgtccccttactgtgcaaatctgtactttcctataataatcctcatcacattttattgtagattctgtataatttccttctagtttgttttctagcctataatattcaccactttatttccagaccctatctccaggcctggaacatagttggtgatcaagttatttgtggaacaaacacattaaagatgcttttgcttttagccattgactaatcttagaattc

SEQ ID NO: 198169 - DNA, 1000 bp, Homo Sapiens
ctctgggaagagcccttgtgaagggctgagccgagagcacccagtcaaggctaggcgtggcccaatggctggcaagttcgggggcctgactccctgctgggaggagtgtgcctttctctgccaggagcagcccctggtccatctgtgtcatgactcctaactgcagcccaatatccctcactggatcttctcctctccccctctgggatatggtatttgaaaaaatgactgtcttctatacaagggatccgttttagggttttcagacatctttctgtggttgttctgggttaaaagactgagcaactacacaagtcagtaaggactggagaggtgaaagggagaataaggccatctgtcccggtggaatgtaggggcagctggtgtggtttccctcgagatcttgtacaagaacagctgcacccacctccaacacctgcacacactggggcctctgtccccaacacatcagccatgcaccgagcccctgctccaagcatactctagaaaacagagcaaaggtggtcacttgccatatcttttttccagggcaacccagatgacacttaatatgagcctctgcctgacttgccatctggctgtcctttccagagccctacttttaacacacagacagtcagagcttgagtctgacctgctggggctgtctggctgtccagtgtagaacaagggcaggagagcctgtgttttagtcacaacctgcccaacctgagcaaacctgccccagattacggaggtgtgcagcaacactaccgatggctgttgatctaagtttttcatttctggtttattttgttgtatgtaacccgtcctgattcggtttcctgcctgggcccctaggcccgttccctactcctgagtcccagagcgtggggggtaaactgccagggccagccttcccctttctggacctcatgcttcctcatctgcaaaataacggcccaggacgagcccctcatcaggttccctcccagccgtg

SEQ ID NO: 198170 - DNA, 1000 bp, Homo Sapiens
ctctggatccctcagatccagtttttttcctagggctttgacctgaaatttggaattgagtctgggacaaagatgtgtctcaggggagttgcatggactccttgtaagccaaatgctaaggtgaaactgtggaaccgagtcctcctccagtaagggagaggaaaggatgtcttgtgacacacccagataactggtggctctagttatgcttgctaggatttgggtgcatggtgcttggctttggttagctcccttggtcttactttcccaaaaggaaacctctgtgatgggcatcctatgtattcccatcacctggaagaatttgaaggataattgctcagaactagaatattggtccagatttttacattacccatccccgttgttctttctgagatgcagctggagattgctggttagttcacaggaacaagcagggttagtctaaaatgtaggtgaaaacttaaaaacaaccaatgagttcagaatttaatgacaaatgtatggtaaattttggaacatgatctctctctttccagtcctcatttttgttaaaaaatcatgataggactgagtggtttgcaaaatcccttagccctatacttgacctgattatttgcctaaagtatagcaagaataattatgtctacataggccttttagattggctttgatggaactctattccccaaggaatctcagataagaccttgaaacacctatgagttgggtgatcctctcctcttaaggtcccaagataaacttggagctcctagaacctgttagaaagtgacattctttactgaccacaggtcaggaaccctgtacaaggactgcgaagatgagggtattaggtcactttctccatggggcttttgttggttctgcaagttcgacttcgagcttgactccttaaaggggagcatacccttccagtaaaagccttgttaaaataaccattttctccagttgtatcctgttacaaaagaaaaatgaattc

SEQ ID NO: 198171 - DNA, 1000 bp, Homo Sapiens
ttcctagtttatgagttgacagaaaatagatgaaaaaaagtagacactctatttaaatgtattgccaccacctatcaactcattatcccatttgaaaaagaattcatgaattatccaaagaactgggaaattttttggttgggaggtaaatcagttacatgagcataccgctggcaaaggagtatgccatatgactgatctctgttggggggcttctgtctgttgacagagaagcagaaaaacaaaggacaaaggaaaccctcattaattaatcttaccaactaagccaaataaatggaccacttgtttcagcaacagaagcaaactgttgacaattgagaaaagccacctgcaggtgcttttgaacacaagctgccccagagacccaaaatactattgtctaacacaggggtcagcaaactttctctgttaagagccagatagtaaatatttttggctttgcaggccatatggtctctgttacaactactcaactctgctgctgtagcctgaaagtggtcaaagacaatatcttataaattaatatgtagggttatgttccaataaactttatttatggacactgaaactgaatttcttttcattttcatgtgtcaagaagtatcatgattcttttgattttttttcaaccattaagaaatgtagaaaccattcttagcttgccagccatagaaaaacagatgccggactggatttggcccatgagctgtagtgtgaggccctctgatttaatgtaattctaattcctttttaaaaaacaattttttttttcagttcagtatctagtatgtgtccggcactatgctaggcctgggactataatggttaacaagatagacatggtccctgtcctcatggagcttatggtgtaagaattagaactataataaatggctctgagggaaaagtacagaggatctacactgtgaattgtaatctagaccaggcaatctagaaaggcttccctgaggaagaattc

SEQ ID NO: 198172 - DNA, 1000 bp, Homo Sapiens
gatgtaattctagactgagaaactcagacgtaggtgaggaagatcctgcaattggtcattgtgtccttggattgccctgttgggggaaggagaattaatcataggataacaccaactcttttgagtaggaggtttccaaaaaggggaggacaggtttgtactcacttaggaagagaagtctacagacaaccagacaagtaagctaggaattgggatatgcccaggaagaaacttctcctgaataattacattagagaagtaatgtaatattgatcagtatcaaattgtacgaatcagaaggataattggaaagtttaagttagaaagttttggagaaacagtatgaaatagctagaccttaaggagagacagatcttgtgaaaagagacaagttgaggagagaaagtgggtagaattgtggaattcttgactctagtcaagccagtatagacaataaatcatggagtaactgatctacgaagtcttgcctgtactatgcctcgctatcactgcttgaaaagaagaagaaacagttgctgttgctcactctcctgactctgctcttctgtcaccctgagtggatggacttgcctggatggtttggggtgaggataggaaataaaatagggagtcaacagttataattcctctaatcatccccaacccttccataaaacactatctgcgaacaagtgttgtgttgatggcatggaagaaaaatcacagtaataggaagtataaccttcctcggtgaagtgctaaccccctcactgagatccatgtggcaatagcagcaacatcatctcatcaaagacagtaggctcagggttctacatggataacagcagctaagtgagtgtaagccaagacttaacagaatggtaatgaggagcatggatcacagagaagcaactgcccagtagatgagacaaatccttctttacttaaacatgctagagaacattgcagggagagtgggatgcttcatcatatggaattc

SEQ ID NO: 198173 - DNA, 1000 bp, Homo Sapiens
gtttgtgtcatctgtgatttatttcagcagtgttttgtagtctttttctgtagagatttttcacctctttggttgaatatattcctaagtattttattttttgcagctgttgtaaaggggattgagttcttgatttgattctctgcttggtcattgttagtatatagcagtgctgctgatttgtgtacattgatttttgtatcctgagactttactgaatttgtccgatctaggatctttttgggtgaatctttagggttttctaggtttatgatcatatcataggtgaagagcagcagtttgacttcctcttttccaatttgtatgtcctttatttctttctcctgtttgactgctctggccaggacttccagtactacgttaaatagaggtggtgagaatgggcactcttgtcttgttccagttctcagggagaatgctttcaactttttcccattcagtatgatgttggctgtggattttgttactttggcttttattgatatatggcttttattactttgaggtatgttccttctataccaattttgttgagggtctttatcataaagagatgcttaatgttgtcagatgctcttctgcatttattaagtttattgatttctgtttttaattctgtttttgtgatgtatcatatttgttgacttgtgtatgttaaaccatcttcacatccctggtatgaaacccacttgatcatgattaatcataatgtattatctttttgacatactggttggatttggttagctagtattttgttgaggatttttgcatatctgttcattagggatattggtctgtagtgttcctttttgtgaagttctttcctggttttggtattaggtgataatggcttcatagaatgatttagggaggattttgtctttatctttctctatccttttctctatctttctttatcttggaatagtttcagtaggattggtatcaattcttccttgaatgtctgatagaattc

SEQ ID NO: 198174 - DNA, 1000 bp, Homo Sapiens
gtcatcataatactaactcctcattgcctgatgacaatagtaatcataatcatgatttaggtataaatgtgctttccatggaatgtatcaacttgctatcttcagtagatttctatggcccctttagaattttgtgtctcagtgagtgtgtttacagtgatgcttatgaaaaagagttcaccaattccagccccaaatagttacatttctgtctgattattcacattttttctgtcttctaggaaagtgcatggtcagatttatcttgtttgctcttctggaagccaaatttaggagaatgtgtatttgaaagatagctgatcaaatgctgagtcatctaaaatacattgtcagagacatctgagttttggctttagctggaagttcttcacattggtctgtcttcccacacaaagacaagttaaaaatgggcctgatcatttaggctgacaaatataatggcctgaaaaatagcacttactctattccaaatattgtaccaagactattgtaaacatcatcatgctttcccccacaacgactatgtccattttatagatgatgctgttgaggctctgagagatgaactgcccaaggcagctgctaattatggagccaggatttgaagtctagagtctactctcttcatttaacagaatgagttctccctgactctgcacttggtacattcctctagcagagtcagtctcacaatggactttcattgtttacttaagctttgcctcctctaccaggtttgctaatttcttgaccatcagtggggactcagtaaatatttgtgcaaaaatggaacgaatgcatgaaggaaaaaatgagtatatgaatgcaagacaaaacacataaaataaatggatatttttttcctagattcttctgtgactctttccttagactttttctgatttgcctctccttagatgtaatggatactatgcatcatcatttatacaatttagtgaacctttacagaatggaattc

SEQ ID NO: 198175 - DNA, 1000 bp, Homo Sapiens
actgcaagaatcaggggacaagaagacatttgtgcttagaacttaaacttcaaaatttaaaactgaagttattttctaatccttataataataaaatcatcctgaattattttcctaaaatcctcgagtaatattgattaaatcattccaaaatgttcagctataagttctgtaatggaaatagtaaacctactctcatttttaaaaacagtgttttattaattttatagctagagttaatttgtcttgtaaaaagaaagcactaaaggctcatgaatatcattcagaataaatattaatcattccttaaaatggtgatcttaaaactgaggcaaaccactagctggatagctctgatcagctgccatatattgtaaaaagagtcttcctaacaagtttggcaggggttataatcacttgcctttggttacatcgtatgtggtttgcatgagtacttttactcccatattttgtgtatgaaatcatttaacttaggtagcactatcccattcaacttcaattcatattaaaactttctcttcaaggcatttctctaataattaaacattcttataaatatggacaatccgaacacatggcatacaaaagtgtgtaggtgggcaaactaaaatggaaacttatttatttatttatttatttttgagatggggtctcactctgtcacccaggttggagcgcagtggctcaatcttggctcactgtaacctccagctcccaggctcaagtgattttcctaagtcaatctcctgagctggaaccacaggcatgcgccatcacatccggctaacttttgtatttttggtagagacggggggtttcacatgttggccaggctggtctcaaactgatgagctcaggtgatccccctgcctcagtctcccaaagtgctgggattacaggcatgagccattgcgcccagccagaagttaaattatttaagaactacagaatgctggaaatgggaagaaccatggaattc

SEQ ID NO: 198176 - DNA, 1000 bp, Homo Sapiens
ctcttgtgctttatattccatattataacaaagaatttcttggttatctatatgccttttgaagacggcagtcaaagtacatgaacatcagagacagcttgcgacaaagaatcaatgtcttatttctctttgtggtttccaaactggagcatttggcacagcaatgatttgatgaatgcataataaaattcaactgcatatcaaatattgaatatttataatatatctttccttgtgattgcttagagcagctaagttacgtttctgctcatctgctcaccaccaagctacacacaccacatgctcactcatttgggagactcagcactgtgagaattgcttggagtgtgtctttacggctgtgacttcaaaataagacttccattactattttaagatgagattccaaaatggagtatacttatctaaaataataaaactgctagtcaatttttcagaaacttcacagaaaaagagattcagccagaccatatgatttctcctgtaaaatttttacttttgtaaaaagtttattagtactagccaatagaattttcaatcataactctaaattgttaagatcatttaattggtgaaagacctacaatgcttacttatatctaggcaaattggggatctctcgtcttgtttcctttctcactcaactgcacttagctactttcattatttcatatttccaagggcccaggctgacaatcactttttgtcttcaacttctattttaagttcagggatacacatgcaggatgtgcaggtttgttacataggctaacatgtgccatggtggtttgctgcacagatcatcccatcacctaagtattaagcccagcatccattagccattattcctgatgctctcactccttccaccccctgcccaacaggccccagtgtgtgtagtttccccccatgtgtctatgtgttctcatcattcagctcccacttgtaagtgagaacatgcagtatttggttttctgtt

SEQ ID NO: 198177 - DNA, 1000 bp, Homo Sapiens
tttatatgtttatcagtcaccaagtgttttccaaacatattcgaccaaataaatatttgtgtgtatttctgtgtatgtattttctaggtaacatatagtagcacaattcttcagaaagacttcaggaattctgatatattagagaactagaggtcaagcttaaaagacaccatggagttgaatttattgcagagggaaattcatcttaccgccggaagcatagttaaaaactatatgctgggattctgggaagatggcagtgtgggaagcaccagaattgtgtctttccatctagatagcaactgcatagggcagaacctgtcttaagtaactattgcattttgggactctcaaatttactaaaggcttgcaacctccaaaggaaagcttggaaggtaaattgtggttaatttggggcactttcagcttttagcacactggcagctacccatcctctattcccagccccatggtaggcagctgtgtgcacgttcctggagcaggctgcacacggcttgtgggaggcaggtgatcaaaaagaaccccacccttaaaatttcagaatctgtgctataatcactgatcacagaggtgcaaagaggcaggcagccacagttattgcaactcccccattcttacaagctcttccctctgtggttgaatagacctccagggaatttaaagggcaagcattctttatcccttactttaatttttctatttttcctcatctaggatccagacatcaaagactgcaaaattcaaaagcaactgtttggttttgtggaggggctttaagatggcagatgtgaactgcccagcactcacctcctccataaagaagtaccaaaggagtacataaataaccacacatcaaatagagcttctaagagaaaactgacattcagcagggaagtggcaaggaacttttgaatcactgaaggagatggaagcaaagtagctgacctggccaggaccagattaaggccaagaggaattc

SEQ ID NO: 198178 - DNA, 1000 bp, Homo Sapiens
gactttatcttttttttttctttttttttttttctgtagcaaacatctttcctgtgaaaaattccctctcctagtactttagttctgtggatccaaaatttatagcattcttctaccaccacaggggtgagtatataataaaaaatgtcagttattcgagtatgtaagaaacttggaagtcatcactcccatccttacaacaagaaaaatgctgtacaaacagactatcaacaactcattttagatccattagaggactgaggtcacagaaaaactgctgcccccaccctaaatccccactaaattagagagatgggaaaatgcaaagaattatagcctagtggagcaaaggcccaggagcccccacaggagttagtaatggagtagaaaactttaatatgcagttgattaatttctggaagcgcattgtggacaagcttgagagttaactttgaaaaatatataacatgataatactaattaaaagaaagctggattaatatattaatttccaacaaaaagacttcagagaaagaacaattatagggggatacaaaggggtattacatagtaacaaaggatttaattttccaagaaaacgtaacaatccttaatgtgtttgcatgtaacaggctgtcaaaacacatgaggtgaaaacagatagaactgcaagaacagacagataaatccactatgataattggaggtgttaacacctctctatcaataatgaatagaaccagcaggtggaaaatcagtaagggcatagttcaactgaatagcaccaaaatcagtgagtcccagtctctcttcccggaagttgattcttgagcagggacgtcaggagtagagtgatgtccaggccatatttaataacaaataaatcagagtctggacatgatatgtaggcattcgtttctttaaaaaaaaattgtcccaggtgattccattgtgaatctaatgttgagaagaaatatgcgcagtggttttctttgaattc

SEQ ID NO: 198179 - DNA, 1000 bp, Homo Sapiens
atcctccttccttggcctcccaaagtacagggattataggtatgcaccactgcatctggccacaaacattttgtttttttactgttcatttttcaagacaggttttcactctgtttcccaggctggagtgcagtggcacaatcatggctcactgcagccctgatctcctcaagtgatcctcctgccttagccaccagagtagctgtgactacaggcgtgtgccaccatgttcagctaacttttaatttttttttgtagagataaggtctcagtatgttgccctggctggcctcgaactcctggggtcaagcaatcctcccaccgcagcctcccaaagtgctaggatgacaggtgtgagccactgcactgcacaaatacagaagaccaaattattaaaattagaaatgagaggggacattactattgttcttagagacataaaggattataatatgatgaaaaggattatacatataaacaatatatgctaataattggataagctggatgaaagacacattaccagaaagatatgaactactgaatctgacttgagaaaaaaacagaaaatctgaatagacagacctatgtcaagtaaagagattgaggtagtaatcaaaaaactttccactaagaaaagctgaagaccagcaggcagcctcactggtgaatctaccaaatacttacagaagaattaacaccaatccttcataaagtctttcaaaatacagatgaggagagaacatttcctaacttattctatgagggtgatattaacctggtatccaaactaaagacatcacacacaaaaaattacagaccagtatttcttatgaatgtagatggaaaaatgcttgacaaaatctggcaaaccaaattcaacagagtattctgtaaacatgaagcagataataatagcacgattctccaaattgatctatggtttcactacaattgttgtttttttgagtgaaaaagttttcatttattggccgggcac

SEQ ID NO: 198180 - DNA, 1000 bp, Homo Sapiens
ccagctattaacaaagctttccagacatttacttatacttattttattttctttttctcttattttcactttctcttattttatctttcttcctggcttatttctccttttcatctcttctttttgtaagtcatcttcttcctccccttttttttccattttattcttccctttctctaccacaatacccttattagttgacatttaggttttacttccttatcccctcttgcatagcaggcagtctgcaaagtactttgagaaatacaaagatcacattacttataaaagagttattttttatttttatttttaactgtcaccccaccattttatttcactgaatgcttacaaacaacagtataagtatttgccatttactataacctggttactattttatttttacaatttatttagttctttggaagttttaaaatagattcttagccttttgacattttaaatgtcaatttaaaaaaaaccattatatctcaaatgttctatcatggttacttaaattcctaaacatttaaagtaactattttcactaagaaggaatatttttattctatagttcatctagtttttagcttacctctgttccatttattttctgcatactgaaatggcttagcctaaacagtacatagtatttccagagtgtaaaattgacaactggatttccttgaggatcaattgtcaactggtcaatacgacggagttgggctagtgcgttaaattgctgcagcattacaagatttgtttccttgaatttaaggtgctgcaatgataaaacacaaatacagatcagaacattgattttaaccatattgaaatattaacattaaagcttcactaatcattccccaggtaaatatgtaaactttaggcttagcaaatatgttttcaattacattaaatcaactgaatgtactaaacttacataactttaattcatccaatgcaccattgatggaatccatccaatattgaattc

SEQ ID NO: 198181 - DNA, 1000 bp, Homo Sapiens
tccgctggagcagaggcccccgagcctgctgacctctctgccttcaggcctggtctcgcagtcccttgtgcctcgcctataggcaggcggaatccagagcgtgcagcaagcccggccggctctcggtggcggtttctacagcaggtggggcctggctccgtgattgagcggcctctacccctctatctggggcccagcagcggccccctcccagcaccctggctacacgtctaaccctaggctgaccaggtggggctctcggaggcgttagccccagccctcccaggagtcttaatgttcctctcacaggaaaaaacgttctgcgccctttgtgccccaaaccctcgacccttcactcggcgagaggggtcgctgagggagagatccacctctgcccttcccgttgcccgccggttcttcctcgcccgcctcttacgcaccccgctcccgccggctcctggaaagccggccccggccccagcgcttccctccccggcctagcccctctctcccacccttccgctcgcccaggccttcacgctcagctcccggtttttgttgcccgggcttgtttcggagctgagcgcgccgccggccgggcgccaggtcacgtgcgttggtgacaacctctcgcagggcggccccggggcccccgcaccgccgattggtggggcccggcctggcgcggcccggggcggggcagcggggcccgacggcgagcggagcggccgatcagctgttgcgagcgctgcacaacaacaaaaggacttggactggccggcctgggcgcagcgacccgagggctggagccggccccgcgcctgccgtctgggtacctgaacgaggtgcagcgcagcccggccccaccgcagctacctcagcagtcccgccccgcccgcgtccttccccgccgagccggcggccgctcccttccccgcgcagccccgcacggcccgggcccacgtaagtgccggggggggggcgggcgggcgtccgtcca

SEQ ID NO: 198182 - DNA, 1000 bp, Homo Sapiens
caggtaaggaaccatgggctggataggcctttacattgcatttaagcatttaaaaattacactgaactttaatggatcattgagttggaatgaggaggggatatccattaaaagattgattaataaaataaggaaaatagtagtgatttttaaaaatataccctcaaggataaattctcctaaatgtactcacttgagacttgagatcacatctatttctataggagattaaggagttgataaaatacctccgttgagggaatcttgggttctcatcacatatttccagaaaaacatgcttcatggatcctgaaatataaaagatcctcttctgataaaattaagattgtagttttgaatgaatgaatgaatgaagtttggtcaataaatatctgcttattaaatacttaagtgtctattctagttggaaagacaagatcagcacaaaaaattgtatgagtcaagtaaaggacccatttaaagggtttgaacttgcttgaaattgcttgaaaaaatactatggttattaagtgctagattgaatgacatagtcaacactgttcaatagaaatgtaatacaagttacatatgtagtttaaaattttctaggagccacattaaaatacgttaaaagaaacaggtgaaattattttaataatatttaatctagtatatcaaaaatattatttcaatatgctctcaacataaacaaatgaaatattttacttttttaaatgaaagtcttcaaaatccaaggtgtatctagtctcaagagcccagttagcccatgtggctcatatgctcagtaactacatgtggctgctgtatagaatagtgcaaataaagactatgtgaggataagtattgtttgaaacttgaacttagtgaattctcttttacagcaaagagttaagatctctagtatactgtcttgactcaaggttgagatatagtgttgaataaattatttctgatgtggctgagctatagccttgaattc

SEQ ID NO: 198183 - DNA, 1000 bp, Homo Sapiens
aaagctttttgtatgcttagacttttaaacttttttttaatatcacttttttcagtcattcttatgaatgatgtctggttgtatttcgtttaaggttcactactggagactttgtctttaacacatttttttttttcttgagacagagtttcactcttgtcccccaggctggagtgcagtggcatgatctcggctcactgcaaactccccctcccaagttcaagttattctcctgccccagcctcccaagtagctgggattacaggtgcccgccaccacgcccggccgatttttgtatttttagtagagacaggttttgccatgttggccaagctggtctggaactcctgacctcgtgtccgcccaacccttccctcccaaagtggtaggattacaggcatgagccactgtgccgggacaacacattttaatttattgccgtaactgtatattttgcctaatacttccatattgtttttattttctattttttattcacttttcctcctatcactgctctttcttctctcttttcttttttcttcttctgcttcctgtcacctcatacctcctcctcctccttttccatttacctattgctatgtagacaactttttcgtcactgttatccttgtttctcttcaaattattttctaattttacatggttttaaatttaaccttaactttgaatgatgcttgaccttatatttttataattcctaagaagcaaataaatcactatttcttaactgtttaaccataaaagatgaataatgggaaatatgtgtctaatttggctatacattgtaatgatcatttaatctcaatagttcttactattaatgcaaatatttcctgatttctgcaattacttggcttgtagtcctaattttcagcattgttaaaatgcatcacttctgcattttcatagctatcttcttgggaaacagaacaaggctgattcacatcttaccagccaggtgccattttgtgaattc

SEQ ID NO: 198184 - DNA, 1000 bp, Homo Sapiens
caaaccaaatccagcagcacatcaaaaagcttatccaccatgatcaagtgggcttcatccctgggatgcaaggctggttcaatatatgcaaatcaataaatgtaatccagcatataaacagaaccaaagacaaaaaccacatgattatctcaatagatgcagaaaaggcctttgacaaaattcaacaacccttcatgctaaaaactctcaataaactcaaatttatttcttcaagtttttctctttacaagtatacataccatgaaaaattagtttattaaaaagtaatatatcttctgtattgtgaactaattttaatatttataatctcttaggaataaaatgttaaacactgagcattttagaatatgtatttactgaaagctttttgtggtattgtagaaagtttattttctttgattcaaattttttaaagatgatataatattttagaatttggcagtttaattaatgaggttcatctcaaatattttgaccttcaaaatttatggcttgccttacatttcaaaatcatgagatagaatttatcttttatcactttgtcttcatctagtttcaaatatgtggatgtgaaatgagacctgcttaaattagtggagaggacatggtgtggagtataatctaccaagtgggcaataaaaattctaaggaaaacataataggcatttatcaattcttcttataggcattaatttgactgatcctagttactaattattaaggattactaagattctgaaattgcctgaaatccaggcttaaaaacagtgttctattttggaatgggaaataaacttacaacattggttttatgcaacatgctctttaaaataccaagagctgtttctggaccatgatactatgaccatggattagtcattaggagacccagattcatctgtcttcctctgtgaatctttgtggcccgagataccttgctgtctattgtactttgtgtaaaacaggtgtgactgaattc

SEQ ID NO: 198185 - DNA, 1000 bp, Homo Sapiens
gtgagatttcattgtgtctttaaagatgaagagatgtttattaagaagtcaaggagggttaagggcagtctagcatccgagtgcggcctgtgcagagtcgtagacatgagaagcagcaatggggagctggagaatgcagctgaaattgggaaatttcgattaggaagcctgaaaaatgtgtctgtttttagaaagggtgaacgataaaggggaaagattttattttgtcagtgatggagagcccctgaaggattttaagccaggaaaggataagaaatagagagttccaagaagagcttaatcggttctttaagctaagggaagttaattaggaaatgtaagaaaattgcctctgtaattttcttagtgtgtacatagttgatgttcaaaattttgttgaaatgcaattttatatattctctctctttggaaagataaatgaagtttccaaagcccactgcatctggttgggtgagttgcaggacagccctaacccaagaaatttatcacagtgcttgcctgcaaagaaaggaattaagtgtagagaagacagagatggaaggaaaacttagatcgtaaacctattcctctttactccttgatattgcagcacatacataggtatattatctaccaccatactttttacttttttaaccaaaaaatatttctttatgattctctctatataattttatgccacacaggtttaatttcctggtaagcacagatttttaaaagaacaaattttgtgtgaaggaccaacaactaaggaaaaagaaatatgagcgagaaacatagaaccctagttcttacatgtgacaaagaggaaagcttagaattagttgaaacatacaaagatattaaacacaacacaaatggcctttaaagtcttgtctgtagtaacaggctttaggctcattccctggctggtgatgtgattttaataggtggtaggaggaagagagatgtatttcttacttattttgctgtggaattc

SEQ ID NO: 198186 - DNA, 1000 bp, Homo Sapiens
aagatcatgtttacctccattttttattttaaaaaaacaaacatggcttttcattgtagggctccaacaaaagaatcctctgaagaggagtatgactctggagttgaagaagaaggatggccccgccaagcagatgctgcaaacagctaaactgtcatattgctgtcttgtatatacagcttttccttcttttgtttaggatcataattgtctctacagtctgatattaaaggcattggatctatcttggatatcatacatggtcagagaagcctttaggagaagaatcagatcatgtatataattgtaacatcacattgattttacggaagatgttatatggactttaatgacacaatgtttagagataaaatgtacattattttggttcagttttttaaaaaaaatatgctttaacaaaattcttaggaattcttttaagcaatgcaggtattgcgataactgtagattttacaataatgttactctacaaatgggaaaataaattctttaaaattgaatattgagataccattctttagtgttaccttttttacccacatgtgtttctgaaaatattggaattttattcatcttaaaaattggaccaggtaggccgggcgtggtggctcacgcctgtaatcccagcactttgggaggccaaggcgggtggatcacgaggtcaggagttcaagaccagcctggccaagatggtgaaaccccatctctactaaaaatatgaaaaattagctgggtgccgtggcaggtgcctgtaatcccagctactcgggaggctgaggcaggagaatcgcttgaactcggagggcagaggttacagtgagctgaggttgtgccactgcactccagcctgggcgacaaagtgagactccgtctcagggcgaaaacaaaaaattggaccaggtagttttcaagtagttaaacatttcattgaaaaataccctgaagaactatattttgataattggtttagctgtattcc

SEQ ID NO: 198187 - DNA, 1000 bp, Homo Sapiens
atgaacattgaggaaaccaaagaacagcacacgtgcataaaatgttccaaatgtaaagttctaaactagtttctatttgaactgtatctttaaaacatttccattgaagacgttaaagctctttcgaaaatacaagaatggttcaagaaatctctatgaatcatcactatcatcagttacccaagtattaccctttctcattttaatcctgattgtcaaataaggcgtctgaagaggtacttcaacaaaaaagattcattgataactgaaatgctatcattttatatcgaaaaggtccacgattatacattttactttgtataaaattagtctgcttagccttaacatgctttgggaaaggagagaaaagctaaaaggaaaaaaatattcatgaaagccctttttcttttatgtcctgttaccgcattattgtcattggcagcactcacatttcttttgcttaaaatcaggagtcagaattgctactttagaaattaaaataatcgatgggtatactagggccaatttccctgttaaaaccaactcctgctcaccttcgctcccgacataaaaacaaatgactttttcagaataatttttcagaaacgaagataattaatgtagcaccatataacacaaattaaagctttcagacaaagactgagaaacaatgaccaacaccagcaaatctaaagtgctcttatatatgtatacacacaacacacacacacaccccaaaccaaatattcactgttcctggggggagactgcttcttcctccctaaccgtgaaccgctgtatattttccaattttgtgattttcctttttctgctatcacattaacctccaagagaactgcttaagttacatggaatcccaacctaatcacatcacgacttctctctcagcctttacatttttctctcaaatattagctcttcgcatttttttttttttctaatagctgggctgagttgacagaaaagggctgtggaattc

SEQ ID NO: 198188 - DNA, 1000 bp, Homo Sapiens
tatataagtaaagaaggagaagaacggagagcttccagtaggagcttttaattagagaaaaagacacagacaatctcatctttaaagtcttcaacatttttcctgtaacaaaactgagatattggtggaaaataggaaaaatatttaaatagctctcgtggaatcacaaaagccctagatcacaagatttctgaataatctttataatttctcttaattattcctgtgtttttttgatagcatgtggtaggcttaagctattacaaagtggtatttcacatgttaaacaaatggaaaaaatgtcacttttattgaagaaaaaagatttctttttgcatagactgctaaaaactataaagatagatttttatatttgaatattgctcatcatatactttttccatttgtaatattcgttggatgcaaaatgttactagtacatataattccccagctagctatataatggcacacattatatttgccttaactagagaagcaggctcagaaaaatatcaggtatatgttctcatattaatttacttactttctatttccttgtcaagttacttccattaaaaattgtgattgtgtggaaagtgctggtgctttttttttaaggaactgtggtgttatcttcttgctcatagtttgtcagatagaataggggtagttgggacagtttcaattaagacttagagatttaaactttaaaacttagagattttaaacaacaaagagatagatctttgttgacctcacatatttctaaaatgacttatcttttattttaagttacctactcatctagctgcctagacaaaatgacagttctctatctgaaacttatcccattaactctcagactagacaactagattggtaattagcttaatatttgacatggaaacctacagtattataattttccatcgtgaatccataagaagatatagctgaggatgctcttataaaaaattatctgagtcattcagaattc

SEQ ID NO: 198189 - DNA, 1000 bp, Homo Sapiens
ttatccctggggaacctctctactcactgtcctctggggcccctagcttgtgctcagagagaccctctggtctctcactctggatagctgtgtatgatatgggattagggacatgcccttagtggggtctgcacagctcctccttcccacttgctgctgctgaaggttggaggttccacagttgaatagtcgaatgcctttaaaaaaattgagatgtcgtggggcacagtggttcacgcctgtagtcctagcactttgggaggctgaggccggaggatcccttgagcccaggagtttgagaccagcctggaccatgcagtgagacctcagctctacaaaaaaataaaacaattagctggatgtggtggtacgtgcctgtagtcccagctactcaggaggctgaggtgggaggattgctttagcccaggaggtcgaggctgcggtgagtcatgaactcaccactgcactccagcctgggtaacagaaccaaacactgtctccgaaagaaaaaaagaaaaaaaagggagggcggtgaaattcaggtaacataaaattaccatttaaaaatgaacaaattcagtggcatttaggacaaccacaacatcgtacaaccaccacttctgtctggttccagaacattttcctcaccccaaaaggaaaccttgtactcattaagcaattattctcattcccacctccccccccagcccctgacaaccgctaaactactttctatctgaatggacttgcctattctgaatatttcatatcaatggaatcatgtagtgtgtgtccactttgcataatgtattcaaggcttgtccatgttgaagcatgtattaatatttcattctttttatggctgaataatattccaatttatccataaaatatatttttaactcatggtttctttgacaattcaggatccacaaaaacacagtcagcttctgacctagttgcttctcatcagctccctggctgcagtcacactgaattc

SEQ ID NO: 198190 - DNA, 1000 bp, Homo Sapiens
aattatttaagcactcaagttttctttttaattttcaatttttgtgggtacatagagggtgtatttatttatggtgtatttaagaacttttgtaacagaacgccccaacaggactagcacacaaagggaaagcaaatgcgacgtgtttcccacaccaggttctgcctcacttatccttaatctcaggtgccaagcaccgtgccagcagagtgggccccagtaacagcttacagaataaacaaacagtaaagaaaggagaccaaacttcggtgaggaggaagaggaacgatctcaaggtggaggaaaggcacaaaaaccaccagtaagtgccagaagcgcattccttactctatgcatgcaactgaaacatgggtcctgcacttacgtccggtgttgcaggcaagattaaaccactcctaactagcagtgaaaagtctaggaaggatcccccgccccatcgccccttggattctccaactactcaactactgaaaactctcttaacagaagacacctctccttccctgcacacaataggagcctaacatatgaaagtgacttcccaatttcagcaaaaaccttcgccgattcagaagaaagctttcccaccagaatcccctctccaacgttctagcttcgacgcttgcagctggtcagagggctcttgccctcctcgggccgggtcgcgggagggaaggtctcggggggcctccttgcccccacccgcggggtgccaggccaagccccgccgagtaactgctccgcctcccagcccggtcccccaggtccctgccccacctgactggtcgccgctgtaatattccgagtccatggcaggcggactctcagcggggagtgtccgcgccccgcgccgcccccgtcacctccttccaggcggtgtgaccccggatggcgcggctaagtgttcagagactgccgcccgaccggagaacttaacgggtgcggagggtaagaaagcggtagcggcaaaggcgaattc

SEQ ID NO: 198191 - DNA, 1000 bp, Homo Sapiens
tggtgtatcattgattctaagatgacaaacccgtaggcctaaaaaggacagatataccgatactcctgggtatcctactgcaccacatgttcatgtaatgcaaatttgcttgtatgcaactggcaaatgggaaaggatatcaagatagttcagaagtcacaattcagagcagttttccccagtgtatccatgtcctgtgttacaaataacagcaactgaacacaaaggacactgcatagctatgtgcagcatgaggtggaaaatctgagtactcggcaccatgagcttatccactttcttccagtggcttcagtttggccacacattctgttgtgtgaggccccaacaggattccacctgatccatgtgcattttgttctctctccaaaaagcagcagccctgacccttccttatactcccttccatcaaggtattgtcactttttgtaaggatacaatccgtatttactatcattgttttcttatgtattagaatttaagtgtgtgtgttgttttactggatagtatttttattaaggtttttaactttttttctggtataatagtaacatagttgacagcccatcatttttagttcacagttttgtagaacatgaagtgttttaggattatacgtatcaccttacagcagaaatgtctttacttctcattgcagaagactggcagagtgaggtctgaagagttgtggtccctgacaccaccccaggtagaccactagaccttttgggtaaagcttcacaggagcacaaaccctcatcctatttttatcccctacccatgaattcattgccaggagctggcatgaaccaacctttgcaattgagacttcaaactatgctgctgtgctcctaagaaggcttaaagagttactgctaaggacaaaaagggagcaagaatgacagatagaagtccagagtccccctactaatgacccactgacagcacctactgttttggggctccaaagacaaagggttct

SEQ ID NO: 198192 - DNA, 1000 bp, Homo Sapiens
agttcaaacccatccctggatttattataatgtaagccaaaaatttatctttcatgctcataacagtttgaattgtgttttcttacaaacaagtcatttctagctgataacaaaagttatcagaaaaactataggtatatcatgaattttcaactcacaaactgtcctgagcatttatctttgtcaacatctactataatttttcattttcagtaaacacaatggattcagggattttatactttaaatgttcagactacctagtactgcctattataaaaatcaaaatatttttctgagcagttaattgcgttaccatgttttgttgatattatattaataaaaaaatagatttggcacacaaagtgtacagtttttagatatatagagtatccttctattttcacacacagcttcataaacatacaacatgttggatatcaaaatgattgttgctttttaataattaccatcatcccatatatttccttcacttaggtccatacactaacatgttaccaaatagcctttttgtcccataaaaaactaaaataaattttatttattacatagtatttgcaagaaactttcacatctcatataatttaaatttaaagataatatttgatattataatttgatgatatcaaataataaggattaaaaagagcaggtgttaacaactgaaatataaatccaggtaatccagcttcaaattgaggatttgttttgtagcacattgaattttagcacatggtttggcaaatcttgtaaaatcttggttggaaccacatgtgagatactgccaggattctctgtttattttcattgcctctgccttgttggcttgcttattttcaactatagatcagattgaaaatttgttttgtagcacaatgaattttagtacaagttttggcaaatcttgaaattttagttggaaataaagacatcaataacttgtctttgttccacttttaaaaattctacaaaagaattc

SEQ ID NO: 198193 - DNA, 1000 bp, Homo Sapiens
atcaagaaagcagcaatcaaagtaatttttaaaggagttgatgaaattaagaacattgggttttattaagccaggtccagaagaccttcctagctgtgagacctcatgcaagtcatttcacctccctgtgtcttacttccatctgaaaaatgggtcgaaaataagccccgtctgactcaccatgtagactagttctaagatcatagttaggtgttattagcaccttgtaaatatgttctcagaaggcgaggggtactcagttctatccatgcaggaatttccaaacatgtaactcaaggggcagagaggtagcctaggaaaagcatgggcctcatgggacacagactactaggtgtggcacgtgcagtgacgcctgcattgtggtgagaagagagacacagggatgccacaagcagctacacaagacccctttccacatgtacccaggctgacaaaatcaccagaaaatacaagcctttaaaagaatcaattagtcccacaattttattccccagggaagataaaatttacacgcttcctgtaatcaatcaatcccacaaacctcttgaaacttcagtcagaaaatttgcaaactgctaagcaatacacaactttttttataggtggcagactagaggtgggaagggaacatcaggctctttgatacatgtaaacgaaaacatgttggtctttaaagagttatgatgaactctcggtttttcaataggagactagaattttaaaatcatagacagtagagccagaaaacctcttagaggccattttctaatgtatcctccccccacccattttacagaaaaggaaactaaaactcagacagacgtgacctgcttccagttataccacaaggtaaaatcagataaaatcatgagctgtgtccctttctgcatttaactcagcacacatttactaagcaccaaccaaattcttgctgaagaaacaaagatggataagtcgcagaatgcatcttcaaggaatt

SEQ ID NO: 198194 - DNA, 1000 bp, Homo Sapiens
aattgcttttctaaacatgtagctttagattcattagtgaataagtttagaaatgtacttatttctgtagagaagtatgaaaccagccaacgaattcgtgtgaagctaatgcactttgtgtaggaaagcaatttacaaagtaatatgtagctatcttattgaaaggaaaggtaaaaaaagcatcatagacagctaaaaagaaatgatcttctgtatcattttaaagatgtgatgattaaatacttgcatacttcactttgtcttatctgcacatacacagctgcaataaaaatctccatctaccctatcagtgtgatctgagagaacggaatactatgtctacttggttaaagcttttcttctctaaacatcaggacgatttaaggaaaatacacatctaagctcagttctaatagttccttgccactcacttggaaaaattcactgtgggttgcaagttcatgtagtagtatacctggttaaaatacagcagctctaccattgttacctcatcatactataatttctttgggacgtgaacttaaatttatacaagattttattataaaatgctatctaatttagggatacttaaatttttttggtttttttgttgttgttggtttttgtttttgttttttttttttttgacagagtcttgctctgttgcccaggcttgagtgcagtggcacgatcttggctcactgcaacctccacctcccgagttcaagcgattctcctgcctcaccctcctgagtagctgggactacaggcctgcgccaccacacctggctaacttctgaatatcaagctgaaattactatcagatatcttgccaccacatagaggctttgagtgaagtctgcatggaggagaacagagctgagagatggaaagatactgaatcccagtgacgtcctttgagatgtcggatcaagctgagctgggcatgaagatagagctactcctatacttttaagatacgtaagttaatgaattc

SEQ ID NO: 198195 - DNA, 1000 bp, Homo Sapiens
cagcttgctgtctgatggatggagtccaggagacagccacagtcattatgtatgaatttaattaacagcagaggacattgaaagcaagggaggagagctgtgagaaacagaggcagatcatttggggctattacaatgcaaagctgaggcgaggccacacagcctgccaattataatgccaatatgtagtaacttgactttttacctctgcagtctcagtctgggcatgagaatgcagctcgggcctcagtgagacccctgtatcccctcttgatggcagtgagaattttacgcctgtgcaaagagcagccaggagcccaggaaatgagaaggaaacaaacaagcccacccaggggtggtttgatgagtgtgttaaaggactcctgattttcacctcaacgcagatgttttgcaaacattcagactcctttcccccaggacagttcacaggattcacactgtagtagtttcagaatttgacctaaagtcttccactgaagttattgattctcctgagttccttctgatgggtcattttcacagcctgttttgtgtacctctctgcggggcactcttttgttctcagccacaggatcacagatttggtttttcattgttgttggggcaaagaggttgattccctctttctctgccagcccttcagacagagattttcttttttcattttcatatttaaaaatccagatacaggctggccctatgagcttcagttttgaggtatcagtcgcatacatcaagaatgtagagagggatcagtgtcagtgcatcctactgcttcagaacaaaacccaccgtgcacaggacgggctctgaagacggcgaggctgggagatcacagatgatgaatgttgctcagggcagcagccactattgcacacttttctctccttgtgcttcccttacagccccaggatttataatgctctgtcttatccaattttggtcacagcctgatggatgtcataaggctgtaaatact

SEQ ID NO: 198196 - DNA, 1000 bp, Homo Sapiens
tgaaaaattgttgtttggtgtagccacttccattaagtatcatagccagatcttctggataacttgctgcagctcctacagcagcacttgctgctttaccttgcactttcatgttatagagatgacttctttccctcaacctcatgaaccaacccctgctagcctcacatttctcttctacagcttcctcacctctctcagccttttcagaattgaagcacagttagggtcttgttctggattaggctttggtttgaaggaatcttatggttggtttgatctatctagaccacttcaaactttgtccacaacagcaatcagattgtcttgctttcttatcattagtgtgttcactgtaacagtacttttaattttcttcaagaacttttccttggcattcacaacttggctaactgcagcaagaggtctagctttctccctttattgccattgaacatgccttcctcactaagttaaatctttttgacatataatgagaaatatgcaacttttcacttgagcactcagaggtcattgtagatttattaactggcctaatatcaatattgttgtatcttggggaatagggaggcccgaggagagcgagggagataggggaatgactagtcatcagaggagcagtcagaacacacacatttatctattaagcttgctgtcttatatgagtgtggttgtggcactccaaaacaattaaaatagtaacatcaaagactagtgatcacatattactgtaacagatataataataatgaaaaaagtttgaaatattgcgagatttaccaaaatgtgacacagagacattaagagacatgaagtgagaacatgttgctgaagaaaaaaggtgctgataaatttgctcaattcaggattgccataaaccttcaatttgtaataaatgtagtctctgtgaagtgcaataaagcaaagcccaataaaatgaggtatgcctgtactttgcttgttaatagaatgaacggct

SEQ ID NO: 198197 - DNA, 1000 bp, Homo Sapiens
agatttatggcatttgaattatatctcgataaagctattttaaagctaacattaaagcttggaaaattttacacaaaattccagattgacttctcttgaaaaagcctataatctgacaccaccagccacatggtctctcatggggttcttcttgtttaaggagtacagagtttcaaatttgcaagataaaatgttctagagatctgtttcacagtaatgtaaatatacttagcactactgaactgtacacttaaaatgattaagatgataaattttttgttagggattttttactacagtgaaaatatacatagaagtagttgttcaaaaaatggtagaagtgtttgttgataatgttatgaatacttttctaattattatctgtgtcattattcttactagcttggaagtccttagtttattgtgatggttaagtaaaggcagaaaactctgtattagtagaacctgataatgatatatattagatcaaaccatatacaagcatgatattccattacttttgacctacaaaaatggtaattttatattacttaacctagcacttgtgaaaatatcttaatgtaactagagtatggcttattgatttgcttttggataccttaaaatttaatgtaaagtacactttcttttagctgctttatccccacttcagggccaatatataacatttgatttctggctgttccatttactggttgtgtgatcttcagcctcagttgtcttatctgtaaaaaggagaagataaatagaattgtggtcaagctttacttgattgatggatttactgttgtgaatagtttgcacaatcctttttcctatacattgttgatgtggggaggggaaaggggtagaaagaggagaacagtaaccaaaaatatatccatctttcctcagaatatttctcccatttttattccattccctctacctatctccctggccccagagtcacactcatcctacatgtgcggcagaattc

SEQ ID NO: 198198 - DNA, 1000 bp, Homo Sapiens
acaatggaaagtacagtgaacacccataaactcactgactagatttatttatttattttatttttaatttttttttttgagacagagtcttgctctgtcacccatgctggaatgcagtggcgccatctcaactcactgcaacctccacctcccgggctcaaggtattctcctgcctcagcctcctgagtagctgggattataggctcgcaccaccatgcctggctaatttttgtattttttgtacagatggggtttcaccatgttggccaggctggtctcaaactcctgacctcagaatccgccctcgtcggcctcccaaagtgttgggattacaggcgtgagccactgtgcctggccttgactagatttaatagttgttacagtctgctatatttgtgacattttttctgaagcattttaaagtaaaatacatagattatgatatttcaccccaatctacttcaatatgtatcctaaaaatatgctggggccagaatttaaaccaaagcctgacactaagtctatattaaagcttgcctaacaccagtatcttttcactactggattttgtcattgagccaggaaagaaaaagatataaaggagaaaagtaaacagggaccgaaagcaagatttgtgtggtctcctgtaagtttacctctcccccgacccctttttaaaaatgttttaccttttgtgaactataattgaattttggaaaagaaaatacactactacagttttaaaagtcaaatcccaatttaagaaaagaaataataccctactttgctttttcatgttttctttcagggagcctttcattttcccacggtgaacaaaggaaaggagttttcctgtggacgtttcctagccctggttggccagaggcctttgttcttcacctatcaggagtgcagagcagtgctcctggcggagctcaactccggtaagaccaacctcattctcacccaagaaattctctgaggaataatctggaattc

SEQ ID NO: 198199 - DNA, 1000 bp, Homo Sapiens
gagtcaagaggtggcgagaaaaccgcagggccgtcccatcccagcagggcgcgtccagggccccgcggtgcctcagcgcccggcgcccccaggcccagccctccagtgcccccttgtccccatacctcctcctcaacgccatcccccagcaatccacgtgacagggtcctgcgggaggccggagggctcggcctgagttccttctcgccagattaggcgcctgttctccgccggagacccagagcgctaccaggtcccgggagcctcgaagtccggggaaagtcggagcagcagcgccacccctgccccgcagcccgttcgcggggggccggcggcagccagaagccgcagcccctcggcccaggcgcggctccctcagtccccgggccggccggtaggggcgccctggggcagcgccacccgccccttctccacgcgccgcccgcaaactcggcccaagtttccgcgcccgccgagcgggcgagctcctacctgcagagcgccaggactcccgccgccgctaccccaggcggcctccgcgtccgcatcctccagcgtctctcaggccgcgggtcctagtccgaccgggccctgcgcgggaagtcgcagtgagcaccaagcccggagcaaccctcctagctgccgttcgcgccgccgctgggcgccgtctgcggtcccgggcggggcgggctgggggcggggcgggggcggggcgactcgcagggttggggaagagcccggccccgcctctgggagcctgcgctcctgtgggcagcgggtgcggagggcccgcgtggggccagctcgctaggagcgggctgcgggcgctgtgcaccgcccgtaaccgccacgctccacgaaccagtgcccggcgggcccgtcacgcgccctcagtcgctcccttagatcgttcattcactgccacttgctgcgatgtgaccttgcgcctgccgcttgacctcgctgagcttcagtttccttatttgcaaaagtggaattc

SEQ ID NO: 198200 - DNA, 1000 bp, Homo Sapiens
ttaatagtaactgttatttactaaaatgcagagttccacaaatggttaaaattcatgggacgttcataatcactcactaagaagaaacaagacattttggcatttcggtctaaaattagagtctctattcaaagagaatggccgtcatctgccaaacagaagtggctagacagagtccccctaccacccaaaggcatgggaattctttttttttttttttttgagacggagtttcactcttgtcatccaggctagagtgcaatggcatgatcttggctcactgcaacctccaactcccgggttcaagcaattcttctgcctcagcctcctgagtagctaagattacatgcgtctgccacaatgtctggctaatttttttacttttagtagagacagggtttgaccatgttggccaggctggtcttgaactcctgacctcagatgatcctcctgcctctgccttctaaagtgctgggattacagatgtaagccactgagcccagctgggaactcttaaactcttgaattactaacaaaaatgggtattaaccacttgagattttgcactttatttttatctttttttttgagacaagatctgaccttgtcacccaggatggagtgcagtggtgttaccatggctgactgcagccttgacctcctggctcaagcaatcctcccacatcagcctcccaagtagctgtaactacaggtatgtgccaccatgccctactcatttttgtaattttttttgaggtagtgtctcgctatgttgcccaggctggtcttgaactcctgggtgcaagtgattctcctgcttcccaaaatggctaggattacaggtatgagccaccgtgcccagctacatcatgcattttagaagacaaattttagattttatggctgaatcagcaaatagccagcacatgacatgtatctgcacccccacctccctacaacctgcagacaccacaaatagatgatggccagcattcctgat

SEQ ID NO: 198201 - DNA, 1000 bp, Homo Sapiens
ggcttcaagtcaccctcctggctcggcctcccaaagtgagccaccatgcctagccattattgtttttctaacctttgataatgtggcatcctattaaaaacataggatctagtactcaaggtagtaaagcttacaggttgacacattatagagtgatctatattacaattagatcacattggtgtctacaagctacatgtggtatttacttgctaaagcatttctctttatgtattgctcagtaactcacttaaaaaatatgctggttaagaactagcactaagtctgtccctatcatccttgacagtggccacataaatgatttccctttttgagagacagagagagagagagaaacgtattccattaataatgcattctcctggagtttttaatgcagtgccaggaatgctactttccatatgcacaaaggtagattagtgctttttctaccctgagcaaaggctaggtgtacatgcttgagcagataaaatgaaaggcaattttgaaagtaggtgttggcacaattaatcttgaataggatcccaattatttgggaaacaaaaggtagctatatttataactctgccttaactaatggcataacagccttcacagcaactcagaataaagtttccatcatagcagtttgtgtttctgagtatatccctaaccacagtaacctaaaaaaggtcaatagttatcctaacaatactgctgactactaacttactttctttgggcacaaatgtatccattgtaaatgttagtctatggtacagtgaatgtgataatcacaaaattaaagtataggaactcaagtggtacaccaatttattcaccaaatgccatatttaaaacacttttctagagatataaaactatcacaaaatcttggttttgaaaattaataagacgcttagtatttctgaaagtgtttggcggagaaatgtttgtttacatttacattttgaagatggatgattagatctaggaattc

SEQ ID NO: 198202 - DNA, 1000 bp, Homo Sapiens
gagagaatggcttgggggaaaaaaaagctctttcaagttggccaccccaaatcacccagatgggtgtccaggcaaatcagggcctctagacacttgctcttcttttcctcttctacttggctggtattgttttgagaggtgaatttctaggagggcaagatttttgtgtgtgtgtgaaacaagagaaaggttatctgcttaacctagctccctgaggaacttaatcaagtcactcccattctggcatttgggtgggtccaggcagcacccaagagtccaggacctcaccaggtccagctcaatgacagactttgtatggaagaactgggaaggagaaaaaagtaagcatgattcctgtttattttgcctgatgaacaaagtaatgcaattaattgaggtaggagaccaggtatgtgggaaaaaggagagtgaatcaaagattctgttttggacatgttgaattgagatgccagtagacttctaagtgatctcacatgagcgattggacatttgaatctggagcttgggggagtggcctgagcttgagatagaaatactacatagctggcataattgtgggggccaaatgtttttttcaactatgtgctagacatttgtagttcctctattgtagataacatgcttgtgtcctttacctatgtatctattgaatctctcacagttattcttaaaatttcctaaaagtttaatgcaataaaaaatgtttaacaaactaccttaaatcatctaatttttacagcaagcctggtacagctttttaaatttttgactaatgagagttgtgacctccacagacaaatttaaaaatcatcagcatataacaaataagaaaaacatatttgtcgtccacaaggaaatgatgtatgctttatgttcacaaagcaaggctatattgtgtctcccaagggggctcacaggctggtatgtatagtaaatcaggcttagaaacctgatttctctgtatatcaagagtgaattc

SEQ ID NO: 198203 - DNA, 1000 bp, Homo Sapiens
cttgtataggatgaaaaatttgtagtggccaggtttgctggctcatgcctataatcctagcactttgggaggctgagataggaggatcacttgagctcaggagttcaagactagcctgggcaacatagtgggaccttgtctctatttcttaaaaaaagaaaaagaaaaaaaaaaagaaaacatgtaaatgatcattatggacatgaccaaatatttatctgttaatagacagtttatccttccttccttccttgcttatctcccttacatccccacagattcttattctacctaagtggataagctggctctaaacctacttacatgattgatttgggaccattcctttaaaaattagagatgttgggagtttttgctttttgacccatactgtgtagatggtgcataattcttataacaaagcagcagggggctctctgtaggagcttgagagttgctgatggagaaagcctggctttttgttgttattggtgttcttttcagttcgggcctttttctactgaaaacatggccgtcatcctgtgaagactcccaaagggattagaatgtagctacagaagcagttagattattttattagattaggaaatttgttaacagttgagagagattatactggtttctaaactctagaaacctggatgaatggaacctgaggtttctttggttgtagagttctctctgaactgagattcatgctaagaaactgtgcaggcggcccctttctttagcatcctttatatcgtaaaaggaaaactattctcattagcatctgcagttagttttctgttcagctgtacctccctctgttctagaacctgtgcctattttttctgtattgttgaggcccaagtgcattataactaaggatctcttgtaaaaataaaacccactctcctgagtgagaggcttaaggaatccaaacagcaaaggttcaggtttctgcactcagaggttgctcttgctgtcttatgaattc

SEQ ID NO: 198204 - DNA, 1000 bp, Homo Sapiens
aattcagttaaatgttccctgagaaattagggtagggatcaggaagacaaaagatgaataagataatattctttcttatattacgaaagagagattttttttttactaacaataatacaaggaaggaggaataagtacttctaagaggtaaaggtaacatgctgttgaagagaatattcatttatacatttatacactatttataatccagaatagtaggattttgaggagatcaataaaaagacaataaaatattttctaaagaataattttagaatgaaaatctgccacccaacagcattaattgttatgtgaaaacagcaggcccccccatttttttttaagtaatgtggaaggccttgtgatgcttttagtataccttttaatatcatggtccaagttccaaacttgtttctatattatgaattcatcaagtggatatgtttataatggtcagcctgattttataatacaggttaatgttctttataaggacatgatgaataatttttatgagctacagtctggtcacatagtatgtttatctattaacaggatctgactgtattttattttagagttttaagtgtgagagtacaatgttatcagatcatgttcttgaaatcattactactgaataaaaatagaatgtataagataagctatgtgaaattatatttagtgaaggagctggctgaagttttaaataactattgatctcttattttaattttattcctttacaaataaaatatttttaatttaaagtactatattattttcactgatactcctttaaatatgaatactcaatctttactttttaaactcaaatgtttgttttggttcccctcctttattaactcagctatttatttagatcaatttccaccatctttcataaaattttcagtgaaaattatgtactaaggtttgctttgaattttgtaggctattgcttatgtaagcaccattggtaattttgtcagacaaagaattc

SEQ ID NO: 198205 - DNA, 1000 bp, Homo Sapiens
ctaaactagaaacatcagctggtaatggataaacagaatgtggagtatctatacaggggagtactacacagcaatagaaagaaagaaatggatacatgcagcaacatgaataaatctcagaagtgttatgctaagtgaacaaagtcagatgtaggaggctactgactgtatgactccgtgtatatgaaattctagagtagaaaaaactacattgccaggcctgggggatgggattgaccacaaaaaagcaagaaggagcttttcaggtgatggaaatgttttatattatgatatggtggtggttatatcattatatacacttgtcaacactcaatgaattatacctttaaaattgatagtttttattgtaagtaaactctatttcaaaacttgaaaaaaaaattgtgggatgcagctaaagcagtgcttatgggaaagttatagcattaaatgcttatattataaaaagaagaaaagtctaaaagcagtgaccaaaagttcattccatcttaagaacctagaaaaagaagagtaaattaaactcaaagcaagtagaaggaagaaagctaaattagttaaatgctaaattagtgaagtagaaaacagaccaacagagaaagtgtacagatccagcatctcatagcaatactcagaatgttccaaaattactcatcataccagaaaccaggcaaattgcaacttcaatgagaaaagataattaacagacgccaacaaggtgacacagatgttagaattatctggtaaagatttttaaaaggttatcacaaaaaaagcctctaataagcaattatgactactgtcaaaacaaatggaaaacagaaagtttcagtaaaaagacagaagatataaagaagagctaaatggaaatttcaaaactgattacaatacctaaaattgaaaactcactggatgggctcaataggagaatggagataacaagaaaaaactggagaacttgaagataaatcaataggaattc

SEQ ID NO: 198206 - DNA, 1000 bp, Homo Sapiens
tgtgtttagctttttaaagaaactgccagacctttttctggaatacctgcatcatcatttcatgttttcagcagcggtgagtgacccaggtggcgtggccagtgctgtttattgcagccattctgataggtgtgtcctgagctggttgtggctgtaacctgcatttccgtggtgaataattacccatcactcctgtgtttgttccatctgctagtccttggttggatgtgtggcttacaaatcctttcctcccagtcagcaacttgagttttcatcctctagagggtctttggcagagcaaaagttattaattttcacgagattctatttatcacttctttcttttaggaatcgtgcttttgctgtgaagttaactagtagcccagtcccagatcccagagattttcttgatgttttatcctaaaagttctatagtctttcatgcgacacctcagccccagatgctcttgagggtggttttctggccccagccgcattgtcgccggcgccgtcctccctccatggctgcttctgccgcagcgtctcgagggcactcaggtgcacctgtgtggtctgtttctgggttttctgcccgtagatgcccttgatcaagttggatttcctgttttctgtgtgttgttatcaccagtgggtgttgaattttttaggagtttgttgattgatatgatggtgtgtgtggtttttcttcttttgcctgtcagtatgtggtggtcacattgactgatttttggacatgaaaacaaccttgcaccccagaaacaattcccgttggttgtggtgtatagtaaccttgatgcgcttctgtgaagtgtctttatgttgacgttgaggggcctgtggggctgcacttgtcacgttgtgtgccgtctgcccccaggtttgctgtggctcccgtgatgaggtgggaagcgccccaccctccagcatcactggtgagactgcggacttgccccttcctttcacatattcgggagaattc

SEQ ID NO: 198207 - DNA, 1000 bp, Homo Sapiens
cacacctgtaaaacatacatattttatggacacataacatagttataaatacaataggaatatgcctataaaatatgcataaatagataatggcattaattaaataggtaatgacattaatataatctcatacagttaaggaacataagtgaatgattagaagaggacaagattcagaactgggtgcctggtcacctgggttctcaccttccacaggggatggctcattttggagaagagaatgtggtcccttcttacgccctgccttgctctgtagcactgagtctcagctgaaatcgcctagacatcatctttcatcttctctggaagatttaaaaaaaaaaaaagaaaagttggtaaaaaaaaattgtatattgtgacacatttcaacaaaatgtaaaatttggaatgtctatagaagcattgtggcagcagggatctttgagactcacagtgagaaatatatccagaaacgtgaatgaccttctcaaggtcacttagatcttggtcattgctcttcccacagcgggtgacaacctctttggttcatctgatcattttctcagtatcttctggtttctcttccctgtcatcaatagatgaggactggagaggtgatcctatccaacaagatgtcccctcttacaaagatggcagtgctccccacccatctcatggggttcttgactgtcatttactttaagaatgcattttaaaaatggaatctctctttatagatgtatagctaagagaagggagaaaggaaataacattgattgaatagtcactgcatagcaggcacttccctagggaattgtttgcacccatgattctcatttaattcccacaaggactctctgaggtatggcggttttaatcccattctactaattaggattctaagacttaaaggtatacatcaaattactgagtgttacccaggctgtaggtagtgagggtacttatacctggggcatgagatctgcctggctctgaattc

SEQ ID NO: 198208 - DNA, 1000 bp, Homo Sapiens
aagattataacaagctgttgttaagcacgtacgctatgccagacgctgttctaagcacatcccatgtgtgaacttatttaatccttacatcttatttaatccatacatgaggtgaagatataaattggtccttgtagggtcacaccactgtgaattcagaatattctgctagctcttcaacccaggccctccatctggtctgtgcagcctgcaagggcataggggaggcccacttcaaatatcagctcttttttgagcatattccccagttctcttgttctcacatcctttaactctcacagagcagcgtgtgttcgtttatcatcccccttacttgactatcctgttactttagaacagagcccttgccctatcctcaagataagactgcaagttccagagggcaggagtgattctgcctaatactctccagagcccatatcaatgccttgcacagaggacacatgaaacacattaaatcacaatgactctgttgtatgttcctggttttcaggaatttggcagcttgtgtcacataaacaaaagtcagtggatttccaggcaccagagctttcctctcataacacttaccaccagggcatgataaaaactgtgctcgttctgggcctgcctacccacccacccatttacccaccttccagcctattgacacacctgctatatataactccaccctacaccctagcaagcgtacgtaagtgcaaccatagcccataccaaatgtaatcttaatatacaatcatgcaaattaagttatggatttctagttgacacatgttatttttgtagatatttgaaaaaacattcaattgtacttacagcttttaaaaattttgtgttgtcaataatttgttgtagttgtcttaaatattttcctgggcccttaaaagatctatgcacttagtactcctctttattgtataaagaattaagttagttaaaactcatatgtctgtcctttcatctgggttataagctt

SEQ ID NO: 198209 - DNA, 1000 bp, Homo Sapiens
gtctctaaaccctgggaaaaggaggtaaaggtagttataaatatacaattttatcttggtgggagagaggaactgataaagcttgaatatctgtcccctccaaatctcatgttgaaatttgatccccaatgctggaggtggggcctggtgggaggcatttaggtcatggcttcagatccctcatgaatggcttggtgctctccccacagtaatgagtgagttctctccatattagtgcatgtgagagctggttgttttcaagagcttggcactcactcactctctctctctctctctctctctctctctctctctctctctctctctccctctccctctctccctttccccctcccccttccctttcccctctctatcccctctccctccctctcttactccctctcttgccctgtgatatgccagctccccgtgccctctgccatccgtggaagcttcctgaaaccttcaccagaagcagaggctggtgctgtgcttcttgtacagcctctagaaccccgagccaaatcaacctcttttctttacaaaatgccgagcctcaagtgttcttttatagcaatgcagatggactaagacagaaagtggttagagggaatattcatgaaacctccaatcttcttcaagaaataacaggcaaatttctccactgagaataaaaggatgtgtttaagtaagaaatttaaaagaatatctaaattttgaaataataactcagaagaatcagagtcattctaccaggtagtaaaacaaacaaaattattgctgggtgatgctgaggctcttctaagggcaggtggacatggattcacactgtcatccacacatgtgatggtgttttcttcaaaagttctcagtcagccaggcatgcaaattagagtccagattgtggcatccacctgggacgggtctattgtgagaaagaggtggcagatagcaagttaactgacagttctggtgagagaggggttcagatgaattc

SEQ ID NO: 198210 - DNA, 1000 bp, Homo Sapiens
agaggagtggaattgctgggtcatatggtaattctacattgagcttttagaggaactcccagactcttttccaaagcaggtgcactattttgcattcccaccagcagtgtacacgagttccagtttccctacattctcaccaacacttattattgtctgtccttttttattatagccatcccagtgggtatgaagtagtacctaattgtgattgtgattttgatttttgtttccctaatgactaattgttttgagcatttttcatgggttcagggcctttgatatgttgattttttcacaaatcttcaaaaggggacacagtcggcagcagttcctaaatgcgttggaccatggagccaaacttgcaaaagcagctcctggaatgcaagcccgtacccgaaagctgggaaacattggctggaaaccagcctgtgctggaaatgtgagtttggtgaatgtccttaggtcattacttctgcaaattttgctcaaagaaagggaatctgaactctccacttttgtacattaagataataataataataataataattttaccccaagatatggcaccctggcatgatgaatattttgaattaaaggcccttggagacaagcagatgctggaaaaggcttttggttatctgtataaagattggacccaccaaggacagcaattgctttccatctgttccctgaaatctcgtacctggatggaccttttcacaagataatgtctgtctctcaggctcattaaaattcaaaagagaataatttacaggttagtttctgtcccccctcccccaccatctattcattctcactaatactcatttgttgcccctaacaagaattacctacattccccacctcctctctttcctatgaggccttgctgaaggtcaccactgtgcctttacactcacccaccttcctttccctactgcttacctgccccacaagccagtcatggcctctcctctgagccctgtgagaattc

SEQ ID NO: 198211 - DNA, 1000 bp, Homo Sapiens
ctgcttgttacatcaagacctgagctcctagtattcctcccaccctcctttgaatgagttaatctctagactttgtctagaacacattagagtatcaataaatgtctgcttttctccatttctacatattttctttttctaagcccatgtttatggtccataacagatataaaggcatgtattgaacttttatctttaccagtcatatactaataaaatgtgctatgtgaatcctttagagtaaaacagaatagaaagtaaatgaactatcctggaagcgatgatattagacggccaattaagtgctttcccagtgaaactcagcatgaattagcaagtgtcccccactaggggatttagcatttcttcaactcaaaccgatatcttcagattcacttgaagtgttgccaatagtcctattactttgtggttttacaaagcagatcattaaacggtcactcttaataaagcttattctttgacaaacaggcttagtgacactgagcacttgagggatcaaagagatggggaactaccctcacccaatgcaggaattcccttagaaatgttctcaagagatgaacatttagccaatggccacgtaggattatttccaatgacagagaagattattacttgtgaaaataaatgaactttaaaggaagtaaaatttaactctgtcacttcccagttgtgtgagtttcaccaagtttttccttggcatctcaatttcctcatggataaagcgagataacaatatcaactttactggctggtaatacacagatataaagtcttgacttctgcactgagaacataatgaccacttaacagtaaatgggccccttaagaggcttcatgtgccatttctgaacaaaaatatgtgatagaaatttcttttttatatttgagctttgatttacctccctgtaacttcaacctatttgatctagtttcccctggagtcacatactcctttccccctgccatttgagaattc

SEQ ID NO: 198212 - DNA, 1000 bp, Homo Sapiens
ctgacctcaggtgatccacccgcctcggcctcccacagtgctgggattacaggtgtgaaccaccacacctggcctagagttaggatttttatttgaggtatttcttcttttttaacgtagacatttaattctataaacttccctgtttatactgcttttgctgcatcacctaagttttggtatatcatgttttcatttatctcaagattttaaattttctctttttttttttctttgacccattggttttttgagagaatgttgtttaattttcacatattctcagttttccttctgatgttgatttctagtttcattccattatgattggaaaaatatacacaatattattttaatcctcttaaatttgttaggacttgttttgtgacctcacatgtgatctgtcctggagaatattccatgtgcttgagaggaaagtgtattctgctgctgttgggtagaaagctctgcatatctgttaggtccattgggtctacagtgttgtgcaagtcctctgtttccttactgatgtcctatctgaacgttctacccattgtcgaaagtgtggtattgaaatctcctaccattattgtgttgctatctatttctcccttcagttctatcaatgttcgcttcatatatttagatgttctgaggttgggtacatacatatggtgatgattaattttatatgtcagcttgactgggccatagagtgaccaaatatttagttaaacattatccctgggtgtatctgtgaggatgtttctggatgagattagcatttgaattaggagactgagtaaaacagattgccctccccaatgtgggtgggcctcatcggatccattgagggcctaaatcgaataaaagtctaaatgggaaaaacactctttcttcctgtcttcaagctgggatattggttttctcctgccttcagacttgcattcagactcagactaaacgctataccattgcctctctcctgggtctggaattc

SEQ ID NO: 198213 - DNA, 1000 bp, Homo Sapiens
atgcctgtaatcccagcactttgggaggccaaggcaggtggatcacgaggtcaggagttcaagaccagcctggccaagatggtgaaaccccatctctactaaaaatacgaaaattagccaggcatggtggcagacacctgtaatcccagctactcgggaggctgaggcagcagaactggaattgcttgaacccgggaggtggaggttgcagtgagctgaggttgcaccattgcactccagcctgggcgacagagcaagactccatctcaaaaaaaaaaaaaaagaaagaaagaaaagaaatagattgggctggccgggagcggtggctcatgcctgtaatcccagcactttgggaggctgaggcaggcggatcacgaggtcaagagatgaagaccatactggccaacatggtgaaaccccgtctctactaaaaatacaaaaattagctgggcatggtggcgcatgcctgtagttccagctactcgggaggctgaggcaggagaatcgcttgaacccaggaggcagaggttgcagtgagcagagatcgcacccttgcacactagcctggcaacagagtgagactccatctcaaaaaaaagaaagaaaagaaaagaaaaaagaaaaagaaagaaagaaaataaaagaaatagattgggctgggtgcagtagctcacacctataatttcagcactttgggaggccaaggcaggagaattgcttgatcctaggagtagtgagaccagcctgggcaagatagtgagactcagtctctaccaaaaaattaacaaactgggtgtgatggtgtatgcctgtggtcccagttactcaggaggctgaggtgggaggaatgcctgagcctggaaggtcaaggctgcagtgacccatgattgtgccactgcactcctgcctggttgaaggagcaaaatcctgtctcaaaaaaaaaaaaaaaaaaaaggctgtaccatttgactgtttttttttttgagacggagttttgcac

SEQ ID NO: 198214 - DNA, 1000 bp, Homo Sapiens
ggatccagatgcttgcttcccacagagttagggcataagattcgccaaggatcgtagaatggggtgtggtgaaggaggagaactctggcatatctgattggagttggaatgaaacttctgccttttgagacccagctgtactgtatgatctcaggaaaattacgtaatctctctgagtctcagatcttctgtctgtaaaatgagtgtgatgaaacccaccacactggacttctgaaagcatgaaatgaaagactgggctaggcacagtggctcacacctgtaatcccagcactttgggaggccaagacaggcagatgacctgaggtcaggagtttgagaccagcctggccaacacggtgaaactccgtctctactaaaaatacaaaaattagccaggcatgatggcacgcatctgtaatcccagttacttgtgggggctgaggcaggagaatcgcttgaacccaggaggtggaggttgcaatgagccgagatcacgccactatactccagcctgggcgacagagcgagactctgtctcaaataaataaataaaagagatggagagtctctggaaggttttgaacagaggaggttgtaatctaacctatatttttaaaggatcactctggctactgacttgaggagtgactgtagagtagaaagggtaggagcaaagagaataagcaggcagctgtgcggttacccagtgggaaagggaagggctgggggctgggtggggctactggatgggtcttagatatattttcaaggtacagccagcagggtttgctgatgggaaacacagaggtctaagaaaaggagaggaatgggccaggcacagtgactcacgcctgtaaacaacactttgggaggccctggcgggcggatcacctgaggtcaggagttcaagaccagcctggccaacatggtgaaaccccatctctactaaaaatacaaaaatcagccaggtgtggtggcacatgcctgtaatcccagctac

SEQ ID NO: 198215 - DNA, 1000 bp, Homo Sapiens
ttgttgttttctgttctttttttcttttaacagtcagtctactgttccatagggctgctgtggtttgctggggatccactccagatcctagttgcctcagtttttcccatacctggaggtatcaccaatgaaggctatgaaatagcaaagatggcagcctgttccttcctctggaagctttgtcccaggggggtactgacctgttgccagcttgaactgcacctgtaggaggtgtttggagatcccttttgtgaagagtcacccagtcaagaggaacaggatcacagacccacttcttaaagaagcaatctggctgttttttggtagtgcagctgtgctctgttgtgggggacccttcctcattcagaccatctggactctccagagtcagcagactggagctgctgagtcgactggagctgctgagtcgactgaattgcagagatagcagctgtccctgcccccagcaactcggtccttctcagaccaacttcagcctctcactgctggctggctggctggaattccaagccagtgtgtcttcacttgtgaggtgccatggaagtggggcccacagaacaatgctgtttggctccctggattcagaccccttcctagggatatgtactgacggatcatcccccttgccgggatcctggggccagagtatgcagaactcctgggtctctgtgtgtgcccaagtgactgctctgccaggacaccacacagctctgtattggtcacaaggccctgttggcttggggttacaaggggatctcctgatctgttggttgcagagatctatggatggtttcccagacgggatcgcacactcactcactgcttcccttggctgggggtggggtttcctttggctccctgctgctcctgggtgagccgtcaccctaccctgcttttcttcattctccaagggtcgagctggttgcctagtcagtcccagtgcaagaacctggatatttcagttgaaggggctgaattc

SEQ ID NO: 198216 - DNA, 1000 bp, Homo Sapiens
tttgtgcatgctgggtgagaggactcaagttcagttgggtaacactgctgacatcgtggaccagatgactctttgttatggtgggctgtctgtgcattggagaatgtctgacagcatccctggtctctactcactagatgtactactcactagcaccccctagatgcaacaacaaaaaatgcctctagacattaccaaaagttccctggggggcaaaatcaccccagctgagaacccgtgggttaaagtgagattccaccctgctgcccactaccatcagaaacttctatctgaatgctcttcacccatccccacctgcgctattccagataacatgtgttacatccagaaggggccatcagcagacggccaggcagaatccaagggagaaagagaatctgtccaataggaaaccaactggcctccacttcatccccacactaaaagggagagaataaaaagtacctgcaacacttgtctcctgacgatgagagaagttggcagagctagcactttgttggccaccttctctcccaccttcttctttgccaataaggatttacccaggatgtgagcaggagagacagctctctacagagagaagcgtgtccctcaggacctggcctgcacccatgggatggaaactctgccctctagtccagccttgcagtccactggttataggaccttgggcaaatcatttaattttgctggatttctttttcttcagctgtaaagtgaaagagccaaatcttagcccttctctgaggttgcttctagatctaaagtactactattttagggaccaactgttggggagggtaaaagaaagaagagagcagatggaggcagaagaaccaaagaaagcactggaatactctcaggtgactgtatggtgtgcacaagagagggcatgagctaggtttttaagagaaatatgcaagctccaggccattggtaacaatcaattgcaatttctaggataaagaaggaagaattc

SEQ ID NO: 198217 - DNA, 1000 bp, Homo Sapiens
gtgaaaaccaacttaatacaattttttaaaatacaggctatggatgaaaaagtctccagagaaatagatatcataaagaaaaaacaatcacaacttctggaaatgaaagacacacttagagaaatacaaaatacactggaaagtttcaacaataaactagaacaagtagaagaaagaacttcatagcttgaagacaaggctttctaattaacccaatccaacaaagaaaaaagaattttaaaaaatgaataaagccttcaagaaatttgggattatgttaaatgaccacacataagaataattgatattcctgaggaagaagagaaatctaaaactctggaaaacttatttgagcaaataatctaggaaaacatccccggtcttgctagagatctaaacatccaaatacaagaagttcaaaaaccacacaggaaattaattgcaaaaaggtcatcatctagatacatagtcaccaggttatctaaagtcaagacaaaggaaaccatcttaagagctgtgaggcaaaagcatcagacaacctataaaggaaaacctatcagattaacagcagatttctcagcagaaaccctactgaggcctgaagggaatggggtcctattgttagcctccttaagcaaaataattttcagcaaataattttgtacccagcaaaactaagcttcataaatgaaagagagataaagtctttttcagacaaacaagtgctgagagaatttgcaactaccaagccatcactacaagaaatgctaaaaggagttctaaatcttgaaacacaacctcaaagtacaccaaaatagaacctccttaaaggatgaatctcacatggcctataaaacaataacacaattaaaaaaaagatattcaggcaacaactagcacaatgaatagaacagtacctcacatttcaatactaacatttaatgtcaatggcctaatgctccacttaaaagatacagaatggcagaataaataagaattc

SEQ ID NO: 198218 - DNA, 1000 bp, Homo Sapiens
aacccactgggaagaggaccactaactccccagtgcctacccctactaccccctcaagctttcccccgtgacttcctgccctgtgtctctgaccatgaccactcctccttggttatacacacacgctagtctacacatgcattattaatgtattagttcctatcccccaacaacctgactgcaggacctgttttatataaaatatatatatataaaatatatatatattatatatataaatatatatataatatatatatatatgtatttcaaacttttaacccactttaaaactccaccaagataatagtaaaaacctccaaaaatttcagatctactttcttgactaatgacatgcaaatgaagaacttagttatggaccagcctacaagggctctttatacttccacattgttcttctatcttactcttacaataaaatattttctaggctatttagggcaactgtaccccatcctttaaataagtccactattaccaccccaggtttcttacgatgatgccaaataggcccaggggcaatgggtcttactgtgttttcctaggttctgtacttgtctatttggcatccattaatcacagggccaaactaatggccaacattctttacatccccgctgtgacccagagctcatactctaagctactcacacatcgagccaatattttccctaccctacataaacccagggccatgtaacagacaactggggaccgtccctaggccccaaagcccatcagaattattcaaactattgagtcctaagctgttccccctgcccagctggacctttcccacagaaaccctaataataaaggttccgaattagattttcccctcacttctgctcctctttccttaaccaactggatgctttaccacatgaccctgcatgacagagcaagtccccttctcttggaactataagtaataaagtcttttttcaatggcgctagtccatctgtgttgacactcagt

SEQ ID NO: 198219 - DNA, 1000 bp, Homo Sapiens
gacacaggtcacattttttcaccattacgttttcacctactacatagcacctaaacatagtaggtgccaaatcaatgtaaccatgaatcaaactgattcattcttggccgggtgcggtggctcacgcctgtaatcccagcactttgggaggctgaggcaggtggatcacgaggtcaggagatcgagaccatcctggctaacacagtgaaaccccgtctctactaaaaatacaaaaaattagctgggcgtggtggtgggcgcatgtagttccagctactcgggaggctgaggcaggagaatggcgtgaacccagaaggcggagcttgcagtgagccgagatcgcgccactgcactccagcctgggcgacagagcgagactccgtctcaaaaacaaaacaaaacaaaacaaacaaaaaaaacctgattcattcttatgtaaaatgcattaaaataagagaaattttacaatatttaaattacctatcaattttaacagaatctaatttcacttgatcttagattacaagaatgatattttcaaacataatttatcatctttcaatatctcccttactaaagtaaaaagtttggtttttttgtttgtttgtttgtttttcatttttgacaagatctggctctaccacccaggctggaatgcagtggtgtaatctcagctctcccaggctcaagccatcctcctacctcagcctcccgagtagctgggactacaggcacacaccaccttactcagctaatttttatattttttgtacagatggggtatcgccatgctgcccaggctggtctcaaactcgtgaactcaagctgtccacccggctcggcctcccaaaatgctgggattacaggcaggagccaccaagcctggtataagttttaaagtgaacaaaaatgggccggacacagtggctcccacctgcaatcccagcactttgggaggccaaggcaggagaatcatttgaagtcaggagtttgagaccag

SEQ ID NO: 198220 - DNA, 1000 bp, Homo Sapiens
taaccaggtcaatgtagtgagagctatagctgcccagtgtactggactctttagccacgggccaggacactttcatctcagcagaaacctctaaggggactggggagtgtgctgtggatgtttctgggttactcagacctcctggggagccttccccaccgcagctgctgcagggagctcagctgcagtgatgaactgcggctcagccttgtttatgggaaaaccctacatgggagatgggacggtttcctgttggttctctcggcctcaggttgctttcacaagtgcagggattctcacctgggtgtgtgaatggggctcaggatgccccaagggtatgtggagatgggggtcagctgtcttctctgatgcctctgaacctcctccccctgcctttctgcatctcattgcttcctggcctctctcactttgggtgctttggaacaacatgcaatccaatacacaggctgactttattattttgttttgttttattttattttattttggaaacaaaggctctgtcattcagcctggagtgcagcggtgcaattgcaactcactgcagccttgaacttctgggctcaagtgattctctcgcctcagcctctcaaagtgctgggattacaggcatgagctgctgtgcctggcctaggctggctttaaaagctcctcactctctctgcatcctgatgatacctacctcctggagcaggctcccagccattggcttcggatactttgtagctattattggccagttgtggcatgtgaagctgaggctcaggagaagggcagtcctgtccaaggccacacggctcagtgctaacactcagacttcagtgtttttatctccctcctggtcgcttccacccttagtgcatctctggaggcccaagggagctaaaggccaggctttggtcagctaagaatttaaaaaagctgtctctgtgctcctctgtcaatccatcactccattatctcccccgacaatgaattc

SEQ ID NO: 198221 - DNA, 1000 bp, Homo Sapiens
agaactaaaaacagagcggaggacaaaatgcaagactttaaataagcaacatcagatgctttaagatattttagataggaacttgcatatttgtatatctgtaaaaccaaccattcacatggaaaattcccagtgatttctgatagccacactctagatttacagaagttacccatgggaaaatgactccaatgatcccattattattactttcttttagagaatgttttgcccggcaagcctgcacagactagtctgaaattctcagcttcagtgccctacatcctgggacacagacgtgagtcgcccagccctgattcagcttttccattacaaaagagaacctacatggcgacttcaaacctgtgctgaaacccaattactaaggatgtagcaagtgtccttagcagacactatgtatggacactcctcctcggagctcaattaaaacatgcccctactgaaaagcaggaaaagcacccctaagcacacacagatgtaaaattcagctagtctataacgatgggtaaaccgttccatctgagttcaattaaaacactcacacatatgcatactcaagagaaggcaacatgtctgacgacagaggctgttggcaaagatggaagcaacagaacactgaaccccattagtgagtgccgcattggcatgatcacgttttcaaatagtttgggccaggcatggtagtgcacacctgtcaccccaacacttggaagggtacagacaggaggaccaggagctcaccatcatccctggctacagaacacttgaggccgctggacatcatatgacaccttctcaaaagaaaggaaaccgtgtggcactctctaataaatctgaagttacacatcctatgaccgagtgattcccatcctgggaagctaggaacactggtgtccatgtctcagaagctctctagaggaagcggctctccagcagctaacagcagacacaaccagaaatgtagacacagttgtggaga

SEQ ID NO: 198222 - DNA, 1000 bp, Homo Sapiens
ccagagttcctaagtcacagaatctaagatttttatttcaaggtttcttgattggtagcttcccaatgactgaggtaatttctaaagagagcatcaaattaattttgggttccttttgcaataccgataagtgttccatctatttatttattttatttttttatttattttaagtcagaatcttgctttgttgcccaggctggagtgcagtggcacaatctcggattactgcaacctccatctcctgggttcaagcgattctcatgcctcagcctccccagtagctgggattacagttataggtgcacgccaccatacccggctaatttttgtatttttagtagagacgaggttttgccatattggccaggctggtttcgaactgctggccttaagtgatccacccgcattggcctcccaaagtgctgggattacaggcgtaagccaccacacccggcctgttccatcgatttttttttttcttcccaagttttaactctccccattcacttaaacattttttaaagtgcttaactctttaaaatgttagcagtcagaagattactttctgtgtacccttggtagtttcacatagctacaggattatattaagtaatggaagataaagcctgactttttatttgcttatttagtgtattttctgagtgtatttacactcatcccattatccatttccagaactttataacaagtaaattagagtgactcagttgtgttatgtttgtccaggactttctgctttaattctgaagagtcctgtgatcaggggaacagggaaggatggttacctaaatgaaatactccaataattatctttaaactactttatttggcacttaacatagctaaaacttaactggttcacaggaaatgttgaaagatattttccagattttatgtctagtactatgaaactaagtaaacctgaattttttaaaatttctaaacagactagttttagggtacatattaggaattc

SEQ ID NO: 198223 - DNA, 1000 bp, Homo Sapiens
actccaaagcccactctaaactcctgcactccatcctgcctctcagttaggtcagaagtctgaaaaggtctgaagtgacttttgtagatattacactttccaagaagggctttggtgaagaggtatttcagcttcctcctaaagtggcaccagcttcttctttttcttttctccccggccctccacccatgttttgttccatttctcctagtctccatacaaatccagcaaagtgattttcttgccggctagtaaaattataaaaacgatttaaactgctctttttctctcttaaaacagctttctccctgtcagtaagaagcaggaagatgaatgaaagaaaacaggtcagcatttctagcttttcaagctgtttttcaataaggaaagaggcaaagaaaactccagagatggatatgaattgcattgaaaacatttcctccaggagaaaagtcgctgcttccctgagagggctcatttattgatttaatcagcctgcaggagcaccttctccagtaaaagatgttgagttggagtggcctggtctgcagtgtgtgcttacggtgctgatagcaccactgccgctgatgccgacggtgcttttcacctgtgcccacacgtgtgatgggggaagatgcacctccctgtgaatgctggcgtgctccatgtcactccaggatgtcacttgtcctgatgtcctatctgagttctctgtaggcatgctacaagaaatctgatgactttgggagaaagaagatgatacattcttttttttttttttttttgagacagaatcttgctttgttgcccaggctggagtgcagtggctcaatctcagctcactgcaacctctcaacttctgcctcccgggttcaagcgatcctcctgcctcagctgcccacatagctgggattacaggcatccaccaccatgccttgctaatttttgtatttttagtagagtcggggtttcaccatgttggccaggctagtctggaatt

SEQ ID NO: 198224 - DNA, 1000 bp, Homo Sapiens
ttggatcttcagagcatattcatgttatagccaaaagtttgtaccctttgaccaacatctccccgttttccccgttcctcggcccatagtaagcatgcttctaccttctgtttcaataagtccaacttttttgtacattccacatataagtgaggtcacgtaatgtttgtctttctgtgtctggcttatttcacttagcagagtgtcctcaagtttcatccatgttgtcacaaatggcaggattttcttctttttaaaggctgaataataatgaaatggaatagctatctatcatctacttatctattatctattaccatttctttatccatttgtccattgatggacacttaggttgcttccataattatattttccaaatcctcaaataagtggatattctaggacactttttacttagagtggaccagcagcatcagcaccacctgggaacttgttagacacatagagtcccagatttttgtgcttttgttttttttttgagatggagtctcggtctgtcaccaggctggagtgcagcggcacgatctcggctcactgcaagctccgcctcccgggttcacgccattctcctgcctcagcctcctgagtagctgggactacaggcacccgccaccatgcctggctaattttttgtaatttttttagtacagacagggtttcaccgtgttagccaggatggtctcgatctcctgacctcgtgatcctcccacctgggcctcccaaagtgctgggattacaggcatgagccactgcgcccagccagagtcccggattcttaacacagtccttagttgattcacgtgcatattaaagtttgagtagcactgctctaagattacctaactaaataattaaatgtgcattgagcatctgccacgtgccaggcattgttctgtgcactgtgtttactgcagggaacagaagagacaaagcccttgccctcatacacgtccagacaagtagtaaaaacagatgt

SEQ ID NO: 198225 - DNA, 1000 bp, Homo Sapiens
gagagggatgggcagaaccaggcgaagtgaaaagggatcctggaaaaagatcctctgggaaagaaacaagaaattctaggtggcgcctctggccctcatgcagacccccttgcctgcaggtgtctacttcgccctgtgcctgtccctgatggtgggcagcctgctggagaccatcttcatcacccacctgctgcacgtggccaccacccagcccctacctctgcctcggtggctccactccctgctgctgcactgcaccggccaagggagatgctgtcccactgcgccccagaagggaaataagggcccgggtctcacccccacccacctgcccggtgagggaagtcatacttcctcttcccccacctccacttctctgctcctgcctccttccctgtctccctccctccacaggtgacatttgcagcccatggctgagtctctgtctttctgtaggtgtgaaggagccagaggtatcagcagggcagatgccaggccctggggaggcagagctgacagggggctcagaatggacaagggcccagcgggaacacgaggcccagaagcagcactcggtggagctgtgggtgcagttcagccacgcgatggacgccctgctcttccgcctctacctgctcttcatggcctcctccatcatcaccgtcatatgcctctggaacacctaggcaggtgctcacctgcaaacttcagtctggacttctttttgccagagaactccagaaaccagtcaggctctcagtcagccttgtggccctgtcaaccgcctcatttttaacccagtcctctgtgtagtttcagaccagacctgaatagtctcctatgccctccaaaagtcgggtccttgctcctgcatgccatcagccccactcagccctcccatacctccctggctcctcaggattcaggttcctagggtacgtccttgattaaatcaccccaatatgcccctttgcagaaagtattggcttttccctgaatt

SEQ ID NO: 198226 - DNA, 1000 bp, Homo Sapiens
gatccctagagcaggggcataatgcattcaatctctttgttaacaaataacaaaagtgacctttgctccagttccaaataagttcctcatttccatctgagaccccctttatcctggacttcactgtcgatatcattatcaagattttggttattaccattcaacaagtctctatgaagtgccaagttttccctcatcttcctattttcttctgagccctccacactcttccaacctcttgttacccagttccaaagctgcttccacattttcaggtatctttataacagtgctccactccttggtaccaattttctgtattagtccattctcacaatgctataaagaaacatctgagacagggtaatttataaagaaatgaggtttaactggctcacagttctgaaggctttacagaaagcataatggctctggggaggcctcaggaaacacaatcattcctgaaggcaaagggaaagcaagcacatcttacatggccagagcaggaggaacagagagaatggtgaggtgccacacacttttaaacaaccagatctcatgagaaatcacccactgtcatgagaacagcaggggggaaatctaccccatgatccaaacacctcccaccagaatccacttccaatattggggattacaatttgacataaaatttgggcaggggcaaaaatccaaactgtatctccaagttaaagcagtgactgttttttttggaattcaatgtatacatttttcacaaggttattgtgggtctattattgtgctaggtacgacattgggtgttaaatgtataagaatcttggcttaccttttttccctaaaaaataaaaagatgaatatatatgctacaactaggcaacagttgatgataagaaaggattcatcaaaatattgccacagagtgttcaaagggaaaggatctcagatgtaattagcctaaacatcttacatgttagagacagaagcccagcgcttggaattc

SEQ ID NO: 198227 - DNA, 1000 bp, Homo Sapiens
atgttatatttatgtttatgttatataccataaatatacacaatttttatttgtcattttaaaagttaaattaagacagaaggaaaatgcacggattttttaacctaagaaattagagcaacaggccgggcacagtggctcacgcctgtaatcccaacactttgggaggctgaggctggtggatcatgaggtcaggagtttgagaccagcctgatcattatggtgaaaccctgtctctactaaaagtacaaaaattagcagggcatggcggcacgtgcctgtaatcccagctactcaggaggctgaggcaggagaatcacttgaacctgggaggtggaggttgcagtgagccgagatcacgccattacactccagcctgggtgacagagcaagattccgtctaaaaaaaagaaattggagcaacaaaaatgcaattaagggaaacaaaaggagtattttcataaagataaaagccaaaattcatgaattttaaaatataaaactaataaatacatgccatgtgtatggcagagtttctgtcttcaactctgacttctaccctgtagtctagtgtcctgtatcccactgcaaagttctttcttcttggatgtctggtaggcacctcagatttaacgtgcccagcccccacacacacacaaaacttgcagttagttttttccattctaataaatgacattaccatctgtccccttgcttaagttaaacctttggagtcatccctgattgttctttcgtgtcacatggctaattgattaattagcaagttccatgggctcaaatttaaagacatatttaatgtaatccggctgctgttttccatctctactacttccagcttagaccaagccaacatcttctctcatctggaccactgcattagctttccagctgatctcacagctttcagtcttgccccacccgccaacactacagccaaagcagtccttcaaaaatgtaaatcagagtatgtctgaagctt

SEQ ID NO: 198228 - DNA, 1000 bp, Homo Sapiens
gttttacctatctctgtttctttgtattgagaaatggtttattaggatattaagtaattaaacatatattgaagaaataaagatgattttctttttgatatctcagattcctattcatatgactgattcttgtaaggaaggactgggaccttaagattttgctgagtgagggaggtggcctgtttttttaaggtcagtttttttcccttttgggattttgttcagtgctttgatacaaaaactgtaatttactttgtagtcaaaactgagatcaaaggaaagtactgttacctgaggcatgaaaatagaagatagcattaagatttagaatttttcttgattttcgtgtctttttaaaataacttgcaattgaaacctgagttttagagcagcagaatgccatttgaataaaggccccagattgtagtggtaactaggatacctcttagataattttaagtgtacgagaaaagcaagaactaaactggattcttcatttatcacgtgtaaagggtagtagttggtgtctttgtactaaggaagtctcctgtttttaaaatgtaggaatatttggagtgaaacattaggaaattgaatagaaaaataggctttgtctttttaaagatggatagaaggaagcagttttttttttttttgagatggctcttcgctcttgttgcccaggctagagtgcaatggcgcaatcttggctcactgcaacctctgtctgcctcctgggttcaagcggttctcctgcctcagcctcccgagtagctgggattacaggcatgcaccaccatgcccggctaattttgtatgtttggtagagacagggttactccatgttggtcaggctggtcttgaactcctgacctcaggtgatctgcctgcctcggcctcccaaagtgctgggattacaggtgtgagccaccgcaccctgccaggaagcagtttttaaaagtgcattacttgagttttatcaagacttatttctgaattc

SEQ ID NO: 198229 - DNA, 1000 bp, Homo Sapiens
agtaaatggcaaacctatttaattttaattctctttccattcatcttaattgtataaggtgtcatatatagaaacatagctctgtgatatttcatcatctgtttcctcatacactttccccatggcctcctataaggtggtgacaattccagagaatcagatgtaccctgacattctgaatttttttcaatctaggtaaggaaacaacagcccactctatcggtcatgatagtctggtttatgctattgtaataacctcaaaatcacaggccccaaaatcatagaggcttacttggacacaccctcatcatcttcactgaggggtgcaggctgatgaggcctcccccatctggaacatcgccaatcagtggaacatggcttaagacacttggaaattcccagttttgttccaacagacttctgccagaaaagactctcagcacttcagctatctttctattggccacgtcgaatcacagatctatgtctaacttcaatgcctggaatgtgtctggaaggcaggcagaatgattggtgaacatccttcatgactatggccattttccagttagaattagcttccacatagagttacgtaccctctctctgatgctgtgctttttactctttcaactatctacatccttcagaatcctcatttaagatgctcctctccaaacacattaagacttgacttcctaagctgctaacctctagaatgcttctgtacctatttagacaccataatttatatatatagcataatgtcttatgcataaatgcagacttgctgttcaggtcaaataaaatccaaacagtgttggcacttagtcataaagctcctattatatttaaggaaagcattcattgacagtttgacatattatcatattttacttcctaatagtatcagctaagaattcagaggacgtagagagcaagggcacagccctgttggaaactggaattcaagctgagccaaaatggacttcctgaattc

SEQ ID NO: 198230 - DNA, 1000 bp, Homo Sapiens
ttatgtccctgcaaataatggatcaaaagcctctattcatgcaatcagtggaagaacatttcaatctttggacactattaaataccttgagcatggctatgttatgacacattgccagattaataaatttaaacctaataagaagccctgccctaggaaggccactaaatggtctggaaagctagaggtgctaacctaggaaggttgtattgcaaatagtgctgctgtactgcaaaataattcctatggaatcgtcattgattggacccctaggggacactttgcagtaaattgtactggacagcgcaaagattgtagagggactccttttgcaaatgactccccagataatgcaccaaaattatatagaagaattgaaacaaattattaccctattaagtgggaggagaatggtatggttcctccaagccccaaaatgattgatctaattataagtccagaacatccagaattgtggaaattaatgatggctcaaaccccaattcggatttggaaaggagaatataaaacagagatccatagtaaaaaacttccatttgttgtagtcatgacccctaatcagactgtcccattgcagagttgtgttaaacatccttttatgttggcagtgggaaaaattaatatcctacctgactctcaaaccatatcatgcctcaactgtcatctttttacctgcattaattccacctttaataaagataatagcattttattggttaaggcccaagaaggagtttggatacctgtttccctcaatagacgttgggaggcctctccctccatacgtattatcactgaggtactaaaaaggaatacttaatagatcaaagagattcatatttactttaatagctatgatcatgggccttatagctgtcacagctactgctgctgctgctggtattgctttgcactcttctattcaaactgtgggctttgtggatagttggcagaaaaattcttctaagctttggaattc

SEQ ID NO: 198231 - DNA, 1000 bp, Homo Sapiens
actaacatgtgaagtttaacctcccctaaacttagtttcattatccgttcactaggatagcaacaccaacctggaattgttatgagggttaaaatgactgtatttaaacataagacccggctgggcatggtggctcatgcctgtaatcccagcactttgggaggctgaggtgggcagatcacctgaggttaggagttccagaccagcctggccaatatggtgaaaccccatctctactaaaaatacaaaagttagcctggcagggtggcgggtgcctgtaatcccagctgctctggaggctgaggcaggagaatcacttgaacctgggagtcggaggctgcagtcagccgagatggcaccactgcattccagcctaggtgatagaacgagactccatctcaaaaaataaaataaaataaaaaacataagatccagctcctaataagcactaataaatggtagctatgtaataacaatgcttcactcactactatttcaggaccaggagataatatctttgatgaaaagagtgaggaaataatgataatcttcagctctcttttttccttgcctgttgtcctctgtgtatctctccactgtgaccagtagtagcaaggagtggaggtggctcaggaaagttgggcagagccacagccaggctccaggactacctcagtgttggtttcaggatttcggtgaacagggcaacatgggtcattgagttaatgtgaaggcaagctcatcaggatggtaaagcagacaaagtttgaaggagaaacttcagtttggagtgtagattatgcgttgggctagagtcctctgtgttgcatttctgaaggagtctgagaaaagcaatatgtgacaagatgggctataggtccagaattcttttttttccaaccattttaatgatgaacggttaagataagctgatgtatttctttcatatatatatatatatatatataacatagcacatgtatacataggtccagaattc

SEQ ID NO: 198232 - DNA, 1000 bp, Homo Sapiens
gggagatcatattttccaaatcgtatgccctatcatttgtactgtcataattcaacacccaacagcagtgactttatctttccacaaatctacaagtagtaagttatcatacatacaacatggaatgttgatcttagactacattttcccttgtatgtttacacagtacagtgaaacagagctatctgtttgtttttaagcaactcctttagataacacagagagtctcatcacatatgaccatcttgctgaactaacaatgagataaataccatgatcaatatttgacaatatgcaaatgcagcaaatggaactagattctatgttgccaactgtgtaggtctgatggcaaaagaaactatctttgtacctacattaaagacagcatgagaacttgcgttgtcataatttagtttgtattatattttgactaaagcttttattaagatttctgacaatttaaataaatgctaatggtgatgcgtagctatattctgttgtcatataaggaaatttcctcataagggaaaatttagaattgcaaatagcatgctttatcaaatatctacttattatgatcttgaagagattactcatctgggaagttttagaatgagacgaaatgacttcacactacatttaaaagctgagtttctgtcagttggggaaatactcccttttctggaggtgtctttgaaagctaatagagtagatgtaatagattagaaacccaagatagacagtactactgttctacaaacttccagtgcctaccttttttttcttttctacttgaaaataaagtttcaaccctcatgcacaagtttagcttaaaatatgtcaaacatatttcagttgcacaactattttaaatcctgtcctcccatggaggcatgagatcccttgtaaacaatttaaattcctttgcataattccaacagggagtaatgattggagaagggccttgtatatcttcttaaccaggtgaaacaaggaattc

SEQ ID NO: 198233 - DNA, 1000 bp, Homo Sapiens
ccggccccttttctcttttttatgctgtctgaccttactatttctcaaatgcaccaaaaatatctttgtctcaggaactttgtttgtgtttccctccctggtatgtactttcttttggctctctctcttggttcattcatatctctgttaaatattatttcagctcaaagtccttccctgattaatacatacaaaagagctgctgcctctgaccagctccatttttaatactgtccatttgttctttgtttgaatgaataaacatatatgccataatttttttttctttttattgtgtcatactaaagaattgttccttgcctagaagagaaaaaaagtaaggaggaatcaaatactcctttacatgcatataagaatatatctgagtaagcaatagcaagagaaatcacaaagcgttttgagaggaagaaagggggggtatgatgtgagttgggttgctagcaaaggcttttagaagaaatttaaatgagacttgaaagttgagaagaagccaattaaagattttcaggcagaaggaatagcatgtataaaaatgtttcagccaaacatacagtttctagaagagaaaatatatatcaaagcagaaataaatggatttgaaatgatgaaagtaatacaaaagatcaactgaacaaaaaggtgtttttttcaaaatataaacaaaattgacaaacctttagctagactaactaaaaaacaaagaaagaatgcccaaataaaatcagagatgaaaaaggaaacattaaaactgataccacagaagttcagaaggtcattaatatgagcaactatatgccaataaattggaaaatctagaagaaatgtataaattcctagacacatacaaactagctacaagactgagccatgaataaatccataacctgaacaggtcaataacaagtaacaagattgaagttataataaaaagtctcccaacaaagaaaagactgggaccaatgccttcactgctgaattc

SEQ ID NO: 198234 - DNA, 1000 bp, Homo Sapiens
gagactccatctcaaaaaaaaaaaggaacctctgctcttaataaataatctcattgaattatgattgcttgctagtgaatacgtattcacttattctaataattttctcagggctagtattttggagtcagcatattttgtcttatagataggtccagggtgggccttaatcttctttccttccacttattttttgtttagaggcacactttccaattatggcattggtggttaccatttgtgtgaaaaatgttgtattccatattgcagttattcatttttcttcttgtggatgttttgcacatacccaggtttatgtgtgttaacgtagctcttaggtactagggaagtgagggtgtttaggcttaaaggtattggtgttcaaggaaggaatgctcaaaagaaagactgaacacaagaatgcagagttctaaggggccagagaaaggagacagaagtcctaatagagtcacggtgataatttgttggcaactgcagatcagaaaaatgctgctattgagatttcagagaactgcttaggttgcagtttacattgcaatggggatggaagctgaagtaactgggcaaaaattgccttatttttttccactttccagatcagtgaaagataaaatgatttaatctttgattcagggtagacacagagaagagaatctgagttctggaagagtaaggctaacgtgcgtgcagtctgttacaagttaccaactaaatttccagatgagccaactcctcccaggacaaagaattgtaggttgaggggcatatattgcattggcgggctcattgcatctgttttctcaatcatgcttgttacttactgtggaatatggattgttatggtgatgtgaggatggaagccatctgccctgcagaatcttgggaaattttatggaccccataatgttggcaacaaggaaggagcagaggatgtggcatctgaagaccagctcaaaagagtaaacttttaccaaagctt

SEQ ID NO: 198235 - DNA, 1000 bp, Homo Sapiens
ggagatgataggtcccacctcataaggtcatttaggggatcagacaagaggaccctaactgatgcttcctgaacactcactatagccaggcactattctaagcactctccagtatgaagtcactcaatcccttcaataatcctatgaggtaggtaccactactttccccattgtacatctgaggaaactgaggcacaagttaaatgacttgcccaaggttactcagccaattaatggtagtgctggtatgcaacctcacgcatcttgcctccagagtccacaagcttctccactactctaggctgtcagggttttagcacagtgcctggcacaaaggaagtccccaataaacattagttactatggctatgaaataataacatatatattttcaaaaaacatgctttgggaactgtttgaggttaaggagtttgactaaatctttaattttaactttggttgaagacagaagctgggtcttacccatcttgtatccaagagctcttggaacacagtgagtgcctggtgtagaataaggactcagtaagtattgctgtgaagggatgagtttttcaaactgctgtatttcttaatttataacatggtagctctttgggggaaggttagtgctgattgagctacaggggactgggccacgtttgacctactttgaccaaccctttgttttccaggccactaaagggccatgattctcacaaacatgttaattggtctactgtcattgcataatctccattcactggctccacttctctcatcacgcagttccagacaaccacacccaaacctggctcactccttctacacacacatacctggcccattagatgctaggcttttccacacactggaaggttctctctctatcttatacaagatctagtctctacctgtcagtcttgtgcttgcttcctgaaggactcagtcctctcacttcacccaaatattcatgacatggagtctcaaagctgtggaattc

SEQ ID NO: 198236 - DNA, 1000 bp, Homo Sapiens
tctgtcttactgtactgtctatgagttaaaaagttgttgtagttattatttttaattggctcatcatttagtctttctactttagagtagtttacactcaattacagtgttataatattctgtgtttttctgtatgtttactattaccagtgacttttgtaccttctgatgatttcttcttgctcattaacatccttttcttttagattaaagaactgtctttagcatttcttgtaggacaggtctagtgttgatggaatgcctcaacttttgtttttctgggaaggtctgttattatctttcatgtttgaaggatatttttgctggatatactattctaaggttaaaatctatatttttttcttcagcactttaagtatgtcatgccactctctcctggtctgtaaggtttccacggagaagtctgctgctagatgtattggagcttctttgtatgttgtttgtttcttttctcttgctgtttttaggatcctttctttatctttgacctttgggagtttgattattaaatgccttgaggcagtcttttttgggttaaatctgcttggtgttctatagtcttcttttacttgaacattgataactttctcaaggtttgggaagttctctgatattatcccttcgaataaactttctacctctctctttctgcctcttctttaaggccaataagtcttatatttgcccttttgagcctattttctagatcttgtaggcatgcttcattcttttttcttttgtctcctctgtattttcaaatagcatgtcttcaagattactaattcttctgcttgatcagttctgctattaagagactctgatgcagccttcagtatgtcagttgcatttttaactccagaatttctcgattctttttaattatgtcaatctgttcgttaaatttatctgatagaattttgaattccttttctgttacttgggtttctttgagctttctcaaaacagctattttgaattc

SEQ ID NO: 198237 - DNA, 1000 bp, Homo Sapiens
atgctcaggtctccccatcccaaaagcacctcctttaatcctccttcccactttagctaagctttctggcttttccttcatagtcaaaacattactcactacataagtctcatacactctgctttgttataggctctggggacacaagatgaacgagagccaggagcagccttggagaactcaagttctgggcattggccttgctcttggattcaaatctgtgccttccttaatggactggtctccccgccccggccccaccccaactccatctcttagtcctgcagggctgtttaaactggtcccaccaacaggcatcactttcttctaatgtggaccttctactaagctcttctctggctgaccagcacagctcttgggttctgcagtggtcccctgtggcaggacagcactcatcagtatgagaagggagataccatgagctccacgagctaaatagtagaagtgagggggcactaaaaggtacagtttagcggtgaggtaatgcccctccagtttgagcagctcaggttctggctcaatactgatgaggctttgggatgtcttgttcttccagtcccagcctatcccacccctgacacctggccaactcttactcatctttccattcttagaatttccaggtcactttttcagagaagactaatgaccaagtaccaccctccgccctaccaaatcaatatgcacatataaacttaggtcaccaggatatatgctttacagctctcttcataacaattatcactttgcagctaaataactgttaaatatcggtgtccccttctaaggatgtaagcctcgcatggcataaggactgcatctgttttgtttgctgctgcacttgcagcactgatatggcatttggcacatagtaggcattcaacaaatgaatgaactccccagctcaatctcagacctgaactggacatctccacttgaatgccgcatagctatctcaaacatctgcaaaagtgaattc

SEQ ID NO: 198238 - DNA, 1000 bp, Homo Sapiens
agatccaccctcaaatgtcagagctatgttccctccagcagtggtattaatactgccggtcacccaggctctggagccagagagacagaccggggttcaagccatggcttcgtcatttgcaagctgagtgactgtaggcagggaaccttaacctctctaagccacagcttcttcatctttaaaataaggataataatcattctttcccctcagagctcttatgtggattaaacgagataatgtatataaagtactttagcctggtacctagcacacaataagcattcaataaatattagttaatattattactgatactgtaataattattttttcccttacttcaaatacaaaacaaaacatacatattaaccattcagattgtactgcctagcccactgatcacaatcactctctctgtaataagcccaagagctctgggcccaacacatggggtcagccatagtatcactggctcatggtgaggaagccagaaagctggtcagcccctcaggtggcccaatgccctgtctccgcagtgtcagggcctggacctccagcatccagggaagaccatcaccagtctagcaggaggttctaagctgaggccaaaccattgcaattaaatctcctgaagcctcaaattttacagctcttggtgacttcttcccctgaccactttcttccaaaggggcgcctttcagtgatttgtagggcaaattggtggacttgatagttgttaagattataatgagaaatcattagagggcaccatgtgggagcgcgactgtgagcagaaggtggtgactcaggatgacccaagtgaggtgcctgctccccacctaggaagggcaccggcccccacccagcctgcgcccccctgcagtcatgcctctgagcaaggcaccgagctgagtggggatttatatttaacattttacttggtcttaaaagaaatgctgaaaatgtgatggtttcaaaataactatgagggaacagc

SEQ ID NO: 198239 - DNA, 1000 bp, Homo Sapiens
ttttaatgactgggacatggtccactgtgcaagtccagagagagaggagctcagtattctgtcctccatgacttttagatactcattcagtgatatttttcaccagtccacagcagttctcaatttctatggtcataatcttgatttgtatttctctggactgctccatttgtgaagtcactaattcagatatcttactgtcagatgacagctttctaccttcaagttatctgtttgtctacttccactacaagttttctgacatcagggtttccagacagcagagtccacgatccataattttaattacccttttttcaatactctgaacccccttgccaattacctggccaacctgcaaacctgaatgaactcaactaaatggctttccttttcagctcttgtaaatgctgtttgagaaaaccatgtaactagttgttttctttttaatcagaatgtgtgttcatcatgaactgattcttcagtactgcttaggaactctattatttgttttgtagtcagatcatttcttgtttcctgcaacaattattgaaattctctgaatcctgatattttgtttttgtacatatgtcgtttatgcctacagcctatagtaagcaaacacaaacagctaagcagtaaaactccaggtaactgaagctgggagcaatatcagatgttacaatcaagcaatctggagttcatgttttctgtgtagagagggagcctttgtgaggtaggactcagcctggaagctccaataaacacagttcagatggactgagaaagagccagaaggcacagagcagagagcatgcagggcagaaaggccattcccaggtagtaagtggctgagcctggcatttttcagggcttttggaaggacaagtcttcttaaattgtgccgacaatggagtggctacaagtcacagaaataccactgataaagcctccaaggagtctgactgtaaggaacctttatccagggagttggagaatt

SEQ ID NO: 198240 - DNA, 1000 bp, Homo Sapiens
gtggaacactccaaatgtagtttgtagatatttatgatgatagattggatgaggagtcaggatgtagaagaaggaaaagaatcaagaataagcttcagatttcctagatgataaactgagtggccggttgtgcaatgggatggttaagaggagaggaaagagataaggggtggatcaacagtccatactgaatggtaaatttcagatacctgtgagccatccaagaagtaatttcaagcaagttgtcagacagaatggtcagattgaagatcttgactatatttagaaatgttagaattatcaatataagactagcaattaaatctacaggaatagtagataaaagggtagatatatttttatcatttcttaaaaagaatctgactctggtgtgtggatttgggtaaaagaaaccaagaaggagcagttagtaaggtagaaaaaaagcagagggaagcagcatcatatgagcctagagataaagtgcttcaaaagttgtcaagtgcactttggttttggtaaaacagtcttcatggcatcattggtggaggcaacctcagtggagtggtggggtagaagccaaattatgttccagtatatcactatgcttccttggaattttattaatcccatacctcagcagggagtaaaattctcataagctttcaatcaaatcaggccaatccaactactcacttatccactcgagtaacagactataaggagtggtagacaaagcaagtaatatggatccaagttgccttttgaatctatagggcagggtaggtatgttgggctagtagtagcaccaagtagtaccaccttggcatcatcaaatctaaggagtggagaggatattgaaggaatgtccagggagagaaaatgcacaacatgcacatctagtctaatcaatcatagcatttcttcctcgtaagcttggatagtgtcagaggcccgcagtgctccaggcagtccttacaacttgaccacacttggcaca

SEQ ID NO: 198241 - DNA, 1000 bp, Homo Sapiens
tcaggagtgtactggtagttgacattaataaaagtctttattcaatccaaaggtattctgagtcaccagattcatacttttggcctattacatagatcatactcttaaatcaggaacataagtaatatcaggcaaaaaaaaattgtaataaattacacaagagcagaacttaaaacatgataaaaactagaaaccacagtgattctgcagcatttgtccattatggtccctcagaacattatagcaagtaatgattaagttagtatcacatcagaagttcctattaatacttaatttgtgcacagagcacttttaattcctccaaagataatattccaaatgttttcctagcaatacccatgcactgtgtgtgtggttctgatacttcgggggctgtgtggatgttgctgtttttgccaccaggaatgatactgcagttaccatccaagtttcagagctgagctgtcataaaagtcagcatgttattacttacctggctttttagtggggtgggtagagtccactgatacatttctatcagcacctgatggcctgggtgcttgcttgacccctatgagcagagataatgaaagggaataaacatatagcaaaaatgttccatggaaacttggtagagttgccagtaataacgtacattctttgcagagcaggagcattggtgtttttatgccaagacattttacgggcttctactatctggctatagaaaaaaataaaaaccctacattcactagttgtgatgttttctctgtagaattagcatttcatggtaaattgtggttttgtccaaatctttcatgaaactcatcctgcactgccttactgggtggtattgcctcaccaggtgggatttcatttatggtaactggccaccttttgccaatattcatcagtacattttgtaattcaaaaaaaatttttttcttccaatccctctatgcccattaaaaaaaacccacacacatacaccttagaattc

SEQ ID NO: 198242 - DNA, 1000 bp, Homo Sapiens
agtttacccctttcttttagggtatcccccagttggcaagcatactgcaattttcccatctccctaaaccctatcttgattagcctgtttccaaccactcaccattaattttctgcctctttctgttgttgttgtttaaacagcaaaacttcttaagagatgcatctgtatttactgtcaccaattcctctcctcctattttcctttgacctcaagtcctcatgcctgccgcagcactaaagccattttctgacagggtcccagtgacctccataacactaaatgcagccaccatttctcagtcctcctcttacttgtcttaggagcagcatttaaatacttgattattccttctacttacaccacttttttcacttggcttttatgtaggaaggccaggtaatttatcatcagaataaagacactttcgagagtgaaagatgggtggtactcttactacgtacagctgagacacaggcctcaacttggaccatctcaggcaactggaccttacagtcaccgttctcctaggacaccacacaactggcatttcccgcatgtcactggctgtttctgctcagtctcctctctgtcctcctcccccagcctctaaatattggacttcccagggctcagtccttgaaggacttcttgttctgtattccttcggggctaattttcacctgctgtgtcctggtgtgctatgctattgataaaacgtggaaatgctgccctttgggccagttgagagctgctcctcaccctctcctctgccctctccagccactctggcctcactctgggaccctcagaccttccaaggatctaatttctaaaaggttgacacctgaccctttagaactgtgctccagtactttgattggttagtaccattactatattggttgttaattattttgaatagcacctttgtactcctttacagggctttaaatgaactcttaatggatatttccagctgggacctttcttctgaatt

SEQ ID NO: 198243 - DNA, 1000 bp, Homo Sapiens
aagcttctttgcctcagcctccccagtagctggggccacaggtgtgtaccaccatacctggctagtttttaattttttgtagagatggggtcttgccatgttgcccaggcaggtctcgaactcatgggctcaagcaatcctcctgcctcagcctcccaaagtgatgggattacaggcgtgagccaccacgtgcagctgcaaagcactttcaaatacattattgtatttaatacaaataaagaaaataagagatgcacacttcctgattatctcagtaagacctatcttggaaaccattaggttttcaatttttgaaactaaattatcctttctacaccttgtttcattacctttcatatctccagatctttttccagtttcttaggcaatgttagctccttttccttaactttttctgttttaagtttttatttatttatttttttgagacgagtctcactctgttgcccaggctggagtgcagtggcaccatcttggctcactacaacctttgcctcccgggttccagcgattctcctgcttcagcctcccaagtagctgggattataggcaccagccaccacgcccagctaatttttgtattcttagcccagatggggtttcaccatgttggccaggctggtctcgaactcctgacctcaagcgatccgcttgcctcggcctcccgaagtgctgggagtacaggcatgagccaccacgcccggccaactttctctttttaaaaagactagtcaagtacagtagagaagggggaaagagtagaacaagaagtttgatctgtgactgtgaacaattaattaagataactcactaccaggccgagcgcggtggctcacgcctgtaatcccagcaccgtgggaggccgaggcaggtggatcatgaggtcaggagatcgagaccaacctggctaacacggtgaaaccccatctctactaaaaatacaaaaaaaaaaaaaattagctgggcctggtggcaggca

SEQ ID NO: 198244 - DNA, 1000 bp, Homo Sapiens
tttaaaaacatccccaaatgaggctattcatacaaccacaagagcctgaaaaacttaaagatcttcctgaggtgtccaggggctaaaagaagagatccagctggccaggcacggtggctcacgcctgtaatcccagcactttgggaggccaaggcgggcggatcacgaggtcaagagatggaaaccatcctggccaacatggtgaaaccccgtctgtactaaaaatacaaaaattagccgggcgtggtggcgggtgcctgtaatcccagctactcgggaggctgaggcacaagaattgtttgaacctgggaggtggaggttgcagtgagctgagattgcgccactgcactccagcctggtgacagagcaagactcagtctcaaaaagaaaattaaaaaaaaaaaaagagagagagggatccagcaaggcatgttaaagggcattaggagaaaaattaagccatttcctgtttgtatttgtacctcttgagtgcagtctgctgtgtgtgtgtgtgtgtgtgtgtgtgcacctaatccttctgctgggctatgactaggtgtggagaatttctcctccattataaggtacacttttccaggattagaattcactaaatcccatctctcgtctatcgacagtgctacataaattctctcctccctcgcccccccgcactccccaccgacacggagtttcgctcttgtcacccaggctggagtgcagtggcacgatctcagctcactgcaacctctgcctcccaggttcaagctattctcctgcttcagcttcccgagtagctgggattataggtgccggccactatgcccagctaatttttgtatttttagtagagatggggtttcgccatgttggccaggctggttttgaactcttgtcctcgagtgatccgcccccgcctaggcctcccaaattgctgggattacagacatgggccacctcaaccagcctctcctctttcattattactcgctgaagaatt

SEQ ID NO: 198245 - DNA, 1000 bp, Homo Sapiens
tcatggctcactgcagccttgtgccccccggcccaagtgattctcccaccttggcctcccaagtaactgggactacaggtatgtgccactatgcctggctaattttttttatttttttgagacaaggtctcgccaagttgcccaggctggttttaaactcctgagctcaagtgatcctgccttggcctcccaaagtgttggctaggattacaggtatgagccaccatgcctgacccctggatattttttaacataacatttttggtgttaggtcttctcttcaggccccttttgtcccccccaaaaaaggttcaggacaaatgaatctgaatcaagacttagagcatgtatcaagtggctgctaataatgttatcccctgatacactacaaaacttggtctttggtctatcattttttttcttaagtgatcatataccttgcatttagtcaacttaattttttagagttttgttttgtttttgcatacctgctatgtactaagcaaagccttcaagtacagtgagctaccaaaaacattttatcacagaactcttactcttggcttaaagctttaggtttaggaggcgggggcatcaatgtggcagaaataggcaagagaccattcaggcaggaagaatataaagtgggctttgaaagcaagaggaaaacaggaggattttctggggagcagaatagcatgaggagaaacattatgtatggtatgtgtagggaacggcaagtatacctttatgactctagtggagcagtgggatataatgagacataccagtggacaggtaaggacgaagtggaagagttagaccaatgccagtggccttgggaattgacatgctgagtggttcttccattgaggaggttcatctagtgacagagtatatgatttatgtgttgaggtcctggaataaagcagtaggagtggcttaggaaagaccatatgaaccctggagctacttcagtggaaggaatgatagattgagt

SEQ ID NO: 198246 - DNA, 1000 bp, Homo Sapiens
ttgaaaaaaaaagattcatgattcaagttctctgtgttaacctactgtgcggtttgggggccaaaaaaatagttgtaatactaccttctgtaaagcataaactgtaaagtggtatgcaaatgttggccactattatttttttcttttcttttcttatttatttatttattttgagacagagtctcactctgttgcccaggctggagtgccaaggtgcgatatcagctcaccgcaacctccacctcccaggttcaagtgattctcctgcctcagcctcccaagtagctgggattacaggtgcctaccaccatgcccagctaatttttgtatttttagtagagacagggtttcaccatgttagccaggcgggtctcgaaccctcgacctcaggtgatctgccctccttttggcctccaaaagtgctgggattacaggtgtgagccaccacgcccagctgaccactgctattattgcacaggaacaacatatatatctgcttaaaagtttctctcctaattaacctgtttgtgacctttaagcatacttcatagaattcctgaaaccattatgtttttctttgttttttgttttttgtttttttacttccaaaatacttggggttaaatttcttacatggtgttaataactctgttttgttatacattacttttctgttatacattacttctccgaatagtatttaatcatctgatttattttctttaaactgcctcaagttatacgtgtcttaatatttatgacctcaaatactttgtagaaaaagaagaaatgggtaagttatatataaacagttaaggattctgacaggatgggagaaaacgtggcccttacatgtcttctctctaaaggttgtgaggcacattgtggcagtctcacttccccctttctgcagcacatcaccctcagataaataaataaagcagaggactttcatttccagccagttgtcatagcaacttttgactatccagagaagaag

SEQ ID NO: 198247 - DNA, 1000 bp, Homo Sapiens
gcccagtgcctgagcgcttcctgacagcagcatccacactccttggagtatcacctctcaccccacctgttgggagggaactggctgtgttgctttcagagaatgtgataattattgtaaacccagaaagtctgaggtctcagttaacttagaaagtttattttgccaaggttgaggatgcacctgtgacctagcctcaggaagtcctgatgacatgtgcccaaggtggtcggggcacagcttggctttatacattttagggagacatgagatgccaatcaatatatgtaagaagtacattggttctgtccagaaaggtgggggcaactcgaagcagggagggggcttccaggtcacaggtaggtgagagacaaatggttgcattcttttgagtttctaatgagcctttccaaaggaggcaatcagatatgcatctatctcagtgagcagacgggtgactttggatagaatgggaggcaggtttgccctgagcagtttccagcttgacttttccctttagcttagtgattttgggggcccaagattttcctttcatattataaagctggaaagtcactttctcttttcttcttttttttttttttcaaattgagctgaaattcacatcacataaaactaaccattttaaagtggacaattcaatgacatttaggacagttacaatgttgtaaccaccacctgtacctagttccagaacattttcatcaccccaaagggaaaccccatatccattgagcagtcactccccatcccccctcttcccagcccatggcaaccaccaatttgctttctgtctctatggatttacctattctggatatttcacatgaatggagtcaggcactacgtggccttttatgtctggctgcttttactctgcatcgtttttgaggttcatccatgttgtagcctgtgtcagtgagagaggagaaaaaggaaccagtcaggcaggcagttagggtgggtcctcggttgaatt

SEQ ID NO: 198248 - DNA, 1000 bp, Homo Sapiens
aaccagtcagcgtgtccctgcccaaaggaagacggcaatcctctcatgtttcagaaaaatttctcacatcatttcttgctcttttttctttttcttctcttttcttcttctttttttttttttttgagatggagtctcgctctcgttgctcaggctggagtgcagtggcatgatctcggctcactgcaacctccatttcccaggttcaagagattctccttcctcagcctcctcagtagctgggattacaggcatgcaccaccacacccagccaatttttgtatttttagtaggagcagggtttcgccatgttggccaggctggtctcaaactcctgacctcaggcgatccgcccgcctcggcctcccaaagtgctgggattacaggcatgagcccccaacccagccacttctcagtttcttagattcagtagctagggcctgcatattaaactcacagaagataccttaacaggagaaaaataaaaaagagttcacactcacatgtgcaaggtgtatacagatgggagaattctgtgatgactaattcaaaggggtggctagaatttggggcttatatgccatcttaattggtgaaggggaaggagagaaaggcacttgtgagaaaacaaatgaccattttggaaaaataaatgggttttcaggagaacaaacaggagataagaaagtttgtgataatgagctgggtgcggtggctcacacctataatcccagcactttgggaggccgaggtgggcagatcacttgagatcaggagtttgagaccagcctggccagcatggtaaaacactgtctctactaaaaatacaaaaattagccgggcgtggtggcgggtgcctataatcccagctacttaggaggctgagggcaggagaatcgcttgaactcgagaggcggaagttgcaatgagccgagatcgtgccattgtactccagcctgggccacagagcaagactccgtctcaaacaaacatacaaaca

SEQ ID NO: 198249 - DNA, 1000 bp, Homo Sapiens
tcatttgtcataaactctagttcgtgtatttcacttatgaatcctctatcatagttgctgcaaatattttcacctgctgtttctaatttttaaattcggtttgtcttttatttttgttagtgatatggaggtttaaaatatttatgcaggctaatctattgattgtcttttgcacttgcggttctccaactttcctctgtctatactaaaatgaacccttactgctctggaagtctctattctgaataatcagtgtttaaaattatatcccaaagtagggtatcacagggtttcctgatgaggataaatgggcctgaagtgcttatgggcacccactatgtatcatgggaaaacttgcacgtgtgtgtgtgtgtgagagagagagaaaaaaaaaaatagagaaagttggtgagaaaaggggaggctgtttttgggccgagggttgtttgtttggctttttcatttcttttcccttgatagaagtgagcttactgaaggcagcggggcttccatagattcctgaaacatctgagtgactgaaaccagcggcttgctgagcgagctgtgactacacctggcaaggggtgtgttaggcatgtgttgagtctgtgagaaggcaggcggagcagagactcaggccacatcccatccagttctcaccccttaagttttgctctttgaggctgcaggctgttgctcagcctcacccaggttgagtcctgtgggaggactcataggagcccacagccctattgcagctcaccagctgcactaactgtagcttgaagacgaaggtaacaactagcacttacctggcacttagctgttttgcaaaaccctttcactagggcttttatagatgcttctcacctcaaccttatgagcttaaatactgtttccatctccattaatttggaggaaaccaccactcaatagatgcatcattaaaatccagagcttccgactccagggctgacctgctctacttcagaaagaattc

SEQ ID NO: 198250 - DNA, 1000 bp, Homo Sapiens
atatccagaatctacaaagaactcaaacaaatttacaagaaaaaaacaaacaacctcatcaacaagtgggcgaaggatatgaacagacacttctcaaaagaagacatttatgcagccaacagacacatgaaaacatgctcatcatcactggccatcagagaggtgctttgttttttaacacttgcctgaaggacttaggtgactgatgggtgagcaagaggaaagttgtttggattcatgggtgaacttttaggcaatttccatattccatgtatgagtgccactgcaatgcatattgatgcattcattttgcacattggattatttcttcaggatccatttctagaaataaaatttctggtggaaacacatgggacatttttagggctgtagccctacagaacagttgttccaatttacagccccagcagtggatgagtgtctgtttacttaaactctcccctgtccagctgtcattattaccgtatctttctgatctctgccgattcagcaggcaaaaagaggtatcttgtggttttagttgcatttcttattcttctcctcctccctcctcccccttcaccttcctcctccctcctcctgtggttttagttgcatttcctcctcctccttcctcctcctcctctttgcttcctcctcctccttcttcctcctcctgtggttttagttggatttccttcccctccgtcctccctactcctcctccttcctcatgtggttttaattgcatttcctcctgttgcattttctccttctcctcttccttcccccctccgcttctcccctccccttctccccccacttctcccccccttaccctcctcctcctcttattgttttagttgcatctcctcctcttcctccccctcctttttcctcctcctcctcctcatcttccttcttctcctcctcctcttccttctcctcctcctcctcctcttttccctcttctccttctccctctccctctccccctccc

SEQ ID NO: 198251 - DNA, 1000 bp, Homo Sapiens
ttttcagttcattttcatcataaatatgtttcacttgtagcttaaagattcctgggtattggagccactgagtggagggaaaggttttgtgaacatttttcgtgattttcatcttgctttgcttaccttgagaattattgtcaaaggaactttacaatccctttttaccttagacagcaggataattgtgttcaattcaaaatgcttaaatcatgagtataggatccagggaattaaatccatattctgcctggaagcaaagtaggttttccctataacattttggaactttttgagctcatttgagtgttttcattgttcttaatacggctatttttttttttacaataaaaacgtgtagtttaatacaatgtggcactagatgggattttctcttttaaaattaactgtccattaaaaatgtatttgaagagattttgaaaatgaacaattaaatccttagagaagaaatagatacatgatcacaattaaaaactattactaattcgtatgacagcaatgtaagcattgcaagaatatatggacccaggcaaggtacagtggctcatgcctgtaatcccaatactttgggaagtcaaggcaggcagatcacctgaggtctggagttcgagaccagcctggccaacatgtcgaaaccccatctctacaaaaaatacaaaaaattagctgggcgtggtggcaggctcctgtaattccagctacttgtgtcactgaagcatgagaatcacttgaacctgggaggtggaggttgcagtgagccaagattgcaccactgaactccagcctgggggaaaaaaaagaatatatagacagttcttcaagttctaatttagatttcctttgaatacatatgttaagacaagtaaaaattgatcacaacctctgttatcctgaaggattaagagggaaccgtattaaatgtctacaaatgtgttaccttggttctctctgaacatgtcaatgcacttgaccagaattc

SEQ ID NO: 198252 - DNA, 1000 bp, Homo Sapiens
cctcaaacccccaaagtgctaggattatagatgtgagatactatgccaggtagagatagcttttaaacatagatcattgtttaactctttcttgaaatgttccatgtggtttatattgttaaactattgtaaggatccatctcttggcttttgttcctatgattcaacagtcatggcattattgagaaacttctcaactcttcctaccattttctgtataatcttggacaggacagtttgtctctgagcctcagtttttgcttctgaacaaaaaaaaatatgattcaactgggtgatctttgttattttcatccaattctgaaattttaaggttctagtgcttctcactggaatgaatggaaagtacccacttgtcaccactaataattaggaagatgtaagattccagtactggccaggtgcagttgctcatgcctgcaatcccatcaatttgggaggccaaagtgggtggatcatgagttcaggagttcaagaccagcctggccaacatggtgaaaccccgtctctactcaaaatacaaaaattagccggggacggtggcatgcacctgtaatctcagctactctggaggctgaagcaggagaattgcttgaacctgggaggcgaaagttgcagtgagccgagatcacaccactgtactccagtctggctacaaagcaagactacgtgctgggggaaaaaaaaatccaatacccccctgtgcctacagttatcttgtaggaaataattgtggccatatccagatataactacacaaagcaacatcctattaaaggaagatttagaaaacaggaagtcacccaactgaattcacccaatattacacaggggagcagatgtgggttccggactagtttatcctgttggttgctgattgatagaggaatacactgtccagtgttggatgatatgatggcacgaatgacacttgaaattcttagggaaggagaatggtttacagatttcagaaactgaattc

SEQ ID NO: 198253 - DNA, 1000 bp, Homo Sapiens
gaggccgaggcgggtggatcacctgaggtcaggagtttgagactaacctgaccaacatggagaaaccccgtctctactaaaaatacaaaaattaactgggcatggtggtgtgcgcctgtaatcccagctacttgggaggctgaggcaggagaatcacttgaacccaggaggcagaggtttcggtgagcctagattgcgccactgcactccagcctgggcaacaacagcgaaactctgtctcaaaaaaaaagaaagaaagaaagaaagaaagaaaatggaaggaatcttagaggagatctaaggctaaatctatattttgctgatgaggaaaactgagcccagagaagaagaaccttgtgaaagtcaccgaaatgagtcagcctgacctaacccagggctcctgacgccccaggcagcattctttcctcccaagcttcttttctccaggccaaactctcttctgaaatctcactttaatctgctcagttcaattttgcttttaattatttgtgtactttctgtctgtccttaacacggtaatttatacattgtcttgcccacaggggtctaccatggtacaaggtggtcaagaaacactgaataaaggaacaatcaaagtagcccacccccactgagttccttaagtatgctgcatgccttagttcctttcgtccccacccagggctcccaggtgggttcctcgcaatgatgaagaaacccaggtggggagataagttgttgctcaagctctggctgatggaagaggtggagtcatcctggtgagcagcaggcacaccctgggctgctgcgtggttgtgaaagcctagaaacactgcgcttgtgcaccagctggcgaagaggcactgccctgagctatccaagtcccctaccctgccttgtcttcctgggaccctcccaccatcagctctaaggccctgtctgttctgcctggcaggggcctgtgcatctcttgggggagtaggcatttcagcttggaatt

SEQ ID NO: 198254 - DNA, 1000 bp, Homo Sapiens
tgcagcctcaggaaaggagctccatcgttcctcatgtcccactccttcaccctaagccagctggacaaccatttgtcggatacattgggtgtagacacatttgttatagatacactgggggtactccaatgccctcatgcccccttttctaggcatgctcctaaagccctggcaaagggagggggagctaggtaggcatgtttgtattaggtgatctcagctcctggccaaatatgattgaataaggagacacctcacctatgctgattccatcagactctccagaattccagccagtgtcccagtgcgtgagtcaggtggcttcagtgctgtgttgggtgttagcagctgtcgtggagctgcacgtaggtccaatcttggatggtgcctttgggcttggatgttacctggagtcctcctagcatctgctttgggcagctccttgtgtatactcactgggactcaccctgtcactctctccactttggtcccccaagtagagaaccacctaaacccctgtccacaatactcaccttagctgtagccagctcctcattggcctactcctggccttactcttttgtttaattttttttttttagatggagtcttgctctgtcgccaggctggagcgcagtggcgtgatcttggctcactgcaacctccacctcgtgggttcaagctattcccctggctcagcctcccaagtagctgggactacaaggcgcatgccaccatgcctggctaatttcttttgtattttagtagagacggtgtttcaccctgttggccaggatggtctcgatctactgaccttgtgatccacctgcctcggcctcccaaagttctgggattacaggcgtgagccaccgcatccggcctggccttactctttcttaaggcccagggccagtaactagggccttggaatgccttgtatgaagacgcagaggaagggagggactagcagaagaaacgcatcccgctgaggagtgaattc

SEQ ID NO: 198255 - DNA, 1000 bp, Homo Sapiens
ttaaataaaatggtgtagtatttgcaaataatagatgcataccctcctgcatgcttaactaagctctagatgatttataatacctaatacaatgtgaatgctacataaatagttgtcatactgtatttttttatttgtattttttattgttatagcactattttttattgttctttttcctgaatatttttgagccaaagttgattgaatccaaggatatggaacccccagatatgcagggccaattgtacatatttatatatgtacaattgtatatatcttatgtatatatcttatgtataaaatcaaagatgtatatatcaaatgtatatatcttatatatagtgattttatagtaattataagaataatataaatgcattttgaaatagctcaaaaatagagaaaagattagctaccctcctactactttatcatattttgtaatttcagttttatccctttaaaaaatagtgtggcctcgaagtatagaaaatcttgtatactgcttagttcatttaacctctcatttaacctaacacttaggctatatggtatagcttattgctcctaggctataaacctagacagcatgttgctatactgaatactgtaggcaactgtaacacagtggtgaatatttgtgtatctaaacactctaaacatggaaaaagtacagtaaaaatatgatattattatctgatggaccaccattgcatatgtgctctgacactgacttggaacattgtaatgtggcacacagcaatatatggaagtatacttggaaattcatccaaacttttgcctgtagccacagttcattcttttttatttctgagtagtatttcaaggtatggatgtgccatagtttgtttagtcatttatccattgaaagacatctgggatgtttcaggttttggctattacaaataaagctttgtgagcatttgtgtacaggtttttgtgtgaatttaagtcttcatctatctgggatgaattc

SEQ ID NO: 198256 - DNA, 1000 bp, Homo Sapiens
cctcctccacacctctgagcccatgaggatctgaggccaactctaatgctaccccttctatgccaaatgacaatttccagggccaaggcatatgacattcctgccttctaggcctttgccaatcattccacatttctgaaaagactcttattcagagatgttttcagtcagaccacctatgcttcctattcatgctgtcaataaaaatagaatgctatccacttctgtatgatgttacagcctttcaactcaggcccttaacgcacttcatgaactttctctgggtgccaagtactgctcttctcccccttctcccagtggacaagcaggcatacaagagtcaagaatctgacccaaagcctgacttaaataagtcaacactaaggatagaaaaagccttgaaaatctgatgttctaaccatccacttacccagcctctctttgttcgttataatttctgcaataccttagcaggtcaaggagaccacagctggcaaagtactattgttatctgtggagacttgttgcagtgttcagtgtgatttaaacttctatgtaaacttgctgtttcttttcatttacaaagttaatatattatcctctaaagttggcaataggtgggtctgactcaccctgattgggcaaagataatcacagggcttcagctttttgtaggccatgagaatctaaattcaccatataaaacctccatgtttaattgttttgtttttaggaagtcccttctagaaacatagctgccagtgatgttgtattcattccccctccaaacgtaaaatcaaaactttcaagaggacgttttgctctggaaacttctgagatcaaaggtcaaaaggttcgtgatgggcaattggctgttagtctcctgagtcatcttgatggactaaagaatgttcccggtggctactcattcctccccaccctactcccagtgcccataaagtcagtttgactgccctcccccagctttcctgaatagtaa

SEQ ID NO: 198257 - DNA, 1000 bp, Homo Sapiens
cttttaagaggagagcttaactccatttacatgcagttattaattatatgtgagccttttttctgtcatattaacggttttctggttgctttatatattctttgttcctttctcttattgtttgttatagtggtttgctgtctttttatggtagtaccatttgagtcctttctcttccttatttgtgtgttgctttaccactgagttttctatttgtgtgtgtttttatgatcataaatgtcatcctttcactttcaggtttaggacttcttgaacatttcttgtaggtctggtctagtagtaatgaattccctcagcttttgctcgtctggagaagactttatttctccttcatttatgaaggataattttgctgattatagtatctttgtgatatggtttggatttgtgtccctgcccaaatttcatgtcaaattgtaatcttcagtgttggaggtgaggcctagtgggaagtgactggatcatggggatgaacatgaacttcctccttgcttttctcatgatagtgagtgacttctcatgagatgtggttgtttaaaagtgtgtagcattttcgccttcactctcttcctcctgctccgaccctgtaagatgtgcctccttctccttcctctttgccttctgccatgattgtaagtttcctgaggcctccccagccatgcttcctatgcagcttgaagaaccatgagccaatttaatctcttttctttataaattacccaggctcagatagttctttacagcagtgcaagatcagactaatacactttggctgggagtttttccttcagcattttgaatatatcattctcttatctccaatgaatatattattctcttttctcttctcttttctctgggtctgtaagcttcctactgagaaacctgctgtaagtctgatgggggttcctttataggtgactagatgcttttctctttgctgaatttttttttttcctctttgctgtttttagaattc

SEQ ID NO: 198258 - DNA, 1000 bp, Homo Sapiens
acacaaaaagatccatccaacctacattataatcaaattgtcaatagccagaaagaaagaggagatcctaaaagcagtaaagaagcagcaattcaccatgtataaaggatctcaatgagatgaacagcagatttttcatcagaacacgtgaagactggaatagagtggcataactattttaaagtgctaaaatttaaaaatctgcaaacaggaattgcatatctggcaaaactaccccacaagaattgagaaattaaaacatcccaaatagacaaaggctaagtttattaatgaaacaagttcattaatagtagatctgccctagaagaaatgttaaagggagagagtgatgccaatcatgtgccagaatatgaagctacagactcttccattacccatgaatgcaccaaatacagagctacacgtagttcaatttcctgtgcaagaattcagaatctagttgagagatgcctgcacaacaggcaactgagaaaatacccatattgaaacaggcaggaaaagctgatcataaacctcaccctcagcaaagccacataattgggaagtaactgaactcccagcttctccctgaaaaatgaagggcttgaaccacttatctagcaccccaacttttatggctgctacttatgggactggattctaactcccctatctctatgagttgataggacccagcatttactagttccctggaaccatagagaataaaaagacagttttaaacaggcacatgagtacctgccacagcttttccccctaggcaagcacagaatgagcaagcaataaagccaagctcctagattctccatgaaagggattagactgaggatccaattctcagctttttcagctactgcctaaaggtctgcctaaaatgggtgggtgagcattttgcaaagcccttcctcagcctgctcctgaagaaactaaataaataaaaacaaaataaacacttccagtttctccttgaaaagaattc

SEQ ID NO: 198259 - DNA, 1000 bp, Homo Sapiens
aatatatcatggcagaaaatcttattttatgagaagatattcagctaaaaaaaagtatgactaatatatttttatatttttatttttttgtattttttaattttaattttatttttattttttgagagagtctcattctgtcgcccaggctggagtgcactggtgtgatctcggctcactgcaacctccgccttctgggttcaagcaattctcctgcctcagcctcccaagtagctggaactacagacgtgcaccaccatgcccacctacttttttagatttttcatatagagggggtttcatcatgttggccaggtttgtctcaaactcctgaccttgagtgatcctcctgcctcggcctcccaaagtgctgggattacaggcctgagccactgcaccgggctattttttttttttaagaattattcaattttataagtcctagggaataaattaggaggcagtgtgaaactctaatttcacccctgaatgaaagattaaagacataatctcttagcatatcatgtttttccccaaaaactaaagagaagagaaaatgtattaaaagatgtcaatttgttcgattaaagtaaggttcaaacttgggaaagtgttctccaatggaccaggtggagatattacacttctaatttttgttataagttatggtttaaaatttgccaatctttaaccccacctaattctcctaagtttgagacagtttagaaatatcttttcgttaatggtctttctatttctttaaactgacttgtctttcaattcctcgtccagttgcacttatcaatgaataaatatttactgaatactattatgtgcaattcattgctctttgtactaaaagcactacagtgtaactacagtaatgtatagtaggcagaaattaaatattaatagacatatacagcagcatagatagatcataaaaatgtgtattgaagtaaaaaagtagagaacaacactgtgtatctatatagaattc

SEQ ID NO: 198260 - DNA, 1000 bp, Homo Sapiens
atgtcttgaagagttgttgtagttatttttgattggtttatctttcaatctttctacttgagtattttacataccacaagaagagtgttataatagtgtgtgattataagagtgtgattttctgtgtacttactattgccagtgagttttttaccttcagatgatttcatattgctccttagcatccttttctttctaaacaaagggctcttttttatcatttcctgtaggacaggtctagtgttgatgaaatacctcagcttttgtttgtctgggaaagtctttgtttctcctttacgtttaaagtaggtttttgccagatatggtattctagggtgacttttttttaacttcagcactttaaatatgtcatgccactctctcctgtcctctaaggtttccactgaaaagtccactgccagatatattggagcttcactgtatgttagttctttcttttctcttgattcttttatgatcctttcttcatccttgacctttgggagtttattaaatgtcttgaggtagtcttctttgggttaaatctgcttggtgttctataatcttcttgtacttgaatactgagatagttctctaggtttgggaagttccctcttattattcctttgaataaactttctctctctctctctcaatctctcactctccctcctgccctccctccctctctgcttccctccctccctcctctttaaggttaagtactcttatattttcccttttgaggctattttctgggtcttgtaggcatgcttcattttttaattcttttttcttttgtttcctctgactgtgtattttccaatagcctgtcttcagtctcactaattctctcttctggttgatgaattcttccagtaagtgactctgatgtattcttcagtacattcattgcatttttcatctccagaatttctgtttgatcctttataattatttcaatccctttgttcaatttctttgatagaattttgaattc

SEQ ID NO: 198261 - DNA, 1000 bp, Homo Sapiens
ttggctcactgcaacctccgcctcccgggttcaagtgattttcccgtctcagcctgccgagtagctgggattacaggcatgtgccaccacgcctggctactttttgtatttttggtagagacagggtttcaccatattggccaggctgatctgaaactcctgacctcaggtgatctacccgccttggcctcccaaagtgctgggattacaggcatgagccaccatgcctggcctgtcgtagctttagtttacagtttttttgtgaatgagattgagcatcttttcatttgtttaaaagccagtatttcctcttctgtgagctgcctgtccctttgtccatttaaaaatgtcattgtctttcattagttggcatttctttgtggacaaaggaaattaaacctttgtctgctagatgtgctccatataatttccctcagttgtcatttgtctatgtcctatccccttgagcacagagattggaatttaaacttttttatattctttttcttaatataacaagacatacacggtaggtgctagacaaatgtctgttggcacagcagagtaagaagaaaaaggcagagatctggaaaatttggagtgacttaacccaaccactccttcctcttataccaagtctaacccttagtctttgtgtcagtcaggactcttataaacagcagaagctaactggcaaattgtttcaagtcccctgcccccaacaattatagagatatcggatagcacacagaatcaatgcaagggccagcaaacaagggtcagcaatcagacaggcacctagggaagctgggcagccagtaccacagtcaaggttgggcacaggacagcctgtgtaggagactcctgtcccctccaccctccgcagtgatcctcctactctcgtccctcacctgcggcagtagcgctgacacttcctcctccagacactagaggccgctgttggccccatcgcctccaccgccgccgcagaaatgaattc

SEQ ID NO: 198262 - DNA, 1000 bp, Homo Sapiens
gccattctcatcatggggccctccaccctcattgacatcatctaaacccgtaattacctctcaaaggccctactttcaaacaacaccttattgggggttagggcttcaacctatcagttttaggaggcacaaacattttgtctgacttatacagattaagtatcctgtatccgaaatgcctgggaccagacatgttttggatttgggattttttttagattttggaatatttgcatattccaagttcagtatctcatccaaatgagatatcttggagatgggatccaagtctaagcatgaaattcatttatgtttcatatacatcctatatatatagcctgaaggcaattttatacaatattttaaataattttgtgcatgaaacaaatttttggctgtgttttgactggcctataatatgaggtcaagagtagaattttctacttatggcatgatgtcattactcaaagttttgggttttggagcatttcgattttggatttttagattaaggttgttcaacctgcaccaaatttgcattttggccaaatgccaaatggctgagtgttaaatcactattggctgaagttgaatatcaccatcataaaacaaatatcttagtatacaagaataaatctgaactattaataagaatacctatttactacaacttaattaaaattataccaagcagaattttttaaaattggcattacagagcagtggtaataatttctcagctgtcagctcctgtggttgttctattgcgtatttatgatactgaaaatatgctttttcaactgaggtcagtgaaggagcaaaatacgcttttatcaagctctgctattactgtagtagtgttaatggtgatattccccccaagtcaataagctttcctcctctccaataataactgactaaagtcaatacctcctggacttgccatcttgctgatggtcatgatgaagtttcattgaaacagtcccataaattaaagctt

SEQ ID NO: 198263 - DNA, 1000 bp, Homo Sapiens
atgtatctaacttttggtatctacataacctacatgatactggttctaagaggttaaagtaaactcctgaggttttgcatacaggaaaggaaagacgtttaacagacttatacaagaattaccatggtcctactgttcccgcccagtgggggaccttttttagttcagactcaaactgcaaattactttcccatcacaaaaataagtgaaataaagcccctcacattgcagcatgcatgtagaatacagaggcaatacatagagtattgaaaaagaagccgaagctgcaatccagtaaacaaaaagagaatccatttccaagagaataaaatggaataagcagaaggcattaaacaggaagcactggatagaagccacctccttcaaagacaattgataatgtctctatattgacaataaactcagagcaatgatagaattttttaaaaacccttttgtaatgggtcattaagacaacgaattaaggatataactttcctagcacagataggcacaagacaggagacatgtgcagaacaacacagacaactcaagaaaagaaaacaggtcagaaataagtctttagcttatcgtggttaaatgattcaataataactttaaaaagaagatgtgaacattaatttctggattagttcattattcatgccttattatgaacaccacagaatacttttatatagttctcatttcaaaatatacgcttaacaatttccaattaatttctcctattgctgctaaatttttcaagttaaaaactctccaatctccatatagataatttatcagtactaaatggacccacttaattattttgaccaagatattgctgcccagagaatcaaatgagttaaggaatttatcatacacgttgggctttcgtggtgaggaatagagaacagcaatacatttcatgttattcaggtggaagtgcaaggttcttccaattgcacagtagacacttgacctctggcaactaagt

SEQ ID NO: 198264 - DNA, 1000 bp, Homo Sapiens
aaatgcccatggtccccactgctgccaccctaccttctctcccagagcctgcagagatggcctcatggggagttcgctatgatcaactgacagaagaagagaagactagggcctagtttacagacggttctgcacgaaatgcaggcaccacccaaaagtggacagctgcagcactatagcccctttctaggacatccctgaaggagagcactgaagggaaatcttcccagtgggcagaacttcgagcagtgcacctggctgtgcactttgcatggaaggagaaatggccagatgtgtgattatatactgattcatgggctgtagcaaatggtttggctggatggtcagggacttcaaagaagcatgattggtgacaaatttggggaagaggtatgtggatggacctctctgagtggtcaaaaactgtgaagatatttgtgtcccacatgaatgcttaccaaagggtgacctcagcagaggaggcttttaataatcaggtggataggatgactcattctgtggacaccactcagcctctttccccaggcacccctgtcattgcccaatgggcccatgaacaaagtgactatagtggcagggatggaggttacgcatgggctcaccaacatggactcccactcatcaaggctgacctggttgtggccactgctgagtgtccaatttgccagtagcagagaccaacactgagccctcaatatgacaccattcctcggggtgatcagccagctacttggtggtaggctgcttatatcggacctcttccatcatggaaagggcagcggtttgtcctcaccagaacagacacttactctggatatgggtttgcttatcctgcatgcaatgcttctgccaagactaccatctgtggactcacggaatgcattacccaccatcatggtattccacacagcattgcttctgaccaaggcactcactttacagctaagaagtgcggcagtgggttcatgctcatggaatt

SEQ ID NO: 198265 - DNA, 1000 bp, Homo Sapiens
acttggagactccaggtgaataggggtgtgttaacagctcttttagttccaccatcgacagcctgactaaagggggcatgtggagccaagcagctacttttcctgttgcttggtgagtgggaagggagtgctacagggctacagctctattcacactcactgtttggcaggtcccaagtttttgtcccacatccaaggagaatgaggttacactgacagtcagtgggtgagcaaggtgaagggttttagtgagtgaagaaacagctctcagcaaagagggagacccaagttgggcagcccccttacccaaagtcaggtagttcctcccccaccacccgaaggtgggcaatcccctgctctgactgagtccagcgtttttatgggctcagaatgggggggtatgtgctgattggtttgttaggacgcaaaaaggctaaaaaaaaggcaccactcaaagatgggcgcaacagtgtaaaaaaccaattagggaagggtaggaatgtgtaaaataggtgaaggctggggatcaaccagaggaaagcacctcacatgggaagaggggttcccaatccggtctgtggatttatctgagacttgtagatgggttttcagctttaaactgtctttggtgtgaaggttgggttttaccatccctgtctgcctaaagatttgtctgtctcctgctgctatctaaaatacatccagaaactgggcacttatcaccactgccaatgctctcctatgggtccgaggtaacattacagctagctttactgctgaagcagcctccttacaggcttctgtttctacctttggctccctgtagtcttttctcaatatagcagctattgtgaatattttaaagcataaaaccacgttccttcactaaagacccagcaatgacttacctctcatccatttcactcaaaggaaaagccaaagtccttaaaatggcttcaggatttgacataatcttaccacgtgctacttctctgaattc

SEQ ID NO: 198266 - DNA, 1000 bp, Homo Sapiens
tgaagttagcagtgaaaggattgaaggaaacatatgttttccagggctgtacagtcactctttcatgaataactgtttcactgaattcagatattaaaaagtttgcatactccctattcacccagaaacttgtttctatttaagtatctcttttgttttcctctcgaatctcaagtgcagatacaggatggggaagaaaggcatagagctgaagcataattggaacttgatccccaggatgatcaaacacaaaccttaacagctattgccattgggcagttatagaacaacaagtaaaatatataaaaagagctaaaagctttccttttctttctctctctttttgagacagaatctcactctgtcggccagaatgtgagtgcagtggtgtgatctcggctcactgcaacctccgcctcgtgggttcaaacgattctccggcctcagcctcctgagtagctgggattacaggcgcgtaccatcacgcccagataatttttgtattttaagaagagacagggtttcaccatgttggccaggccttctcagcctctcaaagtgctgggactacaggcatgagccaccatgcctggccataaaagctttccttttaaaagaaatatttcccagctatgagaaagtgatattaaaaaagaaagacataccataatacccaaatatggcaaatggctcaaatacttcccagaaaactttttatttccagcatcactaaaacattcctctgtggcttcaccattcatagcttgaaagaaaattcagtgcatttctattgcttgacacggcaaaatttacaaatacgtatagagaataagaattattaagatgtgagctgttaaaccatgaagctgccctgcttgaaaaacggtaggaaatctgaaagttgtaacatgatataaaaatcaaagaccaattcaagtgcaggctgaatctagaacaatgcattaagcctttgcttacaatgtggacctgcttggaattc

SEQ ID NO: 198267 - DNA, 1000 bp, Homo Sapiens
tgtatcacttgtatatcatatgtcatatgttacatgccacatcatgtttcatgtaatatatatcacatatatcacatatcacataatctaccatataacatatcacatattatatatcacacgtcatataactgtctttcgtatttcttaatggatcacatcatatcacattatgtcataaatgacattatatcacatcacatatcatatgctatttgtgtgtatatagataatatatcatatcagatctggttttgtgtgatctccttgggggaaaatgaggctctgtaggtggatgctttaaggagacagatgtcagtccatttgcttagtaaatatttgtgaagcccccactcggtgctgagcacagacacaagcagagttgaatgatgtgggctgacctggctgaccaggtggctcgtggagctgaactggatggccttctgcccttgaaggttggtgaccctgactgtgccgagtggggtcctcctgagaggggtctgctgcttattcttggcccctggtctccttacctggctgtgtatgctcctgtgctcagtaacaccccatcttttgcttgaggttctgggccttaaagggtgctgtccttccttctactgtttctgccctgcatgttgatgggttataagctgtttctgcagacgtgcctcttcctgaccgctgcccaggaagccctgcgtctacgctctggttctgcacctggcctggagctgcctggagctgcaaacccacctggcttgctccactttctggttcacttgctccatgaacctgtgtcctcttggccagctctcctggcattccagctgctggctctcagtctgtgagattctccaggatttggtgccttcagctccacatctctacccctgctacctgaaactggtctaccctagtgccaggggcatcttcctgggcctcctgtagctgctgtctgcttgggctcctgattaccagagtgttcccagggcctcaggaa

SEQ ID NO: 198268 - DNA, 1000 bp, Homo Sapiens
tttacaaatatgaccagcttttttcgtgcagaacttctcaaatggactaatatgaattctgaaaatttagaaaatcagaaaacaagtaatgactcccaacattatgtaaataaggaacattttaatcatagactatcttgataacttagaactcaaagaaataatgttgagaaaccatgctagaactcacttactagagatctctaatcatctatttactaacatcaccagaaatttatatatccgttctaatgccttcatagctttccatgcctttggggtttaaaattaaatgccatttcttcagtgtttatcaatagtgatttaagttataccatttaggaacgcttttatttctactgaaaattcagttgaaaatgtcatctattacattattcacagcttatatcaagacccacacagtaattacttctcagaattgatattagaaaaacgtttatgcttgtaagatgagctactttttgacattgctatgagtaaatgcagtgctaagtgcaatgctaaattgtagttacaagctcatttgggtgtctgataacatcaggggatttagttatttttgctcttttaaaatatttacttgctctgtttcatacactgagtaaggtacttctccactttagaaacacaaaaaaattggttttcttaattaatttggaaaggtgtggtaataaagggttataatctttaaataaatattgtattaatatgtaagctaaacaataaaatggaacacaacagatatcctctggttattagattctagatgacattttataaacaaaactattttttactttttagtctgagcaataggaagagcatttttatggagacccaactgttttctaactcctttacctttgaggggcaacaaatctgaaatgaatttgcgctagacaaatggttattatgatgcaaagtatggtttgctatgactgcagggacatgattcattgtgtttccctattttgaattc

SEQ ID NO: 198269 - DNA, 1000 bp, Homo Sapiens
gacagttctcaggaaacagcatttgtaaaaacatgcttattaaaaaattagagagattttctataagaaacacataataggcgcagtggctcatgactgtaatcccagcacgttgggaggccgagacaggtggatcacgaggtcaggagatcaagaccatcctggctaacacagtgaaaccctgtctctactaaaaatacaaaaaaaattaaccaggggtggttgcgggtgcctgcagtcccagctgctcgggaggctgaggcaggagaatggcatgaacccaggaggcggagcttgcagtgagccgagatcatgccactgcactccagcctgggcaacagagtgagactccatctcaaaacaaaacaaaacaaaacaaaacaaaaaacaagaaagaaacacataataatgctaatctaatcatttgtgtatttttaagtttttaacttactgatacatgtcaatgtgttaagaccaaaaaaatacatgaatttaatttaagtctagacggcaaagtcaaattaatgtagtatacaattttcttaataaacttttcctttcctaccctctttcgccccattttgaactttaaagaaaaatttgcctttttgctgcttcctaaacaatctatgactgctacaatagtcaatattttcccacttagtttgcttatggatgtgagggttaaatgttatgaacataatttagtgcttacaacatcagcaaatctggcttcttccttgagctgatacacagtgaggttaaggtcagggaaacatccgtgccttctggtccaagctgagagcattgctaaggtaagcaatcaaagctgggaaggctggggttggggaggtgtcaaggatgacacaatacaaatgctaaagtctacaaaacaaggttgaagactcaagtccacagcagcagtggttaaggggcgggggattcttgcttgaagacgacaccaggcacattttccagttggagagcttgtagtgaattc

SEQ ID NO: 198270 - DNA, 1000 bp, Homo Sapiens
ggtgtatgtgtcgaggaatttatccatttcttctagattttctagttttatttgtgtagaggtgtttatagtattctctgatggtagttcgtatttctgtggaatcggtggtgatatcccctttatcatttttttattgtgtctatttgatacttctctcttttcttctttattaatcttgctagcggtctatcaattttgttgatcttttcaaaaaaccagctcctggattcattgattttttgaagggttttttgtgtctctatctccttcagttctgctctgatcttagtgatttcttgccttctgctagcttttgaatgcttttgctcttgcttctctagttcttttaattgtgatgttagggtgtcaattttagatctttcctgctttctcttgtgggcatttagtgctataaatttccctctacacactgctttaaatgtgtcccagagattctggtatgttgtgtctttgttctcgttggtttcaaagaacatctttatttctgccttcatttcattatgtaccccgtagtcattcaggagcaggttgttcagtttccatgtagttgagtggtttgagtgagtttcttaatcctgagttctagtttgattgcactgtgctctgaggaatactatgcagccataaaaaatgatgagttcatgtcctttatagggacatggatgaagctggaaaccatcattctcagcaaactattgcaaggacaaaaagccaaacactgcatgttctcactcatacgtgggaattgaacaatgagaacacttggacacaggaaggggaacatcacacaccggggcctgttgtagggtggggggacgggggagggatagcattagaagatatacctaatggaaatgacgagttaatgggtgcagcacaccaacatgacacatgtacacatatgtaacaaacctgcacgttgtgcacatgtatcctagaagttaaagtataattaaaaatatatatatataaaaag

SEQ ID NO: 198271 - DNA, 1000 bp, Homo Sapiens
ggaggccatttttaaaaatattttttaaaggaggcagcagatcaatattataattcaagaatctgatctaaatatgcattcaataatgaagaacatttgagtatggactagaaaagcttctccaaaaaactttcaaatatatcatctcaaattacctaaagaataaatcacttctgtagcccttttgttgagtggaatcataaacaaaaaactgaaaatttattgctatgaaaacagatccatggtacaatgttataaattttgagtattaagcatagtcagttgaatccaactaagaagttaaaaatgtagtaagaaatgtgtatatgtatgagtatgtgcatgtgtgtgggaaaaatctaccatccaattgacccaaaaacaacttactcagttgggaccagacatttttctcaattctccatgattcagaaggcaattaagaattacaatttcaacagtccacaaacaaaataagatttttttaatgtagagagaaattaattatgttcaaagagccctttttctttcactcaatttcagtaccccaaagctaaaaacgcaaacatgactatgacaaatgaaaataagtatcatgggaatctgtttttttcctctgagaaataaaatctaaatggagatttgatactatatgctatactacatacactaagaatattgtatttttcataattctgatttaatctcctgtaaacttgatatattttaaaatttgtaatttgtttttcatgatactgaatctggttccagttctttttcatcatttaatatactggctacccgttctaattaggaaaacaagtcctagaaatctcttcattttgacagcaagtgctgatttgtaagaaaatcattaaaaatgcagctctctaggaagcacattttgttgattgtcctattgtctgaacattttcacagtgattcctgactaaaaatccttttaattttgtaagcactacactagtgtgtcatgtcacta

SEQ ID NO: 198272 - DNA, 1000 bp, Homo Sapiens
aaccacgtaggacaataaaaatatgactgtttactgttttcaaaaatagaggcagtaaaaatgagactggtattcaatgacctcaccaaaaagacataaaacctcagattgttaaacagtgtgaaaacctgtatttttatttgggcttttgccagattctctaataaatgtcattacatgacaaggaacaatatatttagattgcaatgtaaaacttggcttggtagccactaacagctaccagatcagtttatcaattctccagaaaacgtcacatctagaagtgttgtaggtaaaaaaaaaaaaaaaatgtttcagatgttgccaaataattccagaatggtctgagctcaacagaacgtctagtttgaaatggaactactcagtgtgcatatgcgtggccaggtcatgttcagatgcagaactccataaaaaaggatgattccaaagaaaggtaaattccgtacaccctaagtacaagaaaaagaatcccagattcaagcagcaaaggaatgaccattcactttgtagtggagagggtctgtgttttgaggagactaaaagttaggcctcctcctcaggggacagccatgagactgaaacgcacaatttggctgctcactctgacatggcaatatacaccctgaatattgcatgaatattgaagctgtatgcagctttgactgggtctattttaatgtgctcagtacctggtttgaaaaactcatgttaccttcccttactgccagtaatgtttccgagttttaattttaagtaggaaattatacaactttagtaagaaagtaaccagggattgccccctaaaatttaacttccccaatttttaacgtaaaacatgtttgctgtaatctaggctttggagactcagcctagagtctttttacctcctgaagtaaacgagggcttctccctcccttttcactcccagcaagaagggctgaagccaacctagctgactaggacatgcagaggtgaattc

SEQ ID NO: 198273 - DNA, 1000 bp, Homo Sapiens
ttaggaatgtgaaaaagcattccaaactcatcaaaggagaacttaaagatataaaagtaatatttcattaaacatacaaaaagttcaagatacataaaattttaagacttcataaaatagaacattgctgaataaaagaaaacaaaatgtgtaatgtacataaaatatacaaatgtgaatttattctttgcattttaacagcaagaaattggaaacaatctgaagtccatcagtaaataagtttctagttaaattatggtagaaccatacaataagataccacgatatgtatggtagatccatacaataagataccaataagaaagaaaaccaaaaaaagctcttcatgtggacatgtggaaagatctccaagattaattttttcatgaaaaaacaaaatcaaggtgcagaacaatgtccatagtatgttaacattaatttgttttaaggtgagaaagagacactatatataattatatataaataaatttatgtttgcttgtattacataaaaatagttggaaagatgcacaagaaactaataaagtacttttactaatttggcagggttggaggggtgaggaaaattgggaactgagcagatggggaattaaggggaggacactactcgctgtgtatctccttctatatcttttgaattttgaaccttgtaaatgtattgcctattcacacatttaaaaaaacgaaacaaagtgttctacccagtgggcatccctctctcagccatgcaccgtgacggcagagtacaagttacaagtcatgcctgagtctgggaggtccacggttgggaatccatcactggcttttgtgagcaaggcaggtcacgcggatacaaagcatctttccctgtctgctgaagtaaaatccatgaataacttctccaaacattcctaaccaaaactctcatatgttaggaaaaagttccgaactagagctcagtcaaaaatctcctcggtttgcaagcacagctgtagagcta

SEQ ID NO: 198274 - DNA, 1000 bp, Homo Sapiens
cagaatgttggcctgatttccttcccttgatttctaagcatggcattatcaccatcatttctttccattaaaataaataataaagcctttcagaaggtgactatgccaggtaaacaacaagctctgaagccaaaatatcctgaaaggatgtaatttaatacatttgcagtaaagtctgacaaatgcttgctcttaaacttgttagttattatactgaaggtgtgtaagatttgtataaattaccgagttgctgtaattccaacaagttaaaccatttattttagttttctaggaggagaagggaacgctggaaagatgttttgtttcgcagaagcctgcctgtactgagtcttctgaattccatatggagttctctgaattcccagacaccctgtctttggcagaacccaactgctgagactgacagtagccacctgagcatattgtatgttgtaagtgattcaacctcaagcgcatgactggctgggcttaaggtaaaatgtgatccctttcctatgctttgaaagattctttggccatatggcaggacaaaaagaaactcaaagaggatctgctaagccctcaagtgataaggtgcaagaaaaagaggaacccaaactttctgaggcaatggaggaggttgaacaatatcaactctccttttgccacctctttcaaatacatattccaaaacaggccagagcttgtgttagtctaggatagtcacaaccatccagttatctttcagggtttcatcttccctctaactatgataaaatataaagaacaaggcccatacgcatgtctttgtttctttctatgtattttggctgaccttagcaattgaccataccagcaatacctgttgcagcttaaggagaaagttcttgcatctcccattttctcccccaaacctgaaattcctgtattaaggatttatttgaattaacaaatagaaattataataataattaaaaagacataccttttatgtgaattc

SEQ ID NO: 198275 - DNA, 1000 bp, Homo Sapiens
tggagactaacaggctaaatcaagaatttctcatttgtacacccacgttcagagcagaattattcacaacagccaaacaacctgaatgtccacagacagatgaatgaataaagaaaacatgatatatccataaaataaacatccataaaaatgtagctctgacacatactatagcatagagaaacttcaaaaacatcatgttatgtgaaataagccagacataaaaggataaattcatatgattccacttagatgaggtacatagagtagtcagattcatagacacagaaagtaaaatggtggttgctggggctgaggggagggagagcaggatggggagttgccgtttcaagggtacagaatttctctttggaacggtaaaacatttctagagatgaatagtggtgatggttacataacaatgtaaatgtacttaatgccattcagctgtacacttaaagatggttaaagtagtaaattttgtgttacaaatattttaccacaattttttttaaaaaagaatttttggttggcaaggactgtcaggcattacagaggacttgaaaagcaactttgcacttctttgggatgtcgttattttgtttccttttacattttattcaattggtatttttttaaaaattgaaaataatacaacctaagacacaaacaaaacatagatacatatttaacaatatatacatatattttaatttttttctttacaaaaagggctcatactctacatattactttgtactttgactttttttcacttatcaatggtacataactatccttccagatcaatatataggaacactttaaaaaatagctgtgcaatattccttagtataaatgtatcataattgattcaactctttttctgtttgttgatggatatttgggtagtttccagggaattttattaattttttggttaatataaaaaatgataaatatccttgaacacacattcttacacaataggagggaattc

SEQ ID NO: 198276 - DNA, 1000 bp, Homo Sapiens
tctccattacccttcacatcctgtcaccaaatcatccttaatatatctagactctgttactcacctccagccccctactaagttcagttaagcattcatctctttcctagactggcaattatttcctaactggttctccactttcagatttatcccatgtcaatccacctttcatatccacgcctgactaatccttttatagtgaaaagtctgatcacatgattcccatgcctcaagcctttcattggctccccactgtctccagcagaggcacaagctcaaatatttgccaggggcaggcaggtacaaaagtgagtaaagggggctgggtgtaaaatgacaggtggtggttgggactacacccagaggaagaggcacatgctccgtctcaaggcacttaagggaggcagctgctttgactccagccagttgctgccacataggaatgagtgtaggcctgcggtcaccagatgttccaatttttcaagagaagctggaagcctggatttgtatgcacaatttccaaaatgttcatgttgaaaatacacccacattctttttaaattttttaatttatttccatagttttttggggaaacaggtggtatctggctacacgaataagttctttagtggtgatttgtgagattttggtgcacccatttcccgagcagtatacagtgaacccaatttgtagtcctttatccctcactgtcttcccaccctttctccctgagccccaaagtccattggtcattcttatgcctttgcatcctcatagcttagctcccacttacgtgtgagaacataaagtgtttggttttccattcctgagttacctcacttagaataatagtctccaatcccatccaggttgctacaaatgccattacttcattcctttttatggctcagtactagcattccagtacatatatgtgtgtgtgtctgtgtgtgtgtgtgtatttacatatatatatatttatttacatatatatat

SEQ ID NO: 198277 - DNA, 1000 bp, Homo Sapiens
tgagagtacttctgccccccgcttgagagttaatatggccacttttaaacaagaaaagttttccagaaacgtggaaatcttgtttggtgtatgtttaggggcaaatgttttaaagttttgcctaaattcttagttagaatgcaaaattgatcaactccctaggaatggttattgtggctaaatatgaattgttgctcctatgtaaaatttagttattggtagaagtttactaactgagttgaattttgttgttttcctgggttattgcatgttatgaagttttttatgtactataatccagatttgttaaatttgccagtttactagaataagctgtgaagccttgaagtttggcttagcattctgaaaatcctttttattgtttgccaggaaagcactgtaggaaggaggtgttatctcttcatttaatatttaatgagtagtatagatgatgagataggatataatgtagaaataccgtagaatcttctttattgatatgaaagtaccattgtctaggaacagcataatttcttatcttttgcatgaatggggaaaaagaggaggggaaatttattagactctttcatttcattagagatatcttccctcacattcattcttcatttcattattcttaagtagaaactttggaagagagatgcaagtatttgaattaattagtaagaacaaaatgaaaattacatcgtatagactatcatgaggaaaatatcaatttgggttggttattgtgtttgtattttttaacaaggaggttatatagagtagtagaaagaaaaaaggacccagaggggaagagtgttaatatttattgtctgttaagtgtcagatcctgtataaggggcttttcatgttgtcccactcaccaagtatgctttatgaggtaggtattattaatcccctgtcctctccctgccaaatagaagctaagggaaatgaaataacttgtctaggctcatacttctagtaagtggaattc

SEQ ID NO: 198278 - DNA, 1000 bp, Homo Sapiens
ttctattagtaatattagcgtatcctttttccttagttagcctagctggaagcacatcaattttattaatctcttcaaagaaccagcttttggttttgttgattttctctatgatttcttattttccatttcactggctgttttgtttgttttgagatggagtcttgctctgtcacccaggctggagtgcagtggcacaatctcggctcactgcagcctccgcctcccgggttcaagcgattctcctgcctcagcctcccaattagctgggactacaggcgcctgacaccatgcctggttaattttttgaattttttgtatttttagtagagacggggtttcaccgtgttagccaggatggtctcaatctcctgacctcgtgatccacccacctctgcctcccaaagtgctgggattacaggcgcgagccaccacgcccagcctctgctctaatttttattgtttcctttcttctgcttactttgtatttaatttgctctactttttgtagtttcctaaggcagaaactttggttttagatctttactcttttctatgtattccacgctataaatttccctctaggcattccatttgttgcatcccgcatattttgttaagttgttttcattttcatttagttcaaaacatttttagatttctcttgatacatcagtgtagtgtggcaaaaaaagatgaaaataaaaatttttttaatagatttcttgagaatctttgacccatgtgttgtttaatcttcaagtatttggggattttccagctgttactgatttctactttaattatattgtggtctgagaacagatactgtctgatttctattcttttaaatttgttaaggtgttttatggcccaaaatgttgtctcttgtggtgagtgttccatgtaggcttgagaagaatgtgtattgtgctgttgttggatgaagtagtctatagatgtcaattatatcaagttgtttgacagcactgttgaattc

SEQ ID NO: 198279 - DNA, 1000 bp, Homo Sapiens
aaagccaactgggattttgataagaattgtgttcaatctgtagattaattggcaagtattatcattttaagaatattaagttttctcatccatgaatgtgggttgtcttttcattttttagatattctttaatttttttcaaagatgtttatagtttgtgattcacaagccttagacttctaatgttaaatttattccgaagtattttattctttccatgctattataaatggaattgtttccttgatatcattttcagaatgttcattactagtttgtagaaatacaattgatttttatatattgatcaactatcctgcaaccttactgaacttgttctttagctcttatagttttttaattacttccttaagattttctaagtaaaaatgataacgttatctacaaatagcgataatcatacttctttctttccagcctggatgccttttctttctgtttcttatttagtgaacctgtatgaaatctctaataaaatgttgaataaaagtggtatgagcaaacattcttgttccttagtttaaggagaaaacagttaatgttttgccattaagtattatagttgtagatttttcatagatggtctttactaggttgaggaagtttccttctattgctagtttgtttaatgttttgatggttttaaagcagggtgttggattttgtcagatgcttttcagcatctatagagatattgtatgatttttccctttattaatatggtatggtatgttatttgatatttatatggtaaatcaactttgcattcctgggataaatcctacttggttatagagtgtaattcttcttgccattttatgtactctaaaatgatctaaatattccaaaattatttaggctttttaaaatgaaaaagaatataaattaataaataaaagttgcacaagtcacctggtcttagattacctctaagtctgtagctctggtatgttagaccagtatttcagaagtggaattc

SEQ ID NO: 198280 - DNA, 1000 bp, Homo Sapiens
cttggccccagagcaaaactccatctcaaaaacaaaaacaaacaaacaaacaaaaaaccttagaagtggaaatgacaggcacttttaagttctttgagatatattactaaattaccctatataaatgtaccaagtactttcataccagaactctgtgcttttcttcctctaacactgaagtatctttgcttatataattggtgaaagtagtaccttaactgctttaaatttaatttcaatgactagattgaaatgttttcatgtttttgggccatgctttctgtgaatgtacattcatgacttttttatactcttatattgtcgggatgtttatcttttttttttgagacaaggttttgctctactgcccaggctggagtgtagtggtgcaatctcagctcattgcaacctctacctcctaggttcaagcaatcctcccacctcagcctccctagtagctggaactacaggcatgtgccaccacacaccacacccagctaatttttgtatattttgtagagacggggtttcaccatgttgcataggctggtctcaaactcctgagctcaagtgatacgcctgcttcagcctcccaaagtgctgggattacaagtataaagataaacagcacccaactgggaggtttatcttattgatcccgaaatactttcaatttgtctcaatcctttcatgaggtaatgcactttttgtctacatagacgctcaggccacatgtggacttttatttgaagtgaataagcagaaattacatagaattacaataaaagatcattattcctgtgattttaactggccagtctcaccaattattttcatgaccgccacagggagtcgggcatggggatatagatcctgcagtatcccccaaaaatattcccatcgtggcctgcaattcctgagactgagagaggagtgatataagatgagctagaattacatggaaagagcaaaggagaatggttatattagaaaaagaatt

SEQ ID NO: 198281 - DNA, 1000 bp, Homo Sapiens
atctctgaagaacagctgggcctgcgtgtgtcattctcaggcatctggcgcagggcttctcctccaggaaggtggctgctcagctccgggcactgccaggggccacggaccccgcatcctttccaggctgttccgcagcatctgccctcatactcacagccaccgctgcgtgtgtcccagggattctcagaatagaattctgtgcctctctcgcctctggaagtgaccgcgctctgtaggaaaatatcacagcacgccggcctcgaaaggccacgacgtggccctaaactgttctaagtatgtcagttacttagaacaatcagaaaggggcagaacaagctggggtgtggagtcaggggtcagggcacagacagcatctcttgtcttgcagagagaatgctagcaatttgcaagttacttgaaaaggtttgtgattttccaacgccctgagtaattctagccaaaatgcgtgactcgcctcacactagatgcttgctgtaattgtgtctctgtattaaactgaccgttctttggagcttcagaatggaccaggaggaaaaggtaaataccaacctcgctacaacctcagaggcatcaacgccctcctgctacagacgcatctgttctcgcctggctcctgccggctgccctgggagaggccacaaaatgccctccacggagacaaggcctgagaaccttcgggacgcccgctgccgctcactgtgttgaagaactgcccgttccgcaccccgggccctagacacacggctctgcagaggacgaggaagtgccgtcaggtgagacttcaccatgaaatatcttctgagacacaacaatctccctgaattaaaactacagactctaatttataaaaactgtgtgtttcaaaagctccaagtgtttacattctccgattcatcattccttcttctaatttattttaggaaataatgcaaagtactcacaaaaatttatatagaaagatgttcattgcagaatt

SEQ ID NO: 198282 - DNA, 1000 bp, Homo Sapiens
cccaagtagctggaactacaggcgcgccccaccgtgcctggctgattttttttttttttaatttttcatagagtcacatctcatttgttgcccaggctggtcttgaactcctgggctcaagtaatcctcccacctcggactcctagagtgtcaaaattacaggcatgagccaccacacccagccaaaacctagacccttgaaaaataaaaattaatttggccttcaagtttatctgggcccaaagaggattttataggtaatagaaagatataaaggattgcccagggaggattacatagctaattactgtataattacagatagaaacttcagtttgtcatccagttttgggcagatattgaagtcaatttgagagactctggaattaggcctcctaagatcagaagtgcatctggctcttgatcttaaaaaacactaataatcacagagattcacagttctccagccctgggcaacattgtgaaaccctgtctctacaaaaaatacaaaaattagcaggctgtggtggctcacacctgcagtcctggctgcttgggaggctgaggtgggaggattgcttgagtccaggagttggaggtttcactgagccaagaccgtgccactgcactccagcttaagcaacaggtgaaaccctgtctccaaaaagaaacaacaacaaaaacttttataatgatagtttgaattgaaaatagtatatgaaatttcaaataacatcataaaataatctataacttctagttatgtgatatttggtaaagtttgccaaattgttagaactttttaagatcttagtataaattataaaataccatgtacaatattaggggtgaactttaatcagattttcttgtataggtttatttgaaagctaaaacaaaacttaagttagaagaaaccattaaacatctgaacagtttttttgaaatcaggcatttagttctgcagtgggggacatgctcactgccaggatatggaggt

SEQ ID NO: 198283 - DNA, 1000 bp, Homo Sapiens
gccacctaagttttttattttttatagagacagggttcaccctatgttgcccagtctggtctcgaactctgggctcaagtaacccgcccacctcagcttcccaaagtgcaaggattagaggtatgagctgctatgcttggcccataatttttgattcttgtgactgtatgcccacattttttttcttatgatttctctgtagatctgtccttataaaaatttttattttctaaacttgttaattcttctggacatatcctaaactacacatttagagccacccaagtagccatccatccacttatgaaataatatgagtattaagaaatctagaaattaaatttaaaaaataaaatatgactttttgtttgtttactattaaaaaacaggtctcaacaatcaataagtaaatgattctaagagaaaatgttaaaatataatttttttttccctaataccagataagaatatttttattttcctttgggccatccctcaatcacagtatattcagagtagttttcaaattttgtaggattgtttttatctttctgtggctttgacaagtatcaagtatgggtagatttagttgaaaaggtaagtaggccacagagcatcagaacaatttctttattttattttattatttttttttgagatggagtctccctttgtcacccaggctgtagtgcagtggtgtgatctcggctcactgcaccctctgccttccaggttccagcaattctcctgcccagccttctgagtagctgggattacagctgtgtgccaccatgcctggctaatttttgaatttttagtagagacagggttttaccatgttggccaggctggtcacaaactcctgccctcaagtgatccacccatctcggcctcccaaagtgctgggattacaggcatgagccaccacgccaggcgcagaacaatttctgaattcaaaacaaatagccctgaatagtaaattctctcttcactgaataga

SEQ ID NO: 198284 - DNA, 1000 bp, Homo Sapiens
tgttatttttgcatagaggctagtgcagacaaaactaggtggaaggttgcctttgtaattaagtcaccttagttgggcaaatgcaacttgatagatcttcttttctgatatacaaaagtgtgattatttgatttggccaagatctttaaggctgaattcttataagagaataaaaaatctcaggaacttcaaattgccactccactttaccgtactgctggtctacatagcaaagaacgaagggtatatttcctggtaggagagcgtagttccctccatgctacatgtatataaatctatagttttatatttcttggtatttggtgagaagaaaatgtagtttaacatgggattgggactgtggaaaattccagaggaaattgtcaagatttactcttactgatcaatgttatcttcaggactccttcttccctcctaaggtttttctctgcaaataataattctttcagcttcagccctaattactagggcccttaatctttttcatggttttatagtccttgaaacaaacatatgcgcttattattgaaggcagcttttgtttgccagaggcaaaaatacttacagatcgtcttctttaacacatcttttcacgtctgctagacagctcagttctctccttctaactcatccctcacccaactcctcccaaattttttattgaaaactgtccacacattgctaagctcttttgttttgtttctaagaacactgtgtagtcttcgtgtagaatggcaacttgatatagacataagatatataaacatttgttaaatatacttgaccaccaactaactaaagggtttctcgatataaactcttgcttacacggtacccaattaaccttttatcacttttcaaaacatgcatagctttatggcataagctcatttatctttgctaaaagccttcataggaatctgaacaaaaatagtttctgttaaaatattcaactgtaatgtggagccttttattacat

SEQ ID NO: 198285 - DNA, 1000 bp, Homo Sapiens
gaaaatcaaggatttgtaatggaaatgctgacagatccaactaactcaaacttgtaccaaccaagcattgctatcatattttataactgtttgagaagtttatagaaaggaatgatacatttgcttcatgggatccatttcctttgctaaaaactaccaaatgtccccagagtagactccttcactcttagaactttcttgatactcttttcttaagaatagaaatgttaaaattgctaacttctcctgaggcttgaaagcaactgttgcctcatcctgtattcttgttttacacttgatgaagaaaattcagacactgccatcggtgcttcagtgtttattagttatgcattcttgaaaacctgttcaacattttagcaaatttaccaaaattatcgtagagatgaatcttctttgtgagttttgaacaagtggaaacatttactctattctcaaaatgctggccagaaagtgaaagaaaacttaaatgcaaaaagttaccatcatcttaagggtggtgtaatctttgtacagatatgtaaatacaaatttccatttatacctttttttgaattcatactgcttttttgttaatccttaaatttcagttagttggccatagttcatgcatactcaaattgaatttcatcaaaaatcatggttaacaaccacaggaataattaggaaataattactcacagacataataaactacagtgttacttattcccctacaataacggagagttgacatttgaatttctgagaaggtttaaatatattttacatgctagaaaaatctgatgggtataattttctctaatattaacgagtgagacatgattgctcgagaaacaagagaaaagctggttggtcaaacatatgccttttgtttctacattttgcataaaggtcttcacttggtatgcgggttcctcagcagaaaggagaagttacagttaacaaattaatgaaaaccaagtgatgcctttgaagaatt

SEQ ID NO: 198286 - DNA, 1000 bp, Homo Sapiens
ataacctggtctgaaatcattggtctgttttatttttagttttaactttataagtgttcattgtgaatgtgctttccacagtcactgttagcgtctttccttcattgcgtaggactgcccacaaccaaactaaaaattcgagttataattaaagttctagtaggattcaaaatacctaatttttcgtcagtaagattcaagatgtttctggattctttaagatatttttgagtgattttactttttcctgagaagataaattttcttttctttttttcagtctcactctgttgcccaagctggagtgcagtggtgcgatctcagcttactgcaacctccacctgcctggttcaagcaattctccctgcgtcagcctcccaagtagctgggattacaggcacccaccaccacacctggctaatttttgtatttgtagtagaggcagggtttcgccatgttggccaggctggtctcaaactcctgacctcaggtgatctgcccgctttggcctcctatattgctgggattacaggtgtgagccaccatgcttaaccctgagaaaataaattttctgttcctactttctcatctgcaaaatattggcattggaggaggtaatctagaaggccccttccagctctaatggtctgtggatttatgatttaatgattaaatggcacaaataactcatttctgaattttctttgtagtaaaattttagtattcatgaaagaaattataagaccaaatctctctccataaatttttaaatggcatctctaaaatagctctatatttcactttttaggatcactgagactctatccagctcaaagatgtgtttatgtatttccacctgacattttacacacttaggagccaatcataaggccagttttaagtagatgccattagaaatgattgatggccagtttatgttttaaggtgaaagaggtacactttaatgatgctctacttttctgattgccacaataacaac

SEQ ID NO: 198287 - DNA, 1000 bp, Homo Sapiens
ggaagctgcgtcagtttctgagccgatgaaagagggttgttccatcctaaactgctaagccccttaattacgtgggtgagcttattcctgtatgttttagaggctgtatgtatttgggcctcaggcacagatcagcaaatcaggtgttatttggcctacactttcagctttttacttgaaatctttaatcctccctttagaagatgtgaaaataggcagaacagcccaagatcatgagaggactcagataaggagcactgtttcacctccatttgaacatttccttaaccatcataattcttcccacaactcatatacacactcaagaaatatatgtcatcccaactttaaggcattaaaggttaaaggcattaagaaatactgacgtccaatctcagagctgttggttgaattacctttgaaagagaactaattgaggcacagagccgaatgatggttaccagaggctgggaagggtaatgaggttgcagggtaggataaagtggggatggttaatgagtacaaaaatacaagtaggtagaaggaataagatctagtgtttggtagcacaatagggcaactatagttaacaataatttattgtatattttaaaatatctaaaagagtagaattggaatatactcaaaacaaagaaatgataaaagtttgaggtgatggataccccagttacccagatttgatcattacatattatatgcctgtatcaaaacatcacatgcaccccataagtatgtacaactattctgaactcataataattaaaaatttaaaaagttttaaaattcttagcataggattaaattagtattatgataataatacttaaacatgtaaacataattgttatgaaattcttatagatttctagagccgtaaaaataaaataatatattattttacacattttataaatcaaacacaaataaaagtaaaaaatataaaagaatcaagaataaataattaaaataaaagagggcg

SEQ ID NO: 198288 - DNA, 1000 bp, Homo Sapiens
gtgtgaagttggaattgattttgaatttttctatggaaaatcaattttattagtatctttctccattcatctgcaatgccatttctgttctatgtcaaatttccttgcatgcatgaatctatgtctataagtccgttctatgagtctgtctatccctgtatgaataccatactgtattaattggctaactttatataattcttgaaatctgcattacaacacccactacccttgtttttctttagtagtatcttcttctcagccttttacttgttcatgaaaattttacagtgaaatagtcaatttccactaaaacaaaaactgttaggatttggattaagtttccatggaatccatagattaattgagaagaattaatatctttataatattgatgactcctatacatgatatgtttctccacttactttgttatattcttcttaaaatatgaactattttacaatataactatctttatttaatatattgtgatagttttaaaatttttccctaaatgtctttcaaatcttttttaaatttctgagaatctttagattttcgttgctattgtgcatctgtagtagtcagcctccaaaatagctcccagtgatccttgcctcctggtattcacactggtaagtctcctctcacactgaatagggctgacctgtgtaaccatggaaatgacagagtgtgactgctaagtctaagccataaaagaaactgtggtttctgctttgttctctcttggatcccttgctctgggggaagccagctgccacattataaggacacttgagctaccctacaaagaagtccatgaggggaggaactgaggcctcccacaaatagccaggattaatttgccagccaggtagatgatccatcttagaggctgatcttctggtctcagtcaagccatcagatgactgcagcctcggctgacatcctgtaagagaccctgaaccagacaagccaactaagccattcctgaatt

SEQ ID NO: 198289 - DNA, 1000 bp, Homo Sapiens
tctctgagcacctagcaattttctattttataggattatatacaataatgtattgagatgtctagcatttagcaaattctgaattaaaattgaatttgaatgcatgagtgaatgaatgaagtagaataagagtttcaatattaaaatatcactcaatagtttgagatacatacatgccaaaagtcatgctacaaaacgagcctaacactcagagtataacaataggtgactacggggaaaatccaacagcaaaaggaaatgtatgccactcaaatgtcatctcatacttcccacatagaatgaaaacttttgcttaactcatggatggccttcagagcatctacaaacctcctaaacttgttgatagcattttctggagttctgcattttccaactatttcataaattcatctgagtttctgaaaattccataatcctcacatctgccccaaacacaggatcatgtgtatgcacgtgtgcacgcacatacacacacgtatattaagaactactactttaggccaggcacggtggctcacacctgtaatcccagcactttggtaggccgaggcgggtggactcctgaggtcaggagtttgagagcagcctgaccaacatggtgaaaccccatctctacttaaaaaaaaaaaaaaaaattagctgggcgtgggggtgtgcacctgtagtcccagctacttgggaggctgagacaggagaattgcttgaacctgggaggcggaggctgcagtaaaccaagatcgtgccactgcactccagcctgggtgacagagcgagactccgtctcaaaaaaaaaaaaaaaaaaaaaaaaaagatttgctactttaggcaggtccctggacagaaagggactgtcaaataaaagagaaaaagtagatttaataaaacaaggctgaaagctgcaaacatactgtttggaaagtatgggtagtggaacttataatgatgaccatctcaaaccagaaaaaggggctctgaattc

SEQ ID NO: 198290 - DNA, 1000 bp, Homo Sapiens
ggtattaatttatgtcttctctctatgcagtatttaatatttttgttactgtatatctcagtttttaattctgatggctgcatcaagtgatatttccagtctgggctctggtttgaaacctgaggtggagaaagcctttttaaaaccagttaatatagtattcacagagttcctctgtaggtaatgaaggaacacagaatacataaagtccctgccaaggacagaatcccccaccccatctaatggaagagatacaggcttttccctaaaagtccctgccaaggacagaattccccacccgatctaatggaagagatacaggcctttccctaagaagtcactgctataattgggcaggcagagaaaatcacaaaggctgcctgcaagcaagccatccagaggttaagcaactaacagtaaccactgcctttcttactgaactcctaatatgagcctggcattttacatgtactctctcctgtcattcccacaacaattcttcaaggtaagtatcattatcctcattttgcagatgaggaaaacgtcactccaagaggttgaataatttacccagggtcacacaaccagaaagtggcagagatgagatttgaacccaggtgtttctgatatccattatgcacactgccttccactggccaagtccactaaagaaaacaattggatgattcaggcaaaaacacacaaagcaacattttggcccaaataatataaattctatcagttccctcttctcataagctgaataaaacacacttgaatttaaaaaccaagaaaattctgtgttccatgtattgtctgttaatcactcactgtcttctgtgccaagcagagcatggcatgagtcaggaatttagaggaggctgtttattctgtcttagccatacgaatagcaattcaagcacatccctgcctccatggttttctaatccatcagacaaaaaacattggaaacatgcagtcgactgaagatgcatttgaa

SEQ ID NO: 198291 - DNA, 1000 bp, Homo Sapiens
ttcttcatggactttaagtctggtggggagaacatgaggactaatttcagaggctgggtcagatccaggaatattccagaaatgccatcactaagacatggaaaatcctgaatgtggaaaatgagaatggcttgcctcactgattgtgagatacagcggaaatccagttgcttcaaagtatcctgccatgtaaaaacgattttaaaagaatctttttggattgtatatacctttacagctttaaaagcactttcacggccaggcacggtggctcaagcctgtaatcccagcactttaggatgccaaggcgggaggatcacctgaggtcaggagttcgggaccagcctggcaaacatggtgaaatcctgtctctactaaaactacaaaaattagccgggtgtggtggcgggtgcctataatcccagctactccggaggctgaggcaggaaaatcgcttgaacctgggaggcggaggttgcagtgagccaaaatcgtgccattgcactccagccagggcgacagtgtgaaactccagctcaaaaaaaaaaaaaaaaaagctctttcacataaagcctctcatttgcctttaggtgttacacaaattgtaattattaaataattacctgttgttatattatttgactgtataatcattggtgaaaactaggcagaaaaagagctgttttgcagcactggaaaggcatctcagcatacaagggcagtgaaacagaaaaggtgggtttgggaggactgcatcagtgcagagagaacagtgtgtttagctgtctttatgcctcatttctaagagaatccatccagaaagagtaagagcaaaactcctaaaatgtacctggatctctcatttaacagatcgcagtttgatgatgccatgtccctgtagcaaactcctttaaacattgttgtttcctcaccaagactgtatgtcatgtttagagtcttgaaaaaggttgtggagcatttacacggtggtgcttgaatt

SEQ ID NO: 198292 - DNA, 1000 bp, Homo Sapiens
atagttaatgtatatgccaattcgactgggccctgaggtgctcatatcgaacatcatttctgagtgtatctttcaggatatttgctgatgagattagcatttgaattggtggactcaatgaagtgtaatatttccccttccccaaagcgtgtgggcaccaaccaatccattgagggcccaaatagaacaaaaggcagagaaatgagaattctccaccttgtttatttttttctgcctcattgcttgacctcagacttctcatcttatcctgccatgagattgggatttgtattatcagcccccactggttctcaggcctttgagctcagactgaattacaccactggcgttcctgggtcttcagatggtggggggcacatcgtgggaagtctcatctccataaccgtgtgagccaggtcctcgtcgccacagcagaaaacccaaaaccttccgtctccctgtgcatctgtcagaggacgcctgatatgactaataaaaggaagagactggccactcaatgccagaagatgagaagagacaatgggaaattctacctgacactcgtcaatggcaaaccgtccaggcctcactggtgaaatatgggcattgtcagtggataggacacagggagtcatgcccacttcaggaaggctatgagcggcttctgtgctactgacctttctgggggaaacagccatcactgcaggccaagatgcacttcgctagacttgactggggctgctagctcctcccttctcctcaggctcctgcaggctacaggccatttccacacctgcaaagaggtgtcatcatcagtcaggagaggaggtggtcagacagcagtgggaccacaggggaacacagagctgtcagcccagggacaagggattgaccgatgggccaggcctctgcagtgacaaatgtcacagctgggctgtttctttctgaattaaggtgcccccatttgtctgactgattcaccaggggaaaatacaataga

SEQ ID NO: 198293 - DNA, 1000 bp, Homo Sapiens
gctcctaagcaatacaatatgttactgtattgatactgtaagcagtggtaaatatttgtctatctaaacatatgtaaacgtagaaaaggtacagtaaaaatatggcataaaagataaaaaatggtacacccatatagggtacttaacttgaatggagtttgtgggactggaagttgctctgggcaagtcagtgagtgagtggtcagtgaacatgaaggccaggggcattagtgtacactactatggactttataaacactgtacacttaggctatgctaaaaatatttttcttgttttaataatcaattaaccttagcttactgtaactttttaaatttataaacttttaattttatataactttttgactcacaatatcacttagcttaaaacatacgttggccagaacaagcctataatcccaacattttggggggctgaggtgggatgatcccttgagcccaggagttcaagaccagcctgagcaacatagtgagacctcgtctctacaaaaagtaaaaaaattagctgagtgcggtggtgcatgcctgtagtcccaggtacttgggagcctgagttgggaggatcccttgagcttgggaggcagaggttgcagtgagccaagattgtgccactgccctccagtctgggtgacagaatgagaccctgtttcaaaacaaaaaccaaaaaacacattcacacacattatacagctgtacgaaaatattttttctttatatccttgctctaaaagctttcctctaatttttttttttttaacttttaaagacacaaacccatacattagccccagccatgtaggggctattgatcaggatcatcaatatcactgtcttcacttccacatcttgtctcactggaaggtgttcaggggcaataacacacatggagctgtcatatcctacagtaacagtgccttctggaactcctcctgaagggcatgcctgaggctgttttacagttaactttctaaagtag

SEQ ID NO: 198294 - DNA, 1000 bp, Homo Sapiens
aagaaagaggaaagcttgattagtgttaatattcataagataaaaaacaaaacaagtttaggaaaaacattgcatttccctgcctaagagaaatttagtcctaaaaggatactttggaacttaacattgtttgataaaaatctctataataaatgcaataaggaattttaagtttgtttatattagacaatgctctgtgaatattattttgtataacaaagatattaataagaattggatagtgtttaaggtcatgttctctggcaagaacctgatcagaaataattaattttgtcagttaagagcagatgcatgcattttgataagcaagtgataaggggaggtgagtaaaattgaaattctcattagaatgaagggggcttatcaggaaatgtgtttcaataaaaatcgctatgtagtgagcagaggggaaatgtctagacagtaccaattttcttttattacaaactcgcataatacatgggtgataataggctcaaaggtctgtgcccaagaatgtggctgggaggaatctcaaagcaggtttcaccggtcatctatcatggccttaaaaataagtcatttattatacagtggctgagattgtgggctctaggatcagactgccttagttcaacttttggcctcatcacttagtaatcatataaccttgggtaagtatttaacctctcttacgattccatttcctcatttgtaaaatggagataataatacccacctcagggctgatagtctttgatgaatgtttggtatctgaataaatgtttaataacatctattatttctagtaaattctcccataaacattatgtaagtcatttgccaaattacctaactactcctactcctgttccctctctaaaacgtgaagactgttggcagtgttagtatgctgaatgcttgtggttagtggtcttgtatacttctctcaccattcgagttgtatgcccttcaagagttagttgtgttcccaaacttg

SEQ ID NO: 198295 - DNA, 1000 bp, Homo Sapiens
tggaggctatcatccttagcaaactaatgcaggaacagacaaccaaatactgcatgttctcacttataagtgggagctaaatgataagaacttatgaacacaaggaaacaacagacaccagagtctacttgtggagggggagggtggaaggagagagaggggcagaaaggataactattgggtactgagcttaatacctgggtaatgtaataatatgtacaacaaacccccgtgacacgtgtttgtctatgtgacaaatcttcccatgcttcacatgtacccccaaacctaaaatttaaaaaaaagacacaaaaaccaaagttgagctgggcatgctggcacatgcctgtagtcccagctattcaagaggaacgcttgagctcaggagttcaaggtcagcctgggcaacacagtgagtcccagtctgtaataataataattagtaattattattataattaataaaatagtaattataattaaaaaattattattattattaagaagaacaaaatagatggagaagaccagactgaccgtttaccagggatgaagcattcttgcttctgtccaaccagggccaactcagctataaaaagccagaaacaccataatgcagtcaaccactgactactctcattcatcataaatactattcatcatctgcttatggccagacactgttccaggtatcaggaatacagtgttcaacaagacagataaggtctctgtcctcatgcaacttaaattctacagagaaagataaagagcaaataagtaaggaagtaacacgacatacagtgttgagagtagtacctgctatgaagacaaaaaaaaaaaaaaaaaaaaagcaagacgaagaggagacacaaaggggggaagcagctagagggataagttggtaagacaggaaggtcacagaggtctctcaggggtggtggcatctgtgcagaggcgtgaaacaagtgagggcatgagtcctgcaagagagaattccgcg

SEQ ID NO: 198296 - DNA, 1000 bp, Homo Sapiens
gcacaatctcccttggttttatgatttagatttgtagagcacagaagtcagtggactggggtggtaatgaagtcattgaggcagccaaggtctccagatgggtcaaagggaactttctgtttctggccatcaatccacctgggcatgccacagaactttgctggcagggaggtaggacaaatttcaattccaataaattggaaggtcaggaaatggtagatagagggtttgggtttatcataaacattccctttcctttacttcttttcctcttgcttttaaaatttaatataaaaagatagaagtattttgttcgaaacaaagtttttgaacaaaaagttcaaaaaccaagatcttttcctgagataaacttctgcttccctcctagagcaaggaaacacatcacaaatgtgaaagtgctggcagatccatgggtcctgtatgtgtttactcatagagtggtgggggcaggggccagtggattgggctcacttagggggttgttatttcttttccatttgtcacttttgaccccagaggtaattttacagaaatctttgccagagttctataatcccctaaatattaacttggccttaactcaacacaccacattacaagaggttcagataatttctagtctgaacagtttctggtctctgttgccaaagcaaagtttttaaaagtacatctagggattcccagggggaggcctaattacctccctcttgtgtgaacggggacttcccttagaaacaaattggcccttgggctgctcgctgctctcactaagcggggagatgagactataaagctggcagggggtggaaagattggcagcctctcttcctggctccttaaatcaaagaaaaataatattagttaatgtttgatgatcttggcctacaattccatgtccaggatatgtactcctgcagagttaagcttgttaaaggagaagtaggagaatgcaatggactaaatccacattggagtcctg

SEQ ID NO: 198297 - DNA, 1000 bp, Homo Sapiens
tcatttgaacacatgccatgaagacatggccgaagcagttctaacttgcctcatacgcttgtcctgtatctctcactctacctgtatctctgtctctcttctggccatctctcaccgtctcattcttcatctgttttttttgagcctacctgcttccatcttttatttttccttgtttttgatctttttctttctttcctcatttcaggttgctcacatgagctgactggaaagtgtatttcaagtgtacattttatcatttctgacatttttcctataaaaattttctttccctgctaacagatttaaaaccagagtgtaaaattcttaaaatttgcttgatttaaaagcatttcaattccatgtaaatcttgatttgtagtttaagttgaaaaaagattacttacttcaggttattaatttctcaaagaatacatgcttgcatatggtaggtgtccaataaatgattgttggatgaatgttaagtgtgtgtgtgtgtgtgtgtgtgtgtgtacactgaattcttaagagggaacttaataggtgttcttgcagtacctcccagacacagctaggcattcattaagacataaaactccaacaactccaaagggtgctgcttatctgtttttgttcatccgggtatcagaatcttgatagcaatggtcaggtagaatccacctggaagaatttctatgcatagctacctagaggagttgtttgatcagagatcatatgaacactcaaaagcatgtgttgagaactacatatacttcatcttacatgctgctgttcaatgaactccgaaatagtgcttctctaattatatgtgcatgtgattcccctggggatcttgttaaaatgcaagttcatattcagtatgtctgaggcaaagcttgagatgctgcatttccaacaagctcccaggtgataatgtggctggtccatgaatcacactttgagcagtttgagagtttaaaggtaatgggggtttgtaaca

SEQ ID NO: 198298 - DNA, 1000 bp, Homo Sapiens
atttgacttcttcttttcgtaattgaatgccctttatttccttctcctgcttgattgccctggccagaacttccacactatgttgaataggagtggtgagagagggcatccctgtcttgtgccagttttcaaagggaatgcttccagtttttgcccattcagtatgatattggctgtgggtttgtcatagctagctcttattattttgagatacatcacatcaatacctaatttattgagagtttttagcatgaagcattgttgaattttgtcaaaggctttttctgcatccattgagataatcatgtggtttttgtctttggttctgtttatatgctggattacgtttattgattttcgtatgttgaaccagccttgcatcccagggaggaagcccactagatcatggtggataaactttttgatgtgctgctgtatttggtttgccagtattttattgaggatttttgcatcaatgttcatcaaggatattggtctaaaattctcttttttggttgtgtctctgccaggctttggtatcaggatgattctggccacataaaatgagttagggaggattccctctttttctattgattggaatagtttcagaaggaatggtaccagctcctccttgtacctctggtagaattcggctgtgaatccatctgttcctggactttttttggttggtaagctattgattatttcctcaatttcagtgcctgttattggtatattcagagattcaacttcttcctggtttagtcttgggaggatgtatgtgtcaaggaatttatccatttcttctagattttgtagtttatttgcatagaggtgtttatagtattctctgatggtagtttgtatttctgtgggatcggtggtgatatcccctttatcattttttattgcgtctatttgattcttctctcttttcttctttattagtcttgctgtctatcaattttgttgatcttttcaaaaaaccagctcctga

SEQ ID NO: 198299 - DNA, 1000 bp, Homo Sapiens
ccatacatatatatgtatatacatacaaagtcacatatatacacagactaagactactaaactgtgccttcttagtgcttagatcacttcctttattagagtcaaggaggcatgaatagactaacatataggttataattttcatgaactcaagaactgatatggcaaaatagcaaggctatattatgagatttagaatccagactttaggttaggtgtaggtttggagtcctatgacttgagtaagggtctaactttggccttaggattaggaatagattgggtggactaagtttgatcctaaatgtcttcatctagaaaaggaaaataaaatgacacctatataccatgattttgtgaaatgagttttacaaatattataaagttttataaaaataatctcattaattaaaaaatattttatataaagatagccatctttttcacatatttaatctctctcatacacatgggataaaagagtaaactaacaaaaaatacaaaaacacaaaaacaaataggtctttactctcatgaattttagattttaaattaacagcattgtttcaagcaggtgaatgattaaagtctaattcccaaatcaatacaaaataaactatattaatacaagtcttaaaaggcatttaccaagtttcattatccatggatcgatcagctttccaatgaaggaaaaagttgcacctgcatttaggtttttgtatgtttataactgagttataaaaataattccctaggtaattccacagaaactacttaaaacaagaaaaactaagcaagaacttctagaaaccttttgcttcagaagtagagaaggggcagattctacaaacagccaaaatgtgggttctgacatgaaggtggatctacaggtagggccagctggccaactgcctgctccaaaatgtccttctccacatcactttattttgacataccacttactttgtttactaattaagtgagccagaaagaggaattc

SEQ ID NO: 198300 - DNA, 1000 bp, Homo Sapiens
tatatttttggtttaatgactgaattgaaaaggaaagaggagtgagcaacagagaagtgtaaagaggagcaaagacatgtactcaacccctacctctgtgttccctactgcttcgcatgtatgaaagtgcacccctcctttctctccctgcagaaacctcttctcccccaatcttctccatcttggttcgtgactcctacatcctttcggtggctcaggcaataaaccttacagtcattcttgactcctttctttctctttcacctaatatcagtcagcagcatattcaaaatacatccacagtgcaaccatttctcaacacccgacagttgccattctggtccagccctatcatctcttgctgcgcaactctggccaccaggagaagctcttcaaagacctccaacggcagaaatgtaattgaccaagggcccaattgctatgcccccaaatctactcccagcccttccacaggctgcaccctgccagtacctgagtgcatccaggaaactaaggcaggccccttcctgggagatatggaaggtcccaacagccatgatgggtgttccttcaagtgcatggttatccaggtgcttccattcaagtctctgtccctcaccctgtcactcggggtcacacttgcatctcagtctctcagtctgatggctctcccagcctccctgcagctgcctccctagttatcctcacaggagcatttcccctaataaaacccttgcatgaataatcccgttaatcccaccttggggtctgcttctccaaggatctggacaaatacaactccttctctcactccccctctcccccacttctatgtttgcctccctgtagacaaaggccagtgagaccctgtgaaagcctaaatctggtggtgtccctaagccttatcacctgcttctctgtttatggtctggcttctccactagaacataagccccctgagggcaggcacttggccctgtccagtgcccagattcatgcc

SEQ ID NO: 198301 - DNA, 1000 bp, Homo Sapiens
atcttgaactcctggagtcaagcagtccttctaccttggcctcccaaagtgctgagattataggtgtgagccaccgtgcccagcccaaattattttttttaacgataattctttaatatctcataactgtcccataaagtccatatttttctgctttttaactgagatcaagttacatttataaattaacttagaactgacatcttgacagttgagttttcccattgaaggatacagtatatggtacatctatttttccatttattttactgaagtcttctttttttttttttctccagacagggtcgcccaggctggagcgtagtggctcgaacacagctcacttgaagcttcaacctcccgggctcaagtgatcctcccacctgtctcctgagtagctgcaactacaggcatgtgccaagacgtctggctaatttttaaattttttgtagggatggggtcttgctgtgttgcccagactggtctcaaactcctgggctcaagtgatcccccaacccttggcctcccaaagtgctaagattacagttgtgagccactgtgcctggccttaagtcttcttttagtcattcactgctgtttgggatttttttcacatagatattttactttcttcttttatttgatgtttattatctaaagataataatggattttgtaagttataccctgttgtttttatgaatgatattgatttatatatgggaattttgcatccacgaacttacaacagtttttccttgtttctaattcttttaaaatagactctattgcatttcaaggaattcatcaaattatctgcaaatggtcatggtcagaactcctcactaatttttacctccaatttaaaaattactggtttcctatctaattgcgctgaccagtgcctccagatcagcactaaatgatagtagtgatagtggacatccatgcctggtgtaaataaatgagtccgtgaaggcaaagatgctattatgggaaa

SEQ ID NO: 198302 - DNA, 1000 bp, Homo Sapiens
aaagaacctcaaccatatacaaaagttaactcaaaatgtgccatggactttaatgtgaaacataaaactacagaacttttaaaagaaaccaacacacgagaaaattttcaggatccaagtctaggcagaattcttagtctcgacagcaaaagcatgacccataaaagaaaaaacttatcaatctgacttcatcaaaattaaaaacattttctacgcaaaagaccctgttaaaagaatggaaatagagtctacagagtgagaatatatttgtacgccaaatgttcaacaaatgcctagtatctaaaatatataaagaactcttaaaattcaacagtgaaaaacgatccagttagaaaatggataaaagacataaacgtttcactgaagaggatatagagatgacaaacaagcacatgaaaaaacaatgttcaacattaggggaatgcaaattaaaaccaaaataaggtatcaccacatacatctcagaatggccaaaatgaaagataatggtaacaccaaataatgatgaggatgtgaaactggatcacattcacacatttctggtgacaacgtaaaatagtataacacttcaaaaaaggtttcttaaaccaggggtccccaacccccaggccaacaactgttaccagtccatgacctgttaggaaccaggctgcacagcaggaggggagcagtggacgaaggagcattcccgcctgagctcctccgggcaaatcagcagcagcattagattctcataggagcacaaaccctactgtgaactgcacaggtgagggatctagactgcgtgcttcttgtgaaaacctaatgcctgatgacgtgaggtggaacagtttcatcccaaaaccatccacaccacctcccacccttggtccatggaaaaactgtctttgaagaaaccggtccctggtgccaaaaaggttgggggccgctgtcttaaacaacaaacatacaattaacatacaagccaacaactgaattc

SEQ ID NO: 198303 - DNA, 1000 bp, Homo Sapiens
ctagacagtaagcttttggacggcagagatgatgtctcattcatctttgcatctttagcgcccagcctggtttctggtttcctatagtcactcagtgttgagctaaaccatatttttggagcaatgacttgacaatgcagtatcatgatggaactatcacagatggacagaatgagtctcttgattcctacatttatttttctattgatatagctgatttaaaaagaaacctgttaattatataatcatgtaattaccctgacataacatcaaactccataaattactttccatctctgcctctctctctttctatatatataacatatacatgttacaaaaatgcacagggaataaatatgagcaaaatggtaagaagtgcaggtcctaggtcagatttcttgcatttagttgcaggctacaccaactttagagaaaagatttagtgaaaaataaaaatgaatcattaatacaccacttggcacagataagttattcagtaaacattaacatatttgcatttatgtttaaccatgggcttaagtgattatccagaaatctccctctctttgactatgtttgaatattagatacttcttaatttatctttgctctgaatttgttttttttcactcgttgtatactcatggaccattttatgtgtttcaggaattgatattttatttaaaaactgttactatagaaaattaacttttggatagtcctgttcagactaaaactatcatttgtaagatctgtattactgcaatcattggtgttaatactttgcattaattaaaattttttatggacatataataagtatttctcccaccttgatttttgtggctatcattttattcattccattgcttttttctcccagtttgctatgaggaagttgataagtacgtaggcaaaacgatagattgttttggcagcttcagtgtatttaagtgcctgtgatgaggctatggtttatttttctaatgtagaattc

SEQ ID NO: 198304 - DNA, 1000 bp, Homo Sapiens
cttcaaagagacttagactcccacacaatagtagtgggagactttaacaactcactgacaatattagacagatcattgcaacagaaaattaacaaagatattcaggatctgaaatcaacactgaatcaaatggatctgaaagacatctacaggactcttcatgctctaaaatcaatcacataatcagaagtaaaacactctccagcaaatacaaaagaaatgtaatcataacaatttcttggaccacagcacaatcaaattagaaatcaagactaagaaattcactgaaaaccatataagtacatggaaatttaataactttctcctgaatgacttttaggtaaataatgaaactaaggaagaaatcaagaagttctttacaactaatgagaacaaagatacaacatactaaaatctctgggacgtagctgacgcactattaagagggaaattcacagcacttaatgcccacatcaaaaagttagaaagatagcaagttaacaacataacatcacaactaaaagaactagagaacccagagcaaacaaatcccaaagctagcagaacacaagaaataatcaaaatcagagctgaactgaaggagattgggaaatgaaaaacaattcaaaagatcaactaatctaggagctgttttttttgaaaaaattaataagatagaccactggctagacaaagaagaaaagagagaagatccaaataaacacaatcagaaatgacaagagggatattaccactgaccccacagaagtacaaacaaacattagagaatatcatcaacacctctaggcatataaactgaaaaatctagaataaattgataaattcctggaccatacatccaggaaggatacatccaagactggaccaggaagaaactgaatccctaaaaaggccaaaaatgagctctgaaattgaaccagtaataagtagcctacaaaccaaaataagtcctggaccagaaaaattcacagttgaattc

SEQ ID NO: 198305 - DNA, 1000 bp, Homo Sapiens
accctattgtgtggcaagcactatgcttagaacctcatatgaagttaatactctcaccaaccctttgggtaagcaatattgtccccactttaaagatgacaaaactgaggttaagaggagcaacttgctggctgggcacggtggctcacgtctgtaatcccagcattttgggaggtcaaggcaggcggatcatctggaggtcaggagttcgagaccagcctggccaacgtgctgaaaccccatctctaccaaaaaaatacaaaaattagctgggtgtggtgttgggcacctgtaatcctagctacttgggaggctgaagcaggagaatcgctcaaacctgggaggcagaggtggcagcgagtggagatcacaccactgcattccagcctgagcaacagagtgagactctgtctcaaaaaaataaaaaaaaaaaaaaagagaggcaacttgtcatttaataatcacacatttagtaagtgggggagtggggatttgaaccccaccctctccaaaacattaatctccataacatgtatgacttaaataagcttaaaaacactacaataattagaaattcaccttacttagatctgaggatgaattgaagtttatacaatttataaaaatgaaagtagacttttttaaagcagttttactgcatctatccatatacaattataactttttctgtttttgagttcattttaaaattatccctttccacatattaaattaaatcaggcaggaaccctcaattctggtagccattatttctgtgaaggaaagagtgaaatgtcatttcaaaatggactctatgtggtttgacatctttcagataggacttctttccactgaactttgggaaagacatatttgctacaaagctttccatttttccccccagctatgacctattttatcatctgatttcacacttcagtgaagtctgatggggtctgtggtctctaaaacactaagcttctagtcaccctttgaattc

SEQ ID NO: 198306 - DNA, 1000 bp, Homo Sapiens
caaatttaattgaagccatggggtgccactaatactagtggttaagacagcaatcaatcggtaaaacacagtcactatttatagacttagttgtcctttagttgttcttcttcagaataaatagccactatttcttttctatataacagttctctcttccatccacgatgacacagatgaacccaactggcccaggaagtctttgagttggtaaatcacaagctcagactgtcccctaaacagtaattttgactgtccttgcatagtcatgcaaagaagcaaataccagctgggtgtaattataggaaggggtcattaatcaccacagagtgaatgacttaaattataaagaagaccaaagaaaggaccagccaagaataccaaagggaggaagaataccaaatgagtttctccacaaaggaaacagcattcaggactgaagagcagacctcgtggggaaacaagttccagcccttttcaacagcccagtcactacttgcatgcacccaccccagatcacacataggacacacacaaatacaggcacacttgtgcctacccacacgtcatcaacctacgagttatcagcgcatacatacacaggctcatatatgcacaggagcacagttacaggaagctgcacacggaaatttcccacaaatacaactaatcacagatggctggaaaacagcccagtctccctgaactgtcaaagataaatatgggataggaaacattttaatggaacattagcatgcaaataggggctgtgccttgattcaggtgacttgacagaagtgagggataaaacccacaaaaaaagtttaaaaagagaagagagagaaggaggaaaagggcctttctacagagggagcaagggagcaaagacaaggagataaaatgcctgacatgtaaaaatgcctgtacaaggatgatcaccattgcattaaaaaaaaaaaaaaaaaaaaaaaaaaaagccaggcacagtggatcccagcac

SEQ ID NO: 198307 - DNA, 1000 bp, Homo Sapiens
atgcataaaaacacagaggaaaagcaggggggattttctgttttatgttttttcactatgaggaaattctgtgtaaaatgggattcccagattgaaggactggtgtaatgattatgtagaatttcttttaatgttataaaagttatttcttctggctgggcacggtggctcatgcctgtaatcccagcactttgggaggccgaagtgggtaaatcacgaggtcaggagatcgagaccatcctggctaacacgatgaaactccatctctactaaaaatacaaaaaattagccaggcgtggtggcaggtgcctgtagtcccagctactcaggaggctgagacaggaaaattgcttgaacgtgggaagcggaggttgcggtgcactgagattgcgccagtgcactccagcctgggtgacagagcgagattccatctcaaaaaaaaaaaaaagttatttcgtctacttgtctagcatcacttatcagcagataagtgtcggaaagggctttctttttttaaaaaagacttgcatatcaaatgaaagtcttggcttttaaaagtatatatagcctttctttgtttattcaaataaattgcttttttgttttaagctatctctgtaagtatacaaattctggttttatgcttgaaacctgtaagaacactgcttgttaaacttatatcatagaatggatatgtatacatcttttaaaaatatttatgtaccaatttagaaaaagaggacttcattataaaaaccttatcaagtattaaaatttttaagtagcattacattaaacagaattacaaactagctttctgaagttataaaatttaactaaaggattttgctctttgttctaaagaaagatgtaactttcatctttgtcttgcagtggaaggactttgtgaaggaattggtgctggattagtggatgttgctatctgggttggtacttgttcagattacccaaaaggagatgcttctactggatggaattc

SEQ ID NO: 198308 - DNA, 1000 bp, Homo Sapiens
ttaatctcctttggcaatgccctcacagacttacaggataaatactctggatccttcaacccaatcaagttgagactcagtattaatcatcacaagtccatcccttgtcaacttgaacccatacacatctcctgagatcatacataatcttcaaataaagacaataatgtcataattatgcctaacataatacaactatccttcgtacagctggaaacgcaccaatcaccaacctaaacgctattacataaatttaacaatacttaaattctgacctgaagtcaataaatcttatgtcacatgatgaaaaataaaatgaagctatttttttagtacaggtgtatacatgcacaaacgtttttaataaaagaaagaagaaatattcattacaattacaatcctcatttctgtaactggtcacatggtcctagctggtattgatgactgctttctgctactacccattttgtattacctttgccttcagcaagtacctcagcaggtcatggcttttttcctggtggagtgacccaaaccttcattccaaaagggtctggaccatttgtagttctgcctggattgggctgttgtagtttaccattgaccttaatcacagggcatggtaatactaagtgatgtcctaatggatctcctgtattccatgcataatcttccttacctcatttatggagtagtagactgatttcatcttgatagcctgggtcagttaccccagccaacactataactcccttcttagcctgttgacttaaatgtaggaggagcccaaagtgttcaggtggcaatcttaacttccagtttaatgaaattgttgtgtttcccattggcggcatttctccctctggaactaagacctctaggccaggagaacataatgtcgtgggaactggaagaaaaaatttttctagtggatcactaggggtgatggtgagtggtgccacttccacttctaccccttgatttctggacctgtgaattc

SEQ ID NO: 198309 - DNA, 1000 bp, Homo Sapiens
ttgggaggtcgaggtgggcagatcacctgaggttgggagtttgagaccagtctggccaacatggagaaaccccatctctactaaaaatacagaaattagctgagtttagtggtgcatgcctataatcccagctgcttgggaggcgaggcaggagaatcactcaaacccaagaggcagaggttgcagtaagctgagaccagcccctgcacgccagcctgggtgacaaagtgagactgtctcaagaaaaaaaaaaaaaaaattattgccaacccaatcctatttggtttcagtcaccagttgagtctagtttttaattaatcaaccgagcataactagaacactcaaagctacctgaactagtaccagaatcttagacaaatgttctcatatcaatacattcagcccaatccaaaattatgttcctttttccttgatcttgcatcttcaagagtctatttctacatatattctccagctttttgccaatgcagtttagcaaaatcttaccattcttctgacatgtaatctttctcttcccaaacttactttattgttggtcctttagagcagcggtccccaacattttccagggactggtttcatggaagacagtttttccatggaccagtatgggggattggtggggaggggtaggggtaggatgattcaagctcattacattttttgtacactttatattattattacattgtaatatgtaatgaaataattatgcaactcaccataatgtagaatcagtggaagccctgagcttgttttcttgcaactagatggtctcatctgggagtaatgggagacagtgaagatcatcaggcattagattctcataaggagcatgcaacctagatccctcacatgtgcagtccacaatagggtttgtgctcctatgagaatctaatgctgctgctgttctgacagaaggcagagttcaggcggtcatgcaagcaatggggaatggctataaatacagatgaagctt

SEQ ID NO: 198310 - DNA, 1000 bp, Homo Sapiens
ggtcaggagttagagaccagcctgaccaatagggagaaaccccatctctactaaaaatacaaaattagccagacatggtggcacatacctgtaatcccagctactcaggaagctgaggcaggagaattgcttgaaccccggaggtggaggtcacagtgagccaagattgcgccatcgcactccagcctgggcaacaagagtgaaactccatctcaaaaaataaaaaataaaaaatacttggccatgttatatcagagacttgagcatccatggattttggcatccctggggaccctggaactaatcctccatggataccaagggttgactgtataaactcactcaggaaggcttctcattggaggaagggcccagttcaggacagacagggacatcctccctggactactgtccattcatccatccattcatccattgcccctccaccccatcccgccccaggactgtcccagtgacagccctagcaagtggagacaagaaaaaagactggctcacgttgtccaactttgaggtcttggaagaagttgcaccagtataaggatagggggtaagtttcctccaggatccagagagcatatcaggcagcctcggggtgaggaaaggagcccggcctctccagcagccacacaggcctgcagtaggatggggctgggcctggccatgtggatcacttgggcctaattagggggaaggaaagaccagggggcagaggaggagcatcagggcagctggtggcctaaggagaaggcatttcagggaaggggtctgtattaatttgttttcacactgctataaagaaatacctgagactgggtaatttataaaggaaagaggcttaattgactcgcagttcagaaaacttccaatgatggcagaaggtgaaagggaagcaggagccttcttcacaaggtgacaggagggagtgagtggagaacgaggaagtgccacactttaaaaccatcagctctcttgagaattc

SEQ ID NO: 198311 - DNA, 1000 bp, Homo Sapiens
cagctttgtgcagagagggccttgtaggttgtgtggaggagaccacattttaacctcagggcaatgggaagtcattgaaggtttgggaggtgtgggggtctgttttgtgtgtgtaccatttaatcattctgcaaagtgtactgagtgccccttaagtgggggtgctttctaaggcatcatcctacaattattcactgaaaagaatgtaaggccccctgttatctactcagtattctaaactctccctatatctcatttaatcgtcacgaaagtatccatgaaatagatacaattgttatcctcattgaacagatcaggaacctgaggcttgaagaagttagatgacctggttaaggccacttgactggattcaaaccctgcctgactccacatgactcctttgggcagcatcgtgtgaccacaccacgtaagatctaggtcctgccttggagagctgatgaaccaaaccagcaggaaggtagacaagtcctgataaggacacttaaaaaaataataatatgggtcttgctccgtcactcaggttggagtgcagtggtgcaatcacagctcagtgcagtctcaacctcccaggctcaagtaatcctcccaccttggcctcccaaagtgctgggattatagacctcagacatggtacccagccctgagaaggactttgatgaaaaagtacatggtgtgtggtgagagtggctcccagaggaggggttgagttgtattccagcagggttagttggataggggcggagggaaagttcaggacaagagaacatctcacaaaagtgagaacttgtagaatatcctgacttgttaggtgaattgtaggcagtctttatgtggtcatatgtgttgggggcaggatggggaaggcgaattcggtcagatgccgccaacgaggcagcaggagccagagcactaaaggccttgagtgctgacctaagggattgaaattcctcctgcaagtagcagggggctactgaagctt

SEQ ID NO: 198312 - DNA, 1000 bp, Homo Sapiens
agcataggcttttcttcctgatgcagtttcagctttctgttacaggagtcacagatacacttcataaaataatcattctgttaaaatgaaattctatttattattttaagctggagtaattttgttttataaaggaataatttcttaatttctactctcccttgtccatttctgggccccctatctcactaagttgtggtacgtgatccacagtatggcatgggaattttttaaattggaggataattgtgataatgcttcaagatatgccagttgtgagttgatccaatgggaagcactaaaaacatacatagttcagtttgtggaattgttcattttgctcaattggtggtattttattggagggattcattttcaccaaagcagcaatacttctccttgaggcagtaggaaacaatgctctaaaatgagccgtgtatacagtactcttccgacctcccgctccccccgcccccccccccccaaatgatgagcgattcatctgtcagttattccacagagcctcttttgggaaccaaagttgcatttattgtcaggactactttttttttttttttttttctggagacacagtctcgctctgtgcccaggctggagtgcagtgagcaatcacattacactgcaaacttgacctcccaggctcaaacaacctttccacctcagcctcccaagtagctgggaccacaacaattgccaccatacccagctaatttttttctttttttgtagagacaaggtgatgctgtgttacccaagctagtttcgaactcctgggctcaagcaatccttctacttcgacctccccaaagtgctgagatgactggcatgagccaccgcacccggccaggactactactgaaacatgtttcccacaatgagattagtattctctcaaaattactggttctgttaacctggaaataatttataataaccaagatgctatgtgcaattaggaagaaaggaggacaaagaattc

SEQ ID NO: 198313 - DNA, 1000 bp, Homo Sapiens
cccagcaggcagaggttgcagtgagccaagattgtgccactgcactccagcctaggtgacggagcgagactccatctaaaacaaaacacacacacaaaactaaataagactaaacaaaaattttctacctgttaaggtacttaaaggaaatattttgtatgtaaaaattaaaaatcgttagaaaacaggtacttgactttaaatttatttatttatttatttatttattttatttatttttgagacagagtcttgctcagttgcctaggctggagtgcagtggtgcaatcttggctcactgcaagctccgcctcccgggttcatgccactctcctgcctctgcctcccgactagctgggattacaggcgcccgccaccacacccggctaatttttttttgtatttttagtagagacggggtttcaccatgttacccaggatggtctcgacctcctgacctcgtgatccacccgccttggcctcccaaagtgctgggattacaggcgtgagccaccgcgcccggccttgactttttagtatcacaattttgacctagtgaatactgtgaccagcttttgttggtggggggacggggacgggggcaccaaggaatttatgaccctatgtttataaatacagatatctgaattggaattacaccaacactggcaacatcttattgacaaaatattttaatttcataaagccaatataatcccttgttcaattttctctaaagtacacgaaacagctaattttttccttcttcaactgatcttttcctgcaattattttcactgagataaggcttttctaagtaaattttaaatcaatcggattttacctacttcaaatatttaccaattatagcttctgtcattatgaattctctctactggcaactgctttttgtttattttataaagtccaataacctggatcaaagtctgaagattttaaatctgtcatgaatatttcattcttttgttgatctgaattc

SEQ ID NO: 198314 - DNA, 1000 bp, Homo Sapiens
cccagcactttgggaggccaaggtgggtggatcacctgaggtaggagtccgagaccagcctgaccaacatggagaaaccccgtctctgctaaaaatacaaaattagccagatgtggtggtgcatgcctgtaatcccagctacttgggaggctgaggcaggagaatcgcttgaacccgggaggcagaggttgtggtgagccaagatcatgccattgcactccagcttggacaacaagagcaaaactccgtctaaaaaaaaaaaagaaaaagatatggacaaaaagaaaaaaagaaagttgggtaccagtctttctatctgatgaaacagatccttgacaaaaatcataacaagagacaaaagcattgttatatgctaagaaaaggaaccacagaacaagaacatatagtcattaagaatatatatacagtaaaaacatagcctcaagatatattaaatcacaactgactgcactcagaggggaatcaattatcaataatagagattttaactacaagctgatatatcagcaaataaaaactaagcagagaaatataaaatctgaataatattattaataatatccaggctgggtacagtggctcacacctgtaatccagcattttagaaggccaaggtgggaggttgaggctgcagtgagccactgcactccagcatgggtgacagagcaagaccatgtctcaagaaaataaaaaatacctagctgctaaatatatattgaattctacactaaacagagaatacattctttttttagttcacatgtaatatttacaaacatttaccatatactaaataacaaaggaaacctcaattaattctacagaatcaatattatacaggattttttttgtttttttgtaaaggaccagatagtaaatatttttggttttgtgagtgtctaccttaattactgaactgtgcagttgtagcacaaaatcagttgtagacaatacataagtgaatatgtgtggctgtgtt

SEQ ID NO: 198315 - DNA, 1000 bp, Homo Sapiens
cttcccctctggctgctgagttccacttagaactctcctgatcatcttcctttctttattcccccttgtctgggaggaagatgtgctcacacttctttcagggttaagtcctcactggtgctccttgcctcatctattactgcgacttacaatcttcgtctataattcctcttcctgtccaaagcactcagggatactcaatatatgtttgttgaaaacgcctgtctactgtgatccagttctgatacagtagtctgcttagtttttctaagctcatttagcctgatcctcatggaacccccgctagaccctaacccagaaagatgagagaagtggaaaaggtgagggctctagaaagcagctgtttctccccctcctctctgcccccacactcttacggagtactctattgcagcatttaataagctataattttatgatgtgtttacattttctccctatgagaccatgaattcctctagggcatggagtttgtcttattagttttagcttccctcaggcctcatctaccagggccaggcacttttgtaggtgctcagtaaatatttagtgaataaacaaatgaaagcactcattgaataatcagatgaggccagcaaaccactctgcaagcaaggccgggggtgatgaggtttagctcaggcatatcttattcctcttggacctccaatgcttagtaggtgtttattcactggattcgtctaacccaaaagagttactataatagttggcattttgggtcagtaaagaggaaggagggagctgtagtgagccagtgaaaacatttttgagaagacaaaggggattattcctcctcatctcttccccctttaagatttgtagccatgtaatcccagcactttgggaggccaaggcgggcggatcacaaggtcaagagatcaagaccatcctggccaacatggtgaaacctcgtctctactaaaaatacaaaaattagctgggtgtggtggcacacgca

SEQ ID NO: 198316 - DNA, 1000 bp, Homo Sapiens
gcaagtcccttggccagctagtgagagatggaaccaggatttgaaatcaggctgcttggaacctgtgttcctaactcctgggggccatactgcctccttctgtgttggcatttagcagcagctaggagctgtcaagatctgacctttgtaccagccaggtgaaggaagcggggtccggtgtggggaaggtgacccacctagaggaccagaaccaggcctctgccctggctgggcctctcacttgggctccaagcctttcatgctgtttaaggagcaagatggaagtggcgctgacagcagatctcacagccgcgggtggggacagagtcttcttcggctgcccaaggtaccaatatccagatcagccaggtgaggaggggaccgtggtcttgctcttcctaggccacagacccctggttcctgcccctcaaatatcctagctgaggtggtacccagagagatggcccagttcgctggtctgtgctccaaagtgagggagatggttctggataggtaggaaggtgggattattttaattttcctcctattttttccagcaaggcctgtgattattacattaatcttccgggcgaagtttttacgactgatccctcaccaactatgagaagtttctccatccattactaagagggaaacagaccctggtggggaggaaaatatttgttacatcttatcaggctgacacacaatctaacaacaattacagcagcctcattttttgcactatttcagctccagtgtgaaaaattgttgtaatattaaagtgaggcagggtgggggctggtcatcggaagtggttgaatattccaggctctcagcgcaggctctcttgggtgccacccagggagctgattgggtggctgaggagagggagggaggaattttcacataaatcccagcgccctgtctcctgtgctaatggccccagagatacttgtgagactgggaagggctcttgaaagacgcgtccctggccctg

SEQ ID NO: 198317 - DNA, 1000 bp, Homo Sapiens
gggaaagaaaaccagaaaggccaagacaactcacacacacagaaagccagcttagaacaaatccagagggccaagaagaaacctgtggaaaaaaatctctctcctaagagggctctattgtgtgtactctgggtcaaaagagcctcgctctgcagagcggctctcccacctgctgggattctccagaggaatcctttttcttccgtctgagttcagcaaacttcctgcttcctctacccagcgcagcgagcccctctctgtactgatcagcaagggtgacagggcttggcagccatggtggcagcttgctggggcactggcacaaagtgacttcgtaaataccgcagctttgataatttcttgcttcactggtctcttgggattctttccatctgcgttaagaaaacaaaaagttggacctccctctgcccacaaagttagatgcttttattttgtgtaggacttaaagaaatagatatctatttctataccacttcattgagtaatatatactttttaatgggggggttggcaaacatttttaagtgccccctctccgaacctcaatgaaagctttgttaatatagacatttacaaagtaaaactttattcagtttgaaatggaaacacttggttagaatcccaaatgacttgtatgcatgaaaactgttatgcagaaaaaattcctacaatggttttttttcctccaaatgaaattcttttgtgttaataaatatttcttcatttatgtccaatcttagggtgctcacaaagagatctccttaggttacatccctttgtttctgagatttaatgaaagaattttatgtaagttaaagaaaggaattcttgttagatttatatatcaaagtaaaccacagacctcagttatttcgcccaacttggccaccccaccccatctgatgtcagagtctttctctaatactgtcttgagtcaactgtgtgccaggatagtgcctgctggaaactggatggaatt

SEQ ID NO: 198318 - DNA, 1000 bp, Homo Sapiens
tgtgctaagtactttaatatgccccatctccattagtcctcccaataatcttattagagaggtattattactcccatttttcagatggcaaatgaggacttagtgtttgtttgcttttaattgcattgttgtttgcctaggaaatgctaccacattcttcattgcacactcacaattctaaatagatgtcataacttactgtttaatttggccacttttccgaagcatgaaattaggaaagagtgcattttaaacagtacactgttacactgtgttctgattggagtgctcatgttgagagactcttggcagagctagacctctctttcggggcttaactaaatgggttaggaaggaaagaaatgacagcagtggtagggactctggtggactggaaatggttgtcactcttagtttcccttttccattcccatcacttaagtattgcaaaatatgtttggagatacagacatacaaatttgcaattggaagaatataaagttttatctgctcaacagatctttattgaaggccagctattcccaagtactatactaggctctggtaagtaacttggtcatggagcttagaatcttgaaaaggatacagaaaatgagcaagtaaactaataacaaaatacaccggtgtaataaaggaaatgggtttcaaatgtagaggccttaaccttgcaaaatccctttaccttatagagtagggacataaatataattgccacttcacttttgaggacatatttagactgatgtggatgaaaatatgaatcttgtagcataaaggttacagcacttcccaaataataactaccttttgttgagtttgtttctctatgcctggtacattacatgcatttgctcattaaatcataactctgtatgagaaaaatatcattattaattttcgcatgttagaaaattaacctcagagaggttaagaaacttgcctaagttcacacagtaagcaaattacagtaatagaattc

SEQ ID NO: 198319 - DNA, 1000 bp, Homo Sapiens
agcagttagattcctacacataaactcccacacaactgatactgtggagatgtttctcttaaatccgcatagcaagagaagtatttgacttttttatctccaagagtatttcattccatggtttgagtgtttgcatcttaggatatttttctttttttcaggggcagtgaggggacagacagtagacagttgggatagggacatgatattttgaatcctgataaatataaatgactatatttcctagtttgtatgcatatataatcgtgtgtacatttattttggtaggcagagcaattgcccctgtgttcttccatttgcattgctctaaaggaatgcctgaggctgagtaacttattaagaaaagagatttattttggcttatggttctaaagctatacaggaagcatggcgccagcatctgcttctggtgagggcctcaggaagctttcaatcatggcagaaggtgaaaaggagccagcgtgtcatgtggcaagagagatgctaggctttttttttttttttttttttttgtgaggtggagtttcgctcttgtcacccaggctggagtgcaatggtgtgatctcagctcactgcaacctctgcctcccgggttcaagcgattctcctgcctcagcctccccagtagctgggattacaggcacgtgcccccacacccagctagtttttgtatttgtagtagagatggagtttcaccatgttggccaggctggtctcaaattcctgacctcagttgttccaaccgcctcggcctcccagagtgctggaattacaggcatgagccaccgtgcccagcccaggctcttttaaacaacccccatttgtgtgaactaatagactgagaactcattcatcaccaaggggatggcgctaagccattcacgagggatccaccccaataacccaacacctcccaggaggtcctacctgcaacgctggagattacatttcaacatgagatttggagtagtcaaacatc

SEQ ID NO: 198320 - DNA, 1000 bp, Homo Sapiens
ctatgtcccatgatagattatatacagagccccaaccatatgtgatttaaaggatttagatgatgagatttggaacattaaagctggttagatttagggaagatttttgaactgaatttgtgttataatgtgatgagatcttcagggacctgggcagggagtgaatgtgtttttatatgggaggaccatggatcatgaaggccaaagggtgaactgtgaaagcaaaattctgcctccatgatcctcactctctgatgtcacaactatagttatgttatgttgtgttatgtggcaaaaggaactttgcagatgtaactaaaattactaatcatgctaattagctgaccttaagataggaagattatcttagtctatgtaggtacacctaatataatcatgtgaccctttaaaggcagaagagatgcaatgcaagagaaagttagacacttgtagagtgagaggcactcaacctacttgttgctgacttgaagacatggaggccacgtggaaaccgtgagaaggaattaaattatgtttgctatcaacctgagcctccagataagaacacaagctggccgacaccttgatttcagcattgtgagatcctaagcagaattcccagctgagctcgctcaacttctgacttcctaactgtgagatagcattattttagctgctaaacttgagataatttattttggcaattttagaaaactgacataagcagcttgaaatttattaggtaaccaaattgttttccaaatggtcatactcaatttacctttcatagcagtataaaagaattccacttgtttttactttttgttgaaacttgacactttcagacttaaatttttgtcaatatatcatatattttaattagcatttacctgtttactagcgtgcttgaaatctacatatttattgcttgtttatcatattctataaaatatttgtttataactttgcccattttttcctgtgaggtggtttgccaaaa

SEQ ID NO: 198321 - DNA, 1000 bp, Homo Sapiens
atgctggaatgcatttgaagaatattaagtgactactgaataatcacaccttggaatgctctgtaataaacaaatttatatactgaaatacaaggcattttcagagccctgaggtgggaaaaatatggggtaaggaatttgttcgataaaagtgaaaaatatatactttttttttttcttttttgtgaatcaaggtctcactctgttgcccaggctggagtatagagatgtgattacagctcactgtggccttgacctcccaggcacaaatgatccccccacctcagcctcccaagtagctgggactactggcatgtgccaccacacctggctaatttatttttatttttttgtagagacaaggtttcaccatgttgcccaggctggtctcaaactcctggtttcaagcaattcttccgcctcagcctcccaaagtgttgggattacaggtgtgagccacttggccacatacttttttaaaaaataacagaaaatgaagacactaatcactagctgagaattcaccatctttgggttttgtccccatagtgaatgtaaaatttagggctatctcttacctgcaactttaagcattcaaagacacaatacctgtaggtcaggcaggaggatgtggccactggatatgtctcctgaccagctccgagacactggctgagacctaagccaacgtatgcctccctggatcaagttttgaggatgccagcacacttaggtgcctagcacctctaaatgtggccttgcaaaagcaggtaaaggaaagggaggctggaacaagtttcctgtttgatcactgaaccacaataagccaacctttgttttattttcatttaaaaatataattatacagaaaaatctaaggaaataagtaataggtcatatttctaccacgtacagtagggcatgcctaagatttgtgtcttatttcagatcttttgcaatgtttatgcttttaaaaagcaaataagtaatatatgaattc

SEQ ID NO: 198322 - DNA, 1000 bp, Homo Sapiens
tttgtagagacagggtcttgctctgtttcccaggctggtctcgaattcctgggctcaagcgatctgcctgcctctgcctcccaaagtgctggggttataggtgggagccgccgcacccagccccttataccctatttaataatccagtttgtcctgcagtcccctgcaccatactctgcttttttcccagtaatagtatcatctaagataatgcaattggccacttgcactcccttttaccaccctctacttttattctttcttttctttctttttttttttttttttttcagagacagggtctcattctgtcactcaggctgcagtgcagtcatagctcactgcagcctcaaactcctgggttcaagagatcctaccaccttagcctcctgagtagctgggactataggtgtacactaccatgcttggctcattttaaaattttttgtagaggccaggcgtggtggctcatgcctgtaatcctagcactttgggaggccgaggcaggcggatcacgaggtcaggagttcaagaccatcctggccaacacagtgaaaccctgtctctactaaaaatacaaaaattagctgggcgtggtggcgcgtgcctgtaatcccagctactcgggagactgaggcaggagaattgcttgaaccgggacctgggaggcagaggctgcagtgagccaagattgcgccactgcactccagcctgggctacagagcaagactccgtctcaaaaaaaaaaagttttttgtagagataagatcttcctatgttgcccaggcttctactttcattctccaacatagcttatctgcctatttttattgcttgttgtctgtctccctccaggacaaggattttgtccttctcttcagaggtattcccagcacctacaacagtgcctggcacatagtagctgcacgatacatattagctactatagtaaagtctacctgactaccctatttaatagaatattccccatgctcaatct

SEQ ID NO: 198323 - DNA, 1000 bp, Homo Sapiens
ccttagctgggctggtcagggaggtgacccttgaggtcatgtgaataatggcaagaagccaagcttgtgaagatcaggggtgagagcgcttccagggagaggaggagcaaggacagagtgcctactgcagggagaaggctggcacgtggcaggagcctagggaaacggcaggagtgatcagttgtgcgcttggagggcatgggtccatgtcacctccttgagttattggtacaggagaacctcactctaacaaattgcaactccagaaaactgcccacagctgagccccaggacgaggcacttgtccagtggctctacctgcagccctaccactgccaccaagccaagccaccaccaaccctaacctgcctagtccctctgctcctgctctggcaccccacaggtctttcctacatggagtggggaccaccaggtcatgtcagtgtcctgcttacacccttcagtgcttcctggtgctgcctgatgcacctgagaaaatgccagccctcagccatctcctcttcccaggatctccctgcatctcaagccctggctttgtagcagtttccatgggttctttctattccttgaagaccccgaacttgtctcctagaactttgcattttctgttccctctgcatagaatacccttctccagatcttcccacagatgcctcctggcaattcagatctctgttctgttctaatgtcaactcctcaaggaagtcctcttgatcacctcagctaaagtggccctcactttcctcaccacccccacaccccagttgccatcccagcatcttcctttactttcttcatagtacatatcactgtcgagatggcctgttttattcatttgtgacatctgtgttgtcaccctccctagttccttgagggcagggcattgcctgtcaggtgcacagctgtctcctagcatggtacgtggcacatgatgggtatccgatatatatcagtgaatagttgaggaagataggaattc

SEQ ID NO: 198324 - DNA, 1000 bp, Homo Sapiens
acttctgtgtgtgtgagagaaatgtttagagcttccctgtttgctgaggaataaaattgaaaatgattgcagctcagctctatattctgaaatcacagccaatctgatagagccatttttaaattcagacgctgcttttttaatagtcaggcactgacatattttaattctcccttaccgaagtgaaaaggcacaagcagattaagaatttatggtttaaacaacaaaataaaacaatgtgttggcagcattatactccctagaatttcacacatttaattttgttatttttactttcttgtatcaggcctgttaaatcctggaaggagagcagacatttgagaaattttttttcctgttctgtttggaattcatttcccttagtgtgacagttgagataagctatttggactgcctccagggagtgctccagaggtgggcagggaggaggcctcctggttccatgactaaggtatggctgcgttgggagctcggctcagccatccctagtgaaatacagtggaaagcggcagctggaatcagatccacaaggaatagcctgagttctccagaccaaagttatattttttaggtttgcctagctgtttaaaccaagtcacaggcagggctatggtagtcattcctaggtatcatcccagtgggacttgtgtacctgggatccgatggtgggactgctggctctggagggctagctggtcagaacttctgatgtctgctttgggcatcaagtgggaacatttcctgtatctcacatgggctggcagatgcttccatttaccactctgtatttttgctgaaataattatacctgacgtcacatacgaggcttccttgcctagaacagtggttagagcaggagcctgtgtagttgcctgcctgggcttagagactggttttactccctaattggcaaattacttagccctttggtggctctctttttccatttatgaaagagggataacagcagccactgttt

SEQ ID NO: 198325 - DNA, 1000 bp, Homo Sapiens
taagcttatgactaggagtacttgctctatctgtgcatttacttaagtagttttctctatctggtatgttctctctccttctgtccttcccattccctcctgtcagaatccttcaaggaagggcccaaagcttcctctcctcctcccgctctcatccaggttatctccaccttttctgcacacccatggccactcttctggcattgagactctttcatcttattgcatggttattgctttaccgctaaactccaacctttctgagagcaagactaaatcttcttcatccatgtatgccttgcagtgtctacaggattgtaagcattaacatttatttgtagaattttttaaatatgtttccttgtaattctcacctactgttctgatgtctttacaatacaaattggacttcacattgcatcttcaggttaagtctttgaagtagactatataatttattctcattttacatttgaggagattaagccacagaaaagttaaagaacttgtccaaaatcactcagtaagagatatagccagagttcaaacccagatttccaaatcgcatagtcttcattaaattgtgctgcctctttcatcacacaaaacttaatggatagagggctgtatgtcttgtttctttaattaaattcagagatccctaagatgtgaaattaatcccaatcttagtgctttttttatttgacaaatgtggcttgttatacagtctcttctctatttacttcctgataaggtccttgatgcaatgcccagtaggcagcagacactgaataaatatttgttaaaggggatcaagaattgtgacttctagaatttctgcaggcaatcaaagattattaataagagaaaggagatgaaccaggggaaccagaagaccatttgaaggaagataatggaaaattttcttttaggtgaaatagagatgagataagcaaagcgaggctaccattttgaaattctctctgtgtgtaaagaattc

SEQ ID NO: 198326 - DNA, 1000 bp, Homo Sapiens
attatcctttaataagccaatgtttatattcaggaaacatctctatatcccaaaccttttcttagaaatttgctgttgtcatattaccaatcctgaagttaggatgctattgtttctccacaccccaggcacatactcagtaaagtaaaacttcagcttggggatgcatccagttttgttattaagtatcatgttctctcactaggacacaatttttaaaaaggaaccaaggctagggggaagcagagatggtagacaaatattatctcaatggagtttttcttcacaatggaatttttttaaaagatatctaagttatatttatttttttaaaaaaaatttactttaagtaagttctgggatacacgtgcagaacatgcaggtttgttacataggtatatgtgtgccatggtggtttgctgtacctattgaaccgtcctctaggttccctcccccgccccccaccctgcaacaggccctggtgtgtgttgttcccctccctgtgtccatgtgttctccttgttcagctcccacttatgagtgagaacatgtggtttggttttctgttcctgtgttagtttgctgataatgatggcttccagcttcatccatgtccatgcaaaggacatgatctcattccttttcatggctgcatagtattccatggtgtttgtatcacattttctttatccagtctaccattgatgggtattcgggttggttccatgtctttactattgtaaatagtgcaataaacatacatgtgcatgtgtctttatagtagaatgatttataatcctttgggtatatacccagtaatgggattgctggttcaaatggtatttctgtttctagatccttgaggaatcgccacacagtcttccacaatggttgaactaatttacattcccaccaagagtgtaaaggcattcctgtttctccacagccttgccagcatctattgtttgactttttaataattaacattctgactggaatt

SEQ ID NO: 198327 - DNA, 1000 bp, Homo Sapiens
caattctctgcctcagcctcctgagtggctgggattacaggtgcccaccaccacgcccagctaattttttttttttttgtatttttagtagagacggggtttcaccatcttggccaggctggtcttgaactcctgaccttgtgatccacccgcctcggcctcccaaagtgctgggattacagtcgtgagccaccgcgcccagcccgagactccatctcaaaaagaaaaaaaagagagaaaagaaatctccaggacactcctcaatgccccggtgccaggaacagaggacatcctacggtccacaccagctccagtgctccctggcttgcacagttaggacactaagactcagaggatgccaggagtggcccaagattacacagtcttcagagcccaggggtcctatgtcccgtgccaccaactctctggtccctcccagccatcactggtgcctggtgatacagcttcctgtcaccacaaagctcagacacatgggctctgtacctcaagagataaagaccagccccacctaagtggccctgcccaggatcaccagccctgataacaagactagctgggcacccgggccagccttcacctgctctggtcccagctgcccttgcttgggagagctgtggggcctggcaggggaggggtgaggttctgtccatggacttctgcctctgaatcctcactagttctgcctgtttgggagtctccagttgtagattgcaggaagcagagcacagggctatttgactgcttttagatgcattttttttttttaattgagacagggtctcactctgtcacccaggctggagtgcagtggcataatcacagctcactgtagcctcaacctcctgggctcaatcgattcacccgtctcagcctcctgagcagctaggactacaggtgtgccccaccacacctggctgattttggggtttttttttgtagaaatggggttttgccatgttacccagggtcatgttgaatt

SEQ ID NO: 198328 - DNA, 1000 bp, Homo Sapiens
gaagaggaactggaggtaaatttcatccacactttggaattctgttcaaggttggctctggtatttgggatggaagggttgctttgaatattaagagagaaatatagtacaggtaaatccactagattataatttctattatatcatttccttaaggaagaaatgagctcacccctgcaatctgccatcttgtgtattttcatattagactatatatttcagagataaaaacaggaagtaaaatttttaagtaagaaggataatttcccaagtaaaaacaggaaagataaggacaataagattgtaaatttttaactattttttttactctaattacaacagaaacctgaatatatgcttataaatttgtaagtcagtttttagttatttaataaatctaattaagtaatcacaaatcaactaacaagatagttgaagtcagatatatgtatgtttatatttttttctcaaagtatgttctactatgttattcatgaagcattttgggttttttgagtatttaaatcaactaattttttatttaggtttgttttgtcatttatttgcactttaacaaaaaacaaatcttctatttcccagttaagtaaacatttaagtaatacaaatgaaaaaaaatagagttctgagaaatatgcaattgcgtaacagaagtcatatatgggctgactcataattgcaaagtaaaatctctgcaaaagtccttaacaagtgcatgtctttcatatttaaaatacaggctgagcatccctaatccgaaaatctgaaatctgaaatgctccaaaatctgaaatgttttgaacatggacatgatgagcaaaggaaatgctcattgtagtatttcagatttcagactcttggattaggggtactcaactggtaagtatataatgcaaatattccaaaatccgaaaaaagcctaaactcctaaatacttctgctcccagatattgtagataaaggatattcaagctataattaa

SEQ ID NO: 198329 - DNA, 1000 bp, Homo Sapiens
atctaagatctatatctggtataactattcttgttttatattttattatactggaacagctcgtgtcctctgtctcttgcctcggtgcctgggtggcttgccacccacataatcccagcactttgggaggctgaggtgggagaatcacctgaggtcaggagtttcagaccagcctggacaacatggtgaaaccccatctgtagtaaacatataaaaattagttgggcgtggtggtgcgtgcctgtaatcccagccacttgggaggctgaggcaggagaatcatttgaacccagaagatggaggttgcagtgagctgagatcgcgccactgcactccagcctgggtggcagagtgatattgtctcaaaaacatagtaataggaataataaaggaaaagtgcaaaaattcaaacaacttaacagaaactgggcaaaagagctgaaccggccctccacagaagaggaaatgtggaggaatggctaatgaaaacatgaagaggggctcagcctaacagggggagatatcacgtgacaaccaccagacgggcaaaaatcccacaacccaatccatgccagcgttggggagaatggagagaagcaggaacaccaggcactgctaacgcttgtgaagtatatttctgctatgcttgtatatgaaagtgtgtgtgttgtgggttatgaggaaaattacatttttacctgggatgaaattttaaaatttgaaagctactgaccagaagaaacttgcgcttgtgtacaaaagaaatgcccaagaacgttcccaacaaaacacagtcctaagggccccaacctggccaaacactcatccacgggaagatgaagacatttcccatgctcccctcagacgacgggagaccatgcagcaatgaaaatgagccatgtcagtgtgggtgggtctcagggagagaatggaggacaaaaatagacacagagcaggtgctcagagccatgcagtgcaggagcagccacgcaggagaatt

SEQ ID NO: 198330 - DNA, 1000 bp, Homo Sapiens
ggttttagaattttagcatttatataatatctcaagcattgaaagtggtatgtaataagctctggtgcaaaatgttaagtgttccttgtacctgtacatgtgccaagtagataaggcactgtgtgccaggtcactaaagtcatccactatgtggatgcctacattcctgtttgctgttataatgatcctttgggttttctcaagcttaataagtctattcccagaaatacatcactcagtttggggaataactgggtgtgccctgaatgaattaatgagttaattaatttagcatgataattcataaataatggcttctaccacacttatttcattttaaatttcagaaatactcagagaaagggaaaatcatctttatgctgtaccaaaaaatgtaataaagttatgttgtatattgtaccattggaataataattactccagtatgaacacagaacttcaaatataatctgattttttctaactctgttaactaagactttggaggaaactgaggcatcatatattatttgcatacaagtacatctctgttaaaatttttctatcagaaatcataagttcccattgcttctctggactatttgataactgtaacctctactaccacgaagaggaagacacagcacaggggatttccagttctggcttcaaaattcatattacagtgaaactcttttgacccatctcttgaggtcctgaaatttttatcttactgctttcaaaaagtattactgtaaaatctggaacccaaaggggaagcatacttaattttgaaagttcctaaaactaaaatttgtttacccacaccagatttggattatttatttaaatttacttgttaattgcctaagaacaagctccttccctcattccctcaaaacagaagataaagcatttcacattctcttcaagccccaagatagggataaatgttttgaattatgttagcaaaattctactgctctgaaaacaagaattc

SEQ ID NO: 198331 - DNA, 1000 bp, Homo Sapiens
ttctatttcttttagattcagtctcagtaggttgtacatttgtaggaatttatgcctttcttctaagttatccaatttgttggcaataatttttaaaaaaatcccttgtgatcatttttatttctgtggcatccattgtaatgtcttttcttttattcttattttatttatttgagattcctcttttctttcttattctagctaagcatttgttcactctttacttttctaaacaccaacttgtagtattgtgatttctcccattatttttctattctctctttgatttatttctgctttattctttattatttctttccttccactaactttgggcttactttgttctttttgtagttccttgagatgtaaagttaggttgtttatttgagaactgtctttcttaatgtaagcatttatcataataaactatcctgtgagtacagcttttgctgcatcccataagttttggtgtgttgtgtttttatttttgtttgtcttcagatatatttaaaattcaattttgattttctatttgacccaaagattactcgagagtatattgtttagtttccatgtttttgtaagtgttcttattctctcattgttaatgatttctagtttcattccactctgatcagaaaagatactcagtattctttcaatattaaatttgttaagacttgttttgtaatctaatgtgacctagcttagagaatgtttcacgtgcacctaagaagaatgtatatttttctgctgctgggttgaaagtttggtgtatgtctgttgggtccgtttggcctatagtgttgttcaagtcttccttttccttatcaattttctgtgtaggtattttcttgaaagtggatactgaagtatcctactcacactatgctggttaatttcttcctactgatctgtcaatactttctttatatgtttaggtgttctgatgttgggtacatatatatttatgcttgttatatctttctattgaatt

SEQ ID NO: 198332 - DNA, 1000 bp, Homo Sapiens
ggacctcagctgctctggaacatgcacaggtagctcgctgacagactccagcctggctgtgcacccaggacctggccctgtctgccttggccctccatggctgcctcccaaacaccagaggtgaggccagggagctagctcaggggagatcacggatcgcttcccatggttgggcacgagacaggatggctacgaggcacacccacagggcagaacagagcagtgtgtccagcttccctgctcctcacctctgagccaagttcaaagtcacctctgcgccatgttcaaagtacctctgccaggacccctacattaggattcagcaccacatattgacctgagataaccactgggtatgtaccagaaaaacaagcaaaagtcaggacactctctgaccaagggaagaaaaggcagcacaagagaagatggtagagggtactgggattagagggaggcactgctactccccaagcacctactgtgtgccaggcactgtgccaagggcttggcatacagcctcacaacaaccctatggggagaggaattatttccgtctcataggcaagacatccaaggttcagagagggtaagtaacttgcccaaggccacgcagctagaagtgagaaggccaagagttgaactcagatttctgtgactctcaggcccacttccttagccactacactcagctgctgtccagaaccagtttctgtggcagggtggctggggtgggctttctctggcccaggagagagaatgaggagcgtttacaactcaagaaggttgtaaaaggtccactcactgcttggtagccaggctcgggcaggtcttaaacagggagaggtggaggccagtgctgaaaaagcaagaccctgggggtattaagcccacccgcgctcaaacagaagcagaacactcattgccactaatggctggcacagcccacaagcgcctccttgcattgcttcactgaatcctcgcggcgaatggcctggaattc

SEQ ID NO: 198333 - DNA, 1000 bp, Homo Sapiens
tacgtttaaggaagccattattgtgtgtgggtgtgagtgtgtgtcttaaaataaccccaaatcattgctattatattagtggtgagataaagttagataacagaagaggtgtttttctgaagaatccacttccacattctagttcagactcctttgctaaaggtatcaaaaataacatttaaaactaaatgaataaaactgtttaggaagtagagaaatattcaactcaaattcaaaatttcagaacaagctgagtcaaagcctgttatatggaagcacctaataaatgtacatgggataaagatctgcagacactaatctacaaaagtgaaaggttagcaaatgctaaggataacaaaatgggaactctgaaaagtacatttttgtcaaaattttttttgtgactaaatgtctttttataccaagtaaagtatttctatttgtatatgcaaattcatgggctgagaacatcctttctgttctaccaaaattcagtagaaaatagtaaaactacttcctttcttattgaggctattcttccatgtgggtttcctttgaaatgggtgagacaaattactgtgaaatgaatttcacatttttcaaagtacataagaagcttagcatgaaagaggcaacttacaggtcattgataggttgtttcattcttccctcatgtgagataactgtaattctctgagggcttgcttagggaagaaaaacacttccattttctcccacctcttttctagaccaggaaaagattctttgtctacaatgtcacaagctctagtgcctttccacaaaacgatgagagacagagaagtatttgaatttgcactaatggccaatataactggccacgaacgtgatctctttatataggatagatatggaattatcttcattccccatgcagagaagagtggcaatctctatagctcaatataacatttccaagggctacacattctaccatttggagaattagacctatgaattc

SEQ ID NO: 198334 - DNA, 1000 bp, Homo Sapiens
cctgcctcagcctcgcaaagtgttgagattacaggtgtgagccaccacgcctggccttctgtattctcatacagtaagtcactacccaaaaggagacatagaaaaataaaaataaataactaacacacagtgttaagtagaggcccaaaggttgtaaatatgtaagggaggaaggattattctcactgggtgaagcttgaagccttcattggagtgatggctgtgaaaggattggtaacattttgacatgcacagttagaaatgtgtatgggggctggagaaggactgggaggagcggatggtgcaaagagaggcaaggagcatacaagataaaaacaaggtgggccagacatggtagctcacatctgtaatcccagtactttgggaggctgaggctggtggatcatttgaggtcaggagtttgagaccagcctggccaacagggggaaaccctgtctctactaaaaatacaaaaattagctgggcatggtggtgcacacctgtaatcccagctactcgggaggctgaggcaggagaatcgctccaatccgggaggcggaggttgccgtgagctgagattgggccactgcattccagcttgggtgatggagcaagaccctgtctcaaaacaaaacaaaaacaaaaacaaaaacacaaaaaaacaaggggcacatgctgggcctctctcggagacgcatggtcttcatttagcagacaaaggccatcaaagatttttgaacctggtggtgacgatcctgtctgtcctttggtcattgtgagaaagactggaagggtcaaagactgaaagctggagaccagtttaggaggctgttgtatgattccaggcaagaagtcctgagaaccaaaaagaaggaacaggagtaaaaaggcaaaggtggatgaggtgtttgagacattcttgaaaaagaagtttcagagtttggttactgggaagaactggaagaagaaaaggagcaccctaaaatagtcctcagaattc

SEQ ID NO: 198335 - DNA, 1000 bp, Homo Sapiens
taagtttactgtagtattctcaaaacattgaagagtttggaccaaaaattcaagcagtgaaactccatgcagtgtaaaatttgagttctgtagtgcagatttgattttttaaacacagttgttctagttattttaaagtgtatgccttactgaaatagttaccagtgaaataataatgttatctgggatttgtattgaaattctccaggaaaaaaaaaagttgggactagaggaataagattggcaagcatgttactaattgttgaagctgtatagtggatacatagggatttcttattttctctattttatacttgtctgaagtttttataagggaaaaaaatctttttaaatgtgcatgcctcaaagacctctaagcaataagcaacttaatttccagtggaacttaaactaaatctctaggaaagtaaacattttatatggcatgtagaagggcttgtttacaccgtttgtacttaaatgggttctaatgttcctttttagtgtgacccaaatcttcaggtgttcaatgttttcattgataacctcgatactcgtcttccccgaatagcattgttttccacaagaaccataaatgctggagaagagctgacttttgattatcaaatgaaaggtatgcttttcaagtacagtttcattggtgtcagtttcaatatgaagaatcaaatcagactaggaacagaccttagatatttgaaccaaacctaatactaaagatgaaaagttgaggcactaagtttgtcatcctaaggtacaaagctaatccaacagctaatactagaacccaggtctgcctgagcttcagctgaggaatggttctacatcgtaaattttcagaacttccattttggaaactgatttatttattatagcatcttaatactgtactacttgtctttttttttttttttaaattgtgggctaagcatgctggctcctgcctgtaatcccagcactctgggcttgagcccaggaattc

SEQ ID NO: 198336 - DNA, 1000 bp, Homo Sapiens
tgtatttataacatacaatattgatgttaagatacatgtatacattgtggaacatttacatcaggtgaattaacatatctttcaactcacatatttatcattactttatggtgagaacacttaaaatatactcttttagcaattttgaagtatataatacattattattaactataattaccctattgctcaatagatcactaggacttatttctcctatctagctgaaccttgtaccatttgacaaatacatcttctttttctgtctatcccgcctcctccagcctctggtaaccatcattctactctttacttctatgagtctgacattttttacttttcacgtgtaagtgagatcatgatgtatttgtctttctgtacctgacttatttcactttacatacgatcctctagatttttctttgttttcacaaatgacagaattttctcctttttaaaagctgaatagtattccattgtgtatatacactataaatatgtatatataatttcctttatccattcatcccttgatatgcacttagattgtttccatatcttggctattgtgaataatgctgcaatgaacatggaagtgttgatatctagtcaacatactgattttaactcatttgagtatacacccagaagtagaatttctgggtcatatagtaattatattttttttatttttgagaaacctcccttctgttttccataatggctgcactaatttacattcccatcaacattttacaagtgttctcttttcttcaaatcctcaccaacacttgtctttcatttttctttgtaatagccattctaaaatgagtaaggtgaaatctcattttaatttgcatttcctaatcaatggtgatattgaacaccttttaatatctctactggccatttgtatgtcttctttggagaaatatctgtccaggtcttttgcccatttttttaacagggttatttgttttattgttattgagttgaattc

SEQ ID NO: 198337 - DNA, 1000 bp, Homo Sapiens
tctattgaaaattaaaggaattcatagaacaatgagactttcttaatttccttttaaaatactttgaaggaacattatggcttcaaaagaaaagtcaacatgaattgtcaaaaccaagctatcataataaactttccaagtctcaaaacctgtctctgtgtttctaaaagaagcaaaatttagcaagcaaataagaataaaatggactaataaaaaacttcgagtttactccaatatagaaacagactaaaatataaaaccaaattacaatgcagataacaggaaatgtttttaaccaagaataaactaatatattcaaaccagatttgtagtagacatatttcagggaatctgttcacccactcccatttctgggggactctgccatattctcaggcccagttgtctttcgattgccatcttatatcacctgacacaactccacaagcacacagccatagctgattggacccgaaagaacacttgacccaaagagagccattcagaagctggccagaagcctagggcttgggtttgattacttgctaaaatgatgaactcagccaatcagttttgctgctgcaggaactagaatcaagaaaccctaaaggaacttgccagttagatgtcatggtgaaaggtcaagaggaacacttaagctcaggacaatcatcatgggccaagtctgccacagaaagcaagtactggactgaagccagttcccaacctgaggtctcaggagatctatatcttgaacccttttgttgagtgagagtgacctggtttttgcaaccaaaagacagagcttatgatagcaacctaagttaaaatcttatatcaagacctaccactgacatatttagtaaggataaaaccaccttcttttagataattagaggaaacagcttacatcacttagtaagaaatctgaagtcaggttttttgtttgttttgtttttaaaggagttttattattttcaacttgtctcctctggaattc

SEQ ID NO: 198338 - DNA, 1000 bp, Homo Sapiens
atttaaaacttattaattgggccgcgtgcagtggctcacacctgtgatcccagcacttcgggaagctgatgcaggcagatcacttgagggcaggagtttgagaccagcctggccaacatggtgaaaccctgtctctgctgaaaatacaaatattagctgggtgtggtggcaggcacctgtaatcccagctactcgggagactgaggcaggagaagtgcttgaacctgggaggcagaggttgcagtgagctgatattgcaccactgcactccagcctgtgacagagcaagactctgtctcaaaaaaaaaaattgtttatttctggaattttccatttaatattttcagactgcggttgcctgtgggtaactgaaactatggaaagtgaagccatggaaaaaggggtggaggggagactcctatatataaaggatcatggtgtatacaaacctctaaaacttgccttttatgataatcattgctttgaggtttatcaaagttggatcgtatttctggaaatattcacttaaactcctatatataaggaagtggtaaattttaaaaaaagaaaaaaacactcctatatagaatttcattctatgaatacattgcttaacgacagggatacattctgagaaatgcatcattaggtgattctgtcactgtgtgaacatcatagataatatttacaaaacctagaaggtatagcctactacacacctagtaggtatctaggtattgctcttaggctacaaacctgtataccatgttactgtgctgaatactgtcagcaactgtaacacagtggtaagtatttgtatatctaaacatttctgaacacagaaaaggtgcagtaaaaatacagtattatactcttttgggaccaacatcacatatgtggcccattgttgactgaaacattgttgttattcagtacatgcatgactgtataccgtaatttatatatcgaaaaaccagattttccccctattataaataaa

SEQ ID NO: 198339 - DNA, 1000 bp, Homo Sapiens
tatatgtgtgtatatacatatatatacgcagatcttgaagaaagttaatcaaaacaccttcatcaattgaaaatgacaacattttcacaaagatatagaaattaaccataggcacagcttattaagaaaaaatataattaaaattcaaagccaaaaactctttttaaatctcattaaggactctaagttaaaaatctgaattttaatctgtggattgaaagaattattgtattgcttccaccatagaaaagttattaaaatcttaataggtttttcctttagcaaaaatacaagttaacatacaattttagatatttttcttaattctgattattcactacatgtagataggaagtagtgaggttttaaatacatttgtttcatcagtgcagtaaaaagcaccctaaggacactaattagctcaattttctccaactggtcaattaagtaccacttccttcttatttcaaaattacataaaagtttaggctttttaaaaataactcttccctattttaacagctcaactgtgcccctgtatccattctctccttaatcaagtctcccttggtcatgattgccagatacatcattttttttcttccaacttttatcgtgggagatgtgtgtgcaggtttgtttttttcttccaacttttatcgtgggagatgtgtgtgcacgtttgttacatgggcaaattgcatgttgcttggatttgctgtacaaattatttcttcacccaggtagtgaacacagtactcgatacataggtttcaatcttcattctcctcccacccttcaccctcaagtagactctggtgtctattgtttctctctcaatgtccacaagtcctcagtgtttagctcccacttttgagtgataacgtggggtatttggttttctgtttctgcattaatttgcttaggataacagtctccagctgcattcatgttgctgcaaaggacatgatttcattctttttatggctacacggaattc

SEQ ID NO: 198340 - DNA, 1000 bp, Homo Sapiens
gctggtctcaaacttctgggctcaagtaatcctcctgccttggcttcccaaagtgctgagattataggtctgagccactggattttctcaccctcagaactgtgagccaacaaatttctgttctttataaattgcccagtctgtggtattctgctatagcagcacaaaatgggctaagatactgggccgaccagattcctccaggaatacgaattaggatggatgtaaaacatgcagattcaggactcatgggtccttctgccctgcagtgtagaacaagaagaggcccagctgtgagaaaggtagaggctttgagagaaacagaattgaaagtcagagagagagagagagagagagagatcttggatgctttctactttttggttcagtccttcctgagatttaactatatcccaacccacgggggccgtaagacaccagttcctgtatttttatgccatctctccttttaatgtgagttagcttgtatttattttatgtacatctagaaagtacacagggggctgagcgcagtggctcatgcctgtaatcccagcactttgggagaccaaggtgggcagatcacttgaggtcaggagttcgagacctgcctgaccaacatggtgaaactaaaaatacaaaaatcagctggttgtggtggcgtgcacctgtaatcccagctacttgagaggctgaggcaggagaatcacttgacctgggagacagaagttgcagtgagccaagatagtgccactgcacttcggcctgggcaacagagaaagactctgcctcaaaaaaacaagtaaataaaaataaaaagtacacagggttggaaattaaactgtgactgtgcccaggcaccaagctcaggctcagttaggaagaaaacttggcaacaggataatagagtcaagtcattaggcacccataagattacacctaaaaccctagcttcacttacatgtattttattagcaattaacctcctagcttagaaatc

SEQ ID NO: 198341 - DNA, 1000 bp, Homo Sapiens
acttgttgtggtaaggacactcacctcatctctggccttaagcaccatcattggcctctggatacctcaggatctcaaaaaaaatggactcccaggaattcagggagttcattttaatggcagcaacttttactgttatttctggcctacagagaagagacttcatgaggcttcgcagagctttttgggaggcttcccattcacagccttggtagaaggagtgttgctggtccttctcacaggacataggtaggaggtgaatgagcaagtgttacatgaaaaagccactccagtattccaagctcctcaatccaggataatttcctctatcataaaccaataaaacgttactttaactttatttagtgtaggccactctagggtttaggttccaatcaactaagcaagaaaactatgagagccacttctgtcatttgcccattttctgacaaaatctcttttcctggagagtaggcctttgttatcaagaaggcttggggcatatttcaaaatggttacttttctcctgccatcttggacataacaaacggacctttctcagagccctgacttgaaaacctggtgagattcctggaaggaaagcccacaaatgtttgggggcttccaggagtttcttactgtcacattagcccaccttgcctccagaaatttatcaagattgccatggaagtgttccttctgcttcaggtaagctgatctaggttgctgtatttctctgtattcaactgtctctcaagatttcaggtgacaatttgccctgttacctctgttctctgatgagtctaagaaaagctgttgatttttaaacttgtacagcttgaagttgtccttataactgttcttattgtaagaatgggaattacaacttccaagatgtttataggttggagcaaaaaccagaaatcctcattttctagaatttgcttttttcaaaacagtttgtcctctgatagtgctatgaagatacaatggatatctg

SEQ ID NO: 198342 - DNA, 1000 bp, Homo Sapiens
tctaggtaacttatataagtgaaagcatacagtattcttcttttttgtgactggcttatttcattcagcataatgtcctcaacgtttatccatgttgaagcatatgtgagaacttccttcctttttaagactgaataatatttcattgtgtgtatatatcacattttgatatctgttcgttaatttatgggcacttgttttttccatgttttagctattatgaataatattgctatgaacatgggtgtacaaatatctctttgaaatgttgcttttagttcttttgggtatatatccagaagaagaattgctggatcatatgataattgtatttttaattttttgaggaactgtcattctgtttctcatagcagctatactggtttacattttcaccaatagtaattgccctttgatgcaaatattttaaattttaatgaagttcaagttggctatttttttcttttgttgcctgtgctttggtgtcatatgtaagaaatctttaccaaatccaatggaatgaagcttttaccctgttttcttctaagagttttatagttttaggttttacatttgggccttttatccatttctgagtgaatttttgtatatagtaaaagggtctaatctcactatttggcatgtggatatcccattttcccagaaccatttgttgacaagactgtcttatccattgaatggtactggcacccttgtcaaaaaattatttgatcatacatgttagggtttgtttgtgggctctcctattctattccactgatctataggtatgtttctatgttactactacactgtttttatttactgtagctttgtagattggaaaccagatagtgtgaaatttgaaattagatgaattttcagcacttattgaaatgatcggatagtttttgttattgattatgttactgtgatatatgatatttattgatttgcatatgctgaaccattcatgaattcctgagatgattcccacttg

SEQ ID NO: 198343 - DNA, 1000 bp, Homo Sapiens
aaagacatgaaaaagtgaggtagttagtcaaatggatctctgggtgaggagggtccagccagaaggaagagccagtataaaggccctaaaggcaggagtcatgtgttcaaagaacagcaaggaagcaaggaggccagcgcgactagaatagtacaaggaaagattagtaggagatgaggtcagagaggataggtaatttggagacttgcaggccattgtaaagactggttttgattctgagtaaaatgggatttaagggagggtgcagtgcccactatgcacaatgagcagcagtggttttgcatttttttgacatttgcactcacagaacaaaacaggctgaaacctggtactaggtttacttaaatttgtagaagtaaaagatttgaacttaaatatataaacttgagagcctttgccatgtagatgatatttaaagccattagattgggtgagatcattaaagtagtaagtataggtagagaaaagaaaaggatcagggactgagccccttgtgcgggggtgtgtacgtgtgtgcgtgcacatccatgtgtgtatccgtgtgtgtctccgtgtatgtttgtatccctgtgtatgcatccatgtgcatgcatccgtgtgtgtgtgtttgtgcccatgtgtgtttggcattaatttatttggtttcttacgtttgttccacatccaaagatgaaacttaaggttattttcttcaagtcgtatgaaagttaaggttattttctttcagattttaagaacttttcactaaaatgtttttggttttgtttttttttcttttgaataaggcccaaggattatttatttaatattttgagtcttaaagtattatttagtttatttattgaattaagaaagtgttatctgatttttttcttccttttctcagggatgatttggtcagacattaaaagactctggtatgaagggttggaagactttttagaagaatctcgtaatcaactcagttttgtcatgaatt

SEQ ID NO: 198344 - DNA, 1000 bp, Homo Sapiens
tatctagagagatgggagaaaaaccaagaaggcattatgtcacagattcaaaagaaaaccataattcaataaaaatgtaattattaatagtatcaaatgcataaaataggaatctttttctttatccaaatattaggtcacaatcaatatggctccactataaattcttacttttccaattgcctgtgtttatgtatacttacttaaagtattcatcagaaggccactgttgtctcgaaatctattatgactggcatctatatcaggaatcctgtactgtgtcatggtaggatgtcctgagacacaattccctgtatcagaagtagaggatttgcaatcttcatcttctgagtcactagaactatcctcactacttgaagatgatgaacttttggaatctgatgaactatcacaactactcatctggtccattagactagcttctgccttcagttctgaaaataagacagaaatgaatagataggttaaataaaaaatgctaaataaatataataaaaattgaatgtattagtttttaagaaactgttgaaactaaaatcaaacatacatttacagtacttgaagcattttattaaaaaacaaaactcttctaccatcaagccatacttcaatgattggattacagaaactaaaagggatagacaaggtctaaatctaaactccacatttatttaaaccattgtacttaagtatacaggtaactcaaatataaagtaaatactgtgaaaaactataaaaattaaaatctattttggcagaaactgtcttctgattattttttgttcctttaaatacatataatataatgtgataatgtaacagatgaacttcattcttttcctggttttcctagagaacattttgatgaagcatctataggttcccccctgctcccttaataaggatttaaaatattctaagtatttttgaagagccagttcccattataactttggctataaatatttctgtagataaa

SEQ ID NO: 198345 - DNA, 1000 bp, Homo Sapiens
tagttattatcattaaaacatgtaaaagtataaaactcactggtagagcagatacacaaaggaaaaagagaaaagaatcaaatcttatcactatggaaaaccaccaaacttcagtgataaacaataagaaagaaagaaacaagttatatagaaaacaaccagaaaataattaacaaatgacaggcgtaaatcttcatctatgaatagtaaccttgaatgtaaagacattaaattccccacttactagatatagactggaagaatggataaaaaaagatgactcaaccatatgctgcctacaagaaagtcacttcacttgtaaagatacatataaactgaaagtgaaggaatagaagaatatattccacacaaatgaaaaccagaagtgagcaggggtagctacacttatatctgataaaactgatacggaaagaattaagtcaaaaacagtaaaaagagacaaagaagattattatataatgataaagggatcaattcagcaaattatataacaattataaatatctatgcagcaaaaactagagtgtatataaagtatacaaagcaaacattaataggtctaaagggagacatagattgccatacaataatagtaacaggctttagcactccattctcagtaatggacagatcattcagacagcaaatcaacaaagaaacatcagaattaaactatgcactagtcctaataggcctaactaacatttacagaacatcatatacaaaaatgatgaagaatgcttattttatcatcagcatatagaacattctccagaagagattatatcttaggctgcaagacaagtctgaacaattcaaaaaagtaaaaatcatgtcaagtatcttttgggaccacgatggaataaaactagaaatcttttcatgtattgtacaaatacaagaaaattaaacaacatgctcccaaatgaccaatgggtctctgaagaaattaagaagaaaatttaaatatttctggaaa

SEQ ID NO: 198346 - DNA, 1000 bp, Homo Sapiens
tttttttttttttgagacagggtctcgctctatcacctagactggagtgcactggtgcaatctcggctcactgcaaccttcacaccccaggctcaagtgtcaatcctcccgcctgagtagctggaaccacacgtgcgcaccactaaacccagctgtttaatacaccatttttaacccaaaacattaagaaaaatataggaacagtaagtagattacattttgtaaacagacaagcttacaagttttctcaaatatgaaagtcatactaaactgggagactgttaacttcttgatggggttaatctctaatatgaagccacagtcatagctaactacaaattacatatacaatgccaaaaatattcaaaaataacattttttgcaccttaatgattacaaatgctaaccagcataaagacactggaaagtttcagaatctcctcaccacatactttcaaatatcttccctttacttccatgaaattgtactaagaacatttcaatcacctataatactctgcctcaataaaatatttcagtgtggggtttggacctttcttttaaaagtgtttagtagatgtaacatttactggccgggcagctcatgtcctgtaataccagcacttgggaggccaaggtgggaggactgcttaagcccaggagttcaagacccgcctaggcaacaaagcaagacttcatctgtacaaaaaatacaaaaattagccaggcgtactggcgcatgcctgtggtcccagctactcgggagtatgaggcaggaggatcagttgaggcaggcaggttgaggctgcagtgagccctgatagcgttaccgcactccagtgtgggtcacagagtgagaagtgtctcaaaaaaataaaataacacaacataaaatatctccccctttcctttctaaccccttttagcagtttactgactgtttatagatcttaaaccaagtctttataagcttcttttaatggacttacactcttcccct

SEQ ID NO: 198347 - DNA, 1000 bp, Homo Sapiens
cctgcagttacatttctaaacactaacttacaatttgtggaagaccttgtgtcttgagggttgggtacaaaaagcatttggatattcaataatgtaaatactatgaattgattaaattattccaagaaattgatggcagggcaagatggcagaatagaagcctacactattgattcccactgcaggaacaccaacttttaacaactatctacacacagaaaagcaccatcacaagaaccaaaaatcaggtgagcaatcacagtattggttttaacttcatattgctgaaagaggcattgaagagggttagagagatagctttgaatcactgatgccacccctccctgaccccctggcagtggctgcactgtcgggtctgagtctgtgtgcttgggggagggagagcacagcaactggggcacttcacattgaactcagtgctgccttgtcatagtggagagtaaagccatgctgggctaagccagcgcaaatgcatggagggagcatttggaccagacctagccagagtggaattgtccattccagctatcagaacttgagtttcttggcaagccttgccaccgtgggccaaagtgctctggggtcctaggtaaacttgaaaggcagtctaggacacaaagattacagttaattcctaggcatctcctagtgctggatgggctcagagccggaggactagggtgacacatgacttagggagacaccagccagtgcagccaagggagttcttgcaccactcctcccccaaccccaggcaggcagcaatgaaagtgactccttgcttctgcttaaggaaaggaaagcaaagagtaaagaggactttgccttgcatcttggataccagcttagccacagtaggttagggcactgggtagagtcgcaaggcccccattccagcccctagctcatgaacacttctaggcacaccttgggtcaatagggaagccactgccttgaagggcaggaccttgttctggca

SEQ ID NO: 198348 - DNA, 1000 bp, Homo Sapiens
gtgtgggtggctgaaagcaaactctgtccaccacacagacatagtctgagagccccctaagtgtgactgccctgggccacctggatccccctgctgggctctgagcagggacatgactggtctctgtgcaggccgcagggcagcttagtccctgtcacagccccagaatgatcgcccccaccaggcccaggtcggtcctcctgtaagtctcctggcaatactgctctaaaatcccacttccagcccagtgcagggactcacgcctgtaatctcaacactctgggaggccgaggtgggaggatcacttgagcccgggagttcgagatcagcttgggcaacatagtgagacacccgtctctacaaaaaaaaaaaaaaaaaaaaaaaaattaggcgggtgtggtggcatgcacctgtggtcccagctacttgggaggctgaggcaggaggcattgcttgagcccaggagttggaggttgtagtgtgctaggatagcgccattgcactccggcttgggcgacagagcgaggctgtttctgaatgaatgaacgaatacataagtaaataagaaaataggtaatacataaaataaaataaataaaataaaataaaataaaataaaataaaataaaataaaataaataaaataaaataaataaaataaaataaataaaataaaataaataaaataaaataaataaaataaaataaaataaaataaaataaaataaaataaaataaaataaaataaaataaaatcgcacttcccagcggttacacccggccacggaggtccccaggctggctgcgagggcgccggggaggtcactgttactccagccccgcaacccgcggcggccctcgcacacttccgccggaagtcagcccctcaggggcgccgtgctgatgtcacgagcccgcaggaagtctcgtatcgcgcccgggaggcgccggagcccagcggctggcggtaaggccgcctccgcggggctgtgggaagctt

SEQ ID NO: 198349 - DNA, 1000 bp, Homo Sapiens
tacgtgtatatacgtgtatatacgtgtatatatgtatatatatgtgtatatatgtatatatgcaatccatgcttatagaaaattgaaaaatacagaaatgcgagcaggagaaaagccacatagaactctccacaaaggtaacagcgaacgtcatttcagcgcgttttcctcctgtttccatttaaagagatctatagcagggacttggctgaaaccttgtatttgcatattcacaacggctgctgatcagaatcacaactggttaggggcttaaatacttaaaataaaataccccttttctgtgaatgatctgtttaagtgggtaaagtgctctggcaccctaagttaggagtttatatctgtgacactccttccctccagctaaacagcaaggggaggtggtcagggaagttccaggaatgcaggcctctggccctagagtggggtggggctgtggatgctgacagttgggggcccatcggagacagtcccaagcagcatggctgggtgtctgtggttccctcctatcaagaaggaacctctccacccttcctcaatgtgggcagaatcctgacacccaccccaccagctggatgaggtaatgccaacagtcaccaaaaagcaaaatgtgatttacagttctgtctgaattgttttcggagtgcagaaatgtaaaggaggtcttcatcatcctcgtgaaagacacgtacagggtgaaacgttcgaaagctatgtgaatgaggcatgatttcctttgtcagtatcagccaggtcatcgctgaccccggagttgggctgaccttccttggccgcccggatgccgacccccaatgcccctgtagcctggaactgctgggtcggcctgtgccttctccctctcacctccccccgggacttctgagttccttctccaaggagggctgtgccctagacttccgggccacttccctctacccttgtgcaggaaataacttacctacttcatgccctaattgaattc

SEQ ID NO: 198350 - DNA, 1000 bp, Homo Sapiens
ggtgacattccataaaagacatgaatccatactgtatataggatactactgtatgtatgttaaattttctgattttgatgattggaatgtgattctagaagggaaaatgtgtcctcagaaagtacgcattcaagtattttgatataaaagggtatgatctctgcaacttactctcaaacagtgcaggaaagtaataataatatgtatggacatacagagagtgacaaagcaaatgttaacagttggtaaaactggaagaagagtatacagtagttttttgttctcttccagctttcagtagatttgaaattatttcaaaaaaagttgaaaaatgcaaaagacttcatttgaaaagtttggctcagagaagtgagaccggagttgtgaaatattctctgaaaactatgcagcctagtcatccctttaaatagatgaagctttatttttggactcagcagatccctttgtccatattatcctggcctccagcacatcactgcttactcaggtagtctcggggtttacctgaggaggattcaaggatactgggatgaaatttatttgtaaaaaatactgtttatcacactgtccaataaatcattagtgcccactatgtatagctcaatgcttttacaatttagtactacaaaaaaaggcttttttcacccaagaaacaggtatttctcttgatttctgatgacaggaattacataaccatgactcttatgatgttgtcagacaggaagactaaggtcgaatgtgcggaccaacttcagcagccactgggctaaagctcagggtgacttcctaggtccgttcttttcctttggcttggttatttttatctgaattttaccactttttgtcctattttgaggcaaaactaaatccaaaaatcattttggctctctgggaaatgtaagaactactgatgtgctcaagttggtaaattcgggctctttcaggctccttctggccatacactcgatatggggaattc

SEQ ID NO: 198351 - DNA, 1000 bp, Homo Sapiens
tgaatagccattaattaattcaatttaacatcagcctaaggttttaagttatcaatagatcttggaaattatctccaagttgacatactatgaaacataatcactgctaaaataaaattttgttagagcaatgagtcaatttggttgaatacatatataatttttataactttaaatattaagtagaagtagtgctagcttatttgatcagtaaacctgtacaagtttagaaagaatacacccaagtagaataaaaattgatgcttatattgtacttaacactgataaatcatagaagatagctgttttgttattaaaccaaaaatattaaactagccttgcttagcaaagacttacctaaattatgtgactttgacttggttttttttttttttgagacggagtttcactcgttagccaggctgactggagtgcagtggcacaatctctgctcaccgcaacctccgcctcctgggttcaaggaattctcctgcctcagcctcctgagtagctgagattacaggcatgcaccaccacgcccggctaatttttatatttctagaagagatggggtttcaccatgttggccaggatggtctccatctcttgacctcatgatccacctgcctcggcctcccaaagtgctgggattatgggtgtgagccactgcgcccagccaaatttgacttcttaaaacatttcctagttagttgcagtaaaaaatacttcttaaatctagcatactaaaagtattagaagttcaatttctttattttctggaattttaggaatattcaatttatataataacttagttatttctataagccagtcagaatagagctccttacagagattttatttttttaaagcgatgaggtcttgcaaaaattatgacagagatatctaacatagctgactccatcttgcttctaagctcacaagctaactgtccttgctcatttcggggcataggccaagctaactatgggaagaattc

SEQ ID NO: 198352 - DNA, 1000 bp, Homo Sapiens
ggcctccgaaagtgctgggattacaggcgtgagccactgtgcccggcccttgttgtttttttaaatagagacagagtgtcgctattttgcccagcctggtgaactcatggtgaattacaatttttatggaattatgatgattgaaagagggccaaaaaaccagagatgggctaaaagtccaatttctcaaagagattttgaaaattgtaaatatataatcttaatgtcagtttttgagagttctagaacagattgtttaaaaggtgttttgtgaaactttagaaaggcaggtgataaactttgagggtgcttgtggttcttttcaaagcagctgaggcaaatgaacagatctagatttctgtaaataaatgatggcatctcctgccagcttggacagatgagaagtccagtttttgacttaaagtcatcttagagagggaggccactgatatgactgccctgttcagtctgtcagccatgtagatcaggggttccacattgggatcacctgggaaacgtagcaaaacatggtgcctgggccccactcccaagggattctgatttaattgatccagggtggaccaaactggtctggggctcccaggtgtacctaatgtgtagttagcatggaaaccctctgatgcaggtgagagactgtgaggtgatgggcacctacctggactattctatggcaaattgctcacctgagtcctgagacacctgtatgttccacagcctcacttccaccttgctgctcagtggaccagcagcattggcatcacctgcaagtttgatagaactgcagaatgtccagccctaccccagacctgctgaattgaaatctgcactttaaccagatccccaggtgatttgtatgtccatgaaagtttgaggagctgtctacaacatctctatgaccagaagggaatgggacacggagccagtggggtggagggcgggggcagtgacaaataagctgtgatgaacaggcaaagaattc

SEQ ID NO: 198353 - DNA, 1000 bp, Homo Sapiens
catttctcatttaaagagtaaatttgggtccaatcctttctcaatgattacaagtactaaatggaggtcaaattaggaagttttgcttagttacattttcaactttaaaactgaatttaaaaaaaagaatgctgtctagtagcaacagatttggattaggagttaaggcaactacaggatcagttctcaatttcctattaaccgttatcaagttgagcaagtagtattctcctcacctttaaaaaagattcattaataattattactagtgattttaaagcaatggttaacagcatttcttaaaatgaaatcttttacagaaccccatatacaaatggtaacacaggagctgctctcaaggaccacagagggagctttcaaagatttctacttaacacttcctaggcctcctgggtcctagacaccctccaggctccctgtaaacgtttgaaaataactgccctacatgaaacagaattatagttgaaaattttgattttatgattgggaaattcttttaaatgtcatagtgataccactattagcattttctgacatgatttcatttaatcctcacaatttgtgaaagactgctgtagttctcatcttaaagaggaggaaacaaacttaaagagtctgttagttcctttattcaacattgtgtactatatgctgggtgcgtactgctgtactgatcaaagtcataaaaaagactgaggcctcctcaagaaaattatgctctaaaaaaggaaatagagactcctctctcaagaatcttggctgtgaaaggaggtagttactataatgcagaagacaggaaaaagacattttccttctctgagaccagagggaaggagtcgagaatgaataaagatgcagattaaataatataattgaaagggaagaatgctgaatgaacttcgaactttcacctaattacattccttttcacactgatgtagtagttaggtttcttgaagtaagagcaatttgagaattc

SEQ ID NO: 198354 - DNA, 1000 bp, Homo Sapiens
ccagtccagacacgtagaataggtgcaacactacttgttaataagtaatattacaataatattgtctgttctaattaacatatgttttctgttatacttctttatatctatacatgtatgcatacatatatatttgtgtatatatataatatatataatatagttacataaaagctctaatcaccaagatatttctataaaaggacttcactatagattatcacaaagccttaggtttcagatgattatataccatttgattaattaaaagaacagaatgaatgatgacatgagcaattgtaccccaatgggcatctgcaattcaaatactatgagatattgaaggatcaacttagaaatgtttttatttcaaatgcttcatgagtgaaagtaaagccactattaatgtaaataccacaggtcccatttgatggagaaaatactttactgagataacacatagattatatgatagacccagccttcacaaatactttttaaaggaataaaacctatcaaagacaaaggtatagagagaatgccacaaaacttgtcagtggttagtaaagggagaaaataaatattaagacattaggggcagttactttgaaggctttatacctctggaaagaaacctgactcattataaaacaaaataacaacacaaaatgatatttttaaaatgatatttttttcccaggaaataaaaactcttagagatgtgtttttatcttcaccatctcatgcaggaagaaatggagaagaaaaaagtaggagtctaatcaaagaactttcttcttagacattctttcttcagacctaacggtatactggaatcttatgggtacatcccaagaagtgtgaggatctaggtccccaaaattttctctgatgaacaaccatcaactgttgcttatcttctgaagtgagaagactcttagcaggggaggaagtgaggggccttggtctcaaagtatagagaggtcacttctcacactcc

SEQ ID NO: 198355 - DNA, 1000 bp, Homo Sapiens
gcctggcctgggcccatacttgtaaccacttctttctttctgccttttgttactaggaactgagttgactctcttatttttcctgatatattccaggccctggagggacaggaaagccagaaatggacttcgtgagactcgctcgactgttcgccagggcccgccccatgggactgttcatcctgcaacacctggacccctgtagagccaggtgggcaggaggcagggaggggctgatgcggccaatgtgggcgcccttcagcagctcctcctctcagctgcccctcggccaggagcgtcaggaaaacacgggcagcctgggctctgacccgagccactccaactccacggccacgcaggaagaagacgaggaggaggaggagagttttgggaccctctctgacaaatactcctcccggagactattccgcaaatccgcagcccagttccataacctgcggtttggggaacggagagatgagcaaatggaaccggagcccaaattatggcgaggccggagaaacaccccgtactggtacttcttgcagtgcaaacacctgatcaaggaagggaaggtaaggggcactttgggttctgtggctcctggcttctttcccctggtggctcagtgttttgcaaggggtcacctgactttcccagcctctaagttttgggcctaccctgttgaactgccagccttatggctgtaagtatcgcaaccctttgccatcctccaccgcagttttattttattgtatttttttttttttgtagagacggaggttgcactgagctgatcttaccactagactccagcctgagtcacagaacaagagtctgtctcaaaaaaaaaaaaaggaaaaagaaaagtgaatcctccacacccttctagcactccctgctttaggttttttttataacaggatctcactctgtcgcccaggctggagtgcagtggcacgatcttggctcactgcagcctccgcctcctggggaattc

SEQ ID NO: 198356 - DNA, 1000 bp, Homo Sapiens
ggattcatggtattaatcacaactgaagttgttatttatcacctgctgggtgagaaataataattttggcacgagtggggcagcaggccagaggtaccaaattaagtaaaacatctaaacactagcaaggatcatttctctgattaatgaattgttacaaagaaaaagtgctactcattatctggtcttaccaatacaaagtggggcatgtaagaagaaaagtcccagcttgctcaggccaatttttctgtttatttcattcctttctttctttctctctctttttgagacaaatctgtgcacagatttgtgttgcagtcatgctattttttgttttgttaccaaatagaaatgaagaaataacttatgttttacatcagaaaatatttctggctattgaaacaatgtttttagtgacttctaagaatttaaagtaattttgaaataggacaggtaggttacctttaatttgttgaattaccttctcatatgtatataaattaaactttttactctaaagagtcaatgtatttttctttttctactttgaattggatactattgccaaagggcttgttttagagagggtaaattttcatttctatttttttttgttctttggcaattctgaataagaaaagctcattttcactctgacacttagagcaatttttgtctttcacaatgctatccaagaacttctacttctagtcatgatggagaggaacaaggactggatgtatcctcctgccttaaacaattgtagaaatcagaccaaatatataaaacaatggtttaagacatgaaacaatagtcagtttagaacagtgatgcctgcatgaaaagaaacaaaataagccattcaattacccagcttctgcttagaaggcatttctaggctgcctcacaggaaagaggagaacccaagcagagcccagcagtctccctgagttgagaatacaagaattccaggccaagaaggccacagtagctagaattc

SEQ ID NO: 198357 - DNA, 1000 bp, Homo Sapiens
atgagtcagaccctgacgacactgacacatacctgaaagtctcctgtaaggcttgttgctgtttttggtgccattttggtgtttcttgtctatggtggttggcagaattcctttgccatttaagatcttctctggtgaaggtggcactgacttggacatcaggacaggcttaattaaaggaggggtggagacggcagaggacgaggtggaggaggcagaaactgcagtagtggttgtggagttcattttgacattggcaccatctgccttcactaggttaggaattttctctaaactgactacaggaactggaacactgaaaaataaatgaacaaacacacacaattgtcttctttgatacatctagtctgctgaggaaccatacccgcttatcattatcagaacatttccttatcacttatttatactccttctataagcaagcagcatgagtccagttttgatgggagagagttctgtgccctggaaaggatcaacagggggtgcgaggctggcacagtgtcaggggtggcatcagggctgactgattaccgcccgtgctgagctgtccccatagatcctgcaactccccacttcccgggccctataggttggccatttccaacacagcaccttgggcagaacaaggcgcctgttgtgaagctcaggaagagataccgtttgtcccctgaagacaatgtgccactgctgaatcacgccccctccccccgctgctcagctagtcccccagcccggcccggatcgggcctgacatctgcttagctccggagtgctgacaggatcacaccacaaggaggcatggcttcaggccagcgtgctgcacggcgtgctgtcggacggcttctggatcactctcacatcctggggatgggctcaaattgagtgagccgccatgtagcattatccaatattccattttaggcagctagttatgtaaataggcaattctcaaggctggcaggtgaaaggatgaatttta

SEQ ID NO: 198358 - DNA, 1000 bp, Homo Sapiens
aagggcaacttgcctagggaagaggagagcctagggaataggaagtcaactgactggctggttaacttgtcagagattgttccatggaaacagacaggtactggacccctaagtcaggcttctggtaaggagctgagagaagtggagcaagaaggacacaggaagcaggaggaggaggaacggaagaaaaagagaaggggcaactctttgttgtcctcatgctttgaccgcaggcattttggggtccccaaattgaacccccaaattgaacctttttggtcctgtatccagcccacctttcaccagtgggtcttccacagaggccagctcatctcagaaactgccacagctaactggagacaggactcatgcaggaagcaacgacacatttgacaaacagtaatcatcattgcatttacagagttctgtatgcaccttttaaactttgtcatctttgaaagaagcagtatggcctttattagtgggtagccacctggtgaaagaaatctcttttggaaactctgacacttctgcaaagcaaggatgcccataactttctaaagactaatacagttggttgaaaaccattttgtcttttgcaaaggacaggccttccccctctgtgtgattcagcattgccccaaaggttgccagtttcatgaatgaagatttatttcttgcaactccaccatgtatttccaaaggatcctttctggtagtgtccctttgtatcaaaatctggtggtaaacagcttagcctggcctcaatagctaagccaccacagccgttcatcacagctgtgagctcattttactccagttactgttctttctcttgctttacaataagtagaccctcaaactatgtcattctcctttttattagcagatttctctttcctggcagttttttcatggaaatatttagaacttcccaactgtttaacaagagatccccaaagtatctgtagatatgacctaatagattagcttggaattc

SEQ ID NO: 198359 - DNA, 1000 bp, Homo Sapiens
ctcctaagtggatgcatgcacacacccacactcgtgcacgcatgtgcatgcacacgcacacacacacacacagcttctctttgggttgctgtgagtgccaagttaatgtacttggcactgagtaggtttcctgcaaatgaattctctccacctgttgccctgtagtcacattctcataggacttttcttatttttctcctcttcaactagttctccattcgctatctgataaaattcagatttactaatgtgctgttcaaaagattctgccctatgtcattttctctgtttccacaatagagaaatagactcgtcaacattaggtgggcagggccaagttaaagtgtaggggaagctgatcaatggaatttcagccaagggtcagtggacagtgaaagcaaagtgtgcagccacctaagtgagcaagcctcaatatcaaaacttattacttggagaaagcaggccaggggattggcaagggggcaaatacaatggatattaaggcaagtgctcaactagcagatatgctggagaatcaactcactgagaagatatgggaaataaataaataaggacctgtaccttctggcttggtgtttggggacccaaagggagcattgtagtagacaggtttaaaatgagacagtagaccagtgttggagccttacctccctcctcatgctcttaaccattcgaacaaggaacaaaaggcacagagctttttttaaaaaaatgtaaaattggctgggcatggtggctcacgcctgtaatcccagcactttgggaggccgagacaggcagatcatgaggtaaggagttcaagatcagcctggccaacatggtgaatccccatctctactaaaaatacaaaaattagctgggcatgatggcgggtgcctgtaatcccagctacttgggaggctgagacaggagaattgtttgaacctgtgagatggagcttgcagtgagccgagatcgtgccattgcactccagcctgga

SEQ ID NO: 198360 - DNA, 1000 bp, Homo Sapiens
tgagctgagtcatagtgccaaatctgatgccggtttagtgggtggtggtgaagatggtgacactgatgatgatggtgatgatgatgatgatgacagaggtagtgatggcttatccattcataagtgtatgtcatgctcatcctatagagaatcacaggaaaaggtaatgaatgattcagacacccacgaaaacagtcttatggatcagaataatccaatctcatactcactatctgagaattctgaagaagataatagagtcacaagtgtatcctcagacagtcaaactggtatggacagaagtcctggtaaatcaccatcagcaaatgggctatcccaaaagcacaatgatggaaaagaggaaaatgacattcagactggtagtgctctgcttcctctcagccctgaatctaaagcatgggcagttctgacaagtgatgaagaaagtggatcagggcaaggtacctcagatagccttaatgagaatgagacttccacagatttcagttttgcagacactaatgaaaaagatgctgatgggatcctggcagcaggtgactcagaaataactcctggattcccacagtccccaacatcatctgttactagcgagaactcagaagtgttccacgtttcagaggcaggttagttacggatcagaaggacagattgaggtgtggtggtttgcttgctctaaaagtaaaatgaaaattatagaaagatagaaatttggtaaaatggtacatcatcatttttaaaatcaaaacattcaacaaatcagtctccagtttctgaagtataattttatttattatttcaaacaattatttaacacattttggtttttaatttaattctctccaaaatagacaaaacaatttttatttattgtcaatatttcatactctacaggatgtcttttatgggtgggggcaattctgtttgcataatacatttttagtacactgcttttaaagcaagatcagagtatgctatttta

SEQ ID NO: 198361 - DNA, 1000 bp, Homo Sapiens
ggtactagctaatacaaacacaaactataaaattatcagtttaaaaataataggcccaagaaataagggggaaaaaagaaaaaaataataataggccaggcacagtggctcacacctgtaatctcagcactttgggaggccgaggtgggcagatcacttgaggtcaggagtttgagaccagcctggccaacatggtgaaatcccatctctactaaaaatacaaaaaaattagccaggcgtggtggcacatgcctgtaatcccagctacttgggaggctgaggcaggagaatcgcttgaacccgggaggcagaggttgcagtgagctgagatcgcaccactgcactccagcctgcatgacagagcgagactccatctcaataataataatgatttactgaatgcttcccacatgccagctactttacaccaactcttaagtggtagtgctggttttcccgtctgtgttacaggtcaggagacgcaggcacagacaggtatactgacttgttcagggtcgtgcaactggaagccagcagagctgggattcaaagctacaccgtctgcctccagatttcacactgttaaccaccgagctacaccacacaatcattggaaaagaagagaacattgcccttctttactggtgccatggtgttggatgtttagaaaaaccaagaaactgtgcttttaaaaaattagaattcataaaagaatttgttgtggctttttataagacagtatacataagtcagtagtttttctctgtacaggtgtaattatgtacccagtagtgaaggtggataaaaaccattttattctgaataatgccaaaattataaattatctgggtatatattatgtgagaaagacacaggactgtatgaagaaaactatgaaatcttattgaagaatgtaaaataacatgtggacacatggaaagatgcaccatgatttatggtggggaggccacacaaaaatgccagttcactcaaagaattc

SEQ ID NO: 198362 - DNA, 1000 bp, Homo Sapiens
atgagccactgtgcctggccaaatgctatttttaaatagtgttttagtttatgtgctatataagggctggctattgctgctgttgttaatgctatgacaataatgatgatggtgtccagtgtggtacacaacttatttaatacattttcctcagtagtttataagaaaaattttctaacatgcagaaaagctgaaagaattttgtaacatgtgtgcctaccacttagattctacaattaatatcttgttttattttctttataacatgtcatttatcaaaccctataaccatccatcaattcattttgtgtctatgaatcatttcaaaggaagttgcagataccataatctttacccctaaatattccattatttaaaattttaaattttaattgaaaggtaaatactgtgtatatttatgtgtacacatgatgttttgatatctgtatgtatgatggaatggctaaatcagggtatttaacatttgcgttacctcacttttttttgtggtaagaatgtttaaaaggtactttcttagcacttttcaaaaatattttattttgttactaactgaggtcaccatgatgtacaatagacctcttgaacttattcctcccaactgaaattttgtgtcctttgactaatagctccccaaaccttctacccctcagcctgtggtaactactattttgctgtttatgtaaattggactttttcatttaaaatttttttaaattttatttgcagaaatgtatgaagtacaagtgcaatcttgctacctgcgttgaattcgtaatggtgaattcagtgctttttagggtatctttcatctgaacaatgtatagtgtgtccattaatttctcatcatccaccccttaccaccccctaatgattcccagtctccgttgtctgtcattccacactcaatatccatgtgtacacattgtttagctcccacttataggtgagaacatgtgacatttgtctatgtctcacttgt

SEQ ID NO: 198363 - DNA, 1000 bp, Homo Sapiens
gaactgtgggtgggggtgttgggggtgggttctgagcagagaagcatcgtgatctttctcctgatttaaaagcaccccctggctgctgagttgagaaagactgtgggaagatttgggtagaagcaggggggctgagatttggcaacatccaggcgggagatgaagtcagtcaataggatttcctgacagactggatgtaagctgtgagagaaggcaggagtcaaggttgagtttggttctaattgaattattaagtaatttttgaaaacactactgcctttcccaatcctaccaagtaaaggatgctagattaaagaaatcgcaagtcaggccacacaggtgcagtggctcacacctatagttgcaacagtttgagaggcagaagatgggagtatgttttaaggccatgagttcgacaacagccttgcaacatagcaagacctccctctacaaaaataaaagaaagaaatttaataaaataaaataaatatggccgggcatggtggtgtgtacctatggccccagttactcaggaggctgaggtgggcagatctcttgaggctaggagtttgagaccatcttggacaacatagtaagacttctctgtctacaaaaattaaaaaaaaaaatagcctgatatggtggtacttgcctgtattcccaggtactggtacagctgaggcaggaggatctcttgagcccagctggtcaaggctgcagtgagctatgattataccactgcactccagcctgggtgacagagcaggaccctgtctcaaaatacaaatatgaatgaagtgaaatctcaagtcagaccagtcccttctaggctatgcaggccttgcaaccacatagctgcgtgatcaggattgtgtggctgtggatgaggagacccctgcccaattgttgttggctatataatcagtttatttttaaatatagtaatcagatatatttcatcatgcttaatggtctcaaatatgtgtgggttttggaattc

SEQ ID NO: 198364 - DNA, 1000 bp, Homo Sapiens
agacagtcaaaagaaagaggtttagagaccagtcatattggattagggcccactttaataaacttattttaatttgatttcctctgtaaagatcttgtctccaaataaggtcacagtctgaggtaatggggacaaagacatcaataggtaaactgggggtagtaggtaaacaaaatatatttcatatcattttgtattaattctggatttttagctaaaattgacaaaaatcaaatgacttgaaaactgtgggctaccattccttcaaaatctccatcaccttgagctaaattgtgactgctttctcctgtttgcagtaatttctattatctctacattttgcttaatcttctaattccttaatttttggtgtcacctataaatttaagaatatgcaacaatcatttaatgtccttctgttctttaaataatataagaaaacttagactgggtgtgggggctcacacctgtactcccagcacttggggaggctgaggggggcggattatgaggtcaggagtttgagcctagcctggccaacattgtaaaaccccatctctactaaaagtacaaaaaattaactgagcgtggtggtgtgtgcctgtaatcccagctactcgggaagctgaggcaggagaattgcgtgaacctgggaggcagaggttgcagtgagccaagatccaagattgcgccattgtactgtatcccggccaggcaacagcgcaagactacatcttaaaaaaataaataaataaaataaaataaaataaaatttaccttcttattccaataggtgaacagtgctatactgacaacagctaaaacagctaaatttagtttttttacacctgccttgagtccagccatcttcccgttatgtccaagggactattggaccgactatgtggtatgcttgaactgatctattattaaatggacaaaagccatgtttaatagtcactcaaaaaaataaaatggatctaataaaattgtggaattc

SEQ ID NO: 198365 - DNA, 1000 bp, Homo Sapiens
tgaaaataaaataacatttaagtactttaaactgtcattccacaaaccttttctcctattactttttggcaaatataagtagctctgactaactaactaaattgtaccttcaataaaaatctaccactttgttaaagttgaaaaaaaaagaagtttgaatgaaaaatacacagcaaaacatatcataaattcaaagtttcagggctaaaattaaagatattgtcaagaggtgtttttgaaacacattgtactaaaacctagattaaggacaagacttggcagtaaaaagataactaagtaaatactgtatctcagggagagattggagacttatctccttggtggcatgtgttatcttccaaaggggaatgaaagctggggccatggagatattccagcagttgtaaccagtagaaatttgctgtatccattcccaaccttgcagttgtttatttatattccagaaggtgaagactaaggatatttgccttatctttccattgaatatttgttaactgaaggaataaaatgtttgtttcatttctccggaggacaaaagaaacagttgtccttctatataatgtttcagattcatatttttggggttcctcatttagagtatagatcaatgtacatgtaagatgacaggtatgtgtatttcctcacatcacccaagaatagaaaataattagtgaaccaaagcagtaattaatataagtaataatatgttcacgccccagaaaccttgtgtctactttcagaataatacagatatagatattaaaaacttaactggtttctttaagcagtgttttgtggttctccttatgggaatctttcaccttcttggttagattaattcttagatatttcattttctttgtggctactgtaagcgggattgtgttcttgatttggttcttacttagaatattattattgatagaaatgctactgattttcctacattgatttcatatcctgaaactttactgaattc

SEQ ID NO: 198366 - DNA, 1000 bp, Homo Sapiens
gccaggctgctctcgaaatcctggcctcaagtaatctgccctccttggcttcccaaagtgctgggattacaggtgtaagctaccgtgcccagccaatgcgtttttatttctagatgtaccaactttagacagtgcctaatgatttctgatatgaaagacaagaggcaaggtatttaatagtctcccctcccttataatttttattagttctgttattatttttagtgcctctagtgggcatttgtaactttaaatatatttaatcttatttctcttgattaatcaccttctgacagtatcttttctttcataccatgtaaaatgaggaaactcacccatctatccttccctcccacctccccgctcacagctatgtctttccttttatatcaccaagatttaaaatattcatactctgttcagtaattattgagtcatcctccttaatactaatttagttaataatttaatttttggtcttgcctataggtcaagtaaaaaatcataaaccaataatgagaatttgcaatattgtgacaatataaatattagtcactaaagaagaaagcagcttgagtagacctgaacaggaggcaatgtcactaaggtagaatgagtgcaaatgttcccgacatttatgtcaaatgaattctcattgttatgttctaccacgtcacaggtttgtctcaagctaaggttatgttctccctaaaatactgttaaatagagcacgcatttagtgaacataaaatgtatatttacatgaaatgtatatagacactttcaaagcattaaaatgaatgaactgtgaaaacaccttccaggccagggatggaacatcatcgaaagtgccttcactggctcccatctcttcccacccttcccaccagctattggtaaaagaattgtggctgggcacagtggctcacgcctgtaatcccagcactttgggaggctgaggcaggcagatcacgaggtcaggagattgagaccatcctgg

SEQ ID NO: 198367 - DNA, 1000 bp, Homo Sapiens
tacaaaaaatagaaaaattagccaggcatggtagtgtgcacttgtagtcccagctactcaggaggctgttttgggagaaacccttgagcccaggaggtcaaggctgcagtaagctgtgattgtgccgctgctctccagcctggacaaaagagcaagactctgtcttaaaaaataaaaaataaaataatttttgtactaacgtggtttgagagcattgaaaaagacggaaacagtcccaattcatccaacaatctaacgtcataacctgacaaggatggtaagaaaaactataaatctgtctcaactatgaataaagatataaaaatcttaaaatattagcaagtcaaatctatcaggggattaaagtaataatataccaaggccaaatggacatggaaggaggagtcatactagaaaaaggaaaagccacatgatgacctcataataaaaaggcattaaaatatttctttccatagctgaagctcggggaaaaaaaaagaaaaaaaattttatcatttctgataaaaacctgcagcaagtaaggaataaatagaaggaaatgttcttaagttgatcaagtacatccatcaaaacccaaaagcaaatatcgtatttaatagacacactagttagtagcatccttatcaaactcaagaacaagagaagggtgtctgctatcacagctactattcaacgttcttctggagtcatagcttgataagaaaacaacatgcataaatattggaggcagaattataatcgtaggtggcataatgatttacttggaaaaatccaagagaattaactaactactagaagcaatgagtttaataaaatatcttgagtacaagtaaatatacccaaatcaataacttcttgtatacatgcagtaacaattcaaaattttaattgaaaatattttatttgacagaatgagaccctgtttcaaaaaatatatatcattcatgatagctataaaaactttaaaaattaggaattc

SEQ ID NO: 198368 - DNA, 1000 bp, Homo Sapiens
gatctaaactattagtgattcattaatcagacggtatcccatctatgaaacagaaaagcacgctagtaagctgaggagaggcagtgggctttataggcagaaaagcctgaagaaagcagaaacaggaacagaaagccgattggttgtttcaaagttactttctttaaaaggataaagcagagccaggggactttcttattatgtcagctcaggttgactgggccccttttaattgattgctgtgaatctgttttttgttgttgttgttttgtgtttttttgggggtttttttgtttgttttctaactggctgattttaaagtccagtttggggacctagcactagtgattccattctggtttggtctgttcttctgggcctagtgcaagagcttagtccaaaacaatagcctcccataaatttaacactactctcagtaaaaataaccattggtatttttatagcatggcttttaataatgcctatattctcatatttgcaaagtgcattttcctgagctgattttatcagtggctttacttccaaaataatttccttttaggacaatatcagaacggcacatacaagtgtccccaagtcatatttggaataagatcacttgggaacacaagtcaaagaaggtatgtaaccaactcacctcatctaatggaacaggtttccctgggcaagcataagattattgtacattgttcaaagatttcaagacagatagcgtagatttcaagaatgccaaacataaggcagagaggagtctactgggatattttcccgaattgtggcttgtatctctctctggtctattagaagacctcctgcatacccctaacaagagaaaaaatgacagatgaaagaaagagagagagagagactttcttgtaattaatctaataggcatttttaaaattgaacacttggacttcctccaactggcatctttaaaacacccattgattaacaggcaaatgggatgagtgaattc

SEQ ID NO: 198369 - DNA, 1000 bp, Homo Sapiens
atttaagtgtgtttaatgtaaaagtgaaaacacacagcctttacgcagggaacacaagatataatacttggtaggtggaaagttcatttcataacatgaaatctttttctaaatttgaaaaaaaaaactttaaaatggacatatcttcttttttaaattgttaattgcttcttttaaaattaatggactaatcgcaaaatccagtgatacatactgattatttcatgcgttttactgaaaataattttgtagtaagaggattgttcaaaatgacccgctctgggggtcaaggggtcgggcccccactgcagagcctggaaaggcaaagacccccgaggctgcgctcccctcgcccttcgtgtcgggtcctgccccacccggcagctcctgggacccgctgtgcggcccagggctgggggcccaggctgcccctgctgagaagccaggtgcgcgttcagcccccgggagtctctccgaggctctgtgcgcctcattcctccacggcgtcactttttaaaaagataattgctaattatgtattttaaaatgttagcttccacggaccgaatgtttccctttctgtttagagtggggttcctaacctccttccagaatagctcaaggtccccagtgcagccgctttgaaacaaaaccacttggtaacaggagcgcaggactatggcgaaaccgccaggaaagcttcctaaagagctcaaacaaaacaaaacaaaccttggaaagctcaagaaaagcatcgtgggtgacaccagaatctgggacttcattcattcatacattcattcattcatttttaaagagggtcgttgggaaggaaaaggggaggggacgccgggctgcagggctcctcgcaggacacacgctccccctccacggggaaccgggggtgggggcgcgggcgtggggggccgcgccagccctgcgtggggtccgggaccaccgaaccgcgaggacccctgatcccgggggggccactgaattc

SEQ ID NO: 198370 - DNA, 1000 bp, Homo Sapiens
ggaatgatgtgaccagcttccagcgctggcccatagaaaacctgacagcttcttttttccttccttcagttgggtgtcgatgtccagagagttcctagaagccgtaattgaagacacaatccagtcatcctgggaccctaaatgacctccctgccccacccctgcacataaacctgacttgaatcacctggactatttttctgagagagtaataaactttaattgggtttgacctattccaagttttttgggctatctgttacagtgcttagcttatctcacctaatacagggactatgcaaccaagaaactggaaataaaaacaaagataattaaaccattttataataagcctattgatatagtttggatgtttgtttcctccaagtctcatgttgaaatgtgatccccaatgttggaagtgggacctattggaagttgtttgggtcatggggatggatccttcatgaatagcttggtgccttccccacagtaattactcacagtaattaatgagttcttgcttgttagttcacatgaaagctggtcatttaaaagagcctggcatgtctcctgctccctctcttgccctgtgacgtgcctcctccctcttcaccttcctccatgagtaaaggcttcctgagacctcaccaggactcgagcagatgctggtgccatgcttgtatagcctgcagaactgtgagccaaataaatcttttatcttcataaattacccaggctcaggcattcttttatagtgatgcaagacagactaatgtaacaattttaaaacaagcttcaagcttttgtagagcctaggaatagtacctccttttaagtcctacagttcatgatgctatgaaaaggaatgggaaaaataccaattcctgtatactctgtggtagctcacactgcatgcagagtcatgggagtagaatagatgcaaaactcttctaaacatgtctttgtgtttaaaaccacatcacattttttctctttg

SEQ ID NO: 198371 - DNA, 1000 bp, Homo Sapiens
gtgcccagattcccccatcagtttttgctaatctgtgtgttcagggctttgcctgtcctctctctctccctgccttgcagtcatctgtaggcaccacattcatttttgaactgttctctaatttctagtgcccatccatcacttcacatttcttaagtaagccaactctgggcatctcagttgatattgttcatttttaactggaaaggaaactataatgacagcatttctggcacataattttttctttttttttttttgcgggggggaagtcgcttgccagaagatcgatgagaaaatgctgagtatgtgtgtatttattatcaactatgcagaaaatgggcatccttgctcatcaggctacagagggtgacaatattgaatttccattgttcatcccatcactgcccagtagaacttcccatgatgttggaagtgttctgtacctgcactgtccaatacaggaggcactagcgacatgtggctgttgagcacttgaaatgtggctagtgagactaaggagctaaattttaaaatttcatttaattttaatgagtttaaatttaaatagacccatgtggctaatggctaccatactgaacagggcagatgtagatctcttccacctcctaaccactgtaccccaccttacacatagctgcatccttaacagagaatacactgccctccgcagcctcttgctatccattctcttcagctttgccttaaaagcaatcagactttttccagtgctgtctggagtttgacacaaggcattcccttggcttgtgctatctgtagatcattctgtatttcaccgtggcagtgttttgttctaaagttggaaaagaccttgtagttttttaaagagccaaaatacaggattgtttctaagaaaggaggtggccagaatcagtaaatttaagctcatttgtggaagcttccaaatctcaaacctagggcagtattgaacacctctccaaaaagtcagattaagtat

SEQ ID NO: 198372 - DNA, 1000 bp, Homo Sapiens
ttatagtgaagcactgtttggcctttatattctctggactgggagtcaagaagcatgattagcggttccaccaatatttctaactccctgtgtatccttatgtagatcactggtattcatatggtgttttatttcctcagtcctgaacttcatgtccaggtagagatttattccctagagtaactaaggaggaggagtgttagccagccccttcctccttcctcttggtgactagagtgttagcacgtcagtccaattctgaagttcaatcattggaagcctacttacccatagatttgagccacattctctaaaattgatttcattgctaatacagatgaacaggcttgctccatactgttctacaggctgtgcactgcacaattccacagatgccatttgcactatagtcatggcggcctcacagtgatttttatctgtgacctaatcttttgccttatttcacacttggttcagaactcaggcaaggtgctcgttactgggctctttttgcaaatttcaactgttgcttttctgatatccagcttccttatttatgaaatagggaagttaaaatggatactcattagtcatcttttttcaacaaaaagcttctttgaacctaaaaattctctgaaattctggtgaccaaaaactgatctccccaaatattagcagttggataaaaattgattaaaataaatattttaacctcaaatactggggaaattcagtgattcgggatctttgcaggaatataaaaaagcaaagtcagcagtctaaaactaagctgtccaatacagaagctactaaccatacatggctagttagcacttgaaatgtggccagtccaacctgagctgtgctgtcagtgtggaacacacaagggatttcaaaagcaggaagaaggagtggcttatttgcaaaaggaattaggtttgcacaatcagctcaattatctcattgataaatgtatattaactatatgttaaaataaaaa

SEQ ID NO: 198373 - DNA, 1000 bp, Homo Sapiens
tactcaatcaccgtacccgaatcccggccatctgctgaggctgcaaagtgaagcaaaaaatcctaacaagaaattgtatgttggctaggtctctcctgataaaagatgaatattgttaatatcaacaatactcaaccaaatacaagatgcaggagcccacatcataagtagagcctctgactgacaaaagagggtcaggcacttggaacagtttaataattgaatagggaaatcaacaaggcactttgaaagaaattaagtggggagctgaggcaggagaatcgcttgaacgagggaggtggaggttgcagtgagccgagatcatgccactacactccagcatggtgacagagtgagactctgtctccaaaaaaaaaaagaaaagaaaagaaaagaaattaagtgggagagaggatcaattttttttgcagtaataacttactttatgattgtcttgttaaagtcaggcatcaaattgggcatgtctaaagtggcaatctacattctggcagaataattacaaagaaaagtcacttgatttagaaggaacaaagaatcaaataatttgcagttatatttaataattttggtcatagttaaaaatttttaaattctatttttaaaagataatattctggccgggctcggtggctcatgcctgtaatcccagcgctttcggaggccaaggcaggtggatcacttgaggtcaggagttcgagcctaaccaacatagtgaaacccccatctctgctaaaaatacaaaaaattagctgggtgaggtggcacacgccagtagtcccagctacttgggagactgaggcacgagaaaagcctgaacctaggaggcagcagttgcagtgagccaagattgcaccactgcattccagcctgggcgacagagcgagactctgtctcaaaagaaaaaaaaaggataatattctgatgtatccttcttttgtgccatttatggtaaaaaatttgggtacccacaattgaattc

SEQ ID NO: 198374 - DNA, 1000 bp, Homo Sapiens
tgtaagttggaactctgcccagagagagattgcccccacccactccgagacagtcttgctctgtcatccaggctggagtgcagtggtgtgatctcagctcactcttcaattctcctgcctcagcctcccaaacagctgggattacaggcatgcgccaccgcgcccggctaagttttatatttttagtagagacagggtttcaccatgttggccagactggtcttgaattcctgacctggtgatccacccacctcggcctcccaaagtgctgggattacaggcatgagccaccacacccggcctgagtgatttttttaaggctcaaaatccactaaaccaaatcttcctccaagagcattttcattataacactaccctactttataaatttgcaataatttaaaatgggtcctggactaggcattctctatttgcccccaacctcctcaaatcaagcctattctctacccttcaagctctgctttgcaccctgtgaggctgtcctctggcattacactgcccaagttctcttcttacttccagttgcattgggccattgagaggcacacataggaggaaatgggaggatgagaagtaaaagaaattggggttttcatttctctagctcccttcccacctcacaaagccatttcctctagggctacaggtcctgaccactagcttggcttccattgctccagctctcatcagtttccagtgttcctcttcttttcccctcagacttaaaagtgtactaatggcttcccaatagtgttaggccttgggaacatgacaatactctgctgctctccttaacccttcccaaaactctacaactagtccatttatttcctgtcaggaccctcactgatgtagatagctccccaggcttaaaatcacttagtctgcttaaggttcacaatcaactgtccccaccaacctaataaattttaccacaccacactccccaactgtctctgctctagtcaggtaggaattc

SEQ ID NO: 198375 - DNA, 1000 bp, Homo Sapiens
aaggctgctgaaccacttcagtgggctaccttgcctactggcttcaggttggatttggtcagtgggaggcgctgggagatcaaacggtggaaagacgatgaagtcaggatgttcatttccagctccctctgaaaacacacactaaacgatggctgagtccctctatcaggagtcacagctcctatcaggtaaccactaatttcccttgtgcctgcagacctggagtagcaaggactcccactgttactagttctggggtactgtgttatcttttttttggtttccctaagccctgtccgcatcattgtaaatggttactttttggtaaacactccttaaatgacacaatctgagcgtgccacctgtttcttagctgatacacaagtaaaccaaaaatcatatgcaaaaatagtctggactgtgatagaggtgatctcaggaggctggaggtgtctagagtagaatggaacagtggctaaggaagtttctaggagttatttctgctctggtctgtattctaaataatcaaatcatgtttgcttgacaaataggtcaaaactttagactttctaaaactgtaaattactcttcctagcccatccaagaaatatcacaatagcctctctacataggggaccagctccctgttttcctaccagctttctaggtccacttcaattgcatgttaatctccaataaacacctagaaagaggagtaaaacactaggatttcaggttcactttcggtggaaataaagccctcttgagaagcagaataaaatacaacaccactgaagcagaaaaacacaacttgcccttccacctgaggtctgccttctagtaggtaaacttgaaaggatggagccaaagggcagcagaaagaaacgagcagataaaataaagagtatatgagagcatgtgtgtctgcccagaatgcaagtgcatgcgcttctgtccatgcctaggcatgggctctgaatgaatgtttgagggtgaattc

SEQ ID NO: 198376 - DNA, 1000 bp, Homo Sapiens
tttcattgctcaatttatatattatagctcatattaaagtcagtacaaacttacatctcgaaaacagattattaaatagtgattcatgattcatttgataatcaacatgattttacttacagtattccccttttcctgcggactctcatctatgctgctcttaaaagctatacatcctgggtgtggcatgacactgtaggaagtcctcaaaactaatcagggcaggggaaataatgttggaaatgaatttgagaatttgttttctcttccatattctaaaacagctagcaagtcagttacattcatcttgtgagcacttaacttagttaccaagtgtggaaataaaaaacaaatagttcatttgacttcatttttacagaaatacaagggaatggggtaaaattagtgcttaatatgaatgctggaggttaaaaagtcacccattattcaggaaaggagtggctggaagggtaacacacttgcagaaaataatttcttgtgtggaccaaaactgaatgttgctctctgaatgatcatattatattgtatgtataggttattcaaatataatagaaaaacttaaaacaatgtgcaggctttggggtcaatatactattctgttttgtgacaaagcctatcttatacagacctgatttcacgacactatccaagtaccattagaagtaatcttcggagaggttatatttctaggtaatcattatggcctgtgtatttaaccaaatctagaatccattatgtcatatagagtggtgatgattcttgttagatagctatatgatggaattactgttttgcattataaattaagtgttcagttgatctgatgaaagttgatgaagcctcagtagagacaattctacagattgtgtcttgtaagacacaatcttacaagtttacacaaaattacaatcttacaattcttgaaaatgaattatatacttagttccaaataaaacacaatatttactaaattaattat

SEQ ID NO: 198377 - DNA, 1000 bp, Homo Sapiens
cactctcaggcaagaaattgaaacttatcagattacattcagtgagccaccagacccctcatacatcaggactgctttcttatccctccttaattcttgttttcccacttccccactatataaaccccccaagttgagctggtttgggagatgaatttgagacgttatctccctttctcctcagctacggcacctgattaaagccttccctggcagtacttgtctccgtaactgtcattctgtgtggtgagcctgatattctgataacaataactcacgtctatttcaatatttaatattagacgtgctttggatctttatttagatatttggtggtgtttttgtgaccaggaatatgccataagaagttaaatgttgtttatatcaatgaacctatggtaacattgctttcatcatacattatttcatttaaagtcacattttccaggaacctatggatgatgttaagtgagaacttactgtattacaaagtttgtgcctcgtaggcttcagtgccaagtgacaatctatttcttatatccattaaatacacaagtacattaggcaaaattaggtgatcttataacaaactgttttattaagtttcaccaataaattaaatattgaaggataactgttcttcaaacacaatcttaatttaataatttactatttactaatttggaaagtgatacatagcaaggagttgctggcctaaatggatgattcttaattcttcacattaccataactacaaattattgtgattgatcatcatgggaaggcttttatgataggaaagtctttatgtagagaaatttgcttctcacggaggctctttttgttgggggctggggatgggaatacattaagaattttaagaaatagaaagaaaaaagtctattgttatgacattgcttgccaagatatcctaatggtgaaaaaaattagtcctgtgaaatatctggcaggcagggcaaacagcaaaaactcagaattc

SEQ ID NO: 198378 - DNA, 1000 bp, Homo Sapiens
atcccagcactttgggaggttgaggcgggtggatcacttgaggtcaggagtttgagaccagcctggacaacatgatgaaaccccgtttctagtaaaaatacaaaaattagctgggcatggtagcgggtacctgtaatcccagctactcaggaggctggcacgggagaatcgcttcaaccggggaggcgggggttgcagtgagtcgagatcgcagcattgcactccagcctgggtgacaggagcaaaattccatctcaaaataaaaataaataaataaataaataaataaataaataaataaatatataaaataaataaaataaataactatctcaaatccagtggtctgcagcaagaggaagtcacctgaacaaatgccctcataaagccaattcattactccatttcacattccactaatgaaaagccacaggaagactttttttttaatctaaattttgatctcattcaggtccctccagcacatcttacctgccctaaatgacccggtatgtggcagactagtcataccaaagttggaatacttaggaagaaattaaaccgctgtttgggcccaaaccttaaggctcctgttccaaatccctctcctaaaaccacctacatctccctcatttctcacagcatgtctatcattatatgtcccttttgaactgtaaactacacagggcacagatcgtatctgtggctgtaaacatatttgccttggtccccagcacaatgcctggtacgtgggaggtgcttagcaaacatttgttaaatgagaaggggcgagagagggaagcctggaggtcaggtggcaggcatcctagcttgagtttcagccacacgctgcctcaggaatcacgcagcccactggcagagttgagggttgacaggaattccgagactgcggtgcctggggcaatgtggtaaaagctatttttgtttcctcatgtctaaacaatgacatttgtcaatggacatatacagaagtgaattc

SEQ ID NO: 198379 - DNA, 1000 bp, Homo Sapiens
attttctattcatcgttctctctccacatgctttgtatgcttttgctctgtgcggctccaggctagatagaggctggaattgttttgggggaaagctgcagaggcagagactgatacaatctttcaggtgtatgggaagaaaataataaaagtggctcagtgtggtgagaagatgctgcagaaggtgctgttgggcctcacccagggctccctttgcctgaagatgggcccgttccccagctgctgctgggtgaccagcgcttacaactccagcgacttccctgggggccagagctgctgcccacaaacagccgaaggtgacagtctctcctgctgtcagcctacttggccccttccgtaaacagaacaacttcactgtgccatgatttactctctaaaggctctcagtgtgtcgggtcaaggccaggccttccctaagaccttcccttcccttcctatcctgctccccaacctccctcccatgagggctttactgaagaagctgctccttcagaaaatcttgtgcctcgaatccctgcctcaggctctgccttgagggaacatgtcatgtcgcctcaaatcctgacatgccttagctaaatataacaggcataaacactacacattggaggctctgccctaaatagaaaagcttccaagcacattatttttagcaagagaaaataacttgaacctatcagaaaacatgctaaagactggactgaaagtgaaacctagaaattttctggttttacaagcctggctggagctaacatacattcacggcagatgcacacgtgacaaagattaggtctgtgctgcactcagagagaacacgaatcaaactttggcatggcatgttccaggcagtgtctactggactccagcctgtggtacaggcagtattggtcaagcctgtgcccagcctctgacagccccttgctggggccagcaccccagagtccttccaggtcttgctcctagaacccacagggaattc

SEQ ID NO: 198380 - DNA, 1000 bp, Homo Sapiens
atcatcatattattcgacttcaaattacaccacaaggctataataacaaaaacagtgtggtattagtatgaaatagatatatagatcagcggaacaaagcagaacccagaaataaagctacatacctacaaccaactgatgtttgacaaagtcaacaaaaatatacaatggggaaaaaagcctactcagtcaataatgctgggaaaactggatagccatatacaaaagaatgacattgaactcatatctcttgccatatacaaaaattaactgaagattgattaaagatttaaatgtaagacctgaaactataaaaatccagggaaaactcttctggagattggtctaggcatgaattcaaaagcacgagaacaaaaacaaacagacaaatgggacttaaaagcttctgcacagcaaaagaagtaatcaacagagtaaacacacaacctacggaatgggagaaaatatttgcaaactgtgcatcctacatagggctaatatgcagaatttaaagggaattcaaacaacctaacaagaaaaataacaatcccatttaaaaagtgggcaaaggacatgaacagacattcttccaaagaagacatacaagtttccaacaaatatatgaaaaaatgttcaacaactctaatcatgtgaaatcacaatgagatatcatctaacaccagttagaaaggccattattaaaaagtcaaataacaacagatgttggcaaggattcccaccacacaattggtaggaatgtaaattagtgccacctctatggaaaatggtgaactaaaaatgtaactaccattcaatctagcaatcccactactaggtatctacccaaaggaaaagaaattatatataaagacacctgcccttgtatgttgatcacagcactatctacaatagcaaagtcatggaatcaacttgtatccatcaataaatggctaaatacagaaaatgtggtgtatatatgtacatacacatcatggaattc

SEQ ID NO: 198381 - DNA, 1000 bp, Homo Sapiens
atccagagacagagaaactcacaggccccagatcttggcaggagataggaagtggtatgagcacaaaaggggagctacgcaccattaacaaggaaacagaatctgaaaactccaaagaacacgcacgtggatgttcccacacccgtctgctcttccacattccagagactcccggcctctaaaagacacctttttattatggataatactggtggtatgctggcatgctgacactgggtaggggtggggtggggtggggttgatctattgccaatttccttggtataaatactgcttccatggcccatttcaagcaaacaacattttaactactagcccttaaaaatcctgattatttaacaaccagctcctgcaagctggtatgaactggctccagcacaccactggataatacttaacacactagaaaccctggagaacaatccgacacccaatataagcgtctcttctacagaatccctgacagctgtacaccaaacctgttttgctctccactggtgagctgctcatgaagtctaacatctgcctagcttagaatgccctaagtatgcccactggagaagtgcaggataagtctacccatctgtggtgtcttcaacatggcaaccttttacatacttgaagacagtggtcatgaaccttggggtcttctcctttcttctccatgctgaaacatatccccagatccttctactacccttcacatcagaagtataacagcccacccacaatacaatgaacataaaaatgtcccaaatgtaacataacacaatggggccattatctcccttgtgctaatcagagtaagaattgtcttgcatcacacataaaatacactaacactaatgatagctgattagttaaaaaaaaatcacacacacaaaaaaatctcatatgttttaaggaagtttaggaatttgtgttgagccacattcaaagctgtcctgggctgcatgcagcctgcaggctggacaagctt

SEQ ID NO: 198382 - DNA, 1000 bp, Homo Sapiens
taccaagtgctggtgaggatatggaaaactggatcactcatatattgctgatgggaatgtaaaattatatgacactcttgaaaagacaaaactgaagtgacagaaaacagaccagtggttgccaagaggacaggtgtgggtacgaaagggtagcacaaagaagttttggggggagatgtaagtgttccacatcctaactgtggtggtggttaaatctacacgtgttaaaattcatagaattaacaccatgaaaaagtctattttactgtatgttaattttttaaaaaacagtgatctggaaaacattgaacagttggcttttaaagactttgagtggaaatgaaatgtttttgaaagtatttgaagtaagtgtttcctaccaccactataatactttaccagcaacattttagtcttagctaccattttctatctcttcacacagtctcaggagatgttcccgtattctgctcccaacagtgtattattaagcccatgacaccctttccttttctgatcatattttaagatgtcagatcagtctttccctacaagttaaggccctatcattaacacaaatcagcagtgagtccaggagtccaactcattgctgacatggccttgcctcccagaaacttaacattcttataaaaataaattaaatcagtggattctcccattgtttgcaccacataatactcccccagaaatttcacagaaagaatatgtattaacaattcctaagaaaaagatagacaaattgctgtaagaaaatagtcaacctcattagtaattgaagggctgcaaattagaatgagatgcattttttaacccatcagcttcataaagattaaacagaatggtaggtaaatatatacagtgttgagaagagtgtggggaaatggcgtatggggctgaactggcttacctttcaagaggccagtttcacagtatatagcaaaagccttaaaaatgtgcatccccttttgccttggaattc

SEQ ID NO: 198383 - DNA, 1000 bp, Homo Sapiens
tagcttttattgtgaagatcttttaccttctcagctaaatttattcctcagtattttatcatttgtagttattgtaactggaattgctttcttgatgtctttttcaaacagcttgctattggcatatagaaacactactgatttttgtatgtttattttgtatcctgcaactttacagtttattagtactaacagtttgtgtgtgtgtgtgtgtgtgtgtgtgtgtgtagaccttagggttttctatgtatataatcatgtcatctgcagagagagacaatttgactttctctttttcaatctggaggccttttatttctttctcttaccagatccatctggctagaacttccagtactatgttgagtggaaatggtaacagtgagcatccttgtcttgttccagatcttagaacaaaagctttctgtttttctctgatcagtataatgtttactatgtgtttgtcatatatgttttttttcttgcttcttctctaatagtcccataatgcaaacatttgtttactttatggtgccccatcagtcccatagactttctttattcttttttttcttatttcttgtctgattaagttgtttcaaaagacctagccaggtgtggtggctcacgcctgtaatcccagcactttgggaggccaaggtgggcggatcacctgaggtcaggaggaccagcctggccaatatggtgaaaccctgtctctactaaaaatacaaaaattaacgggtgtggtggtgggcgcctgtaatcccagctactctggaggctaaggcaggagaatcacttgaacccaggaggtggaggttacagtgagccaaaatcgtaccattgcactacatcctgggcgacaagagggaaactccctctgaaataaaaaaaaaaaacaacaaaaaaacttcaagttcaaaaattcttcattttgcttgatgtagtctgttgttgaaacactcagttatattttttaattccactcattgaattc

SEQ ID NO: 198384 - DNA, 1000 bp, Homo Sapiens
taactaattgaaaagcaataaactgaacagaaatgaaatatgctgtaagagtatccaaaatacatacatagaaaaccttaacatatggaattcttatgagtcttcccttggtaacagataatgctgttaacagccattaccatatgttactcaagttgaagtctaccactactttcaagttggcaaaattttttaatacgagcaattcagtccaaaaagcttttacaagtgcttcttcaatgccaagcagggactggaagctaagagcacacggaagaatacaacgaagttttgacttcataaagtaaataatcttaagttttctccactttagtacacactgtctgcattactttctttgcctctttaccagttatttccatcagccatgattttgtccggatcgcctgtcatcgtattagaaaaatagataggttaaaaaagtttcgtggattttttttttttaaacaaggggtggggaacatattccctgccccaccattctgatgagatgaagaaaggcggcttggggggtgggggtgggggaggaggccagggagaaattatttcttccattcccttttgaaaaatccccagtctagtatgcttgtctatcaaagcccacctaaaatatgatgtgcacaaacacatcaaaaataagtaggcctcttgtaaaagtgacacttaaaaggcaaaccatatgagattatttcccattttattcatagaaatgactcttggcagcactgaaacatttaaaaacactcctggatataatgctggtatttcagttttaaaaacttatcctacggatcaaaagatccatggaatgacaaagctaaaaatgttctctctcactaataagggtgaatcacagcagccacctactccacccaacaatcgtccttgctaagactggacagttcaaaacctggaaagctttccttgtctgctccacactggaaacgaattcacttcaacactagtgtttaagcacagg

SEQ ID NO: 198385 - DNA, 1000 bp, Homo Sapiens
tgcctgatttcagaagatgtttagctcagtaaatataccagagatttgttgttttgtaaaacagtctttattcttttcttccaaatgtgagatattctaagtgaaatgaagacttttgtcctttatgcttgctgaaatttgaatggcttgttttatagcagtcttttttccctttttcaggaactctttccagttaacagacagagtgtggatcattttgctaaatacttcactgacgcaggtcttaaggagctttccgacttcctccgagtccagcagtccctgggcaccaggaaggaactgcagaaggagctccaggagcgtctttctcaggaatgcccgatcaaggaggtgggagaccacgggcagacatcacctcaatacacatgaatgagaggaattacatgggctgtgtagcaaaggctttccttaacaagtctgtcctatgcttattgctgtaaactttgtccacttattcctaccatttaaattaactcagcttcaaagtattgatttagaatcctccatttttgttaacactctaggatggtccagaaattaatagtgatttccacacaactgacttattttaccaggctgctatgattttcaaaatatttcatctgtcaaagagatttgaccatccactatcagtatagcccattatatggtagttttaaaattttgttgcaggttatctaacctgattaagcatttgtctagtgtttggaattaacactggattttttgttcatcactctgtatgaatatgtaacaggctttttatttgaaaaaagtttgaattcctgtcatgggaaaagactagttggatcagtgacttgtttaatcccactcacacttggaagagctgtgtttccctataatgtaaaagctatattttttataatacgcatatacatagtttatatatacatgctatagttcacaaagcaatgactatatcttttttttatttttagtgtatctggagagagctttc

SEQ ID NO: 198386 - DNA, 1000 bp, Homo Sapiens
attatcttttgacaccaaaagcaacaaggtaaacataaatcagactacatcaaaattagaaaatcctgtgcttaaatgacaccatcaagaaaatgaaaagctgtcccataaatgggagaaaatatttgcaaatcatgtatctgattaatagacttctactcgaaatatacaaagaattattaaaactgagtaagaaacatgaataacccaatttaaaaatgggcacaagacttgaatagacatttctccaaagaagatatacaaatgaaatatgaagatatacacatgaaaaggtgctctctagaggcactagagagatgcaaacaaaaaccactaagagatgctacttgcgctcaccaggatgactgtaatcaagtgttctggaggatatggagaaaacaaaaccttcctacactcctggtagaaatgtaaaatagtgcagccactttgaaaaatagtttgcagtttctcaaaaggttaaagaattactgtataacccagcaattccattcctaggtatagactcaaaagaaatgaaaacatatttccacaaaaaacactgtggaaacacaatacaaatgttcacagcagcattatttgtaatgaccaaaaagcagaaataacccatatgtccagcaactgatgaaaggataagcaaaatgtagtatatccatacaatggaatgttacttggcaataaaaataaatttgaagtcccattacatgatacaacatggatgaatcttgaaaacaagctaagtgaaataagccagtcacaaaggcccacatattgtacaacgccactcatataacatgttcaaaacaggcaaaaccggcctggcacagtggctcacccctgtaatcccagcactttaggaggccaaggcgggcagatcacttgagttcagcagttcaagaccagcctggccaacatggttgaaaccccatttctactaaaaatacaaaaattagctgggcatggtggcacgtgcctggaattc

SEQ ID NO: 198387 - DNA, 1000 bp, Homo Sapiens
ttttttaaatgtttgtattcctagagttataggataaagcattacacactaagttagtctcagcaagtactgtatatttgccaagtaagtggagttcttgcaggcaaactaggtagtttcaatgccaggtgtgaaattataatggtttagataaaattttgaagcaattctacaaataagtactctgagtcatgacatttttaggccacattgaaaacgctagctgaaagaatacaaacaatgttgaaatcatatttaagccccttgctgagtttatattctgagctaaggatagattagcctcatgcccttatatgatgaaaaattgttttgtttttcttgcacagcacagttaggtatcagataaagggggaggagtatcctcatggatacctcaaaaacaagtaacccatggacggaggacagagaaatttcatgcaaagacagattttcctatctcttatgattaaattctctcagtttcctcattatgaaaatcatttgggatacctgatcaatgtacaaaatcttctgcctcaattcatactggtcaatataaatcttagcttggcgatctgaatttttaattagcacctgagcgattcttagtatcaggcaattttaggaaatgtttatttattcatcctttgaacaaacaccagtggagtgttttttccatattgcagacattcagatactaggacacaaagataattaagacatggtttctagtcttaagaaattgttctaggagaggagacagtaaatgccatgtaagaaatggcttggtagctgttgcaaaaggaccacagagaagggcagctcagcattgaggagaccatggaaaactgtgcttggggaaggtaaagtttgagtagggtattcaaggataagccaaccagatatacagggagtgtgagagaaaagcactcttttcaggataaacatcacattaaagacaagaagagattgtgttgggtctatgaatactactgaattc

SEQ ID NO: 198388 - DNA, 1000 bp, Homo Sapiens
tattccatgctataagtgtcctgctaaaccctgtttgtactgcatcctgtaaatatttatacatttcaattttgttcacttcaaaatatatttccccttgagacttttaataccttatttagaaatgtgttaattcccaagtatctgaagatttttttttcagttattgatttctagtttaattatattatggtctaacaatataaatttgttagggtttgttttatggataggatatgacggtctgcctggttgaatgttccagttgcagttgaaaagaacatgtattttcctgtttgggggtgaagtagtctataaatatcagctagatcccattatcttgtgatgttactgatttattttatattcctgctgattttcactctagtagttatatcaattactgagaacagagctttctagttagggagatgtgcgatgccaactctttgctgtttaatgcacagcaggcacggtcaaaagggcaagtgcctctccagtttctgaggccagagtggagggttgctgttgctctgatgtttgctcaatgcaaggtggagaaggttggtagctctctactacggtctctacagtgtctggtggggaggaagacaggtaccacatctgcttgtgttagtgcagggaggaacaggctatatggctctgccttacagttttggtagtctcctggtgggaaggaagggggaccacctcagtagtacaggctgggaaaggttgtcagagctctatctcacaatttccctaacacccagtgggatagggtatcaccttgttagtgtgaggacggtcaacagggctctacctgtctccacagtgcttgatgggggaagggtaggtgtgctccctggttagtgtagggtgatgatactcaacaggactgtaccctccctcttcaccccacccttgccacctccccaccgcccccaccatcccccccaccccgccgccccgtttccacagcacctggagagaagtaagg

SEQ ID NO: 198389 - DNA, 1000 bp, Homo Sapiens
cagttatacatgccctaacttgaaatatcctcgtccatctcactcagaaatttatttccagtaaattttactgtttatgtttaataatattcaattggtaatacatgtatagtgtcaatcaaatgtgcaataaaaatgataaatcaattagtctttttaaattttttggaggtatatctgaggaaatgttttaaaaattaatttcgatacagattttgttacaaaaaacgacagatcaaaactagactttcaagcataaatatatattattagaagaaaattctataaagtagaaattcaaaaaaggaatgctatatttgcaaccattagagaagattatttgcgttttttaaaaaaatcagtatcaaattgctaatggtatttagattccactgaatacattaaaagagtgatattatagttgaatttttaacaatgtttacaatacatgagaaatcaaatctattgtaaccatttaaaatctatgataaacaagatcacacaggttgagtatcctttacctgagatgcttgggaccagaagtgtttttggattttgcatctctttggattttggaacatttgcatatacacagtgaagtatcttggggatgggacccaagtctaaagatgaaattcatttatgttcatatatatcttacacatatagcctgaaggtaattttatacaatatttttaataattgtgtgcacaaaacaatgttttggctgtgatctgtcacacaaggtcaggtgtgaaattttccacctgtaacatcacactggcactcaaaaagtttcagattttgcaacacttaggatttttgattttcagattagggttgcttaacctgtatgttccacttaaaattatgtgagagggtatatagcttttgaaaattccctaaaagagtataagagccaaaattttgacaacctttgagctagagaaagctgctcaatttgggaggaaagaaatgagaaggaaagaaaggagaattc

SEQ ID NO: 198390 - DNA, 1000 bp, Homo Sapiens
agatggggattcaccacgttggccaggtggtcttcaactcctgacctcaagtgatccgcccacctcggcctcccaaagtgctgggattacgggcatgagccaccgctcccggcctgtggtagctttagagtcctgccaggacttaaataaagggaacttggctgatgcttccagcaggaacaaaagaaagcagccctgactgagcagctgggattgaagggggtggttggctcaggattcctttctctcctgcccttctcccctccacattacatggtcatatctccacactcactttattcctgtacccagctggtggctctcagcagaacaccaatggcccttttccttctatgggacttgcccactgggctagtgggcttctgtttcccagcacattctctccaaaggaattgaaccaaattttcttgcccatttaaagaagttggggccaggcccggtggctcaggcctgtaatcccagcactttgggagaccgaggcaggcagatcacctgaggtcaggagttcgagaccagcctgaccaacatggagaaaccctgtctctactaaaaatacagaaattaggtgggtgtggtggtgggcacctgtaatcccagctactcgggaggctgatgcatgagaatcacttgaacccgggaggcagaagttgcagtgagctgagatcgcaccactgcactccagcctgggcgacagagcgagactccatctcaaaaaaaaaaaaaaaagaaaagaaagaagttggaattccttcaatatttcctaagcttgccaaggtcttttctgacatatttgaccttttttgttaggcctggagaacgttgcaggctttggggcctgaaaggaaggtttcccaagtcttctagactcctctcagttcgaaccccagaggtaaaaggatgacttttcttttctttctttcttttttttttttttttttttttgagacagagtctcactctgtcacccagggtggagtgc

SEQ ID NO: 198391 - DNA, 1000 bp, Homo Sapiens
ctcttttgaaatctggaaaatattttagtagcaaactgatttataactttggttaatgtatattagtcatcactccaggcactagtcaacaaccacagtatgtaatttttcctgccagttgtgacagctggtctccccaacatccctcctgtatcagtaaaaagaaacatagatgattccatttatttcagttagaaaacaacagttagatgattttatttgttagaaacataaaatgggacttgtatactataataataaaaataaaaaatatgatgaggataactataatagtatagcagctaacgttaactgagcatttactatgtacctggcattatgctgtgtgttttatgcctatgatcaattcatcttcacaacaactgtacatggtagttataaatatttatctcattgtgcaaaactgaagcagaaattgaggtaaagaacctcatcaaaattattggaatacagtttgtctaactgaatagctcttgttctttctactgtaactagttgctgcttgtatttatagtatgattttagttaacaaaatctccagatcattaagcacctttctaacactagtgagctggaatattttctttaagaaagagttaaataggaaaagaatttaaaaagaggctaaatggccagaacacggagagatggtagtcaccaggcaggtggttgtgatgctgcctgagataacgggggagcagagcaggaagaggctaaggaggcatcagttggggagttgagggcaactctcatttctgggggttcaagtgaataaagagagaaaaagtttcattagtgattggaggtgaggaggatcttagaggtcatctagtccagagttccttttagaatgggaatctaagactcacaaaggggcccagcctggctttctgatttttaagctcatgtattattaagacttgagatcatcatatagatttatttgagttttaggtttgaaatacttgtttttgaattc

SEQ ID NO: 198392 - DNA, 1000 bp, Homo Sapiens
atcccagctactcaggaggctgaggcaggagaatagctggaaccagggagtccgaggttgcagtgagtcaagatcgcgccactgcactccagcctggtgacagagtgagactctgtctcaaaaaaagaaaaaaaaaagaatatagaaagtaaatgttaaaacactactaacagtacctagattttatgtttcaatgtatgtagattatatgttataaatacaacaactataatgtaaagagacttatatacatttactaactggtcaaatattaactctggactataaatggtcaggcatgcatattattatccttacagtaactactaaaaataaaaataaacaaaaaagatacagccaaaagactacaaatctttttagatttatagatacagaaaaagcaagtgacaagattcaacacccaatctcagcaatttgaacttcgtaaacctgttgaaggacatccatagaaaacctacactaacatcatacttaatggtaaaggactgactgtttcccttgagatcagggacaagatgaggatgtctgctctcaccactcctactcaacatcgtcctgtaggccccagctggggcaatgaaataagaaaaagaaaagacatacagatgagaaagaaataaaactctatttgcagacaacatgactgtcagcatagaaaatcctaaagaataaactaaaaaagttcctggaactaataagtgtatttagcaaggctggagggcataagatcaatataaattcagctatatttctatatcagcaatcaagaactggaaatgagcaccatttataatagcacccaaaattataaaataggtataaattttaaaaaatttgtgcagaacctgtacgctacactgttttcatggactggaaggctcactattgttgttgttttttttaacctttgactgatcttaaattattcatattgttggccgggcgcagtggcttacgcctataatcccagcactttggg

SEQ ID NO: 198393 - DNA, 1000 bp, Homo Sapiens
gattcatcaaatgaatcttaggccaaaaactgttcgagaatgatgttagcatcactcgtaggaatgctagttttctaggatttgatattttcaatgattgagagttagtgtattttgtaaatggaaatgccacaactaaaaacagaatgctttaagtagaatgatgtcttttgtttccaaagtcaacatataagagcaatgcaaaaataataataaaagtgagacatttcgtggggaaaagttatctcagggtaaagcctgcagccgcaagcaccgccagtgagtattcttggcacaaacggaaaaagagttaaagtcctctaggctccccatcactctggggacagagtgtgactcagctctgcttacaggctctgtgtagtctctggctcacctctccagtattacctcctgcccttgaagctcttacactgagcctatatcaaaccacctccatccagcttctctgagcctgatccatttcctttgtttggaatgcttgcctcacagcctggtgctgggtctaccttcctcctgctcctccttagctttaaagccccctcatctgtgaagccctccttgaccccctgggcagctagcacatggttagttttacaattatcaatctgtccctcacacttgattggttctcctaaaggacaatgactattccctgattctcataatctttagcatcctatgtagtgcctggtacacagtaggtgctcaaatgtgctggctggataagttaatgaatgaaggtgcagtgcttggtgcaggagctgtaaaattcaggagtacaagcttctggttaccacttacatcatctaccatgagggttgcaatggcacggccaatttcattgtaggattttgctctcccagaaggtcccagtagtataaacagaaatctgcaaagaagatggaggaggagacagagaagattaaggaagaggagcatgaaagtgagaaggaaaaacagaagcaagtgaagagaattc

SEQ ID NO: 198394 - DNA, 1000 bp, Homo Sapiens
atattaataattgagagcgctttagggttttttcatgagaaggaactgaattaccgaggttttaacatatttgataagcatcctcaagtgtcctggtttcagctacctctcccttcagaagtgttgcttcatgtagacacttgttttctatcgtttctatagatacggaagactcagttttcagtatctatagtcttcagatactgaaaactcagttttctatcatttcaattacaaaactctttgaaaaaataaaatttcatctcgtcatttcaaactcaggcttatacatggagattgttaacaaggcttcttcagtaaaatgatccttccatcttttgttctcaaatgctaatgtaaacaaaacagttgattattttatatccattacaatcttgacattcatggaagggaagactgcctctagggatgaaagaagagcaaaataagaaatatcacagatgggtcagggggagcgctgctgttgttgttggagaagcagccagagccaggccctgtggcgggtgtctcgggggtggccctcctggagtggaaggccatgcagcaccccggacttcccaactgcaccagccgcggtgttccagagcctgggcaggagcaccacgcgaactgagaggccgctccctggggaaggccagcaggtgtggtattttcatgaggaactgtggaacacagcggccaatagatcctctgttatatatttaatttttcaatcatgattggcacttgtggaagcactctaagaagtaagtgagtaggagacaaacacatggcctaagaagcttctgaatagtgtcttcaatggagttcctgatatcatggcttccacaggcccaacaggacaaaaactgtttgaggcatgcttcctcggtgcagtgaatattccatggccacctgagcagacttctagacttccccagcctggaatcactccttcagtgcagatgcttgtccaccaagaaagctcattcattttcct

SEQ ID NO: 198395 - DNA, 1000 bp, Homo Sapiens
gcaagcgccatgggccgctggcgaccctcctcagctctgcattagtgagaggttatgtagaagaggaaagaaattttccttgcttagccgatttgtcctccctctctgcttactggttaggagatagaacccagatccgggtggcaattcacattccattacaaaactctacacagcttccgggctagcaccagcacacatttggggaacatcggagggattttcttcttcttttgtgggtggtcatgatcgtggtagcggagagacatagaagggtgaataaaaaatataacgatttggtaagtcagagcacctgtctgggatttttattaacggaaaattaaaccttcgttcttaagagtttaagcttagccctttctaagtcaatggaaacaaagtgcctgttggataagaatgctgaaatagtaagacatttctgtctttaaaaaccttaaaatgatttctgccaagacagagtttccagtatacccacatatatttgagagggtttgttttgttttgttgtttgtttgtttctgagacggagtctcactctgtcgcccaggctggagtgcagtggcacgatctcggctcactgcaacctccgcctcccgggttcaagcgattctcctgcctcagcctcccaggtagctgaggctacaggtgcgtgaaagggtttatttttccttacatatgtagttgtctctgaatctgtgcacgattattctgaaggaagtttaatagaagtggaaggtgagggagagaactgccaagagaaggatgtgattttgttttcattttttcacactcatgaaaagcatcctctagattttgtgttttttcaagtaggcaggtatagttttgaagccatattttaattagggaatctgaaattagaggccaaagtcttggctaaaacctctttgaaaaaacaaaaagatgcttagttcagtgctacattcaattgccacagaacttttgcaggaatgggtatgaattc

SEQ ID NO: 198396 - DNA, 1000 bp, Homo Sapiens
gtctggttctgtggaatatctaaaagtcacagttttatgcctttaactactatacataagggatgactttttaacctccagggcttatacaacaaaacacacctcagaagcttatataacaatatactactttttccattttatcaacaattcagcctgccttaagctacaaagtaaaataattagacaactgtgatatcaaaacaaagattatgtaagttgagccaaagagtcacataaatgaacttgacatccccgctcccacaattgcacctaagtgctcaaacaggtaataaacatacaaacttaaacgtagttcgatttcaggagttaaaaaccatctacttgaagtcaaatattaaaatttccagctcctaaacagcatgtgatgtttttagtgtttttcattttcagatggtcaaacatggaagtctatattgaaaacactggctggcttttacaacttcagtctggattaaatgatttcaagtatacaagttaagtaaaatactttgaaaatctcttttaccaagtcttatattctaattccacaggatatgatttctgtatgtctataggaggcttatttataggcataacggtcaacacctataaaaatgaaccaattgtcaataatcatcacatctcctaaacacaaagaataaatgaaaggtttataaattctaatcctaatctcaaagcataatagatatttcctaggcacattttaacttaaaaaatttgaaaattaaaacgtattagaatttgaaaatcaaacatttatcaattcaagttgatttttaatgatctaaaagcagattatctgttttttctttcatatttctagcaacgttcaagctacctgggctatgtgtgtgatgcaaaagtgtgtgcatgggtactatgatatgtgcatgtttggtttatgttgaaggaggctgtttttgagtctaaatgttcacctctgatctcattcaacactgaagattaaaagagattt

SEQ ID NO: 198397 - DNA, 1000 bp, Homo Sapiens
tcaggaggctgaggtgggaggatcacttgagtcccggggttcaaggctacaatgagctgtgatcacgccactgaactgtagacagggtgacacagatcttgtctcaaaacaacaacaacggcaacaacaacaacaacgttctgaagcatcacattagccaggggtttctgaatacttactttgtaccaatgttactttaagttctgcatatatattactaggttggtataaaagtaatcgtggtttttgccgttatgtttaatactttgcaccaacctaatagctcacagaataaaaaaaaaagtctatgaggtaggtacagttttcatccttattttacaaatgagaaaaggaggccaagaatgataaagtaacttggtctcacagccagaaagtgatggagccaagatttgaacttgggcagttggactgtgttcttagtcactgtgcttcctgggtgattactgtgacccttgtacttgacactctgctatcaattacaagagccatttctgtgtgtgcacttgatttccttggggtctccagggaaatgtaattgtctcctcaagtccaggctttcctagaagacatggtgattgcactgataaccagcattagggctggctttgggaaagctcagtacctatgatttatggttagtatcttagattttagaacgctgagcaggaagtttttgtgctttctgaaatcctcacacctttaagtctcatgattggtgaggaggcagtggtccaagggaatggatagaaggagataataagataagccaaatgtttcaaagggagtgaaaactgttgaatgtaaatgcagctcaaggaagacttccctatctgaataaaaaggtgcaaataatgcggcctatttgtatgcatggtggcttaatgatgttgatggtgatgatgatagctttacactatcagagcgctcattctgggctaggcagttttctcagtggggtacagatattaatttatttaca

SEQ ID NO: 198398 - DNA, 1000 bp, Homo Sapiens
ctcatccttcacaaaaggtaacaacttgcaaggtcaacaatgtttctggtgatttatataacactgacatgaaaacaactatgtggagggagaattctgaggacttgcaaaatcccatttaacagagaaatgagtgtcaggccttacccagggagaccagcgtctcgtagttgcccctcatcacgtgcttgtagagctccttctgccagtcctccagcttgccccactcctgctcggagaaatacacggccacatcatcaaaggtcacgggcacctggaaccacaagtgtcacactcgctcacccacacgctcacgggtttggccgcttgggctcccacaccccaaggcgtcccagggctaccttaggggactcccccttgctgcccgggggcagccgcaggatccagaagttcctgttgcgcagcaggttctccacgttctccagccgcctctgcagcagcccgtactcctgcagcagggtccccagcacggcccacttgccctccagctggttcccgaactccacggctgtcttctcgcaatcagccagcttcttctcggccatcccggttcgaccttctagggaaagcaggcgagcagcctgcgattcaatcttcctctccatggcctgaatcgtggctgccatcgtccacggagaaatctttcagaaacaaaagagaaactggcatcactcattccatccactgtcttcattgagcccctctctccctaggcacgggggagttgggctgggagtccatatgtgtggacaagtggggctatcctataccacatgccagatctcaggttggccatcacctgcttgggtatgttaggtctatgtctgggtgggtgcctttactccaggcctctgcagcacaatgcagacccttatcacggtgcttatcaccctacacaataatttcctacccacacctacactgtgggctccctgaacatggtattgcatcttttcataccactgtccttgacacatgg

SEQ ID NO: 198399 - DNA, 1000 bp, Homo Sapiens
aggatagaacttcaaaaagcgttgaggttctaacagacgagaacgaacagacaagacaacacctcagagccagtggtgtggggatgacacctcctgctcaatttctcagctctcccactgatctagaaaaaggctcctctgaagccaagaaggaaaaagacatgattaattcaagcacaagtggatcaagactaacaggattctttgctgcctcttagaggtttccttgatgccagccctagaggcagaaatcaaccaggatcactcaggaaacaagataccacttagtgaccctggtgagggaaggcagagaccagctccatgggccagaggggacttctagtaaaatcctgtaagggtacaattgatggcagggacaagagtgggaggagatgggcctagattttcttcatttcagttgacgcttccagaaaacacagttctgggggtctggactgtgctgtgaaatgaaggaggaaaaggagttagtgtggaaatattaataccactttaaacccagtggtattcactctctatataaataagtccaagtgtcttttgctgaattatacagaactggttaggtgactcttaacaaatttcagagtacatatgggatggtctaacttaaaataggctacatggtataaataaaatttgctttggaggacctcagggacatctcaaagagagagttcgtttttctccagaacagctaaaactgaggttcaactagaggcctcagatggaggccatatttactaagactacagacaaataatggttttaaatatgagcaccaggcggggtgtggtggctcacgcctgtaatcccagcactttgggaggccgaggtgggtggatcacctagggttaggacttcaaaaccaccctggccaacatggtgaaaccccatctctaccaaaaatacaaaaattagccagacgtggtggcgggtgcctgtaatcccagctactcgggaggctgaggcaggagaattc

SEQ ID NO: 198400 - DNA, 1000 bp, Homo Sapiens
atccccactggtgattctgactcatgcttaagtttgagaacccctggtatcaaataatggggagtagtgggtgacagtaaactagaaagtgctaatgcattagaatctaaggtcaacaaactgagttgccccaaacaaaataaaaacaccacatctgagaggagaatttatcccatggaacatgagtttatgcatgcagattaacaggatttgatacctttaatttctagaatgcctcagattttagttggttaagtttgaactgtctagaaaacaccttccctgtggttatccatcttgctgtgttcaattattgctctctaaatagcacagtcttaaccattcagatcatttggagtcaatgggacattctcataaaataagaatagtagaccatatttgcacattccatggaatagaatgacctgtctcaatcaattttcttattgaattgaaaatctataaaactcataaaaagtcttgctgaacatgtagtccaacatgtttgctttatagataaagaaaatgaggttgggagaggctgggcaacatgctgaagatcaaacggtgaattgatataaaggagttaatgtagtggttatcagaagaaatcaaatgcatatatactacacattggaagagctgtattctctttgaaattaatattcaaatttataaattatgagtatatagcatatatgaaacaaaaattctcaatataaatgcatatgtgaaattataatcaaggccagggtgaaaattattcaatctttaccttatgaaaaagtggtatgtatgaggaattctttaagtattcctattataattaatacatttgaatatgtgcagcatacagcatgacaaaataactcagttttattttctctgccttgattcttttatccatggatcataggttagaatgccatatatatttgaagctcctttcactaaatgacagatttataagagaagggttcttgtttgccaggttcctgta

SEQ ID NO: 198401 - DNA, 1000 bp, Homo Sapiens
accttgcaatccacaaggccctgccccacttctcagacctaacctcctgtattagtcagggttccccagagaaagagaaccagtgggatatttaatatttcattttaatttcatgcacacacacatatacacatatgaaatagccatatatataggagatatatataaaatacccctatatataggatatttttatatatcctattgtgtgtgtgtgtatatacacatacacacatacacacacatatacagatgatctccaagttacaatgttttgacttacgattttttgatgttaagataggtttattgggacgtaacaccataagtcaagaaacatctggacttaacgattgtttgccttatgatttcttaactttatgatagttcattggagtattaaatggatttttgacttatgatattttcaattttatgatgggtttattggtatatagcccctttgtaagttgagaagcatctggacacacacacacacacacacacacacacatatatatacacatacacacacaagtacatataaacatacacacacacatacatgtagagagatttattatagaaattggcttatgcaattacggaagttgaaaagtcccacaatctgctgtctgcaagctgatgaactaggaaagctggtgttgtgattcagtccaagcccaaaagcctgaaaacccacagagccaatggtatcaatcctggtcccagtccaagagtaagagcactgataatcaaaggcagaagaatatagatgtctcagctcaaacagggagagtgaattcacctttcttctgtctctttgttcaagccttcaagggattggatgatggccaccttattggtgagggtaatcttctttgccttattctataaattcaaatgctaatcttttctctaagcatcctcagacgtaacagacgcacccagaaatgttttaccagctatctggctatttagcttataatacacacacaca

SEQ ID NO: 198402 - DNA, 1000 bp, Homo Sapiens
gccccgtctgagaagtgaggagcccctccacccggcagccgccccgtctgagaagtgaggagcccctccaccggcagccaccccgtctgggaagtgaggagcgtctccgcccagcagccaccccgtccgggagagaggtgggggtcagccccggccaggccagccgccccgtccaggagggaggtggggggggtcagccccccgcccggccagccgccccgtcggggagggaggtgggggggtcagccccccgcccggccagccgccccgtccgggagggaggtgggggggtccaaggtaaggaaggccctagagtctaggaagagactggccagtgcattaaccattgtagtgtaatggatttgatgttactttatgctcacaagttggacacacacacagggacccagatcaaattggaggggaaggtcaaagtcagcttcccaaaggaactgaagcttagactgatttttaaaggctgagttaaaataaactgggtaaaaataaagaaggaaagagaaaagcaaatgtaaaatatctgtgcagcatgaagtagcaaaatatattcagagaatgtaagaagctgaaatgagggcctcaactaagcgtgggaatgcagatggtgacatagcaatgctgaggtaggctccccaggaccgaggccggcttgttgcggggagaggggaggggcactctaggatgatctctggcgtaagcagcaggtaacgcggtgccaggacatggctgagttttacataaacatttgttcaagcaaatatgggatcattcactgaaacggagaattcaaagtgaggtctagatttggtggcaagatacaactgattcgaggttaggaaaggagagttggaggaacaggaggaagcggcctctcatctgcaaaccctgagttcctggaacacttgtttgttagggagggaagtgtggcccagccacaatcctttgaacatcttcctcttccatcctctgggttctgcatttc

SEQ ID NO: 198403 - DNA, 1000 bp, Homo Sapiens
caaattaaagaaatcaaacacattatacaggatatgaaagtaaaattcttcagtgaaatagatagcataaataaaaaacaatcacaacttctgaaaatcaagggcacacttagagaaatgcaaaatgcactggaaagtctcagcaatagtctcatccatcaaacaagcagaaagaaagaacttgagaactcaaaaacaagactttcgaatttacccaatatgtcaaatacaaagaaaaaagaattttaaaaaatgaacaaagcatccaagaagttcgggactatgttaaacgtccaaacctaagaataattggtgtttccacagaagaagagaagtctaaaagtttggaaaacacatttgaggaaatagtcgaagaaaacttccccagccttgctagagatctagacatccaaatacaagaagctcaaagaacacctgggaaattcatcacaaaaagatccttgcctaggcacatagtcatcaggttatctaaagacaaaggaaagaatctgaagatctgtgagccaaaagcatcaggttctgtaatggaaaacctatcagattaacagcagatttctcagcagaaactctacaaactagaagggattgaggtcctattttaagcctcgttaaacaaaacaattatcgccaagaattttgtatctagtgaaactaagcttcataaatgaaggaaagatagtcttttccagacaaataaatgctgagagaattcgccactaccaagccagcactacaagaactgctaaaaggagctctaaatcttgaaacaaatccttgaaatacaccaaaattgaaacttcttaaagcataaatctcacaggatctatagaacaataagacaatgaaaaatatcaaggtgttcaggcaacaaatagcacaatgagtagaatagtacctcacatctcaatactaacatttaatgtaaatggcctaaatgttctacttaaaagatacagaatggcagaatatataagaattc

SEQ ID NO: 198404 - DNA, 1000 bp, Homo Sapiens
tcagcctgcctattttgtaaatttatgtattataaacacaatatgatcaaatatttgagaccaaactgacaatctttaaagtcaatattttattttaaaaaaaatcattgtcattactttctattatttccccacttaaattttggttttagttattcacatttattttccttactagattttcccccctgtattaggtagaaagttcggcaatctatttctgtgttcttacgaatttctctagaaattgtaaggtggttgttttaatcaaataaacctttaccctcctctaaggactttaatgtaatctaacggaattttctgctttagactgtactatttcaagatttttagatctcatttttaactgaacaagataaacatctagttatgatgttacaaccaatatttaaacttcacagcttgtttaacatttatttgcttagtattccctcttccatctgatactttctgcacccattttttcttgaaatacatcattgagaaatttctataactaagaataagttgataattatttagtttatgtttgtgtttttgaatttttcttaaacatggttttattttatatataattttatattgatacttttctctaaggtctgtggagagagagttccactgccaaatggtttccattactgctattgagaagtattctgtaaatttacttgtaacttctttctggtcatctctttattctttcttgacacttctaagatttttctctttttttgtcttaaagatttctgcagttttactacaaggtatccatgaatgaattcgtttgtcttaatcatcttgaatattttgcatactgtatctgtgatatcttttgttaacatctggaaagtattaatggttatttcttcaaatagtctactgtctttccccctccattgactctactatctcctccggaatgatgacgatgaatatgttagtccttctcgttcttaatttcactttggttatgtcc

SEQ ID NO: 198405 - DNA, 1000 bp, Homo Sapiens
atcaatcaggctgacaacacctgaacctgctgttgaatcctaacatcagaaacagtgagataaccagacattatgtatctcccaatgtcagcactaggaagttcatagcagagcttaaagtgttcttgccaaaaagaaagaaaggaaaaaataaaggaagaagtaatcaaccttgtagatctaattacagcttagaaaaataaaaagaagattaaaggaacaagttaaagacatcaagaaacatcaatctgctaaatccagattgtgtgaaattgtataggacaaatgacttggtttctttgacaaatgaatgacatgaaattaataaaggtgagaagaccccgtctctactaaaaatacaaaaaattagcttggcgtggtggcggacgcctatagtcccagctactccggaggctgaggcaggagaatggcgtgaactcgagaggcagagcttgcagtgagtggagatcgcgccactgcacttcgcgagactctgtctcaaaataaataaattaaataaataaataaataaaggtgagaagaaatgttgcagattgaaagatactttagagacacatcagccaaatgcagtgtgtagaccttgctgggattcttatttgagtaagctgactatcaaacaaatttttttgagaaaatataactgagttttgagaaatatttttgagaaaacatggactgggtaatggattttcctaagtgtaattttatgtcgagactatgtttttaaagagtctttatatgttggcaatgcactgtaaagtatttatagatggaatgagacgatgtctggggatttgtttttaaaaagtcaatgagcagtaactgaaaaaaacagcaaaatgttaatatttgttaaagctgaatgatcagtacatttggattcattatgctgtgctatcttcgtgtatgtttcaagttttccatcaaaaatgttgaattaaaataaaagaaattagcataaaatgtaatgactgaattc

SEQ ID NO: 198406 - DNA, 1000 bp, Homo Sapiens
ttgcaatgggactgggtggcccccagaaaattctttttctgatggaaaagatagtctggaataatgagcttaacggaaagctttggttactggaggtgagaggagatctgagtaaacatggcatctcttccttggatttacctgttacttcagccctgctggactctcatataggacacgtggaaaatgaagaaaaaaatcagaagagaacctttactaacatcttagtcaagactttagaagaggagcagcacttctttgatcaccctgaaagaagcctttcccatttgaagcagaaacctaaggagttttaacacatgaaggcctccagtaccccagatgccatgaggttggaggggtctggtagacattgaggcacccagcagatgccgaaccaggactggaaagccaacttgatcatcagtgtgtgttgggcagtctgggggagggagttcccaggaaaaccagagggattctatccagagagctgagctcttctatcagcaagcagggatgtggccaaggaaattattaccatttatgtgactgcatctgtcactatgtgccagtgatgcatggggaaaaactgaaaatacaaaaacatattgttatgtcataccattagtccatttttaattgttttttaaaaattcatgttttgtactctcaaagactgaaaatttctgtgaaataggatgtgaaaattttcaaatgatgttgccacatcattttttttcttttctcaaaaataaaaaaggatgtgagaagtctggccaacacacatgttggacataaaatgagaattctttttaaagccagaaatacctattcatttcattcacacattcactaagctactaaatctgatagcagttctgaaggatactaattaattatggttttaataaagaaaacaattcaataaacacacacacacacaacatacacatggattgttgaagaagtactgaaacaaatttgaaaaacaggctttcaaatg

SEQ ID NO: 198407 - DNA, 1000 bp, Homo Sapiens
acataccaagaccctgtctctacaaaaaagaaaaaaaaaaggattaaagtcctaggtaagactgtacctccttgcttataggcattaaagaaagatgaaatgattttactatcatttgatgaaatcacatgagatctttgatactaggagaatggactgtctcaagtttgtgtcattttaatgtgtactatattctttttagtgagctcagaatttagtaatcctaaaatcccttagacatccctgttaaaatagattctgaggtacccccaaaattctgattttggtgggagctagaagttggcatttaaacaccaccactagcctcagtgactggtgtgtagaagcactgatgtagggcttcactagcccttaacaaatagtcaggggtcagctatgaccactgtttgagatcatttgtgaatacttacataggggtaaatcccgaggctcatatgtgtacaatctgttagagtatcttccagctatgtcagctctaactgttaaagaagggtctgtcaaggaaaaaaccaagtcacgaaagtataatttagcatgttcttttctttactcttgtaaaaacttaattattattttatatgtgggggttatgtgtacaagtttgttacacagatatattgtgtgatgctgaagtttgggcttcagctgaacccaacaccctaatagtgaacatagtagccaacagttagtttttcatcctttggctccctccctccttcccccgttttggagttcctattgtctatttttcctctctttatgtccatgtgtaaccagtgtttagctcatatttatatgtgtgaacattcactatttggttttctgtttctgtgttcatttgcttaggataatggcctctggctacatccataaaacgttcttaaaatcatttttgtttcttaatctaaaacaaatgtcaaaccaatttataagcaaaattagttttcatacatgtcagttcatgaattaacctgaattc

SEQ ID NO: 198408 - DNA, 1000 bp, Homo Sapiens
gaaagcagagtgttgaagtctccagctatgattgtactggggtctgtctttccctttagttctaatatttgctttatgtatcttggtgctccagtgttgggtacatatatatttataattgttacatcatcttgctgaattgaccgtttgaccttctttgtctctttttatagttcttgtcttgaaatctatttagtctgattaaatatagctacttctgctctgcgcttttttggtttccatttgcatggaatatctttttccatttctttattttctttttttgagacggagttttgctcttgttgcccaggctggagtgcaatggcgcgaccttggctcaccacaacctctgcctcccaggttcaagtgatcctcctgcctcagtctcccgagtagctgggattataggcatgcaccaccacacctggctaattttttgtatttttagtagagtcagggtttctctactaaagaaactgactgttggtcaggctggtctcgaactcctgacctcaggtgatctgcccacctcagcctcccaaaatgctgagattacaggtgtgagccactgcgcccggttatttctttatttccatttgatgtgtgtctttataggtagggtgtgtttcttgtaggcaacacatcgttggatctggtttttttattcattcagccactgtgtcttttgattggagagtttagtccatttacattcagtgttgttactgataagtaaggatttactcctgccattttgttagttgttttttggttgttttgtggtcttgtcttctttctttccttccttcctgtcttcattttagtgaaggtgatttttctctggtggtatgttttaatttctttttattttttatgtatctgttataggttgggctttctttataggacagtgaaaacatttgaaaattgatagtgagggttgttgttcaaatcagtgaatataccaaaaatcattgaattgtatactttaaatggg

SEQ ID NO: 198409 - DNA, 1000 bp, Homo Sapiens
gagcgggacaatgatgtctcccttgtgagactgttcacagaataaagacaaaaatgtccaatgcctgcctgagactaacaagccagccttgctcactgcagattgtccctgagccttgcactgtatgttgccgatacatccagttaaactgtacagaatctctactgcccagggaagtcactgctcgacgttcagcactgtgcgcctggcacgggtgcgtatcctgcaggtggaaggcagtgtgaagagtagagtcagctgcagcaaaccaagcctatgtcgtgcaattaatgctagtgcggcatttcaaatggagcatccttcactgacgtcccattgccatggggtgaaaggcaggtgctcagcctggtcctcagagccctgggtgagccagcccctgcctcctcatgtgcctccctcactccctgtccctaccttacctgctgtgcttcctcctgccccaggttctttgcacataccacacagtttagaatgctcctcattcatgtatcccagctttacctggttaactcctgtgatttctcaagcacttggctcagatggcaacttccagcaaagcataatctgatctccctacccgacctgagtcatatgttcctttctactttggtctcctttttgttttgtttttgtttgtttgtttgagacagggtctcactctgttgcccaggctggagtgcagtggggtgatcttggctcactgcaacctccatctgccgggttcaagtgattctcctgcctcagcctccagtagttgggattacaggcgcccgccaccacacccggctaatttttgtatttttagtagagatggggtttcaccatgttggccaggctggtcttgaactcctgacctcaggtgatatgcccgcctcggcctcccaaagtgttaggattacaggcgtgagccaccacgcccagccctggtctactttactgtgccgaccacaactgcaagaaaacaactaactgtgaattc

SEQ ID NO: 198410 - DNA, 1000 bp, Homo Sapiens
gggcagagaggctctgtcccctgggaagaaggaggaggtcctctgatctgggggatctatgatcagttcttgcatgttcccagattctgggcagcggctaggagggccgtttggggtcaaaatcaggtatctggggtgaaaggaggctctgtgattttcgtgactttcctcctctggctgacagattgaggcctgggagcaggagcagctgagccagcctgtctgttttgattcctgctgtattgaccagtctcccttccagctggtggagcagacaaccctgcacaaggtgagtcttttgctgactgctcagggctgtggggaaggcaggagagctgtggggcaaggaacatgcactgacctgtgctcttcatcctcagactcataccctgttttcactccttggcctccacctcgcttacgtgaccagcatggggaagctcaggggcgtcctggccctggaggaggtaatcacgatgtgtcccatttgagcagcaggagggaggctgggcataggataaggggatgcagtggggacagaaggaatattagcatctcagaagtcccctcagattcccttctctatttctttcttttttttttttttgagacagagtttcactcttgtcgcccaggctggagtgcagtggcgtgatctcagctcactgcaacctccgcctcccgggttcaagtgattctcctgcctcagcctcccaagtagctgggattacaggcgcccgctaccacacccgctaattttttgtatttttagtagagacggggttttgccatgttgggcaggctagtctcaaactcctgacctcaggtgatccgcccgcctcggcttcccaaaatgctgcgattctaggcatgagccaccatgcctggcacccctctgtatttcttatgcagagattggagggggtagagcaagcagccagctgaggtagaggagactacgaagcctgttatggccacagccctgaagggaatggaattc

SEQ ID NO: 198411 - DNA, 1000 bp, Homo Sapiens
gcggtggcacgatctcggctcactgcaatctccgcctcctggattcaagtgattcatgcctcagcctcctgagtagctgggattacaggcgtgtgccaccatacctggctaattttttatatttttagtagagacggggtttcgccatgttgaccaggctggtctcgaactcctgacctcagttgatccgcctgccttggcctcccaaagtgctgggattaggcctgagccactgtgcctggcctttttgtatttttttgtagggatggggttttgccatgttgtccaggctggtctcaaactcctgagctcaagtgatcctcctgcctcggcctcccaaagtgctgggattacaggtgtgagccaccatgcccggccaagatgtctttttcacattttggaagtgtatatagatttttttaagttaggggaaatgtgtttcctggccatgatccaggaagtggactcctagccacagcagagagttgccgatgaaggtgacagtgcataccgacatgctgggtgggccgctagaccacactttagaaaatcagaggtgttttactaggagatgtttcgttatatggatccagtgtttctaagagtggaaagcctgctcaagagcagatgtgtcgaatagttcctgagtgtgcgtgggatgctaaccaggtccgcagggcttgctcacaagcatggacacccaggccaggcgcggtggctcacgcctgtaatcccagcactttgggaggccaaggtgggcggatcacttgaggtcaggaattcgagaccagcctggcccaccgtggtgaaaccccgtctctactaaaaagacactggaaactgaacgttcatgtcgtgctcccttttgaccaacaatttgggagtgtgatttagagatcagagagaggctcagcttcaaacttatcaaagctgatccttcttgctcagctcacagtggtttcacacgctctagtaatttggggaggcaaaggtagaattc

SEQ ID NO: 198412 - DNA, 1000 bp, Homo Sapiens
aatgtatatgtaagtttacagcttgatagattttcacaagccaaacacatccatgtaactagctctcagatcaagaaagagatccttaccagcactttggaagtcctgttgtattcccttctagtcactacatgaactcaagtgtaaatcctatatgcacctgtaatggcacaagttactttttcttgttttttacactatataaatggaatcatacagtgtgtaatattttgtgtctagcttctttcccttgacattgattcatccattttgttgtgttagttgtaatttttttccttcatattgttgtattacattgtgtgaatatatcacaatttatcttttctacttgatggactttgggtagcttctgttttggacgattaggaacattcttgggcctgctttttcctgaaaatttatacatgtttttgttggggataaacatagtagtagtagttactgggtcaatgactatgcatagtcagcttttgtagatactgccaaatagtttccaagtgattgggcacaaaatccctttttaaattaattgctgatttagatttctggtagtttgagtaatttatgggaagactgcttggttcatttgagttctgaatataaatcacccattcaattaggctgacttttcaggagtcctagtaaaaagtttttagttgtcctgactatgacaagtatgagacagcctctaattcaggctgaagagtcctggctatttccaaagagggacaggaaactacagctgttttggggggcttcagtctgttcctcagaagaatgtgaggaaattattgtatggctcatcctgcatctttatacttctgatttcctgaattaacatttatgttaatccatttgttacactttttacaaattgatatataattcacataccataaaattcacccttttaaagtgtacaattcagaggtttttaatataattacaaagttgtgcaataattaccgctatggaattc

SEQ ID NO: 198413 - DNA, 1000 bp, Homo Sapiens
ttcaactagctctgtgcttattagctaacctcaggcaagttacttaacttttctatgcttcagtttgtctgtctgtaaaacaggaatagtcatagtaactattgggtagagttgctgtagagtttgatgagataatccacggagacagtgctcaataaaagtcctgtaaagaaatgttgaaaaagtgtagctagtgatcctactctaacttaaccaatgactttcagcatcctatcatcttcccctttcatcttgtcactgtttttggtaagaatgaattatttggaagctaatcactgctctcatgctctggagaaagggactaacatttcacccatagcctagatgcccaaagcaatgtggaatcacgtacctctttgtaatgtttaatctatgttgatgacagggcttctccagggctccttttggtcctcctctaatagaggcctacactatttcctcctggcctgtcagacaatatgttctgatctcttccaagtggtggatgggaatgtagagggaaccacaggttcttagcatggctacatactctgtggctgtcatggtagtttgcaagggttacttagtggaaatttagggctattctacctgtcttctcaacttctaatattccagcctcagcatggagctgaaacagaaataactgaaaagagagtttggcagagatttctgagccagaaaacttgcttctcatgctgatccaggtgtatgtgcctcagtggttctgccataggatgggaaagatctaccaagtgggggtgtgatggagaaggctcccttcagttcaccctggaggtgggttggatttctttaagcaggaagacaccggctggaatcccaagtcctttgtacttagaaaatgtgaccaaatctcacagataatgctgtatgaaaggcaaatgctcttgctgaccaacaggcaggctgtcttcaggcacatcacagttagaaaacacacctggaaccttttgttgaattc

SEQ ID NO: 198414 - DNA, 1000 bp, Homo Sapiens
ttaaaattagccagacgtggtagcatatgcctatagtcctagcgactcagaggctgaggtgagaggatcgcttgagtcaaggggtttgaggctgcagtgagctagtactgcaccactgtgttccagcctaggtgacagagcaagaccctgtctcaaatttattatcaattttaattttataataaatttcctatcattgaaatcacacaggcatgataaatactaaagtaatgagctgagtttggcaatgagatcaggaagggagatgagattctagtacctaaaaaatctggaaacctacactgaggttcacacctggcttactttctcagctctatttttacttgagttggtcttagtccattcaggctgttataataaaataccacagcttgggtaatttataaacaacagaaattgattgctcatagttctggaggctgggatgcccaggatcaaggcccagcagattcagtatctagtcagggctccctgcttcataaatgatgtcttgctgctgtgtcctcacagggcaaaagagggcaggggagctccctgcaacctcttttgtaatcccattcacgaggacagagccctcatgacttaagtcacttccccaaaggccccacctcttaatactaatacattgggtgttaggttccaacataggaattttgtaaggacacacatattcagactatagcagctggttagctgttataagcaaatgctcagaactcttaagtctacattccagctctggactacatcctgccctcttccacctctgctgcaaaagtgaattcctcactggctccatttcctgggtattctgcaagaactccaaactccacatgcatatatgacattctctgctcagtcttctattgaatctttcccggaacctattcttttcatggtctctctctgtcttcccaaccagaaacctctgatttatttgactccctttacctctatatcgactcttctgtgagatgct

SEQ ID NO: 198415 - DNA, 1000 bp, Homo Sapiens
gtttccttatctttaaaatggagacaatggcacctctctcccagagtagccactggggcttaataaagcctcagcatgagaagatggtgtatttgtatttgtgagttttccttggtctatggtgaccttcctgtgggtaagaaccaagtatcacttggctcaggacccagacaggcacagcacagccagaaccagaggggcctaggcctgggtatgattggaatccaggcatctggcccagtttttctggctctgtctccttccccatcttttccaaactggtccaaggatcagatttgccatgtcacccagacatcgttgtggccctgtctgaacaagcagcatcagaatttctctggtgccagctggatgactcagagagaaaaactggtcaccaatttctgcttcaagtgggtagggaagaaagctaccacttgcagctacttattatgtatcaccagccaggcacttttcctacttagtggtcacctcagctaagtcataaagacacagaaaagagtgccttgccccaggttcacagctgataagtggggtgtgggagaggaggtgctgaaatccacatttatctaaacctttcagacccatgtgcatttctccatttttaccacattgtcccctccttggtgacagcctgggctgctgctcctgcctctcactggcctctctgcctccaagctgcctgtgccttaggaagctccatgttgcactttcaaaccagcagcccaatccatccctcacctacttgtgcctttcaatgactctcattgtcctcagaaaatgaccctggctcctaggtgtccacacctctgtggccctgagcaggctgacagaaataaaactgcatgcctcctttccttccagtgaaaagaaatcactggatattgcaacaaaatttaaacttatcatttgggagaaatcagagtatcctctttcatagacaaaaaaaacagtattcaaccctaaaaggaaagaaaacaat

SEQ ID NO: 198416 - DNA, 1000 bp, Homo Sapiens
atttttgattgttactactaggggactgctactggcatttagtgggtaaagatcagaaatgctgctgaacaatcctacagtggttaggacagctcccaggacaaagaattatccagccccaaatgtcagcaacactagtactgagaaactttgctctatgtaacagaggtcacaccatacatactgttaggtaacaatcttaataggaaatataaataataataacagccaacatctatatagcacttcactatgttacagacattgttttaagtgctttgtaaataaaaaatcattctcacaatcttaagaggtaggttttatcacccctattttacaaatgaggtcctttagaggttaagcaacttgcacagagtcatgcagctaataagagccaggatttgaacccagagtttttaaaacctacactgcctttccattcatgcacgatattccattttataatctctggcaaagactcactgcaaaaattccattttatagtcatgttatgattcacttcatcctttattgatggacttttaggtagtttccaactttctgctctaagaaacaacatggtagtaaacatccttgtacacaaatctttgcacattcatctgattaattccttaggatacattctagacatgaaacagctaggtcaaaggatacacagtatacatttccaattttgatacatattgtcaaactatctaacaaaacatgtatcaatttatactcaaagttacttctctttatttccttggctcctggggaagctgtgtttcatatacacaaacccaaactgtgtatcactgttctctctctttcattctcctaacctacccatcctccctcaaaagacctaggttaggacttgtttctccaggcaagtgctaacggtggccaccacagcctggtgctaccccagccctcttttttaaaccctctctgacagtaacaaatgaaatcttcgatctgtaaagaacaatgaatt

SEQ ID NO: 198417 - DNA, 1000 bp, Homo Sapiens
tgccaaggcatgggcaaggtcatccctgagctgaaccaggaagctcattggcatatccttccatgttcccactgccaacatcagtcacagacctgacctgccatctggagagacttgtgccaaatatgatgacatcatgaaggtggcgaagcaggctttggagggtcccctcaagggcatcctgggcatcgtgagcaccaggttgtctcctctgactttaacagtgacactcattcttccacttttgatgctgggactggcattgctctcaatgaccactttgttaagctcatttcctgatatgaccatgaatttggctacagcaacagggtgggaggccttatggtccacatggcctcctagaccaccagccccagtgacagcatgagagtaaaagagaggccctcagctgctgtgcagtccctgccccacttagtaccccccaaccacactgagaatctccccttctagacacagtttccatgccacaccctctgaagaatgggaggggcctagaaagccccactttgtcctgcaccatcaatagagtccccgtactcagcccaaaatattaattaaattaaatcgtaggagcaaaagtttatcatttcaatagcatttattgtaatgcttatttgcaaattccccaatgcaggaataaaaattattcacctatatgccagctttgttcaaaatagctatggatatacttaatagtatataaaaatgaaatctgagatattctgtgtagaaagctcccagttaggaataaagacaaattttacaagtaaaatgaaaatataagccaagattaattctgagataaaattctaaagaaaataaccatttcatttaattttcattgcagttttgagattatttaacatctcggtttcaacgaatttcagtgcctttcatagacaagtagatgaaagtcagcaggttgtgtcgagcctcataaaagctgtgtcgagcctcataaaagctatgttgaggaatt

SEQ ID NO: 198418 - DNA, 1000 bp, Homo Sapiens
cagcatagaaccatacccctcagtttcaaacctgacatttttcatttctggctgggtgaatttgagccagttgagggacttttccaggtttaagtcaatgaaatgtggtattaattattcttaacttttagggctttatgaaaattaaatgatgcttctgctcagtaaacaggaaataatttcctttagattaagtaaaagataaaaatttaacaataatgtatgtaattgggaataaacccaaacagatactcataccaaataccaagaatatgggttttatatcctggatcattctttagaatgaacattttttgacatgatacttgactatttaattatctgtctttgtgatatgattattcatatccttaactaaaacatctttaagatttaaaaacaatctcaaagcaaatgggtaaggttcatatcagaggataaataagtggtgttatggtttgaatgtgtcccccaaagtttatgtgctagaagcttgattccccaatgcagcattgttgggagatgggacatttaagtggtgataaggctatgaaggcttttgtgtattagtctgttttcacactgttataaagaaatacccaagactgggtaatttataaaggaaagaggtttaattgactcacagctccacatggctggggaggcctcaggaaacttacaatcatggaggaaggggaagcaggaacattgttaggaaagagagaagagtgtgtgtaagaggaactgtcaaacacttacaaaaccatcaagaactttcaaacacttataaaaccatcaagagaagatagtgagaactcactcaccatcatgagaacagcatggggaaaactgcccccatgatccaatcacctcccactgggtccctcccttaacacatggggattatgggtattacaattcaagatgagatttgggtggggacacagccaaaccatatcagctctgcccttatgaatggattgtcattatcatgagaatg

SEQ ID NO: 198419 - DNA, 1000 bp, Homo Sapiens
ctgtgccgcctggttcctaataggccagggaccggtaccagtccaccacctgagagttggggagccctgttgtatggcacatgataatatgattttataagaaactatcaaactgttttcaagaggggttgaacaattttatatcctcatgagcagtgtatgagacttcaacttgttccttacacttgctaacacttgctgttggcaatcttttcactttcggccattgtagtgggtctgtagaaggatgcagttgtgggtaatgactaatgatgttaagcttctttccatgtgctcaggcatgtgaatattgattcatatcatttctcattaaaaaaaatcaggttgtcttatcgttgaattgcaataattctttttattttttagatgtagtcctttgctggatatatgtattataggctgggtgtggtggctcacacctgtaatcccagcagtttgggaggccgaggctggcggaccacttgaagtcaggagtttgagaccaacatggccaacatcgtgaaaccctgtctctactaaaaatacaaaaaaaaaaaaaaaaaaaaaggaaaaaaaattagctgggctctatggctcgtgcctgtagtcccagctactcaaggggctgaagcaagagaatctcttgaacctgggagatggaggttgcagtgagtcaagattgtgccactgcactccagcctgggcaacacagtgagactctttttcaacaacaacaacaaaaacaaacaaacaaaaaaaggatatatgtattatgattctccaatctgtggcttgcctctttattttcttaacattgtcatttgaagacgagaagttgtgaattttgatgaaaagggatgcttttcaatatctactttgtctcctccacagctttgaacttggaactgggcttttttgaacacaaaagtggagccttagttaatttttgtttattgacaaattagaaaaggcaaaaaaattcactctgaattgagaattc

SEQ ID NO: 198420 - DNA, 1000 bp, Homo Sapiens
caagcttcgatctcacacacacagaaacatacattcgtgcctggagaccctgcaggccagagtccaaatatttaacaatcagaaggggcaaggctctgaccagtgacagtcagacctcctgctttatttggtgttaaccgtttcttgtctggatggtgaagtctggaatctgggtgggtccttggaggaggggctaggacagccgtgggtgtcaaaggtggcatttgaggctcgtttgaggtgacagtggctgtttaccaactagtacagagcgattcagcgttttcatgaatgggttggctgtgctggttactgatgaatatgggccccttatagagctgcaaaacacacacatgcgtatagacatacatacatgtacaccatacatagacaagcatcataaaggcacaagtgcacacacatctatgcagacaagcttcctcgctgcttatgcccacagggtttttctgtatgacacacctcagaggagcctgtgcttaacatttgtaggattatttcgagggcagggcaggggaaagaaacgcgttaaagggccatgacatgacacagttccctggccgggtttggactgaacagtggattcagaactgcagcgttcaaagcccctgcccgccttagattctcatggctacctcctctgacccatccacatccttgcggctggcaggcaggatgttttgaaatggtgcagccaaaggccccgtctagcttggctggctcccgaacatgtccatatttgaaggctgcctcaggcctggcaggcagaagcagctgtggtccctggaggcaaaaggcagctcacggggccttccatttccagccaggcctcatctggggtagggccaagaggaaagtacagagtgcccgtgggggagaagtcccaccaggatgccccccctcccctgagaagcccgccttctccctcgtggacaggagtcagccagttggttgctgtggttacagccagtgcctggaattc

SEQ ID NO: 198421 - DNA, 1000 bp, Homo Sapiens
atgccagcattatcacatggcataatttgagctgctcaaaaccaaaaaaatgctcagctgaagtgaacactaatggtttatccatcatgttctatccaaatctcattaatatagtatctcagagataatagataggaagattacaaagagaaatacaagtagaagaaggttgtagggaaaggctgatttcattgaaatctgctatggaaaatggtcaagtcaataataacttagtttatgaatattatttctttacctttgtaggtggatcagtatcatcttggaagagaattgagacattgatcaagagaaaaagactctgagaggctgactttacaaaaccggtatctgtttttcactcatgttgttagaataggcctccaatgaaaccttttattcttacctgcaatattactcaaacaagtgggacatttggaactggttatttaattctgacagctataagagtaagtgtatgatcaacatcagaaatatgaaacattgcagtatcaaaaatagaagacaataggtataaatgagtgaaggaaggtagaaatacactgaaagaatctgtagttgaatttatgctgctgatctcttacttcttagcagtgaaactcagataaatattgttgctctttaaatgaagtagtaatctggaccaacactgcattacagaaagaacagtggtggcattgggtttatatttttaaaaatagaagaatattttcagatggggcagcagtagcagcttggtttttaatttctccaaatctctaaaactgatcaagcaactagacagcaaaatccaaaactcatggacagcggttctgcttcttatagtgtttaagtgacttgtattagaccaatcttcttgcaaataacacttacatatctctaaacaatgtaaaaataaccacctgaatttcctaaaagcaacaaaaagaatacagaaactggagaagagtcaacacattgaagaggatggcacgtggaattc

SEQ ID NO: 198422 - DNA, 1000 bp, Homo Sapiens
tttttttaattaaaaattttcaacctgagccttcttcggttcttaaaagaataatactaatttggcctggcgtggtggctcacatctgtaatcccagcactttcggatgctgaggcaggcggatcgcttgaactcaggagttggagaccagcctgggcaacatggcgaaaccttttctctaccaaaaatacaaaaaataaaaattagccgggcatggtggcgcgcccctgtagtcccagcggatcgggaggctgaggcacgagaatcactggagcccgagaggcagaagttgcagtgagccgagatttgcgccagtgtgctccaacctggacgacagagccagaccctgtctccaaaaacaaaaacaaaaacaaaaacaaaacactgatttgcacctaggcttaagttagtagtatatccagttgggccaggcattggaatgagctgaataacgagtttatggaatccttaatacagagaaatcttaaaaaaaaaatagtaatgcagacattcattctatcaagaaatcctggagttttgtgggggtgggaacgggacattggctacctcttcattttctgactgtatttctgtgttgtgtgttcatttccctgggcacttttcaccagactgttagatggggtaaccaatcacattcctgaacaatgagtttatgctatccttacgtttgtgaatcttcttattccttgtcatatatatggtaatgttttttctgtactgctttaatgcagtgaaaataagattccaaacataaggcagattccttaggggtgagttgtgagtccaaggcagtcatatttgcaggttattggtgtggaataaaagccatttgatttagataaataggaaaggagcttgttaatatagaaaattatagttaaataaagcttatggttatcatatttctggtgcttcattgtgccctcttcatagagacaactttcatttctttatggaatttgttaaccagttggaattc

SEQ ID NO: 198423 - DNA, 1000 bp, Homo Sapiens
atacctaagcagatattttaaatttcagaaattgtgctatagaattttttttcagttccagagctatggttttatttaatacaaggtttatataagatttccttatagagaagaaaaatataatgtacttatatttggtgagaggcttaggttagattcattctttcagtcagcaatcatttactgtgtgtctactctgtgccaagccttttaaagtcaggtgaaagatgttctctttctgccttcatggagcctgtagtcctatgataaggataaaaaagtaatagaaggagcataatactactttgcttctgtaaaatcagaaaaacaagttttcatatcttggtgagagataccacttcctccacttgtttttccaaaccattgtaaaactatttgtggttagatttgaaaagctgaggtgggcttagagatatggctaaacctcagggcagaactggaatgtgctgtcacagatttgatctgttaagccataggagagcagtttaagatttacgttaaaattttggagctccattagtttttcactgatacttattttagacaagcagactttttttttttgatgtttataccaaatattcctttctgtattgcctccttttacagccctatactataaatgaagagaaaaaacaagtgcgtgttagaatctgaagtggcagcatgtttgttagttttagttaatgtttaactatacatgcaacaggagttatattataaaatatattagaaaatagtgatgagtgtgagttgaaattccgatttctctttttttgttattagaaaattaatgggcagaaaaataatactacttctatatttatgtatgttcatttcatgttcaatagtcccttttattcattgataaatatttgaaattatccaaacagatcattataaacctgcaatttcccatcgagatttaaacagcagaaatgtcctagtgaaaaatgatggaacctgtgttattagtgac

SEQ ID NO: 198424 - DNA, 1000 bp, Homo Sapiens
ataatatattttatttaactcaatgtatccaaaatattatcttttcaatgtaaaatcagtataaaattattgatacattttatacttttttcatactatgtctcaaaattccatgtttccacttaacaacacgacacaccttaattcagattaacgacaagtgcttgtagccacatatggctaatggctgtcatgtaagacagcactgttgaagtatgaatagttcaaagaaatggtaggggatattccaggcagagaaaagtgcgtaagtaaagtttttgcacttggcattcagggaggtatatggaatatctgaagtgaaagtagggaagcgtaggagatgaagctgaaatgccatgcagtgggcagcagatgagggtacgtgggtgtcttgagtgccgtgcagacagagctatgaggtaggtgaggggagccacagaaagactttatgtagcacagtactgggatcaagtttgcactgcagaaagaccactctggaagagagtggggaatgattgtattgggggtgcagagagctaagattgaaggtgtgaagatcagttaggacactattttaagaatctgttgagcaatgatgagggcctgaattaaggcaagggcacagattctggagaacaataaatagagaagatggaatcaagccagagaaactcaaatggaagagtcaaagagatttgatgctggattaaacataaagaaggaggaagaaaaatctagattctttttgggtctctgaactgggtattcaggtgaaggacaatgtcactcactgaaatactaagtttgtgtttatttcctctcttgtaaagtgagaataatacctaccttatagtattcctgtgacaactaaagtcaatatccataaagtgattagaacagtgcctggcacatagtaaggaattagtaaatattatcaccataatcataatcatttttgagataggaactgaagaaataaattaaagaagaaaatgaattc

SEQ ID NO: 198425 - DNA, 1000 bp, Homo Sapiens
tatccttagttgggtaaccctgtctcccatggggctgggctgaggaggggttcaaagggacagtgtcatgtctctttagggaacagtagtcaactttgtgatggctgctctcaatgatagccccagattggggttatctgaaccaagtcactgccaactcagtggtctgatggttcttgggcttcactgtacattagactcacctaggagcatttaaaaacttgatattgctgtttctggaagataagagtagatataattttccctaatcctcccactaagtacagctaaaagccctggacattctgtgtaaaacaaatacaagaagtctgaaaagtggagaaaagaagacagaccaactagggacctcgataccttaggatggtgatggtggtaagttccctgggttttcttttgcctcataaattccagacatggggcagaaaagtccaaaaatctggaaataatagcaaccacagacaaaaacagccccaacaaaagtcttctgtctctagtcagagcactaggaaaagagcagcctagcaagcataaaacatttagacaataattgctctattccagccaaacatcacagaaaaactgtgtccccactctatccagggtagcaaaggctgagtggggagcctagaattccaccctcaccaggctgtaacactgtgccaggtggtgtcaggaaaggccatgtagggagctggggctttctcatcaaccagctggtaaaaactcctctgcccccgtggtgaccatgtcagtagccatactcccaaaccccaagtagcagtaaaaaggaatcccccttgagtgttagtgaaggttgagtggggaatttggatgtctaccttcacccaacagtagcaagacagcaccctcattctcctgccacagagctatcaaaaggagccagctaaaatagaaggcttaaataagacccagagtttcatatcaggacataaaactacacaggtctcaaagtgaattc

SEQ ID NO: 198426 - DNA, 1000 bp, Homo Sapiens
tagttgaatctgtgataaactgaaagcagacagattaataggagaaaggcatacggatttattatgtgcatatacacgagagtctcacaaaataaaagactcagaaaggccagatgattggaatttttataatatctgtagctgcagaaagaaataggggcttggggcttctagggagtggaggtgaggacagacaggctttgggagggtgaggggaagaaatctagggaacaaaggttgtcttgctacatagattaaaatatctcggggagcagccctccaaagaatgggtaaagctgctctgggtgaggttgctaacctttagtccttttttttttttttgagttggagtctccctctgtcccccaggctggagtgcagtggcacaatctccgctcactgcaagctctgccccccgggttcctgccattctcctgcctcagcctcccgagtagctgggactacaggcgcttgccaccatgcctggctaatttttttgtatttttagtagagacggggtttcacagtgttcaccaggatggtcccaatcttctgacctcgtgatctgcctgcctcggcctcccaaagtgctgggattacaggcatgagccaccacgctcggccaacctttagtctctttttcctgtggtacggtctttccagatccatctttaggcagattaggggtcctcagagaaaacttcagcttgcatccactggttccctgctgttccccagtcatgataccaaagagccttactttggggtatcattttctgagccccaatactacattgacacattaagatcacccagagttcatcatttacatgtagggtttactcttgttttcttactttctgtgagtttagacaaatgtataacgacatgtatccatctttatagtagtatatagtatattttcactgccctaaaaattctctctgccctgccggttcatccccctcaccaacctctgataacccacaactgtaacccc

SEQ ID NO: 198427 - DNA, 1000 bp, Homo Sapiens
ttgttcagtttatgactggtagaattaaaatgcagaacccaaggtctaaactactgtggaatattaaagcaagcagaacgtcttgtatatgttgcaaaagaaaataaaaactagcattttggaaggttgaggtgggaggattgctggaacttaggagttgagaccaccctgggccacgtagcaagaccttgtctgtactaaaaaccaaaaataagctggacatggtggtgtgcacctgtagtctcagttactcgggaggctgaggaaatactatagctagagcttgggagattgatgttgcagtgagctacagttgtcccactgcactccagcctgagtgacagagcaagatcctgtctcaaaaaacaaaacaaaaccccaggactaatcaaaattttttaaaagagcaaaacataaaaatgacatctatagatcagatttatccattattatagtaagttcacatggattaaatttttttcaaaagggcaaacagatttttttaaatctaaagatattctgcttataaggcacatctaaaaataaaatgactcataaaggttaaaaataaaaaataaggcaaagatatatttggcagacataaatgaaaaggaagcaggaataaaaatgttcaaaagcaggcaaaagaggacgtaggaaaaaagcattaaaaagtcaaaagacataattttatattagtaaaagattcagcataaatagaagggctcgtgttcatagagatctttacacctaaataaatcatacagcaagtatttccaaagcacaaggaaaatgtgactgaaaccaggttgtagtggaagcttttcatacacaactgtcactttatggccaaacaaatagaaaaaaaacagaagattgtaatacattgaaaattttaaaatttctatgtgtgtaaatatgactaaaatttgttacctacaaagaatatacaaagaaacatgtataaaaagtggccatattctagctacaaagagaattc

SEQ ID NO: 198428 - DNA, 1000 bp, Homo Sapiens
cggctctgctgggatgccctcccctcacttcccggtccagtgagctctgatgtatcctgcgaggcccaccttgcatgtcacccctcgcagggacctcctggcctttgtgtgcagggctggccacccccagcgccaccccgggctgtaaccactcgttcacttgtgtgtttgagcctttgcgtcccagggcctctgagactgccccacgcagggctggtgatcagtgagtgtgcatgaaaagaatgaatgaatggaaggaaggaatgaatgaagagattttgaaagtgggaaattatcgaaatatttatttgatgtctctatttctcatgtattttatacttaacgttggggtctggtttggtttcatgaaaagaaggacttgccgggcgcggtggctcacgcctgtaattcctgcactttgggaggccaagatgtgcaaatcacctaaggtcaggagttggagaccatcctggccaacacggagaaaccccgtctctcctaaaaatacaaaaattagctgggcacagtggtgcatccctgtaatcccagctactagggaggctgaggcaggagaatcgcttgaacccaggaggcggaggttgcagtgagccaagattgcaccactgcactccaggctgggccacagagcgagattccatctcgaaaaaaaaagaaaaggaatcaacacatctttaaatatcccctcacctacttttcaacaaaatacaaatccgaattttgaaacaagaaataaacctcgcttacctcatccagaacagccttttttttctggaaaaaaaaaaagaaagaaaaaatacatgaattaacacgagaaggatgaatgtggttttgattccttcatcttgccaacaggtgtccatcaagccaacaagaggcctggctgccctggctcctccctcccgagctgccgggacccagcaaacaaacgcctttgtaaggaggacgaaagtgagaggcagaattaggatggcgggaattc

SEQ ID NO: 198429 - DNA, 1000 bp, Homo Sapiens
aagtacaatggcaccatatcaggtcactgcaacccccgcctcccgggttcaagcgattctcctgcctcagcctcccaagtagctgggattaccgggatgcgccaccatgcatggctaattttgtaatttttttagtagagacggggtttcaccatgttggtcaggctggactcgaactcctgacctcaagtgatccacccgcctcggcctcccaaagtgctgggattacaagaataagtcaccgcacctggcaccataggtactattttttggaccgcaccctcctcccgccctccaccctcaggtaggcctcggtatctattgtttccttctttgtgtctatgtggactcagtgtttagctcccacctataaatgaaaatatgcagtatttgtttttctgttcctgcgttagtttgcttaggataatggcctccagctccacccatgttactgcaaaggacatgatcttgctcactttttttttttttttgagacggagtctccctctgtcgcccaggctggagtgcagtggcgtgatcttggctcactgctagctctgcctccctggttcatgccattctcctgcctcagcctcccaagtagctgggactacaggagcctgccaccacgcctggctaatttttttgtattttttagtagagacggggtttcaccgtgttagccaggatggtcccgatattctgacctcgtgatccgcccgcctcggcctcccaaagtgctgggattacaggcgtgagtcactgcatccggcctgtctattccatggtatatatgcaccacgttttctttgtccagtctaccactgatgggcatttaggttgattacatggatgactacaatttttacaaatggaaataatacgtgtcagtgagaatgtggagaaattagaccccttgtggcagttcctcaaacagctaaatgtagaattatcatacgacctagaaagtctactcttagataaatatgcaaaagaattc

SEQ ID NO: 198430 - DNA, 1000 bp, Homo Sapiens
gaaatgacattggtacgatccaggccttatttggacttagagagttttacatacacttatgtgcatgtgtgtgggtatagttctatgcaattttatcacatgtatagattggtgtaactcccaccacaatcaagatacagaactgttccatcaccccaaagatccctcatgctacccttttatattaatatttacacccactcctctctcccctccctgtccctgcccctagcagtcactaatctcttttctgtccttatcatcttgtcatttcaagaatgttacatatatacatatatattttatttatttattttttttgagatagggtttcactctgttgcccaggctggagtgcagtggcacaatctcggctcactgcaacctccacctcctaggctagagtgatcctcctaccccagcctcccaagtagctgggaccataggtgcgcaccaccatgcccagctaattttttaaattttttgtagagatggggtttcaccgtgttgcccaggctggatctcgaattcctgagctcaagtgatctgcctgtctcggcctcccaaaatgctgggattacaagtatgagccactgcgcccagccctgtatgttttttttttttgaaatggagttttgctcttgttgccccgactggagtgcaatgtgcgatctcggctcactgcaacctccaccgcctcccaggttccactcttctgcctcagcctcccaagtagctgggattacaagtgtgcaccaccatgcccggctaatttttgtatttttagtagagatggggtttcaccacgttggccaggttggtcttgaactcctgacctccggtgatccgcccacctcggcctcccaaagtgctgggatgagaggcatgagctaccacgcctggccctatatgtatttttacaagggatccacagcagtcatcatattctcaaaggcatccacagtaaagtgctgagattgcaggagcttggtgtgaattc

SEQ ID NO: 198431 - DNA, 1000 bp, Homo Sapiens
gttattggttaataagaccagtttaaaacgagttctactagctcttggttaccgtgagtatagaacaattctaggaaatggggggtgggtctttgttttatttaattctccattgtgttcccttttgctcatcctcagtgaagctgcagaagggatcatcagcttccaggaaatatccagatcctcaccactattgttgaacctccttcaggatgaggttttcatttttgttttttctgcaaggatataattttcaattcaagtgtcaatcagcaaaatttcatcccataatttattgagtcaacttttgaattatctgatgggatagtggataaatagaaaatttcaaaactctagacaagacacattgaacaagatttttcctagaacctaaaaacttgatctaaaatttctaaagaaaaaaagcctaagaatagccaacactatctggatgaaaacctaaatggggccaggtgcagtggctcatgactgtaatcccaacattttgggaggccaaggtgggcagatcacttgaggtcaggagttcaagaccagcctgggcaacatggtgaaatcctgtctcaactaaaaatgcaaaaattagctgggcatggtggtgggcacctgtaattctagctactcaggaggctgaagcaggagaatcacttgaacttgggagacagaggttgcagtgagccgatattgtgccactgtgctccagcctggacaacagagtgagactccatcttaaaaaaacaataaaactaaatgagaaaaattgccttaccagagaacaacttatcaaaaagttataataataatataaacattatggagaaaaaaagtaacatacagtaaaaaaataaataacaaaaaattctctaatattgtagatattagaggatgtatagattactcaataaatgatgctgagaaaatcgataatcagcataaaaattaaataggatcccactcccataagatacacagaagtgaattc

SEQ ID NO: 198432 - DNA, 1000 bp, Homo Sapiens
aaagctatgaaaacaatccacgggaaaaaacaatcagcttgtgaaataattcctgtaacataatcaagagtcagtgagaggaggtgacagtcaatcaagtatgtgaaatgaaatgctttgtagccagctacattctcaggagggtcatttccagcctatgtagttcccataagctgctctaatgtcacaaaaacattacttccatcgagcctacattacctttctggagattgaagagacattcaaaccaaatctttgagctctttccttcagcttatccaagttaacctataaaaacataggggaaagaacatagttttaaaaaatcaaaacggaaaacaaaaaatgcagaaactatagtatgaagctaagagttcaaataagcctataacatcaaagacaccctatgagcaaaataagaaaactaagcagcaaccatccagtccactgattatggcctcctctggaatgcagtgaaagattcagccctgcctcctgcatttatcacaggtgtcaagagcctaaggagggcttaagatcaagggaagccaaacactgccagggaaagcaaacacatgtctaaatcatcacctccaaacaagtctaccattcacaatccaaaatcattaattctcatgtggtctctgcaagtatttcttaactctatctccaaacaaagagaaactatcacggaagcacctttttcagaagacaacctataactactacccaactcgattctcttccctcctctttcttggaaaccttggtacatggacttgctactattgttaagaattatttagggccaggcgcggtggctcacgcctgtaatcctagaagtttgggaggccgaggcaggtggatcacctgaggtcaggagttcaagaccagcctggccaacatggtgaaaccccgtctctactaaaaatacaaaaattagccgggcatggtggcgggcacctgtaatcccagctacttgggaggctgaggcaggaga

SEQ ID NO: 198433 - DNA, 1000 bp, Homo Sapiens
ttatacagtagcccagatagggaatcaacctaagtgcctatcgacaggtgagaggacagagaaaatttggtatgtagtggctcacgcccataatcccaacttctcaggaggctgaggcaggaggctcacttgagccatggtgttcaaagctgcaatgagctatgatggcaccactgcactccagcatggataacagagtaagacctgtctctttttaaaaaaaaaaatgtttttaaagaaaagaaaatatacacaatggaattctatttagtccttaaaaaacaaggggaaaccttgccatttgtgactatatgcatgcacctggtggacattaggttaagtgaaataagccagacacaaaatgatgaataccacgtgatctcatttacatgtggaatctacagaagtcagactcatagaagctggggcctgggggtgtgaggggcatggggagatgttactcaaagggtacagagcttcatttatgcaagaagaaggaatgctggggatggaatgtacatttaacatggtgactatagttagtaatactgcgttgtttacttgaaatttgatgagagcagattttaagtgtcctcaccaccctcacacatatacacacacacacagtaactatgggtagtgacggttgtgttaattatttcgactttggaattcagtacacaatgtctatttataacaaatgatcatatataccttgaatatatataatttgtatttgtcaactaaatattctaaaatttaaaaatatgccttttctatttacccacatttaaaaaaaaaaaaaaagaactggaaatcaaatggcttaactttagtgttccataaagagtgagtagctcagtcttctccagggtcccagaagttgcctgatacgtagacatatccctgatcagtatgtgagcttaggaagagccttgaattagaagaattggtttcaaattgttggtttgccaataacctgtgtaacctaagggaattc

SEQ ID NO: 198434 - DNA, 1000 bp, Homo Sapiens
tgcctgtaatgtcggcactttgggaggctgaggcaggaggatcacttcaggccaggagttggagaccagcctgggcaacatattgagaccctgtctctatttttatttttaaaaaattggttttcaatgaaatagtttcctccagttgctactactgtgagattatgaagctcatttcaagatgctcctgtcctgcttagaaagctggtcttcccctggttttgcccttaacttgaaatccagcttcagttttagtggccaaagggccatgtggtagcctgctttatatctgaactcagaccaatgggtatcttttttagttcttctggtctccaatgtcaacaggtttctcctgtctacatagatagaaaactgttctggaaattttgaagcctccctgtttaggcgagggagaagcagttttggaaaaatgaaaaaaaaaaagtacttttggggggtacctctcacagaaataggccacttggtgagtctaggatatgaaactacagaacttcacttattttggtagagtagaattctagctcatggaattaggagatggagctttaacttgtaatttttccactttatttaaagggagaggcctttaaataaatgacctctcccagctttattttcttcatctataaaatgggaacagtaatacctacatcagagagtttgtggattaagtgaaataaaatgtaaacatagatacaaagtgtttatatacataacacgtgcttatgaaatataaattccttttgccctcctgttttttctcctttggattgctcaaaaagttattctgctcgacatcacttattatagaaacatctacataggttaattatagacattaatttattgtaatgcttttacatcacaggtggaaccacatagagctacactttctctaatttttttttttctttttgagaccaggtctcactctgtcacccaggctggagtgcagtggtgccatcacagctcatagcag

SEQ ID NO: 198435 - DNA, 1000 bp, Homo Sapiens
aagcatgcgcctgtaactctaagataatcaggtagtaattagatgagttagactctcatgggtaacacgactccttttacaaatagtctgccatcatcatcaaatacaaggtgcaaaaagaaaaaaaattcccattatacggctcatgttttttgtggtttgtttgttgagacagggtctcaatctgccacccaggctggagtgcagtggtgcattcacggctctctgcagcctcgacctcctgggctccatccatcctcccacttcagcctcctgagtagctgggaccacagatgcatcccagcatgcctggcgacttttgtattttttgtagtcagggtctccccatgttgtctaggctggtctctaactcctggtctcaagggatactcttgccctagccccgcaaagtgctcggattacaggtgtgagccactgcatcccgcccgcattttcttattgtctctctaaactgcttaaaataaaataagccataggaattgagtatgtgagctctcagaaatgaaatgaatgtgtataaaatatggttttgtttctaaattatctaactgaacttggttattgctgcacctaataatcttctattaagaaaactaggatacgggagaaagaacactggcctgggagataagtctcctgggttctactgtgagcagctctacccacaaagccggtgacctggtcaagtcacccacctgctaaggcccagtctcttcccctagcaactgaggcagcaggagagaatccctgcagactgttcctgcattactacgattctcccagggcagatctaagggggggatcagcagacacttaagtgagagaatagaagtgctgacggacgtttaaaggcggtccaaatctggagcacggagaggaggaggaaggactgttaggggttagcggggagtggagacgacgtccgcagctgagggtggtgacaccctccacgcctccgtaagcctcgtcctcccagatc

SEQ ID NO: 198436 - DNA, 1000 bp, Homo Sapiens
tcctaaatgtatgttagggtgaggaaggattatattagttactacttggtgctactaacaggatgatcttagggaaagttaggacctacaacttctttctgaagtgtgtctccctttaaagatgataccttgtaatagtaattgaagaattaaaaacataaaaacttgctcttttggtaggtctgaaggtagcaagttatctcgatcgttcacagacagttatagatcagatgaagtccttgtttcactctttccttctttcccactattgcacttgactagtctttaaaaataaagataaaaatgagacaaaattaaagaaaagttgttctcattatttttttttccttttggggtgataaaaaaatttctaaaactagatagtggtaatgattgcacaatattgtggatgtacttagaaccactgaattatagatttttattgtttcctttttgtttgtacaaagtcatggggtacatgtgcaattttgttgcatgcatagcttgcgtagcagtcaagtcagagcttttggggtatccatcacatgaataatgtacacactacccattaatcaatttatctggctcacacctgaaatcccaacactttaggaggcccaggtgggaggattgctttagtccaggagttaagaccagcttgggcaacaaagtgagacactatctctaaaaaaaaaattatttttcttaattagctgggacatacctgcagtcccacctacttgagaggctgaaccaggaggatcacttgagcccaggagttcgaggctgtagtgagccatgatcacaccactgcactccagcctgggcaacagagtgagactttgtctctaaaaaatacatacatacataaataataaacttatcatcctccctactcttgttatttttaattaaaaggatcaatttgttaacaagcctaaaagcacatttcatttttactaaacattctagtggaggcaaattatggtgtaaaataatt

SEQ ID NO: 198437 - DNA, 1000 bp, Homo Sapiens
tagaacagtatctgacacacaatagccactcagcacattttaaaagcagttgaatgataaataacaatatgaagttgctttgtgaaatgtcagcaaaccatactgaggtgatatctgactatagattctaggatttagtcgattttataaatacctggatattcttccagtctgaaaaattctacttctgatagctctcctagaatttcagcctttgctacagagtatttggattcttaacaaaatataatacaatcatgtgggaaaatcaaggtttgacttaattccacaaagaggcctggtataattcttttcttatcacgacttccttccacaacagaacaaaggggcttggaatttgagacctaactttagaatagttcattgagccaatcagagattatagttgttcatttcaaaaaaagttctgtttttgtggccctgtctttctgcatgtcagcagaacaaaaatctatattttcaggtctcaatgtaaaaaaaaatttttggctccacctggctcccaggcaactaacctgtggcttgtgactgttagttatttcccatattgaaatccttggacagttttaaatgaagaatgacatagaagaggaggaaggtttcttgtagaatccagagtggataatgggaggggcaaacagtcaaatagctataaaaaccatttagcaatactaccacctctccctgcattctggttgcataagtcatgacttttcttagaagtctgtttgtgcaatagttttgtatgtttgtacatatgtgaatagccattttctactagtacatccagtatgttctgataaaagctgagtcatgattgatcacagttttgaacaccaaaatttcaaacttctgtaagtatcaattttccttcaaaggctaccattgggttatgtttattgtaaggtagtagctaatattaacagctaacagtggcagttgcacacaatgtggcagcctctgtggggaacattttaca

SEQ ID NO: 198438 - DNA, 1000 bp, Homo Sapiens
actgtcaaattgatgaccatgtatatttatatttagttgaatggattcctcaaccatgttttagcacaacaatactgataaacattggtggaggttaatgggggtaattgcccacttcagctatggctgctgacagataagtccctagtaaagaaataattgcagtcaagagcataatcgccctgtcccagggacctctaaagtattaatcaaaaaaaattttaagtaatttttaataattatctttactgtctggaaagtagtgatcatcatctatttgaagagatattttacttttaatctcgaaacatgtaacactatgtgtgccaggctcactttcttttattttacaaatagtagcccctttatttcacacaaaatttcctgttatcttagtccattcaggctgttataacaaaatatcacagactgggtaactattaagtgacagaaatgtgtttctcacagttgtggaggctggaatccaagattaaggcactgacagactccgtgtcaggggagggccgattttctggcttataggctataattttctcactgtaacctcacatcatacaagtgacaagggagctctggggttcttttcataaaagcactaattaccttcaaaggtcctaccttctgacaccgtcaccttgaggtttagaatttcagcatatgaaatttggggggacacaaacattcagtgtatagctcccagcgtttgtcttttatgttcttaaaaattgattagacatactactataccaggcatgaaggaaattgaaaatctttatttagggatatgaaccaacctagccattactttttctgtggcaagtctggcttgggataaataattggttttatttgctaatgaggagctattcaatatttttccacattaattttatgattaaactgatttgagataatataatgtcaatactaaataagacaaaatgaaatgaagagtggaattataagaagattcagaatt

SEQ ID NO: 198439 - DNA, 1000 bp, Homo Sapiens
ttttttttgatgactcagttcttaatttctgactgcaacttttctgaaatcgatgtcagcagaatagttacctactgcatatttataggtatctttagaaaaacagttttctgtgatcaagtaaattggataaatactaggtaaacaaaattaggcagccttctttttttttcccagattattctgagcctttaccatgtgaatgtgtattttgagtctctgcagggggttatggaatggaagttttctcaaatataatggaccacagaaccccctttgtgttacatttgttataattcctgaagaaaatctttagaactttttgggaaaaagttgctttaatgtggtagcctctcaggctatcaatatgtatgggattatttgcctctattttgaattaccccagactgctgctgaatttttgtctccttttaaaatacattttctacatattcttgttttctgcagttttcatttgtcattgtgagtgctttggtttctcctaactgcctgataccatccccttagcccccaccagttatgatacaggtgctcatataatttatcattcaaaccagaatacttttggaagtgaaagagaactttgttaatagttatgctggagtagtagctgtaaactgtgactctccagggcaaactgaaattgtcacagctaatataaaatctaatacaaactcatataaatagtagaagcgttttattggcttacgtaaatgaaaagttcagaggctgactgggtgctgttatggcttgatcagggatctggattcatttacctgtctccatgtgtacagattatctttgggctggtctccatcatggtacaaaataattgcagtatttttaagttttacatcttgccagccagtttgcacagtttgtcagcagaaaagagagcatctttgtcccagaattcttagtagaaatcttgagcttgcgctgattggacaaactcctaaaccaatcgccaaggcctgaa

SEQ ID NO: 198440 - DNA, 1000 bp, Homo Sapiens
ttaaccataggcctcaatgcactcccaaatatcccttggcatattctacaaaaacagattttccaaactgctcaatcaaaggaaagttttaactctgtgagatgaatgcactcattacaaagcagataatcagaaagcttccttctagttttaatgcgaagatatttcctttttcactataggcctcattgtgtttcaaaaaatcctgtcacagattctacaaatacagcgttaccaaactgctcaatcaaaagaaaggtgtcactctatgagatgaatgcacacatcacaaagcagttcctcaaaaagcatctttctggtttttatctgaggatatttcctttttcaccatcagcctcattacattccctagtatcctttcacagattctacaaaaacagtgtttcaaaactgcttaatcaaaagaatccttacactctgtgagacaaatacaggcataacaaagtagtttctcagaaagcgtctttctagtttttatgtgaagatattccatttttcaccataggcctcaatgcactcccaaatatccctttgaatattctacaaaaagagattttccaaactgctcaatcaaagtaaagttttaactctttgagatgaatgcgcacatcacaaggcagataatcagaaagcttctttctagtttttatgcgaatatatttcctttttgactgtagacctcattgcattccgaaaaatccctacacagattctacaaaaacagtgtttccaaactgctcaatcaaaagaagggtgctgctctgtgagatgaatgtacacgtcacaaagcagtgccttagaaggcatctttctggtttttatctgaggatatttcttttagcatcataggccccagtatgctcccaattatcctttcacagtttctacaaaaacagtgtttccaaactgcttcatcaaaagaatgtttacactctgtgagacgaatgcagacatcacaaagcagtttctcagaaagctt

SEQ ID NO: 198441 - DNA, 1000 bp, Homo Sapiens
gctcccagctcctcttcctttagctggaagggcttcactggccacttcaccctgatgatgggctccacgtggtcctgaaggcggtgccgcttcatatgggcatttcgactcttgatcttgtcaaacaccctgaggagtcaccagaggacatggggtcagagcagggaggaagggatcacaggggctgaggctgggagccctgggagtgtttccaggagaaagctgggtacctttcacactctctgcatggaaaaatgccctggctctctgcacttcccaacagctcgggggtccgcttggagcctgcatttgggctggagctgaggatggactccctcctataactcttggtctttaacttgggagttggatggtggctgggtctctcccgagggctgcatgggacctgcagagggagcaaaagtgacataagggtgctgacctgtcctgctgtaagagagacacagagctgggggcatacgtgtctcctgcaggaaaacccttccatcaggagcacccccgccctctgaccccaccgtccaactcaacgggtagcaggcactgggaggagagaagagctcccgacacagccctggttcctctaccttttcctctgtcctttccacttcctccggctctctcttgaccctcttttctagccctggggctcggccacagtcaaacttgatcatttttttccagatgtaataatactcaacgcactgagctaccgtctttgtctggatctagtgaaagaaaacaagcaggctgtggctgtgccacgcgggccctgggagtgtgaccttgccattgggccggccgcctcctttggaaagccctccggaagcacctcttcctttggcttggcgttaccactcaccacaaaggcacaggaccacaaaatccttcctggggacgagggcgttcaaactggagccacatagtagccaccagtacctaagcctgcacactctgagcagccattccagctcaggaattc

SEQ ID NO: 198442 - DNA, 1000 bp, Homo Sapiens
taagggcctctattagcatatcatgccaataaatatttcaacagttacgtttaggtgtggataaacttccttcgagcattcatagaagacatggcaaacaagcctagatttattatctacagtttcacacacgacacagactacttgggagaaaagtttatgttgtatgagcagtcaagaaatgcctgcctttttacaatatttgagtttgtttagtaattcaaagtggggactgcactatatttttatatttcatcacaatccaagaatctctactcagcgtttggagcacgtaacatttgccatcatttaaaaagtgaaaaacctagctttcttccaaattcccataggtgtagcaggactaagaggtaagcactgaaaccacatcatttaataagatggatcatttcaagaagggcagtacgtgtacactatcgcatttttgtaaaagcttcatttagtttttcttttcttttttttaacttcctttcctctctggactctctgattttctgtcttttttacccctagtatatattctttattatctattagtaaataacaaggggaaaaaatcattgcccctttttcctggcaaactcaattaggttacgggagaagggagaagagtgcatgtgtttgtgtatttttgaatataaattccttgaagtcaggatacctcctaaacattatccagaattgtgtagaaacttgaatctgacttagctggggaaaataatctttcagggaatgaagtatcatacagaaagcagcactctctttcacactagggatcaactttagagcattataggcaaaggcatcatattttcaagaaatgccttccacttcaacctgagaagtctcttaccatttagtcacttccctaaagcaacagactcgcacgactgagaatcactgtgtcattttcatctgtagcgtttctttaaccaggggtgggtaccctgacgactgattgaaaaacacgttgactaaaatg

SEQ ID NO: 198443 - DNA, 1000 bp, Homo Sapiens
gaaaattacaaatgtattcaatataaccagtatttatcccaactttctgaagaagaaacttctcctacttaactccaaccttatgactcttctctgatatttttccagccataggtgttagcatctgctgttgtaaaatctttggtgttgattggtgtggactgagatgaggaccagagccaagatcactttttacaagaaatatacaattctgccccttgtccaactctataaattactagaagtttctggaagtgtgtacatcttcaagctcatcttaatcatttccacatttgtattcttgagattatacctgagattctcatccacacaatccttaattaaagcagctgactcgcttctcacaatataggaaaatgggggtgccaactgctttctctgccaacttctgagtactgttgaagctgaactagctcctcaacgcttcttctccaggaaatgtactgcaactctcatgctatttagcaccttccctcctcatttcaaaaattgtgctgatcagagacattcagaaaaagtgcaaaagaacaaaacagctccaaatagctttccacagttctgcactgtattcttccctctgttgatttccctacaaaacaaataggcaaaaaagcagctcacaaaaaagatagagtacatagaaaagagaaaaccgaggcataagacagcactgtgtgcttcaagaaagtcctggagcaaagcttggagcacagggttcaggtgagaactgaagttatattagcataaacatatggtcgcttactgccccctctgcaatgtccagaatgcattcctaattttcattccatttgtctccaatgcgtgataggacttcaaagagtcatgattaaagaaattgttcagtgcaattagtcaccacttacaagtcagtgagctcgcattctggggtgagtgctaagctttttcaataggagatagcacactccattcacttctttgttgttctttcttaagacct

SEQ ID NO: 198444 - DNA, 1000 bp, Homo Sapiens
acaaaaaaaagaaagaaagagagagaaagaaaagaaagagaaagaaagaagaaagaaaaaggaagaaagagaaaggaggagaaagaaagagagagagagagagagaaagaaagaactttctgaatcagaatctgaccagcagcaaacaacaacaaaaacagttaagtgcaaaatagggagtaccccgaaaacaagagggaaagagccttgattagtcaacttcaagctgtcagtaccccccttccccctcagaaatctgaaaggtcccaattaagtcaggcctgcctggttggtaattagaaccagaagtggccaggccacagggaggggggttgggaggagggcacaggaggagttgggggagggctccaggaagccatgagtcctcaatagcccccgtttctcttcaccagatgcaccccactcatcaccccatctgtgtgtgcatcccaggcattgcatggagggggtccttaggaccaggcattacggtgtcaggcccgccctccccatcaaccctgacccccccattctagacagacttagtacagccttggggagaaggtaagagggtgggggatctagtgccccctcttttccccaaagtttccccagcccttattgcagcaattagacccattagccttctagcatttcatgggaaccagatgttctccaccatcctggtgggagtatgaaggggggctgctgcctgactcacccccttccctatgatccccaccaccagggcatacccccctcccagctagagccccacaaaggcatagccctagaggcaaagaggagagtaccccttcccaactaacaaagccattagcactcagattctttcggggtcaccccttagagtccctgccaccctggcaaggatgagtttggccaggacgaggcagggcagggacagctaactcctcatgcaccctgcctttccctccttgccaccttctggatggggcttgaggataactggctctgaatt

SEQ ID NO: 198445 - DNA, 1000 bp, Homo Sapiens
ggattacaggcgcccgccaccatacccagctaatttttgtatttttagtagaggcggggtttcaccatcttggccaggctggtctccaactcctgaccttgtgatccacacgcctcggcctccgaaagtgttgggattacaggtgtgagccaccgcgcccagccttttttttctttttaacacagggtttcactctgtcgctcaggctggagcgtgagtgcagtgatgcaaacacagctcactgcagcctggacctcagcctcaagagatcctcctgccgcagcctgctgagtagctgggaccacaggcatgcaaggagctttttgctaaaaagagataaaggaaaactgaaaataaatatcacctacttcatcatttgagcttggactagcccttttagaaaaggaagatggcaagattatgtttccaaagatacttcaaagggacaaagtgctgaatatacagcaagcaggggattaattttgatagaaaaactgaaaagtaaattcccaaatgttggtagatggtatagatgttttagaagagaacaccaaagagaaaagttattcatcattgattatcctagcaagagcagcagactaatttggcatggctgttctctgagcaacatgagatttgttcttgactgaaacaacagtcctttgtctaaaagcattttcttattacttggtgaaactgtcagtagtctcctcacctttattaggtaagatgtatgagtagaggccttaaaatacttcttaagacgttatgctggggatttctgatctagaaatttcctggtatttttatttatttacctaacaatttaagcaaagtgattagaacttaacctctatttaacaatgtctggtcttccgctatagactataatctttttgtttggttggtttggtttctgttttgttttatttttatttatttatttgttttgagatggagtctcgctctgtcatccaggctggagtgcagtgtcatgatc

SEQ ID NO: 198446 - DNA, 1000 bp, Homo Sapiens
agagttatatcttaaaacacaaagtataacacaggtcactttccctggatgatatatcaagtgagatactgtgaaaatactcttcatggtaagccctcgactctacctctttctttttatgaaaacagaatacatggcacaaagcacagctgcccctgagacatgcttcagaggtaaagcgctttgtaacagattcacttcctttcccagtgccacagaacaaagattacactcagccttcctggacataaaaacttcagtttttcccattcctcctgccaaagctgaaatgccgagaaatgctgggaacctggcctgtgattatacacacttaatattttacattctgaaaccccaaggaataagctgttgagaacagagtcctatttcttaaatggcagttgaacagatacaacgctcaagctctgttgagcgtggcttagtatttgcataggcagaaacagacaaagactgcacagattctgccagtctgtgggcaccttcccggcatatgtggcagacctcagttaacttttctcacttatttctgttttgttgttttttaaccttctgaattactcaaccagattcttacaggaaaaaaaaaaaaaaaaccactaacacacatacaaatcagtcacagggaaactcagttacggcctctgacgggtttgaacctgtctatttgcaaatgagaaaacaaaatttcagtgttctttaggccaaaatagtatctaccctgctccttggtgcagcaataaaatggacagccccacagtaatcagattttgggtttgcttttgtcaaaattttcctcctcagttttgtaagttgatttcaccgccacagtatatttttctcaattccatcttctgtgtaggagtcaaaaaaaaaaaaaaaaaaaagcctgcttcccttcctctcttacattcattcctttccttcaagaaccaacccaagagccacacatcccccaggaagggctcgaaagggtgaattc

SEQ ID NO: 198447 - DNA, 1000 bp, Homo Sapiens
taagcctcctggaactaagatgtggcctcagacgaaggtgggatccaaattgactgtgattaattccaccttccagttaaacatgagctactaaaagaaatcagccagcatcacaaaaagaaaaacaaaacgaatccctttcttccatttccatgttctgtgatctgggactcatgcatgctgttctggtatttaaattctcaaatgcttatccttagctccattcctggcttcctcgtgggcttctggaggaaggaggatatttgtcattcacccctactcaccgcacattcttgacagggcctggcatctgacagaaaatcaggggaaggtgaccatttggcacctctgccaccagcttcagattgcttgaaggctggattaaggccagggtgaaatctacgggaagaagctgctctcttccaggggccctccctgcagtgaggcttcgtcatgctctgggtgagcctccaactctttaattaaaaactgaaggttgagggagcccagctacctgcagactacctgactttggctcgtagctagctccaagccagttggagtgaaagatgcagttcctgggctcttgatgaaattaattaagagaaagctgacagggagacagatggaggttgcaggactcacagaaccagccagcaatccatttgtagggagcttgtgttgggggccacaagcgcagtctcctaccagggctgctttggtgacatgaagtcctcagacctagccaagggctgtcaagaaggaatagagcccagagtgctgagccttactgcttacctggagaaatcacatggtaagtgttgacatctggtccaggttcttcctgaacatgccaaattcagtaggttcaggctggactgggatgacaggtcactgccttgtgaccctgtctgacaagctgcaagaaactggtgcccctgaccacagagacaaggatgaggtgagccccatggagcctgccagctcaatcagctgaatt

SEQ ID NO: 198448 - DNA, 1000 bp, Homo Sapiens
taatatcatgacttgtccacaaattgatgtgtgaaacaattttccctgttgtactctgctttaggagatgagatgattgtagggggcaaaagaatggtttcccagcctcctggtttgcaggacagcagaaaaaacagccattcagttggatgttattggaatcaacaacaaagagactgaaatgctcatttatctattacggtaaaatccaacatttgcttcacatacggtgatacaaagcaatagcatttgccgtggtatttgaaatacagtaaaaatatgagttaacaaaacttgggcattaagctatttctctccaagagataatgagtgtttcttattcttcaaccctttatactttattttttaaaagtgtctttgtttttaaagaaaagagatatgcttattgtaaaaaaatccaaaaatcagaaaagcatagaaaagaagcatatgatagtctatactcaccatggaaacagtttacagatataattccagaattttctatgtgtaatatatagaaatggcaggttactattcattccactttataattttctttaaatattttgtgttgatataattatagactcacaagtagttatgaaaaaatggtacagaggagtctctcctaccctttaccctgtcttctccagtgataacaaaaactgctgtttttcagcagatcttttttcttgtatttctagacttggaaactcctcagtagattcaaataatttctgtctccacctcccttcttcctctctccctttcttctttctttcctaccttccttcctccttccttatatttttcctttcctttctgtaatttccaaacactgctataacacgttatagtgaactgagtgggttaaaactatgtaaaacaatataaccttacagttcgggaagtcttaagcacaaagtgggtttcactgtcctaaaatcatggtgtgggcagggctgctttcttttctggaggctctaggggttgaatt

SEQ ID NO: 198449 - DNA, 1000 bp, Homo Sapiens
agatgttagtgcagacgaacatcattatatagaactctaataagaaaactgatgtttatgaagcaaacaaatcatttcattaaaaatctttgctgtaaaattcatgtaaataaactacttaaaatatttctttaataaaaattccatgtttcataagattaactaccatgttattaccaactgttggcttttggaaattttgtagtttcaattagattaaagtatcaagcagtgtacaagcctgaaatatttaaaaattttaaatacttcaaaacaaaaaaatacttataatactgagatatcatcaaaatatgctattctggtcttttttatcttaaaaggaatatatttctcatgaaaatgaagcatgattgtaaaaattgtttcacttaatggagccatgactattctttctatagttaaggttctttttaagtaagttaaaagttgtggcagattctattatggttcactgagtctcattctttgagctatgtaattgaatgatcacttgaagtaaaaacatggcagcatctatcaatcaaaagagtcctatgctttcagagatcaagaatcaactgccaaggaagactcatcctaaaaggggcccatttgcaattggtgttacagtgaatccaatgaataaaaaggtgatttcactaataagatgtataagacaatttctgggactccagttggccgtgcattcttatgttttttttaaatccaatttcattgttgtattttcagttatatgctgtacttctgaaggaaaaaactaatacaaaaagtagtcaacgagatccagataaaactaattgaaattcacaatgtacttgtcattttgccaatagcattttttttaaatgacaaaacctaatcaaagtaatctgtgactgaaatcaaccacaggaaaatgtgtcagaaggacttttcaaacatgaaatacacacgtttgcctaaagatgcaatgaaccttacattgttgacttttgaattc

SEQ ID NO: 198450 - DNA, 1000 bp, Homo Sapiens
ctgttaagaggatgaaaagacaagatacagattgggagaaaatattttcaaattgcagatgcaacaaaggacttgtattcagcatatataaagaactctcaaaacccaatcatgaaaacaaaaagccaagttaaaaaaaaaagggcaaaagactgagagatacttaccaaaaaggatatatagaaggcaaataagaacatgaaatgatgttcaatgtcattagccattagggaaatgtaagttaaaaccatgatgggatgctgctacacatctgttagaatggctatacaaagcaatacaaaaacctgacaatagtgtgtgttgacaagaatgtggtgcaactggaactctcatacatcattggttggattgtgaaatagaacagctactctggcaaatggtttggcagtttcttatgcagttaaatatacacttaacatatgacctggtgatatcactcctaggtatttatgctagagaaataaagacacatgttcatatggaaacctattaaaaatacaaaccatccttcttcgggtcctaatatagtctctatatgtagagaagttaaaaatacttctcctcaaagggttcaagacggagaaatcaactgcttttgacttactttggagaaagctaagtaccatccacaattagctgcctacttgtatgtatattacatgtgagaggtagattcctaatctctcagggaggggaaagggcctgttgactttcctgagtgccatctgtgatctctaacaggcaatgcaagctgcacagtcagtctagggggtgccaatatggcagagacccacaaagccatgatcctgcaactcaatcccagtgagaactgcacctggacaatagaaagaccagaaaacaaaagcatcagaattatcttttcctatgtccagtaagtagaagctttagtttcctaataagggatatcgaactctgaccacattggggtgggtagggggactctctgtagaaagaattc

SEQ ID NO: 198451 - DNA, 1000 bp, Homo Sapiens
tgcactccagcctgggcaacaagagcaaaattccgtctcaaaacacacacacacacacacacacacacacacacacacacacacatctagttaaaaaaataaacaaacaagcagtcactaactaccacccccaccagaaattcaatggcctggttttgaattttatgtaaatggactgatacaacatgaatccttttcttggcttcttttggagtcatccatactgtagcacacggtagctcattcattctcactgccatgtagtatttcactgtggggttatactacagtttatttctccactcgaatgttgctggacattgggttgttctccacgtttggcaattaggaattgtgatgaacattttcatacatatctcttcacaaacttatgtacaaatgccaagtactttttgacatctcccacatggattcaggttcaccctgcttataccgcctcccactcactccaaaagtacgctcatttgctcatgctttctcactcagtaacttaaagacaaaagaacaccagcagagatacagacagtaccactcagatgtgagccagtttctgctctgatggtaggattgtaaaaaggaatgaaacttctagaagatagtttgatggtatataaaaaaagattaaatatgcattccttggcccaacaataccacttctaggactctaatctaatgaaataatgaaatgtataaaagaaatctacacgaatgttcatcatagcattgtttatactggcaaaacactggatgttgcctgattgtttggcaataaggaatcaagccaaatataatatatctcacacagtggattattgtgcagctgttttaaatggctatataaagaccttgattattttgaatgaaaatatcagatagcaaaatggcacatataatcctgagcccatctgtgccccctgtatgaagacagaactgtgacaatggtcacagaaatattgcttattttcaggagatggaattc

SEQ ID NO: 198452 - DNA, 1000 bp, Homo Sapiens
gttatcacttcataaggccatctttctagatacctgccataacatcaggatatttccatcccaataaaacatgatcatgatgtgcttggctaataaaaaggaaaaaagccgtgtgttaaaaatatgtttaaaatgatttgcatgagtggtgtaaatataaaccaccaccatcatcattgtcaacattatccccagtttatttgccttttgaaatccctgcctgaccttgagggtgggaggttgataaaggaagagggaggcagaaaattagcatctattaaatgcttattattgctaggcactgtgctaaacactcacaataaccctctaagataggtattattatgctcttacagatgaggaaattgggctcaaagaagttcaggaacttgctctaggtcatacagttagtaatcacaggatcaagatttcaacccaggtaagtgtaattccaaagtctgcactctttcccctacacctggactggttacatttactttgacctcagcagtgcctcactgagtggatctatgctgctactgatgtgacactggtcaggagacatgctgggctcaatgatccttcctagacacccagagtcccagaggggagccagaagttctgaacctgacctttggggcttctgtgttcagtcacattactgccttcacccaggagtgcccacacgtaatcatgggcaccgtcattgttgtgtgcagtgtcacatccaacacgcatttggactcacacaggctggctacaccttcccatctcccaggcggtggtgtgtgcagccagcaggggtcgccggcacaccaggaattaccactttctgggtttgtctcctggcccaacaggatggaaatgttcctcttcctgtgttcttctaaaatcttacattaatcccttgccttccccgcctttccctcctatctcctcctatccccacagagccagtaggtttcttacgacaagctgggtagtagtagcccagtaagta

SEQ ID NO: 198453 - DNA, 1000 bp, Homo Sapiens
ccatatcacacggtattgtgagaagtccaaaatttaggttctttcttaaatttaattatctggtactttcctacaacactgtgtctcctattgacatttcaaatttcattttgttcacatatcttatgtttgtgtctccttgatatggataacaatagctggtgtaagagcttatctccttttgattctgaaaatgtaataaagaaggaaaatgcagagtaacagccacatgtgccggttattcaagcaaccatccaacttctgtatgaagttaatttggggaaaatatggtatgcacgctgcagctcaagctcacttgtgtcaaagagaaatacgaaaggcaagggatggtgctactttgacaagtacatgaaggaataaagtattgaaataaaacaagtgaatgtggccttatgagaatctttgttttacttataaggcacagcagtttcaagaatatgaccttgcttaatatattactgtttttacttcaaaacaacagcatttgtattcttatctaacaatttatgaatacaaatgacatgaaaatcatgagatacttttactctttatattaatttttattccatttactccacttggatatatatcctaagtaatcatcaaaattaaatgaatatttgagggaatatataacattaaaagaacccctgagaagttatgtagttcttgcctgactctaggcaaatttataatatgtaaagatcttctaaagaagaaattcatataacctattatagaaactcttccttatttctaactcaaatctttatattttatattaagcttgttgaagttttttcttagaaaatttgtaataaaacatcatatcatgtctctttggcctatagcgaatgaaaaaacctcacagttaattaatacagagattttaaaattgtagacctctagaaaactcattttgttttctttggattttatacataaaagtaaacattgatttgtaattaagagaagagaa

SEQ ID NO: 198454 - DNA, 1000 bp, Homo Sapiens
ccagcgcagagggagaaaaataacaaaacgaggagaaaataagctgtttggctgtggtgtgagcaggaatatccatgcagggctgcccaccactcacccttactcactctttccacacccagccggggcgcccagcatgagacagaccacccccctgccccctcccccgtctggtctaaaagcagacgctggtgagcgagcagcaggttataaatatgcccagggaactgccgccaactcgctcccttgtcatcccctgggaggggcagggtggggtggctcccagggaggagccagggctgccctgttccctgaggcccaggaggaagtggggcttcctagaggctaccatattttccccccttttcaaggtgaaggaaccactgccactccattttccctgaacatttgctcatctcttcagatatgtggtccctaccctccctgggccctggctggaggctcggaatgaaagggcccaaagtactctgtgtcatggcacagcccgctgctacttctcttcttcacatgcatttgctctcagcaaaacagaagttcattcattcattcaacaagcattaactgaaagccagctgaatgccagaccctgtgcacaggcccacctgtgtgcacagtgtctgcacacacaggtgcaagcacacacagctgcccctactccatgtgctcacatcacctccagcccccactaaggacttcctggcttcaacctgccagcctcatcaggaaagcaaagcttcaagctcctggttgtgcctcagagtaggttagggggcatggggtagggggtggctgagaacaggaccccaaacacttctgcttccactacttcccctgtaaatgagggggtcctttctctccttcctgcccaatcatcctccctaagtaggtgccatgtgacgaagaaagagccattcttgggatgctgagggtacctgtccaggccaccagagcctcccacctcccagcaacttgccaacta

SEQ ID NO: 198455 - DNA, 1000 bp, Homo Sapiens
gagacttcctttattgtccagtatgtaatcagttttttgtaagagttctgtgtatgtttgaaatgaatttatagattacttgagctttttgtgttgttcactttttttattttttgatatgcttgatcagttactaagaggagtttgttaaaatttgccagtatgatgatggatttgtgatttttactttttgctttaaatactttgaaggtgggtaattgagtcattatgtagtgactttatctctgatgtttttgcctaaaagactattttgtcttatattaatagccacatcatctttctctttatataatttcccactctttcagtctttctgtatcctcatgtctcggatattacttgtgcatagtatagagctggttttaatttataattcagtatgacaatctttgtcctttagcttgaacgtatagtctactcacattttttatgattattgacatttggttttatttcttcttcttttttttctttttaggctcttatttttcttcacacaattttttttcatttgctagtttggaagttggatactaaatttctggtcttatattcctaccagtgtttaaagttaatcaggaaccttactctttccccgaaatacaaagaatgatatttgcttagctttgcctatatatttagcactttcttggctcactctttgtatcatgtctggaattatatatgtataaatatattctctgtgtgtgtgtgttttagataagatctcactgtgttgcccaggctagagtgcaggagtatgatcatgactcagtgcagccttgacctcctgggctcaggtgatcctcccacctcagccttctgagttgctgggaccacaggcatgtactaccatgcccggctatgttttaaaaatttctgtagagatggggtctcagtatgttgtctaggctggtctcaaactcctgggctcaaatgatcctcttgccttagcctcctaaaatgctgggattacagg

SEQ ID NO: 198456 - DNA, 1000 bp, Homo Sapiens
cataaaattataagactgggccaggcgcagtggctcacacctggagtctcaacattttgggagttccaggcaggtggatcgtttgagcccaagagctcgagaccatcctaggcaatatagcaaaaacccatatctattttttaaaaaacacaaaaaatattagccaggtatggtgggtgcacctgtagtcccaggtactcaggatgctaaggcagaaggatcacttgagcccaggaggcaaaggttgtagtgagccaagattgtgccactgcaatccagcctgggcaacagagtgagatcctgtctcaaaaaagtgggggattataagactgtatttttactttaccttttctatgtttaaatacatttaaagtacaaatacttaccattgtgttacagttttgcctagagtattcagtacagtcacatgctaggtttgtagcctaggagaaaaaggctacaccatataacctagcagtgtaaaaggccataccatctagatttgtgtaagtacactctataatgtttgctcagtgacaaaatcacctaacaatgcatttttcagactgtattccatcgttgttaagtgatgcatgccttatgccaaataatactatttaataaaatactaaaactactactatataatggatgctgacatgtgtaagacattttacatctgatttaaaatacttataactgcataacagataatcaactgtctattttacaactgaagaacatctgaggtttagtaacattcccagggtcacagagctagtaagtgactgagtagggatttgagcctgaggctctttcttggaagccctcatgtttcatactgcacccagcctacacaaagcctatcctcctttaatttttatacattgctcttacttctttatagagtataatatcaaacccaaatgcttacagaagacacaagtaagtaacatatgagagaccctagctgggtctttccctaaggatatctggaatt

SEQ ID NO: 198457 - DNA, 1000 bp, Homo Sapiens
cttgctagggcatatcatttaacaattctttcaaaaaggaattttatcaatgctaaacgtcttagacattattttccttcaggttttaaagataatttcttctttttttctggcttcctgtattccattattttgcaagtcgtctgttttcagtctgaaatatttagagtcttttttatccccagtgttctgaaatttcaacatgtctgtccagcaaaggctccctcttcatttatcctgataggcactggcagagttctgggacattgccagtctcagctctggaaaatttcttcccctgcattcttttggttatgtcttctgggaccagaaaatgaaactttgactctgtcctccatgtatcctaacttttattctgtgctttccatctctttgtcctttcatgctgccttctagaagtccttaactcaatcctcttactcatttctttgctcgtcagctgtgtccattctgctattcatcccatttatggagttttttcaatgaccagattttaactttctagattctctagttgatttttttggggatccaatagcctatcccatctctccagggatactgagtacacctttctaagtcctcatcctggtgccttaactccctttccttgggtgtcaattctctcattgaggagtttgctgcctgtcattcacaggctcatctctgtgtctgaagttcatggttagccaatctgcaagcatcacagctctctcccacagcctgccccactcgtggggtagcagaatgcaccaccagccgctacctaatgttctgtgcatgggggcctccattctccctaaacacaccagccttccaggacagtgcctgccccttcaagccttgcactcacattacttctgatgaccactccctcaaaacacagatacctgtgttatctgcttggtctgggtgtgtgtgtgtgtgtgtgtgtgtgtgtgtgtgtgtggtggtggtggtcaggaagagggttgaattc

SEQ ID NO: 198458 - DNA, 1000 bp, Homo Sapiens
ctgaccccctcaatccccctgaagcaggacccagtctccggcctttccagcccacctcagatcctgggggctacatgatgtccagacctgactcctgggaagggacaggaatgcgaggcttggtattagtttcctgggtctgcctaaaggacagacatttcctgggtggcttaaaacaacagaaattttcttttcacagctctggagaccagaagtctgaggtcaaggggtctacagggctggttccttctgggggctctaagggagactctgtccctgccctatctcccagcttgggaactcccagacgggctttcgccatgttggccaggctggtctcgaactcctgacctcaagtgatctgcctgcctcagcctcccaaagtactaggattacaggcatctgccaccacgcctggctaatttttatttttatttttattttattttattatgtatttatttatttatttatttattttttgagacggagttttgctcttgttgcccaggctggagtgcaatggcgcgatcttggctcaccgcaaactccgcctcccaggttcaagcgattctcctgcctcagcctcccgagtagctgagattacaggcatgcaccaccaggcctggctaattttgtatttttagtagagatggggtttctccatgttgaggctggtctcagactcctgacctcaggtgatccgcccgcctcagcctcccaaagtgctgggattataggcgtgagccactgcacctggccaatttttatatgtttagtagagacagggtttcgccatgtcagccaggctggtctcgaactccagacctcaggtgatccccctgccttggcctcccaaagtactaggattacaggcgtgggccaccacacctggccaagagccttgattgtatctgcgaagaccctatatccaaaaaaagtcacagccacaggtactggtggtcaggacgcagatgtatctttctgggggacggaattc

SEQ ID NO: 198459 - DNA, 1000 bp, Homo Sapiens
gaatgagttcagcccacttctctctgccatgtgcacttgttctcaccttctgcccttccactaagggatgatcttcaccaattgtcagtagcatgctcttggacttgccagtctccagaatcatgagccaaataaatcacttttctttataaattgcccagttcatgttattctaacaccagaaaacacagtaagtaagacaataatttacagggcattaggttgagtataaagaagggtcttccctcagttgtgggaaataattatctctacactaaatatactagtcctgctgaaagatcaaaaaaacaagacctaaatggatcaaactgtttttaattacttacatctggaacaaagctcatatttataagaatacaaaaacatccatcacctaagataaaattcacaatgtctaatagcttaaataccaaaccttttaaaaagcagaaaatatggccgattatgaggagaaaaatcaaacaaaaccaacccaactgacaccaatattagaactaagaacattaaaacagttattaaaactatgttccatttgttcaaaaactataggaaagactgaacatattaagcacagatgtaaaatagacctaactctaacttcaagagatgaaaactaaaacatgtgatatttttaaaacccccactagaaataattaacagaaaatttgatattaaagattagtaaacttgaagacacagccataaaaacgattttaaattaaacagcaaaaaaaaagaaggcaaaaagaggaaattaaacagaccaccagtgagatatggatcatatttagtcagcctaataaacaggtaataagagttgccagtaagttgggaaaacaacagaaaaacatttgaataattaatgctgaagacattcctaattgaatgaaaatgttaaaaccacatatcaacacatcttaagtatgcacgcaaaaaagaaaaatcttaggcaaagaaaggaggaagacactgtgaccca

SEQ ID NO: 198460 - DNA, 1000 bp, Homo Sapiens
attcctatatatggatttatcttttattcctcctttgactacagggatatatatggaaatctgagcaaagggaaaataaagggaagatagtgacatgaagctaggaatgaggatggtacacaggtatgtgtctgaagtcctaaaactcctggaggtgggttgcagatttgtctctaatgatggcgttatactaaagcacaatcagaaaatgctgtaatggagagagtggaggcagagtagcagtattatttatttcatgcacctaggcaaccaaccccactgatatggttgcctaatccaagaatagattttttagagtagtggttctgaacctatttttttttaactaaacttttgagaaaataaacctttttactttgaggtaattttacgtgaacagaaatgttgtaaagataatatggggaatctctcttatacttgtcacagcttggaaattaacactggcaccttatcactagctaaactccagcttttatttggatttcaacagttttttccctctaatgtcctcttctgttccagagttccatgaagaatacccatttagtcgttatgtctccttagtctcctctggtctgtgacagtttctcattctagtttttcatgaccttgacagttctgaggtgtactggtcaagtgttttgcataatatcccttaatgtatgtttgtttgatgttttctcatgattcgattggggttatgggtcctggggaaggctaccagacaggtgaagtgtcctcatcatgtcatatcaagggcacatgatatcaatacgactcatcagcggtggagttaaccttaatcaatttggttgaggtagtgtttgccatgtttctctactgtaaagttactgtttttcccttttccatattctactctttggttgcacgtcactaagtccagctcacacacagggaagtttagttctgccttctggaggtgggaatatctactgtctacttatattaaatggaattc

SEQ ID NO: 198461 - DNA, 1000 bp, Homo Sapiens
cgctgcacccactaactcatcatctagcattaggtatatctcccagtgctatccctcccccctccccccaccccacaatagtccccagagtgtgatgttccccttcctgtgtccatgtgttctcattgttcaattcccacctatgagtgagaacatgcggtgtttggttttttgtccttgcgatagtttactgagaatgatgatttccaatttcatccatgtccctagaaaggacatgaactcatcattttttatggctgcacagtagtccatggtgtatatgtgccacattttcttaatccagtctatcattgttggacatttgggttggttccaagtctttgcaattgtgaatagtggaggaggagaggtgctctgctttttagagtttccagtttttctgctctgttttttccctatctttgtggttttatctacttttggtctttgatgatggtgatgtacagatgggtttttggtgtggttgtcctttctgtttgttagttttccttctaacagacaggaccctcagctgcaggtctgttggagtttgctagaggtccactccagaccctgtttgcctgggtatctgcagcggtgtttgcagaacagcggtttttcgtgaactgcgaatgctgccatctgatcgttcctctggaagttttgtctcagaggagtacccggccatgtgaagtgtcagtctgcccctactggggggtgcctcccagttaggctgctcaggggtcaggggtcagagacccacttgaggaggcagtctgcccattctcagatctccagctgcgtgctgggagaaccactgctcttttcaaagctcagatggaaatgcagaaatcacccatcttctgcgtcgctcatgctgggagctgtagactggagctgttcctattcagccatcttggctcctcctattcttttattcctttactttcccaattgatacagtttgactatgtccccacccaaatctcatcttgaattc

SEQ ID NO: 198462 - DNA, 1000 bp, Homo Sapiens
aatgagacaaggccacgtggagtggatccagcactttgggagggatcacctgaggtcaggagttcaagaccagcctgaccacaatatggtgaaaccccatctctactaaaaatacaaaaattagccaggagtggtggtgcatgcctgtagtcccagctactcaggaggctgagacaggagaatcgcttgaacccaggacacggaggttgcagtgagctgagattgcgccattatactccagcctggcgaccgcgagaccgcatttcaaaaaaaaaagagaaagatctcatctagatacatgtctcctgttaatttaaatccacagacccttgttgactcaatctaaagacacttgaagccactgtaccccagaatttaactcaggaatccacttcactccatggtttataaaaatgtgactttcttttgtaagcctgattgattgtttaaaatgcagtgtcctcatgaatggtaatatttgttttcttgacagcctgagttctccaaacctccaaacattaataatatagctaccctgatatccagtaaagtcatcctcttccttaagaattgctttaaggttaatcattgttctctggtgaacggatcccgtagtcactcattagtagccaagacagatttgtggctgcaactgggactagttaagggaagtagggctcagggttagaaggcagtgtttctcctctaagggttcctggagcacacaggtctgctagggaggggctgccagggctggggatccaagccaccacatggatgtgcaatacagcagagacacagcagatctgtagtttcaggacaggccattgtataacacagtggccataaactctcccaagagtactgaacaatccagtaagattgtacttcagtacaaatccatggtctctgtacagacctattttattttatttattttgagacagagtctcgctcttgtccaggctggagtgcagtggtatgatctcagctcactgca

SEQ ID NO: 198463 - DNA, 1000 bp, Homo Sapiens
tatattaagctgtttctattcaaataactggtatattttctgtctcctgattagaccctggagggccactatgaataaaacgtgccctctcagcactaatttggcctggcagcctttctaaggaccaccactccatgtttccagactaaataaacattgaactatagtggcaatttaagcagttatttttatagaaaagttaagtaagcattcccagtgattgcaaaatacaagaacccaggagttgtgacgactttatctcattctttttcttataccacacaagagagagaagaagcacggaaagtcctcggatttaggctttcatatagttgtcccttgtttctgaactctatctgttcaaatcctgaccttcctcctgcagaccctatgcaatcctccaccatctagggtccccacgtattttcttcagttttccttggtctgcatattgccagagaaacacaggagtttggcaagggaatactgtgggttctggtgttgtaagtggggtaaaggtagtgagggctctgattccagattggtctcttaatcagtgaaggctgctgccattttctacctgatttatctaaggaaaagggcaactcaccatcatgagtcttaattttctttccaagacaacacaatctagcatcatatgagggggttataattttcctattaatgtggctttgaccccattccttagaaaataataatgctggaattcctgaaaacgaatcttctggctttttcctgaacatgtccatatgactggaaccatcagtttagtttgaaattactctgtgtgaatcatttgagaaaatgttgccagcctcaaatggattaattctgataatgtactatttcctctcagaaaagtgtgggtgatcgtggtggaagatggagttagcctaccaaactatatctccatccacaaaaccatgacaactgacttttgtctaaaacgttcaggtagaagcaatacctaaagtatcca

SEQ ID NO: 198464 - DNA, 1000 bp, Homo Sapiens
aaagaatctagaaagtaggacatagtaatgactcaacctcaaatgcttagtgtaaattaccaaagtctctgaaagttgtgatctgaaaggcaaagatgattcttgtccaaattcattttaacatttcttaatgtaaggtctgttacaataacatggggactttccagaagatttatgagcacttagcacctctgtgtgagttgtatattcttctttgctcacagtcccacctttcttctgaaatagaaaaggctacccataatatggctgctaatacacaataaagattatctactgatgcaacagcatatcctgaaaattgttttttaaataaatcctgatttaattttacttctatgagatttatgccgtaatctgaaaagttaaagagaaattgatacttaaaactgagtttaactgatattttactgcagttaacacaaacattctcttcattattttgaatctgtcacaaagcaagtataaaatttttcacagccagaaaaaggagataaataaaagccatcctcaagacacacaggttaatgttaaaaccatatactttaaaaaactgattaaacaaccaatatttattaagtgactgctataccacatttactgaatggtctacttacagtaaaagggttttgagagatataaaaaatatacagaccatcaagtcaagcacacttctcatgaggaaagaagagcctgcccatattcagagtactccatggatattttctaagtacctttaatatgctagacactttgttggatacaggaatacagaaataaataaaagaaaatccttgtcctcaaggagtttatgatggtcagtggaatatacttgttaaccaacaattgctgactgaataaggatgagagaaaatggactatttaaactttctggacttaaaatttttttaccatgtgcacatattacctatacaaagtcataaattcaggaagtttttaaattgtaaaacattaaggaatt

SEQ ID NO: 198465 - DNA, 1000 bp, Homo Sapiens
gacctcgtgatctgccagcctcagcctcccaaagtgctgggattacaggcgtgagccaccactcccggctctgttataattttcgtttgcctgctcaagagcgatggggtgcagagtttccagagccatcttgcttttgtcgtactttttttttttttgagacagagtctagttcttgtcgcccaggctggactgcaatggcatgatctcaactcattgcaaccttcacctcctgggttcaagcaattctcctgcctcagcctcccaagtagctgggattacaggtacccaccaccacacctggcttatttttgtatttttagtagagatggggttttaccatgttggccagcctgatctcgaactcctgacctcaggtgatctgcctgtctcagcctcccgaagtgctgggattataggcataagccactgtgcccggcctgtcatactttttaaaaccctcctgactgtgacattctagaaggggaagcaggagactagaaagtggtataaaaagagaaaggagttcaagaccagcctgggcaacatggcaaaaccccatctctacaaaaaatacaaaaattaactgggtatggtggcatgtgcctgtaatcccagctacttgggaggctgaggtgggaggattgcttgagcccaggaggtcgaggctgcagggagctgtgatggtgccatggtgccactgcagtccagcctgggtgacagagcgagaccctgcctcaaaaaaaaaaaaaaaaatgaaggaagggctgagccagggtggcatgagcctgtaatcccagctacttgggaggatgaggcaggaggattacttgagcccaggagttcaagaccagcttgggcaacatagtgagaccttgtctcaaaaaaacagagaaaggaaacaggaacaaggaaagagtaggaaatggagaaagaaggaggaaaaaaaaacaggaagagttgaggggttagaggagaaaatgatgtgactcaggaattc

SEQ ID NO: 198466 - DNA, 1000 bp, Homo Sapiens
catctacctatgtcaagagccagctgtatgcctgggcattcttagaattaacttacattacgtgtgcaaagaaaggataaataataaacatgtgcttatttgaagctttcatatcaattatttttatcttaacagtaacctcagcaattgtttggaatttataccaataaaagacatttcttaggaggtatatctcaccattgactatttagaattgctggcacatggtggtaataaaaagcagactgacttttagttggttttattactattttaaaattctctacagatggtgctcccttagagcaccacccttggtgcaaggtggtcagagtgtaaccatgaaatgggggagggagggcagatgaggggagaggggagaacccagagcacctccattttatgtaacatgcttccaaataagatatttcttccatatggggttccttgtcaaaacagtttgaaaatctctgtaggaaaatatctaggcagagaaactcagaaatggcatttcaggaaaagagctcagaagagaggcaagcccaagaaaagggctgggagtcatttgagaagagatagtagtgacactagaaggatgctgaggaaaaagagaagagaataaaaaatacatccttgggggacagttctgtttagtggatggtggggggaagaagggctagaaaagactaagaaggaaagagtcagaaataaaggagagaatccagaagcgtatatggctttgcagaatccaaggctgtagagggttttaagaaaagagaggccaacacaattaggggctataaagagatcaggaagctgaagagaacaaaggttgtagcttttaatacttggaaggtgactgtggttcaacagaagcagaaatcacatagtacagacttaattcctcagtaaggaatgggtaaatactctgtggtatatctgtattttggaatactgtgcaacgataaaagatgatgaggtaaaaacatgtaaagaattc

SEQ ID NO: 198467 - DNA, 1000 bp, Homo Sapiens
atacatttaaattaaagatttaccttttaggagatgcaaacacatgcaataagcctttaattatacagagatcttgcaccaagggtaatagagaaggaaaaataaagaattgttttaaaaaagcccttaatgaatgttgtcaataggttcttggtactaaatggcaaacaaccatgaaaactttttattttataagaatattgtgtcaaatggagacattaattaaaggcagcactgctaccccttcattttctgatgtttttaatgtgttaaacattaagcaaaaggacatatagcaggtcctcaaataacatcatttccttcattataatgttgatgaggaaaaaaactagtttcatttcttagtcacagttttcaagaaccaactgacaatataaagtgtggacttactcttctactaaaattaattttacggaacaatcctagaactcttgatctcatggtagggaatcccttattttcagatatagttatagaggataaaaactactgagttaacacatttcagaaccttggacggttacattatcaccagtttagaaaaccaaatggaagtagaaagccaggtgccatggctcatgcctgtaatcccagcactttgggaggctgaggcaggcagatcacctgaggtcaggagttcaagaccagcctggccaacatggcgaaatcccatctctactaaaaagacaaaaagtagccaggcatagtggagcacacctgtagtcccaactactcgggaggctgaggcaggaaaatagctcgaacccaggaagtggaggctgcagtgagttgagagtgtgcccctgcactccagcctggatgacagagcaaaactttgtctcaaaaaaaaaaaaaaaaattggagtagaatctttgtcttttgttaaacaaaagtttgtaagacatttggcaaattatttaggtagtttcaatataaaagatattattccaagcaattaaataatcctcaaaagaattc

SEQ ID NO: 198468 - DNA, 1000 bp, Homo Sapiens
aggaatgcaaaaaatggttccacatatgcaaatcaataaatgtgatacattaaccaaaggaaggacaaaaaccatatgatcatctcaataaacacagaaaaagcatttgataaaatttaacatccttcatgataaaacgtctcaacaagttaggcgtaaaagaaacatacctcaaaataacaaaagccatatatgacaaacccacagctaacatcataccacctggggaaaagctaaaagcctttcctctaagaactggaataagacaatgatgctcacctttactattcttattcaacatagtgctggaagtcctagcctgatcgattaggaaagaggaagaaataaggacataatccaagttggaaaagaagtgaaagtgtctctctttacagatgacatgatcttatacttagaaaaacctaaagactaccaaaaaagtcttacaaatgataagtaaatccagtaaagttgaaggatacaaaaaccaatatacaaaaattggtagtttctatataaccaggatgaactaattaaaaagaaatcaagaaagcaatcccgcatttccacccacttccccacccagtgccactctggctaccctgcactcgctctgagctccaggcttctgctaagttagcaacaccatggtctccctttagctgctctcatgattacctaccctggcatcatcagccacaatagttcaacatgtataagatttgggagattgcagacaggcttgcctggagttggagggaaagatggtaagtaggacgcagggtaacactgatgacttgttcattggtggaaatgcctctgctgaaggcccttagggcaaaggtgcctcccaaagtgctgggattacaggtgtgagctaccgtgcccggccaggtctaaatatttgtaacgaactgttaaataaaatatgttctaccctcacatcttgacaaatacacttttataataacctggaagggcaggttcctatttagaattc

SEQ ID NO: 198469 - DNA, 1000 bp, Homo Sapiens
gctaaaaacgcaaactctctggaccctttacatttatcctctgtgcccagagttggctttagaaactcaaaaggagtgaaaacagagacgtcagacactgagattctttgcatagccttacgtgcgagcatagccttttatgcatagggcccagaggcggactcagttgtcttgccgtttccatgggcttggcatttgtggcgtgacgacagccatgattgctcttcttatggggccatggcagccactagcatcctcccccttgcttgttcccgcgctgctgctgtctctcctcacccttccccccttttctcaccaactgtcctgtacttgctctcccttcttgcagtcactgtgtccccagttatatccactgccctgacctctctaaaggctttgtcacttcattaagcaatatgaccttcctcttctaaagttggttccctgcctctctgcctgatccgtcctcccctccacacacactcagctttctttccacttccagctctgttctccttggttttgctctgccctgccccttccctgtctccttagcccggctgtctcattttgccttagccgcacacatgtggggcaggcctctttgtaggcatgtgcttttggcactgtaagtattcgttacaatgatcctgtcctgtgattttcactctttcttccctaaggaacaagtgacatttgcattttttattgtgtcagatcgtgagaccaggactgaaaatgatcaagaaatttctgaagacacaagatcacatggggtcctactgggaagatttcaaaaggatatttctcagggtctcaagtttaaagaagcctatgaacgagaagtcagtctgaaaaggccgctggggaactcccctggagaaagactgaacaggaaaatgccagattttggtcaagtgacagttgaggagaagctaacccccaggggagagagaagcgagaaatataatgattttgggaacagcttcactgtgaattc

SEQ ID NO: 198470 - DNA, 1000 bp, Homo Sapiens
gactttgggcgagagatatgcttcctgggatccactttctatctcagtccaggggcctgatgccctgatggggccggcatggggccagttatccagcaggggagaggccaggagattctgggcagagcagatgactgtcacctgctgcaacagtctgagaagcgttttccatccctgagtcccctggaggagattgtcgccctatcttctttgtcctacagctcctggttctctgacattgtaatcagagatgtcgaccaggaaggaaggaaagaagaaagggcgggctggggggaggaaaagagggacagaagaagaaaacccacatttaccaggtaccactggctctcacttacatatttcatttcatctttgcaacaactgcacaataacatcacatagtcatagccattttaaagatgagaaaaccggcaaggcacagtggctcgtgtctgcaattttaacactttgggaggctgagacgggtggatcgtctgaggtcaggagttcaagaccagcctggccaacatggcaaaaccctgtctctactaaaaatacaaaaattagccgggcatgttggcgggcacctgtaatcccagctacttgggaggtcctaaggcaggagaatcacttgaagcctgggggtggaggttgcagtgagccgagatcaagccacttcactccagcctgggagaaagagctaaactcagcttcaaaaaaaaaaaagacaaaaccagtcctcagccaggtgcagtggctcacatctgtaatatcagagctttgggaggccaaggcaggaggattgcttgagaccagaagtttgggaccagtctgggcagcctagtgagaccctgtctctacaaaaaaattagccaagcatggtggcacaagcttatagtcccagccactcaggaggctgaggcagaaggattgcttgagcccaggactttgagaccagcctgggcaacatagtgagaccccccatctatataaaaatttt

SEQ ID NO: 198471 - DNA, 1000 bp, Homo Sapiens
ttactacctaagaccaaattttaaatcacattaaattttcttcttataattgttatcttgttataacgtcaattaaaatttgatacaaccaaaaaatctgaaggattaagggatgcttaactctgttttatttttgctttcagttgttatagcagtatggattttaattgctaacactttatgttttgcttagatgattaacagagctaaaagcagaaagttttagcttaatgaaaatatacttctaaaatatatatataataaatgcactacaaacataattaatctaaaagcattaataaactcatcatctactgtgtcctacccgcaagccctgacaatcagttggaacgagttcacgtgcttgtatgcactgtgacctgaaggggtgagtagatatttcccaggctgaaaacaccggaagataattgaaggaaaagagaatcaattgcatgcagcacataccaaaggctggaagagagagagggtacaactttttcgaatttcagtatcattgaaataaaaggttaacagaagttctaatatgattactacaaaatctatcaaacctttcttaaataacccagctgtgctttgtgtgtgtcccttagcatttatcattttctctctggagggatagcatgttttagtggctaagggtacagaatccagagctgtatgtgacttaatcagacaaagaccatcccacttcacagcagcacagcttaagtttctcactttcttagtaatgcagttattttatcttagaaatacaggtggtgacaataatgtccaccttgcagtattgttatgaggattaaaataaagcacttagaacaggacctggcgtgttccattaaatgttgggtattttttctgaatatcagtgtatatatgtctcaccatatctagcacattgtaaagacttaaatgtaaggactccatctaattcacctccagtttcttcacaacaactaatttgtgcaaattgaaagaattc

SEQ ID NO: 198472 - DNA, 1000 bp, Homo Sapiens
caggaatattaacacaaaatgtatcaaaacactaataggatccataaacacagacagctaaagctccatcacttttaacacgccataatttaataagaggtctcataagagacctcttattatggtctcataagaccgagggtgtccttttcaagttccttccctctcagctacttacggcaattctcagaagtctgcaaagttatctacatcctccctttaccaatgttcagccatacgcagatatcacttgtgaactaaacagtgtctttcctccagggacagggccaaggctacaacatgctggtgcacactttaaattgtaggtaaacgctcaacctatggcagaattccctattttgtgggagtcccagttctttaaactaattctaacttttggtgttggctttcaaaaattactatgtcaaggaatatgcgatgttgagatttcactcaatagattggtcagaaggacaggagggaggagagagaagaaaagatagtggtaggggaaggagaaggaaatgataccagcaaaaaggccagggctctggattcctggatgcctctttgagcaacgttttcattcgcaccacctaggtgcacccttatatgcctctggtcctttatttacaaggctgtcacctgtctgacaggtagttttacatgttttacatgttgcagtaccaaggaccagacgccttttaggaacagttttgagaatgacaagtcacttagacactcattgccatgactcagttttaagaaaaatgaccaatgactgagcattcctaatggggaagctttcccatctgatgggtgcgattctgacccaatgaaatgggtgcaggagagaagacattgagaactccagctttaaaagaggccaggactcgttagtgaaaatagttttgacttgttagatgcctgcttttgctgggggaatggaacaaatgatgtttcaggcaggagctgccagcacatgaacctccttctagca

SEQ ID NO: 198473 - DNA, 1000 bp, Homo Sapiens
ttagccgggtgtggtggtgcatgcctttaaccccagctactccggaggctgaggcagcagaattgcttgaacccctgggaggcagaggttgtggtgagccaggatcgcgccattgcactccagcctgggcaacaagagcaaaactccatttcaaaaaaaaaaaaaaaatgaattttaagggatgtatttttatgagttaatttaacatgttaattttttcctatggaagatgttatctcttagctgtaaagtgaagagattgtatccaatatcatccaagtgctattaaataacattgaataaggccctcatttactaattgagattaaatgaaaagatattcagtgtaaattaagagaatagctattacatgtacatattttgttgtcatttattttgtttattagaacaaaagagtttaatatttttaaaatgttgagatttccatctccatctagaaggggaataaaaaaccagtattctcagagaccaagaaaaaaacaaaaacaaaacaatacccaaaccctctacatattataatttgggcatgatgtctcaatttttatgattctgaataacagggttaagcattcagagctatattgggcgggcttttctccaagtccacccaaaacaggaagatgattgtcatattcacagctttagataaactgtaatataaagtgatttgcattgagagtgattatatatccaatttagagatgcacagttcatgaatggaacacatcatgggaccctaattcccttttggagcacaaaatgataattaaaagacaaatcacactaaaaagaattttatatttacatatcactagataaggtcagtttataggctttggccatcttaatgcagtttattatctctggaaggctaccttaaaaatcaggatggttgtatctatctagaatagatagatcaaaacaaatggaaagatttgccccatttgaaaaaccactctttaaatgcatgctgggaatt

SEQ ID NO: 198474 - DNA, 1000 bp, Homo Sapiens
cagtagctaatccaggggtttctctggctttgtttgcatgagtagtgatagttggggatgaagcatgggtattcgagatcttttttgtgtgagtatgggaggaaaaattctgttctcttcctcctccatctttattcatctttgtcttccctcggatcagctttaaagacccctgagactctaggacttggtttgcttttttctcaccactgggatccatctcccactagtaggaagaaggatctaagtagttgagctgcataaaggggaagtaaacagccagacaaatgttacattttagagccttgagtgacccagagctttctatcagcttcattgggtgcagggagggtagcgatttctggctgctgtcacctccttgctcatatcaggaagcgctaattttgaggcaaagttcagtgccctctggctcacctagggcccctgttgcctaatttcacgaggccaagagtttgagggtgggttcggggctgcgcagcctggatgccttggtttgcatgcctacagcagctgtgcccgaaagctttttttagagtaaatatgtagcttttgctaggctttttgtgtgccttgttcattcctctatcattttttgtatacctgctatggtgtcaggcactggggatacaaattagccggggactcggacatgtaagcaagtaagcccaacagcagctaacatttatgcagtgctcactgtgtgcttggatgtccagagtgatagagcaggtttagtaagggggacagagggctgagaccagaggcaaggtggagaagggcatttctggaggcagcaacatgagtgcaaaggagacatacacaaggttccctgggggattccaagttgttgctgtcgtggcttcaaatcttactttagggcctactcagatggcatcttgttcatgaagatgtgcctgttttttgttttatttgtccctctccccccaacaaagagtaaactttttttctgaacttctcg

SEQ ID NO: 198475 - DNA, 1000 bp, Homo Sapiens
tttaccagatgccttgctttctctggtaggggtaatttaagaagcaactgctattctgtattaactcttaagacagggctggtggtaccaccatgatgaaatggagaataatggtaacagccatatcttggccatataaaaagctagttactttaattcttttgcatggcttctttattacagacagagccattagaaaattgggaagcttaaagatgaagggcagttttaaatactaatctggaagtaatatgtgtaagacagaaaggaaagtagggaaagtatttctgatatgttgtcggattcagtttgctagtgttttcttgaggatttttgcatccttattcataaaagatactggtctgtgcttttcttatgatgactttggtttgggtatcagggtaatactggccttataaggtgagatgagaagtgttccctcttctgttttttggaagggttaatgaagaattggagttatttctttttatacaaaaatttttaattgaggcaaactatacatatataatttaccatctttaccattattaagtgtacagttcagtggtaatacatttatattcttgtttttcaccttcatcccccacctccccttcttcgcctctgataatcaatctactctctattcatgagatctatttttttagctgccacctgtgagtgagaacatgtgatatttgtctctgtgcgtggcttatttcacttaacggcctccagttccatccatgttgctgaaattgacaagatttcattctttttcatggccaaatggtgttcaattgtgtaaatacatcacattttctttatccattcatctgttgatgggcacttaggttaatttcatattttggctattgtgaataatgctgaaatatacatgagagtgcagatatctctttgatatattgatttactttcattttggtatatacccagtagtggaatggctggaccacatggtaatcctgtttttaggggg

SEQ ID NO: 198476 - DNA, 1000 bp, Homo Sapiens
aggtaaagagcaggggtggtggggggcgtattccaggcatagagaagagcttgtgcagaggcccaatgggggaagacagtggcccattccaataactgtcagtcactctgttcagctgggtcactctattcggtttgaggatggtcatgagatgggagaggggagaggcaaggctggagaggtgggcaggggccatgtcagacagcggtctgcagctcattctatcatgagggccatggatgaccactggtgggcttgaagtaaggaggtgacaggattatatttgtgttagaaaattattccagctgttggatggagaattggacaggtggggtgaagctagtgtggacatgcactgtattcttgattctccgatttccttcagtatttacctcagtggattgatgggtgcaaaaaaggaatgaagaaagaaaaacagggagggagggagggaggaaaatggatggatgggatagattgatggatggatgaaacccaagggaggccaggtacactggttcacgcctgtaatgccaacactttgggaggccaaggcaggcagattacttgaagtcaggacttcgagaccagcctggccaacatagtgaaacctcatctctactaaaaatacaaaaaaattagccaggtgtggtggcatgtgcctgtagtcccagctactcgggaggctgaggcaggagaatcacttgaacccaggagatggaggctgcagtgagccgagattgcaccactgcactccagcctgggtgacagagggagactccatctcaatttaaaaaaaaaaaaaaaagaagtagaaacccatggagataaaatagaatcaatgaacacaagtccaaggagaaaatatctcaacttggaatatgaaaaactttcataataatctaaatagtccaaaggtggcaagaactgccttgagagacagtgagttccctatatgtgggagtatggaggcacagactgagatgaggcataagcatca

SEQ ID NO: 198477 - DNA, 1000 bp, Homo Sapiens
acttcaaagctggaactccacccacagctgagctgcacccagacagagatgcgggcagagctttctaaggaacccaaattagcagctcatggacgcagcgttaatttgctcttgctgctggctgactttgaacttagtatctcagttttctctctgtgtcaccggctttgaacttcaatgctttggtgcctgcattctctttataacccactgtgccccgggacctcagagggccccacgaaccccaaccaccacctgcctggactcagcctgcctctgctgctcaaatcctcacctgcctcagcaccccaagacagacacctcgggccccgcatgggttggagacatttattggcagtcctcatgcacttctctgaccttggagggctcttttggtttaagactgaagcccaggacggagcaaaaggagatggagctgagaaaatgggatcatcctgtgtctatcctgggattctgggcttttctgtccattaattcaccgaaggaggaaacttagctccctgatcattcaaaacacttgtgccttttcccctcaactcctcattttcttttcctgaccaacctccagtcgtctgataaataaatcagtgtgacttgccaatagcgacaaacccttttgtaatgtaatgtagcttccaaagtagtgggtgcatttccagaaggtgtccctttatccacccaggccttattttcacagggacttcagaacagaaaataattttggtggcttttagttctcttcaaacgataggcacacagctagctaccaattctgcctgtgtaaggtgggcatcccgagctcagtagaaatgagggctgaggaacacacactgggagaactttaatcacaaaataagaaaaataaacacaaccgcaacttgcaaaggaaataaaaatgaacagcgacttagattttcccctacaaatcccacacattttatgatttgaacaccaggatataaccagcatcccagaattc

SEQ ID NO: 198478 - DNA, 1000 bp, Homo Sapiens
tgggtccctcctgtgacacacaggaattacaggatctataattcaagatgagatttgggttggggacacggccaaaccatgtagggcatttatagctatgtacttccctcttagtgctgcttttcctatatcccataggctttgataggttgcataaacaaacagataagaagaaaagtgataaaaactgtatgctttaatttcatcccctcacttttttactttctgtttgtttctatttatatctttttgtattgactatgccttgtaaagccgatgtagttattatttttgattggttcatcatttagtctttctacttagaataagagtaatttacacaccatagttacagggttatcatattctgtgttcttctgcattcttactattactggtgagtcttgttccttcaggtgattacttattggttattggtaacatccttttctttctgattgaagcacagcctttggaatttcttgcaggacaggcatgatgtggatgaaatccctcagtttttgtttgtctgcaaaaatctttatttctttgtcatgtttgaaggatacttttgccagatatactattctagggtaacttttttttcctttatttcttgaaatatatgtagttccactctcttctggctggtaaggtttccactgaaaagtctgctgcaagaggtgttggaactctattatatgttatttgtttctcttctcttgctgctgttaggatcctttgtttacctttgataattggaagtttgattattaaattcctccaggtagtcctttttgggttaaatctgcttgatattctacaactttcttgtacttgaatattggtatctttgtccaggattaggaagttatctattatcactttgaataaactttctacttgtatacttctctcactgccacctctttaaggccaataaattttatattttctagattttgtaggcatacttttttctttaattcttttttttttt

SEQ ID NO: 198479 - DNA, 1000 bp, Homo Sapiens
taattagaactgggtgaaactcatccaaatatttaaaactataaattgctaatactaagtattagaaaaaagaaatggctacatttggaggataataagaatctaattttcttaatcattgattttaaaaattaagcaattattctgcttttttatataaactgaagcactgggtagccaaacagcaaatgagagaaaccatctcctttttaaggtattttagctaataatgaaaaagaatttatggaatttgaatataatcaaattttgcaaccccacaagttaattaatctaggcattgaatattaacagctatagaaatcacagaaaaagaaacatccagacactttgctctcctaaaaaaagacacctaaaatcttgtcagagggttagtacctgattctgataaatcccctggattcagctgcgaaattttagaaaatacagaagacaggttgaatcatctagagtttataatcagcaacattcaggctttgaaactctgcaaagaaaaggtttgtatccttcagaaaataaatgacaaggaaaagaaagtgagagggtaaattgtagattaacagaaaattttaaatcatcaagtgcaaaactggaaaagactaaactataccctcttggaacatgcacttaaatgataagactattttaaaattcaaggaagtaattgctgtaaaagtcaggatagtggttacttctggaagaggtaggaggtgaaataaggataaggcacatacagggacaaaggctgaagaaatttttcattgttgacctgggtggtggtgaagaggtattcacctaaattaagtcattaagctgcacatttggttttccagatctgtattttattttataataaaaagtttaaattaaaataaaaattattgatattcaactgatattttatgccaattttagtttaaaattattcatctcagtataaaaaataagcatataagttacttatatgtatttttgtgaattc

SEQ ID NO: 198480 - DNA, 1000 bp, Homo Sapiens
tgtctgaccattaggaattcacaaacctaggctgttgagtccttctgaaggaaattataccctaaattcataggttactctttcaatttctacaacatttattttgaaatactcatgaatttccttacccgctctatgttctctatacttattcttagacaacctaactcctagttcaaagagaatataaaaaacatgggcagttaccccagagtgcatattgatgttctgtctctctgtctcagtggctgaagctgccatcctcctgttcagcccctctgactctcatcccattgtttcacctcccattggttgtccatttcctcacttgtatctttagtctcagactttcagtttctctctcccctatttgtcagaatcttgctcatacatcttcactcaagtctgcattcccatgtgtttggtgacctgttctcatcttccattgacaccgtcctcagaagtgtacctcacacttgcagtcctacctccattttagaataagcttagtaaaatggcttgtatcccatcatctgattgaacctgctcttgatgaggtcattaatggcctcttagttgttaaattaaagggatacttttcatgccacatttgattttcttggcccatatccttttaggtatctttagatatcttcctgctttgtttgtgccttgaatgttggtgtccctcatgttccattctcattctacacactctgtaagggatcacaaccacacagttgttttcaggtatgatatatggattttggagtcatcatatttttgtagcccaggtactgcttctcttgacattttgtatgaatagaaaacaaatattttttggtaacagatttgtgaaaaattgcatattttaatttctttttatctgaccccttttgattactgctcttagtttgtcttttggtatcagatattatttatttggaggttctattccatttttactgtatttataattttttttctccattgagaattc

SEQ ID NO: 198481 - DNA, 1000 bp, Homo Sapiens
aaaagattattttgattttaaaaattaatattaaatttattaatgttacagattcaaacacctagttttatctttggcttctaagttctgtttataaaacacattattcttgttataagtatatcaaattttaaacatttaagggtttttgaatgatacttagtcatttataaatttaaccacattaaaccatttaaaactctatacatttaatatatttgatttttaattacttttctgagaattgaaaaaattttatgcatgtcacaaattaaacttacaaatatagtgactgtaatgttctcttaaatatgtcaatactatgtttagtgctaataagatttctacttataatcacaagtctcaatcagttattcaatttttaattttaatcagaactacaaggaattattgtcctgtcactctaataggtcatattctcttataagttacacatacttaaaatatgattggttttgttattataaaatgttaacagtatgaatttgattctcctaaatatttcatattttaaatctcctcagaagtatattatcccaagcaattttctcaattatttgaggctgcgtgaagaatttgagcaagatgttcatcagatttttgttagttcatttaagatatatcaaactttatttattgataacaggcatgtaaaaattaatttctgcttcaccatgtggtctatacccctattctattcatttgtagaatgttgtctgtaatacttgattggattttctatttctttggctgttaagataattaaataccttttcaccaagctttaaagatccttgaactatatggacttctttctctctctctctttttttttttttttcttcatgttcttcctatctggcagaagcacagaaatcttactgttattaaaatatctgattgaattctggcactctcttaagactgttcagttataacttacaagatgattctactgatcctaagtaaaactgatcag

SEQ ID NO: 198482 - DNA, 1000 bp, Homo Sapiens
taatattagcaacctgaatccagaaatgtaattaaaatatatatgactaacttgagtctatgtaaacaacacaaaattgttttaacattagaaaacctactcatataaaatcaacacattaactagaggaaaaatacatataattatttcaatgaatgaagacaaacatttaatgaagtttaataccttttcaagtttaaaagttttatcaaactaaaaatatggaggaacttccataacttgatattgtgaggctaacaaaagtctctgtcacacattatatgaagtggaaaaatgttatactccaagaatttcctttaaaattaagaatgcttttaatatttcatcactaagtgtattactactgcttctattcagtgttgtcctagaggtcctagtaagtactaccagataagcaaaagaaatcaaaaatttaaggagtgaaaataatcaaaattttcattattcactcataataaaattgaatacattaaaaaactcgagtcttctgattattagatgttataagaattaacagggtagatggatttaagaagcatcagacatcaatcatttccaacaaacaaaatgtaattttctaaaatatgccataaaaatagcaaaaactatgtataaggtagtcagtgatgaatttaacaaaagatctcaagacccatggaaagacatgaaagaagacttacataaattgaaagagaaaggaagcctcaatattataaaaatgctttttatgcaaaattaatctatatatcccatgcagttttaattagaattcaaacaaggcttttaacttctttagaatttggtaagttgtttctaaaatatatatggatgaattgcttggcccagaatagggccaaggtgaattgcttggcccagaatagggccaggttctcctgaggaagaacaaggtgaggaacttgttcttctagatactgagattcattatgaagtaaaagtgattaagaccacgtgatatagt

SEQ ID NO: 198483 - DNA, 1000 bp, Homo Sapiens
agtggtaggcatgtggcccacaccggattttctcttgtgaatcttgagggaggcaacacaaggacagaaaacatttggagtcaattcatcctatagtaactccccctaggaactgtcctttagtttctgatacctagatgctcagaactcagcagtttgggtactttctgaggcctggttcagctttctttcttttattctttttctgtcagaaacccatatccttccaggaaactgatccctctttattttctttcttttggcttgttatcttgaagaggttgctgttacttgtaactgaacaggtgatattaataacttacattcttgcttcttgcagcccttttcaactctctcagaggtctctgccatctttctgtggttcgcccccactctgtacattgcacttacactatattatagttattagttttctatttcccctctcatatgtgattccctgacaggcaattactgcttttcctggaatgcctaacacagaacctgagacattttagacagtcataaatgtgggcttaatttaaaatgattattaagcttcacaactcaaccatcatttgtcttcctgaaaagcaggaaaatatttcagatttgttgccaaacctctgtgagtatgttagtttggcttaaattaaaagcaaagtccatcaaagccacggaaatgaaataggcaggtaactcatgaactcaggtgtagaaattttataagatagaaaaatgtgaaacaacagacaagggcctagctgtcacaaaactataatctccatcagaaacaaacaaacaaataaaaattccaagaatgatgctgaagcacattagaaagaagggcaactttatcacagagcttcctggtgaggttcctacaattaaaaaagccaatataaagattaaaggcataaacataatctgcatgcatttttcattccaaatagaaaatcactttcatcataatatattcacaaagaaaaactgagaaatc

SEQ ID NO: 198484 - DNA, 1000 bp, Homo Sapiens
tcctcatgccctgccaccagcatctctacttcttcctctgtcatcttctcacctgcagggggaaagaaagcatttttggaattgggtgacaagtgaggtacctcagggtgccatctcagctcaaggacaaggacacagaaccttacccagtgtgacaagaacatgccggatttcagcacccatgacggtgccatttccttccttgtcaaacacccgaagtccttcgacataatcctcataggtgccctggtccttgttcttggccactgtctgcagcatgggcagaaagtgctcaaagtccagcaccttcacattcatctctgccataaaggaggtggaagtgtcaggccagagaagtaacacaagttctcaggacaggggattatagagacctcaactgaacagagagatgacagatgactccccactaaaagcaaggaaatccatgggatttgctaatccagacttgcttgagtttggggcctatgaagataaagggaagctcttagctgaagaactgtgggcccatgaccacactgaggagttgttctttaggcccctcaccatcactcttggggttccccaggaccttgagcacctcggcgttggtagggttctggcccagggccctcatcacatccccacactggctgtacaggatcttgccatcacctgttcggtcaaacagctggaaggcctccttgaactctgaggattcagatgaatgtcaacacaggatttgagggttaatccaaaccctacctcagagctctgctgcccattcaactttgatcatgctgaggaaacgagatatctgcaccaaactgtacaccaaagtctacttaagagggctctatttctcttcctcccaactcaagtgttctatatagaggcttcctccccttctggcagcctggtaacatccatttacacaacccctctgcctgcggcaggcctgccaatctccactgctgctactacacttctcagggcaggaatt

SEQ ID NO: 198485 - DNA, 1000 bp, Homo Sapiens
tttgcttgtcaatatttaagttttaatatgtttctcagcaaaaagaagttacactttcacatcattatagttcaaccacctttgtacaaatcactgtgaaataatagatcatttgatttaatccccataaacatttattcggcaccaattatttacggggcaactttacaaaatgctggggctaattccaaaggaagataagacacagttcttgttctcaaaatgtttacattctgtgtaaggagacaagacatgcaaatgaaaacagttaaatgattttgcaaggcagtctgggattaagaggagaatggatcagacaatagaaacggtatggggttaagacagaagaaaataaggttgcaattgggattgaatgcttgataattagacattctacaagataacttgagttttatacacaatcagcaccaccccaccatactggttttggctacctggctacaatcccctctcttaggcaatttaagaaacgtccatctcctttcaaaatgtaaatgcacacacaaaaattcaagttttaaagatgtcaaaaacatcagggatagctctaggcaaaaattttggatctgaaaattttgattccctttattttgtcttttccatgtttgcttttccttatccagttgttcagtcatcttcccattatcaaaagaaagtgcatcccttgttgagactaaaattcctcattgagttaaggggatagcccggtagggtctagggtagtagaagattcttcctaaattatagcgtagagaaaactgcccattataacttttccataggtaactcttgaactttggctaattgtacacagccagtgttattaccaacagatttgaaaattcttacataaatgtgtgagagtatttttgaactattaaagggcagtatttttcagacgtctttaagaaaactttgaaagaatgtagtctcatttctatacatacactttattaaaatgtactagaggctcagaatt

SEQ ID NO: 198486 - DNA, 1000 bp, Homo Sapiens
aaatatttcttattagacttaaaaaggtgccagactattagttaattctctcctggatcaggacgaagacctggaaaagtaaagggattctttccagaatgtagattttccccacaagagacagcattgcagggccatttcaaaatatgtcaaaaaatatattttagggtaaaatacttcaatttctttcagggcctgctatctgtcaagtgatgctataatagagtcaggctggaattcggtgtcttattgctacaaagtcttaagatgtctattgtaatgtgaatgctggtcagttgtgcctgaattccaaagcaaggcgggtataaggaggcatgtccaactatgccccccactgccccccaaccccgccagccccggcatcccatcattgcctgaactagtttttcaggttctttggaatgtccttggctgagagaaggggtcctttcagatggttggggggcttagaattttttttttagtttacacaactaatataaattttatcaaaggtttctgatggttcacacagaagtcccacggtgcaattctccactggaagacatttttatttcctagggctattagttggcttacaataaaaactttaaagcacttttctttcctgagaaaattgctctctgaatcaatgggattgagcatagataatggaaagagacagtaagatgttcttgcctgtaaccaagctcctgtttagcgcttagtttgtctgtccaacctggagaatcatgggatgccccaggaattgttcctgagatttaagtttcacattgagactttagggttgtttcctacagattgactcttcccagagtgggtgatccatccatggaacaaccttgggtgggcctgtgggtgcatccttaaaacaaatgagggctcactctgaatataaggcaagatctttcaactgtggcactattgacattttggactggacaattttgtgttatgggagtgtcctgtgcaatgtagg

SEQ ID NO: 198487 - DNA, 1000 bp, Homo Sapiens
ctgtatttaagacatgagggaaggggaaagttgtgtctgttcctttaataaggaaacgtaatattttctccagtaccactccagtaaatttccttttatatctgagtggtcagactggtagcacatggccactcctacactcaagagacattgggagaagattagctttttcagcttctcagagaagggagaaggaggttggaaatgagtgtttggaggaccaggcaggaatgtgtgtgcgtgtatgtgtgtttgtgtatgtttgtctcgtaggggtgccagggttacttgtggcctaggctgggggtccggggctaggtgcagtaccaggaggtgccctcaagggggagccaaagagaaggccactcagctgggcccacacacggtgctcatttcatgattctttggggtagctcttctccactatcgttctttctctatcccttccgtggatccatatcctctccctgcctctcatatgttagctttttctcggattttaccattggcctcttttcttctcaccctgcccacacctggagagaattcaggaagctgacattggaagggcctgagattcctgccaggcctagcagctgtgccaaccgtgaactccctctggatagggtttagagttgccaagtctcacatcccagttagagaggaagaaaataacaggggcttgagtgcccagtgatgagtgccaggccagtgttaagccagactggagtcaccctgggataagaaatctgttctctgaagacaagcttgatttcagacttctgtattttctacatggtttctgcctttccctttagtgtcttggtaaacttgttttccagaaacgccatgcttgttatctcagaactaaaagagaaagggaaattgcccaccccatgccaatctagaccctcatccttacatctcagtctaggaatagaagtcaacccatcctagcctgggatactggtaggaatgggacagttagtcaggtaaatac

SEQ ID NO: 198488 - DNA, 1000 bp, Homo Sapiens
cactgttaaatccagataacctcaatatatgatgtggttatgtcccaacaagcccatcataaagttgaaaaatgttaagtccaccattgtaagtcagggaccatctgtagatataaaaggagcggggtagacagacaaaacatttgagaagataattgctgaaaaagttctatattttatgagagctatgaactcacaggtccaagaagctcaataaaccccaaacataaaagacctgaataaaaccacagcaatgtgtattataattaaaatgcttaaaactagtaatcaagagaaaatctgcaaagcagccaaggaatggcaggaaagggagaaagaaagatacattttgttgagaggaaaaaatataaggaagacagcagattttgcatcagaaacaatgttaatggaaaagacagtggagcagcatctttaaggcactgatcatgaaataaaccccccaaatgccaatttagaattctacagccagaaaaaatatctttcataaacaaaggcgaaagaaggttttagaccaacacatgctgaaagaattaattgccaggagacctgtactacaagaaatgcaaaaggatacagatggaaacctgtatctatacaagggaaaaaaaactggttatggtcactctgtgggtatataaacattttacctacttttaaaatttcttcatatcataatcgattgtttaaagcaatgtcatatgaggtttatgacatatgtagaggtgaaatgtataatggtaatagtacaaaggccaataagggagaaatggaagtgtatttttataaggcttttataccatacatgaagtgatgtaatgttacctcaaggtggagtgcagtaggtgtaagatgaatgtggtacattctaatgcagctactaaaataatacagtaaagaattatagccaataagcaaagcatggaaatacaatagaatcatttaaaacatttaatctaatagaaggcagaaaaagaagaag

SEQ ID NO: 198489 - DNA, 1000 bp, Homo Sapiens
actggcccccaccactaggcttgaagcaggtcaccagggttgagcccagggactcccccaacaagagtacctggaggctctaggggaaggcaagaattggggaggccccaccagagaaactgacctgaggtggagcccaaggggtcccatgagctggaatacgcccaggctggaaaccacctcgccacgtctccaagcaggagagctccccaacgcgacaacattaatcataaaaaacaacaataataccccacagtaataaattgcctttgtgtacctgcagctaaacgctctaaatatattagttaatttcatccctacagcaaccctgtgaggtgggtattacaagaagccccacacaaagacgagaaaacagaggcacagagagggtaagtggcttgtccacgtcacacagcaataaggggtacgttctgagatgcaaggcaaaggctgagctggctttctgaggagggacaagaggggacagtccccaggctctgaacctgtccctgtaggacagcagcaaacctgacttgggcagagggagtctgacccagctgctcagaaagggaggcaggaaaaagccattcaggtgatgccccctggcctcagagggttctccctgaccatggcacctctgaagctggaaatcagggccaccaataaattacacccttaaaactcctgggaaaggtgagaggccaccagaaaaagccattcatccaggagggaatcccagctggtgccttcttggctgggtcccaagggtggggaggagtggctgggggcagagaggagaaaggggctagatgcggggggatgtttgagcatggactgggagaagttcctttgcgggagaggagtgcccctctctggcccctgcatagggctccttactccagaaggtgtcaagggaatgcctgggattgcacactgaaaggaaaggaagaattcagcccgttcctggaccctggattcatgggaaagcaaaggaagaatt

SEQ ID NO: 198490 - DNA, 1000 bp, Homo Sapiens
ggagaggagcacatgcagttctttccctcactgttctctggcttccaacaccactcaataatttaaaatcatttgatcatatatattcatagaataatgtgtgccttcttttaattgcttaataggaggcagtgaagaaatcatgagttattgtcccaaatgaggcatttgtcaaggaagaattatgagccagcctcagttggtgctcacatccaacccaggagcagctgaatatttccagcattagaagagagcacaacatcaaacccagggcagccccctcatcctgcttcccggcaaagcccagctgctttcgtgcatttataaacttattcccggatggaagagctctcaccctccctgcccatgagcatgctctgaaaaatgagagatggcttcagcctgacaaagtcgatgataaagaaaagagtttcccagggcccctgagaaccacaagcgtttcaccaacaccttccctcaccccctccagggaggaccgcagccagctgcccacatttcccagcttagaagaggctccttaacgtcagcgatagcttcagtgtactgggaaaccagtgtggtgtctgtgggctcctcccggaggaggaccgggaacgagtgggcgcctcctgcagagcactgtcaccagcccaggtcagggtgcagctgcagtactgacggacccagggtcatttcagataacaaacttggaagagaacttaatttcacctcagcagactgatgggctaaaactaagaaacccgtttgagcggatggaggaacccatcacataaagtgatttcaggaggttccctcctcccccagaccaaccctgacagcttgccaatttctgaaattccacagttagagaatcttttctttgatgagaagctctaggactcctaacacctagtgggaacttcttaggagaccaggctcctcttgtatctagcacttcgcctcatccccgttagctcggcacttcccttgcacagaattc

SEQ ID NO: 198491 - DNA, 1000 bp, Homo Sapiens
gtctgactgtaaatatgtgcaaacatacttacatcattaatgtaatactgagtctatgattttctattttgcacttaatattatataatagccattttctcttcattaaatattatttgtagagatttttaatagttgaggctgaaatcaatgtatttgttataaattatgacttttaatttggggggaaggacttttataaggggagccttaagctcaggaatgcaaagcttcataggcacttggtataacttgacaagtgatttttcagaaatgtctctgcaggtgcattgccacctcttttgttctgctcttgaagtgtctgactttcaaaatatatgtgtgtatgttttttcttcctctcatgtattattcctgcttctgttttagcattaattaatatattacatttaatgtttgtggttccaaaatgttgtacctcaaaaaattgtagaatatttcttgtaagcacctttacctacagataatgccatttatttatctctatttaatcaccgattatacaaataatgtggacataacgtattatctagaaatgttagatcaatgagtgaacatagaaataaatgactccttggctattttgcaacattttattctgtggaagtatgaaaatcaaataaatccttcagggaatttagattattgacataactgtgtatgttatagatagaaatgaaaaagtcaagctaatattaattagatatttacatcataatgaatttaataatcttcgaagagtgtctaaattgttgaaggtgccatgcttttataattttacgtttagaagtcttcttaactattaactgttctagagagatcctgagtaacctatttcaacctatctcctatctgtttcaggcatattttctctagagtgtttctattttggaagactggtagaatttactttttgtttaatttctgtgtaatttttcttttttcgtaattcatgttcttcacagtaaagttggaattc

SEQ ID NO: 198492 - DNA, 1000 bp, Homo Sapiens
atacacatcaaatggatggatggatacagatacgtaatttttcataaatgggattgcatagtagattctattttgtaatctagttttttcactcagtgtatcaggaagatgctttcttatttaaaaaatgtacattttatatgcatactttatcattttataaatgaatatgtatacattatccttgaagtaattaatgatccctggatggtaagtcactgactagatgtgacatacttagtttaatcagttctttcttggtgtgtgtttctactttctcaagatgataagcagtgttgtaatgagcaatcttgtatctttatccttgtgcactttttcagttatctgtttagaatgggagcattgtggccattttaaactcaattggtattgccagattgccctccggaaaagttgtactagtttattctgtgccatccgtcaacaaggattgcctacaccctgtccaacaatagagcctcttgccttgagtattataatctctgggcttcatgatagaaaattacaaggtcaaaggctgtctgagacaggaaacagaaatgagtgactctggaaatgtaataacagggagtggtgaattaaacattacttgtccctccccaaaagcagtcaggttttttttggtttttttttttgagacggagtcttgttctgtcgcccaggctggagtgcagtggtgcgatctccactcactgcaagctccacctcccgggttcacaccattctcctgcctcagcctcccgagtagctgggactacaggtgcacgccgccacacccagctaattttttgtatttttggtagagacggggtttcaccgtgttagccaggatggtctcgatctcctgaccttgtgatctgccggcctcggcctcccaaagtgttgggattacaggcgtgagccaccgcacctggccgcattcaggttttaaaaaatataaaacagtatgccagctaaatatatctggtaggtggaattc

SEQ ID NO: 198493 - DNA, 1000 bp, Homo Sapiens
ggggaggggggagggatagcattgggagatatacctaatgctagatgacgagttagtgggtgcagcgcaccagcatggcacatgtatacatatgtaactaacctgcacaacgtgcacatgtaccctaaaacttaaagtataattaaaaaaaaaataataataataataaatattttatcaaggcacatgttggatatttgcccaatataagttgttggtcttttcatcagatcactgtctgaaaacaccagctctcttgcgccttctcttgtttatgtacacgttggctctagcgtcactgttacaatctctctttattgtcctttcttcactaggtcacactgccctgcatgtgctcccctgctgcatatacacattgtgactaaatatcatttagtcttgttttcacatctgtcttaaatgtctaaatccccaacttaactctttctcatttaacctttttataggtagaattgtttcccgtatagagttcacttttcttctctaggggaaggtaacttttttgagcttcctatttatagtcattaaggttcaaaatttatagcattagatgctagcttgcagaaaaatggaagggaggtgaatgatttttgcctggttgaagtgaaaatgcttctgtctggtagaggagggaaccccaagagtgatggttttattgctatgtagggcattaactagtttcatatctaatttagcaatctcattcccctgttctctttttatcactgactctctatatatatcatttccttgtgtcatcctttgagccagtttttttcatcctgccttctctcattaatgaattatgtaaatcttttgacacatgctccttatatatttatatgaaagttacatttttagcattttgaaattatactttgacacccccaaatgtgactgagattgagtttctcaccactccggagagtcgtcaaagctggattattctgagttagaaaaatgaagtagtctggaattc

SEQ ID NO: 198494 - DNA, 1000 bp, Homo Sapiens
aatagtatctgcacatatgcacagtcctcggatgcgatgggcattccctcaagctgcagtccagcaggaaattttcagtgctagaagagttaaactataagctgacttgagatgtagtagttcaaaacccttgccaataactctttattatgtgcagcattttcaaagcaaaattacaacatgttagaaagtgaatgaggcaaattactggtgatgtcatcaaagtaataactgctaatgacccttttactcctgggcattgcctgaggccacactgacaggaagagcagatctgctttctgtgaatccatttggattatctagaaggcatcctgaaagttatgaaaacataatgtgagaaaatgatagatcaaagtgtgaatacaatgcagggacaacagaaaggaaaatgtactctctgttgtgtaatgggtattttggccagagtttgaagagctttattaaggagtgacaacaaacatatatttaaatgatgacatttcctccaaaataaaataaacaaataaatatgtagaatttaaaacttttttgtttccatgaaagagtttggaatacccttccaaactctcctcattcattgagacgatggatctcttgttattaaccgagacactgaattttgaggtgacatcctgttctggaggcagaaacattgccagcacttctccttcagcagttgatttattatgtgacagtcggtgatgagcttatcctcatgaagatgctccctcccacggacagccgtatcatacttgaggcctccctgccacttacccaggccactgcaatagcccctttgttgtcatctggttaagaactaaggttcttccttaaccagtccattcccctgacttccacagagaaaccattctataaactgctcatctgtcagctgttcaccagctcaaaaaccattcagaatcccacaccttctcccactgtccacagaatattgtcagtactccttctaagagaattc

SEQ ID NO: 198495 - DNA, 1000 bp, Homo Sapiens
accaaaggcccctggaaaagctcattcataataggtggtctgaaaggctttgggagaagctccaacaccattcggccccctttactggctgctagactgctgatatttactaggtaaatttactgtgtaagcattgattttccatgcttctataaagctggtgagagggggatggtaaaagtgcaagttaaagttcagtgaagttcattgctcttataaatattcaaatattcagctgttttttaaataagtgcgccccctgattgttgcaaactttggattaatttccacacttctgagaaatttttttttttgaaatttttgccgttttcttcattgcttttatggaagagaggattttcagagattcttactccaacatttatcctgatatcacttgtatttcttgatattttaataatctcaatgatcctgatacatcaacaaaaatattgaatctaatttttttcaacttttattttaagttccagggtacatgcgcaggatgtgcaggtttgttacatgggtaaatttgtgttatggtggtttgctgcacagatcaactcatcatctacgtattaagcccagcgtccattagctattcttcctgatgctctgcctacccctctcctcctgacaggccccagtgtgttttgttcgccttcatgtgtccatgtgtttgtgttgctcagctcccacttataagtgagaacatgtggtgtttagttttctgttcctgcgttagtttgctgaggataacggctttcagatccatccatggaatctatttttaaaacaggaacacttgcacaaatttttaatctttcaaatacaactgatattgttgaaagagtttattgaaagagtcagatgaaaaacaaatatgtaatagatctagccataagattttgcttactaaaataaacgaaatctctgccatttgttaaacaatgactatgaaccatgaatagtcattctattcatcttcatttatgaattc

SEQ ID NO: 198496 - DNA, 1000 bp, Homo Sapiens
tcaggaatgcttttgaagaaactgtaatgaaaatgagggccgggtgtgttggctcacacttgtaatcccagcactttgggaggccgaggcaggtggatcatttgaagtcaggagttccagaccagcctggggaacatggcgaaaccccgtctctactgaaaatacaaaaattagccaggcatggtagcgcgtgcctgtagtcccagctactcaagagactgaggcgggagaatcacttgaaccctggaggcataggttgcagtgagccaagattgtgccactgcactccaggctgggcgacaaagcgagaatctgtctctgtctctctctctctctctctgtgtatatatagtatatattatatatgtatatattgtatactctacatagtatatatttataatatatgtatataatgtataatatatgtatatattatgtattacacatgctagcatatttgtaatatatatattatgtattatgtatatattatatatgtatatattatatatgctataatatagttatatgtatatattatatatgctataatatagttatatgtatatattatatactctataatatagttatatgtacatattatatattatgtatatatgatatgctctatttagtgtatattttatatatttatatatatgggggggtggaaatcactatcctctaagaagttacaaacctgcaaatcctctagagcccatttgggccggcaaacttttgccttgggatttccttagaggagaagagagaggacccagtcaaatgctgacgttgttgtgacagattctaagtcgcctcagggctcaggggaaagagccttggaattgcaggcagtggcgtggatgtacctgcaggggtgggcatggtggcatcttggtggccaggtgttcgtcaccctgcactgagagggcctggtgaatggcaaggtcaggggatgctgtccggacatgtcaggatgggaaactgtcttgtc

SEQ ID NO: 198497 - DNA, 1000 bp, Homo Sapiens
tttgacctccacattagtttcttcattattttcaccaccactgtattgtgacatctgtacaatcccattctgacacatgtgaagataaggttttgctttattaaaatgttaaatatgtcagacacttgactaacatgtacaaattccttcttcacaaaagcagccccattgcctcctctctcccatagacactctttcacagctgttcttcactcacatcggtttgagtatctatcatctctcattttgtctctatgctttcacctcatattatgagttattatcataggctcagcagcctatcctacctgttttcctctccagcagacagtactgagcaataaactagaattttccaggatatgaacacttttatgtacacaacactttgtggagctattttatgtttaactacccataacaccactatgtctatgctttccagagaaacaagctctgaaattttattgaatataacctatttagaaacttctttaactacaatgacagtctctccttgatgcaccaaaatcttcagaaataacttgtgaagacttgaaaacatgtcagtaattgacatgaaaaatgaagcactgacataattttttgcaggtataaaaaagacaagctgagatccttactagatccaagaagagcaaagtacattagacaggaaataaatatggaacagaaacattttcatttgtaattaaaattcctctatttacagttttcagaagagaaaaaaatacacacacatacacacacacacacacacattcacacacaaaaaccagagcaatatggctttacggggtgtttcttcatcaaagtcctatttgccatttgacatctgggaacactctatagggatcaacaaaggggttctaaattgtgacctgagtagattagagtttaacattcatgaaggggagccaagaggacaagtaacactttgaccattggccatttccactccttactgttagtctctgaaaag

SEQ ID NO: 198498 - DNA, 1000 bp, Homo Sapiens
tagttctcaccattattcaggaaaccatgtgctatacaatattaaaacagtatttaaaatgttagtataatttttctgttgaacatcagttacacatcaagaactatataacacatgtattttatttctttactcctaatttataatatattcttccaaatcatgaaattcaccaggctaaggattttgtattatgatattcagcagtagaattcaaaagacacttgttttatccttaagctttatatgatgtaatgttttccttttcatttagaaaacaattaaatgacagtatttcttttaggattcatcttcatttttattaattagaagacaatagagtagaaaatattaacaaagagttccaagtagctgattagaagactaaatctcttttctataaataaattactagaaaaaaattaaaattaaacaaaaataaatcacctaggctgggcatagttggctcatgcctgcaatcccagcactttgggaggctaatatgagaggattgcttgagcccaggaggtcgaaaccagcttgggcaacatagggagactctgactctacaaaaagtgaaaaaattactcaggtgtgtggctcacacccggagtcccagctacttgtgggggctgaggtgggagaatagcttgagcctgggaattggagactgtaatgagctacaatcgcaccactgcactctaaccttggtgactgagcaagaccctatctaaaaagaagagcaaaacaaaacaaaacacataaaaaaactaataaatcttctactaattattcactttatctaatataattccttacagaagataggtcaaatggtctgggaatgtctgagtgatgttcttttgcctgccacagcatacctcaacaaatttgtaatccaatttaaaaggctagaagaaattagaaaagggaatgtttctatacatgaatggcacacggatcctttcactcaggcagagttatctgactgcctaagctt

SEQ ID NO: 198499 - DNA, 1000 bp, Homo Sapiens
acaaaaattaggcgggcatgatggcgggcacctgtaatcctggctactagggaggctgaggcagaagaatcacttgaaccccagaggcggaggttgcagtgagccaagatcgtgccactgcactccagcctgggcaacagaacgaaactctgtctcaaagaaacaaacaaacaaataataaataataaaaggggcactcacttgtgaaaatggggaggataaaaataaataaataaaataaaaagagcattcagagaacaaaaaatatgacagcagaaattaaaagcctcctgggttcaagcaattcttgttcctcagcctactaagcagcagggactataggtgcacgtgccacaatggccagctaatattttgtatttttagtagagaccaggtttcaccatgttggccaggctggtctcgaactcctggcctcaagcgatccacgtgccttggcctcccaaagtgttgggattacaggcgtgagccactgcacttggcctatctttccactcttgaaattttaatttctgctgtcatattttttcatctctgaatgcttttcttattttatttatttttaccctccccatttacaagtgagtgctccttttattattcatttatttatctatttaattatttatgtttgagacagagttttgctttgttgcccagctggagtgcagtggtgtaatctcggctcgctgcaacctctgcctgctgggttcaagagattctcctgcctcagcctcctgggtagctgggattacaggctcccaccaccaggcctggctaatttttgtacttttagtagagacaggctttcaccatgttggccaggctggtcttgaactcctgacctcaggcaatttgttctgcctcagcctcccaaagtgctgagattacaggcaggagccaccgtgcccagccaatgctccttttaaatagtatccttttctctcatatgtgggagcttaacattaaacaaattgaattc

SEQ ID NO: 198500 - DNA, 1000 bp, Homo Sapiens
agagtggacagatgcataccgcggactattaggcatcaatgtgaagtaacagattaaatattaacatctggcaacgtggatggagccaaaaaacagtgcttaggttaaacaaatataagtaatgagacaaatatctcagtaggtttgaagtacatttaataatgcatgctcacgaaataataactatgtttagaaaacacataaatggaaatatccacattaagcacattagaaaattgcctattgtagtgagaaaatgggacttgaagggtataaataaataaataaataaataaaacaagagggcctcactgtcatggtctgatgatagtatgccatgaactgaggagtatgactaactcaatcctttcaggaacaaacaaaactttaaaacatagcaaaaaaaaaaacataaatcataacaccacctgaaagatggaatgaggaaaaacttgcaaaaaagaaaactggctgggcgaggtggctcacgcctgtaatcccagcactttgggaggccggggttggggggggggcggataatctgaggtcgggagttcgagaccaccctgaccaacatggagaaaccccgtctctactaaaaatacaaaattagccgggagtggtgacgcatgcctgtaatcccagctacttgggaggctgaggcaggagaatctcttgaaccagggacgcggaggttgtggtgagccgagatcttaccattgcactccagcctgggcaacaagagcgaaactccgtctccgactcaaaaaataaataaatacataaatacataaataaataaaaagaaaagaaaactgaccgcaaaatgggctcttattttgagcatgtacaaaacacaggtaagtctgatggtctcggtacatgcgatactgttaacagttggaagaggggagaaacatttctggaggtgctaactgaagtgcttgaaatactttatgttatttaatcctcataaccacactgaagcatcgttgcccta

SEQ ID NO: 198501 - DNA, 1000 bp, Homo Sapiens
gctctgatgcctaggctgaagtgaagtgtggtggcgtgatctgggctcactgcaacctccgcctcccaggttcaagtaattcttgtgcctcagcctcccaagtagtagctgggactacaggcgtgcaccaccatgcccagctaatttttgtatttttagtagagacggggtttcaccacattggccaggctggtcttgagctcctgacctcaagtgatctgcctgcctcgcctcccaaagtgctgggattacaggcgtgagccagcatactcagccacaaatgttattttttatgtgtgcagcaatatttccagattgagaagtaccagcttagatcaatttctggaaaaatataaagtgccaaagtagacatataaaaagaacaggagtttaagaccagtctgggcaacatggtgagaccccgtctctacaaaaaattttaaaaattagctggatgtggtggcatgtgcccatggtcccagctactgcggaggctgaggcaggaggactgcttgagcccaggaggtggaggctgcagtgagccctgattgtgccactacactccagcctgggtgacagagtgagacgccatctccaaaacataaaataatgaaataaaaaaaagtttgggagtgaaagatgagttgagttttgtgtatgctgaatctgaagtacccatgggacactgaaatggaactgtctagcatgcaaatacacttggaaaaggggcttgggtatgatatatatatagagagaaagaacagaatatacgaatacaaatgaatgagaatgtaagtgatagctaaatttgtgggggtggctgtgattacatatgaaaggaatataaacttaaaagagaactgaggtcagaacgctggacaacatcagcataaaaggtgaatttaggggacaggaaggtcagaggtggagttgtatcaaataagggaaagaccaagacaaggacttcagtatctactacatttggcaatttttggagatc

SEQ ID NO: 198502 - DNA, 1000 bp, Homo Sapiens
cttgggctcaagaagactggttttaatgaagtgagacacataaactctctgagccttagtttttaaaatctgtcaaatgggactgttacctatttatgcagtaggttttacggtgacattaaataagataatgatgtaaaatgcgtaagagagtgtcagtctggcacatagtaagttttcagtacaattcaaaactttattgctttccatgttctaattcctatccaagccagcttcataacacaaactaaaaatgatatcttcatcagccttcaatcgcttttcttgagtttatatgcagacaggactttgctgattatggtacaaagcagctatacttgtggctctttcaaggaatttacttccacaatcacatagagattgatggactcatagaatataagctggaaaggaccctgggggctctctgcattcagtaattttacagatgaggaaatagattcccagagagatgaaaagacttgttcagaatttcccagttaattagtgacagtgccaggaacaggatctggttttccaaaagcgtaatctattgttcttatttatctacccttctggtttaggaaacaaagattatggttgaatatcctgagttgttggtcaggatgaactatttcaaaatgttatggtttttaaagctacatggctaattggggaaaaaatcaaagtgtatgtatgagatatcattaatggctaaacaaaattatagtgtagaagtatgggtggtgttacctaaccatggctaggaaagtcttcccaagctaacccataatcttcaacattctccacactcctcttccaattatttgatgaagtctgttggcattttctcattcttatgcaaagtgctctgtaaacccagcttcaaccccttctccttacccttgttcaattaaattcatttccatatgctactctgatgtagaaatttgggggccactcctgagaagtacaaccaccctttttctcatatgcttgc

SEQ ID NO: 198503 - DNA, 1000 bp, Homo Sapiens
ttcctaatattcaagatttactttactgtaaacaggaaagtctcaggcaaattctgacaagtttgtcatcctgtacacacaagacttatataagagctgagattccctgagcttaggagatagcagacctttaaagggactgccagtaacttgtccatcctttgccctggaaagagacattatctttattattctaaatagaaagcaaatctgtcctttgctttggagggagacattatctttaccttccaaaactgtttgccatgcaaacacacttaagaagacatttcagaataaaagctgtccatgtatctgctctgaagatgtacagaaatgcaaaagatctgtggaaaattgtttcccaacaatatttttataaaattacagtacagttatagcacattcatctctactaatctgtatgctggcttagaagaggaaaatcctacactcttctaaattttcaccgagtttcctttcttaataatccaatacaaaatgtttgctcattatttttaataggaagtttgtgaaaggcacctaagtatactgaaagaggtcctctatctctcaagaataagttgctattttgtctcagtagcaaagatttaacaaagaaaaagatattttctactgtcacaatcatccaaggacatactaactaaatccttcccttggcatctagcaaaagaggtcagggtctgtgaataaggcaagggaatttaggagtgggaggagtaaatcagaaaacaaaaccaaaaccaaaaaaaaaaaaaaaaaagaaaaagaaaaccccgtgttccttttggtaaatgaagcatatcctaggagatcaaactaatctggactttatggaaatgtgtgcagtcaatttccttggaattcatcagcccgtaggttctagtcactcatattgactgtaataatgcaaatttcagtgttcttttccccgacccagaagaatttcagtgttctttttccccacccaggagaatttcta

SEQ ID NO: 198504 - DNA, 1000 bp, Homo Sapiens
ggcattttacaaatatggaaaatgaggcccagaattgagttggtgcttttacccccaactctgcctcagacattaggggaaaaaggaagaaatgaaatgaagaggtttgtgcaaggtgtggaatttgtagcgaagaagcagtgatttgctttgagtggtaaaggaaggctcctttatgtcttgaaccacagcaaaaccgagatcacatcaaagaaacttggaagacacctgtcagtcattcccacttttgtcagtctccaagacaagatcatattccaagctctagtgatccttacctcattaatatctttctaataattcatttatcctcagccatgctaatgcccccttaagttcttaacactcccacagtaacgtattagaaaaacagtgagttttggaaacagactgccaaggttctagttctagctttgctgtttactagctcggtgatctcaggaaatttacttacctcctcctccagaccttagtatccctgtgggtaaaatgaagatgataataatagtatcaatctcacagacttgtaaaatgccaaggcactcctggcatacaaacaatgaacatttaccatagttaatattgttgatgttattactactatttcatgcaagcagtcttactttattgaaacactttccatgctctttctgtgcgcctttacacatctacctactctacctgggtcatcctcggaaacacaatctcctttcctcagctctggggtcgtcacttggggtaattcttcctaaacaccccgtcctcactccataacttgatacagaggcccctttaatgtgttaccacagtgccctatgttggcctatgtattagttttctattgctgctgtaaccaattacgacaaacctaatggcttgaaataagtagaagttattttacatttctggaggtcagaagtccaaaattaatttcaatggactgaagttggcagggctggttccttccggaatctctagggaa

SEQ ID NO: 198505 - DNA, 1000 bp, Homo Sapiens
catcactgcttttttttttttttaaaaggaacatttcaaatacacagggatacagacagcctttaaggcagccagccacgtgccaggtcccatttttcaaaacctctggtccactaaaccaaccagtggtgttaacctagccattgtctgtccacctgttgttttgtttcatcttgtttttgtgtgtgctgctgtttaattgacaagtaaaaattgtatgtatttacggtacacagcatgaggatttgatatgtgtgtgtacactgtggagtggctcggtcaaactattcaacacaggcacggcctcacatacttagcatttcttttgtgtgtggtgagaactaaaatctactctcagcgattttcaagaacacaataggctgttgttaactgctgtcaccatgacgcccaatagatcactgaacttccttcttttcagctgaaattgtgtgttctttgaccaacatctccccaccctcccctgcccccacccccagcctgttccattctctctttctgtgaatttgactcttctagattctacatagaaagatcatgaggtgtttgtctttctgtgcctggtcatgcccgttttttagtcgatcaaagcagtatctatcagaatggctgatcagcagaatagagcgagggtggctggagcgagggtctcctgccagctcacagccctaaagcttgaagctatcacgagtttgggcaaaggtaatacatgcggcttctttggtgaagtaatgaaaaggattcttggaagctgctccctctgcactgctcctgtcttggaaccagagactaagtgattctgggctggaaaccactcatctcttccaactgatatcccagaaggggaaactgaaccccacgaggccctgggatccccctcgtttgctgagggttcatacacagtacccattgcccaacccccagaccacaagccagagccctaggcagggtgggcacctacctccaaagaggaagagaattc

SEQ ID NO: 198506 - DNA, 1000 bp, Homo Sapiens
tgaaagttaaaaatagagattatacaggaggactggattttttttagagataatttattagtcaaaaaatatcttgaactagatgactaaaactacagtctgaaaatagcctatgtctgccaactttctacagaccaaatttcatatcaggcttcaagacaaaggttgacataactgccaaccagtgcagtaacaggtctggccttattcgtgttggatgctttgcttgaaaaagataataaatcacttgaaaagcccacgtgggaacaggacacaatctaggaaactgaatgccactctgtaacacaagtgctaaattaacattctccaactgcttccagctattgatattcattttggaacaggcaggacatatttagaaaatggcacatcaccagaaaatgtgagtgagagtgtgggcttttgcctgatacaatgcagcgagaatttttctagaaccaacttcaggaggcagaaaagaaaactctgtttcacaaaccttttagattagagtgtaatcttccaataaaataagttatacgaaatcaagtagtatcatcttactataaataactattcaaagaagcagtattttaaaataaactcctcctcttggccttcaagctagtgatcttggttactgccaatagcattcataataaacaggatatagttttgtcaaatgtttagcaaagtattataaatatgcttttggtgaaaataagtattcaatatcttttggggacaatgagaggactattcacatgtaccacttatcaatttaacaatgagcagataatgtaagaaagtgcacatcagccagctaccataatggcttgcattttggcagaagtagaaatggaggtgggtggataccacaaatatcattagtcataaattgagagacattaatatatttattaggatagtgtgcattttaccttaataataatgatgttctcccaccaggcaggcaaaagaaagccttctcaaagaattc

SEQ ID NO: 198507 - DNA, 1000 bp, Homo Sapiens
atatgccaatccttgtgccatttctgaagattctgtggcgtgataaattggtattgaaatcaaatttgcagatttagggatttgatactttggctgtgggatcatctctgcatattttgcaaactgatgccctggtctagggattagttcagaggattccatgatttgataatttgttcttggagtttgctccccatatttcactctttgaggcagtgaccctggtgctaattccacagattttatagtttgctgcagagacactgaagataatttcacatgttttacgctttgcaactttggctctacagtaaactccaaagatttcacatcctgttgctgtgattctggagacaaatttgaaaatctgacactagtcaacagtggtcctgatgggaacttcctagttggctctggtaccaacatcattgatttcacatcttgccatcctgaagtcaactcttgataatttataccttgctgttgggcccctggtgtcagctccataggttttacatcttgaaagcatggcttcgatgcaaaggccacagatttaacgcattgtgacccaaagcatgatgtcaaccctgaagaatttacactttgaggttgtggccatagagttgacttcacagatttcacatcttgagaacatggctctggtacaaataccacagatctcacattatgctgcctgaggtgtgaatggaactcctcagaattcataccttgcagctgcgggccagagttgaactcctttggtgttatatcttgaaattttgtccctggagtcagttcacattttacatcttgtaaatgttgcacagagttgaacacaacagattttataccttgaagctctggccctggatgcaactcagaaaatttcataacttgaaattttgtccctgattctacaccttgcaagtgtggcgcaagtttgcactccatagaatctatacattgcaattttagccctggattcaactcagaagaattc

SEQ ID NO: 198508 - DNA, 1000 bp, Homo Sapiens
ttgctgactgagctaaggattaaaactgaaaaaccacagcgttagtgtttatgttaatctatttggctatagattctcaatcgggagaaaaacaaaagaagaaaacattgataaactacttcaatctgctttacaatatgtgattaaagaaagaaaagaaaccttgtctgctacagttgttcaaacactgatatttctagctggggtcctaattaaggtgtaatgagagatttgaagtgcactaaattcccttcattcacgtcactaaaccagtgaaccacaactacacgtagaatttcagggagacataggacccagtgaattagttatcatataactcctgagcagttggttcagagctggagccactggggcatagatccacagtgaacgtgtgactgcttggctgctatttgactgcagctttccgttcatggatacttaacaataaacagtcactccacttaggagagaacttgattccacaaacacgtggaatttcctggctcttgaatgaagacgccacaggattttcactgctcaggtgttactggatgcaatgctgattcaggaaccgaaatagattatctgtttcccttgcctgtgtagttggatcattgcccttggcagtaaccccagactcctgcaaatgatgaagacgtccctctatgcctatgtagaaaatagggccaacatagatgccattagagaggctcaactgagcttatgctgggaaaattgtggcatccataccttgcataaggagggaatgttgagaacaccagaataggttgaagcccattcccttgaatgggaatcactgggttgttcaaaatctcactgatacagtattccctggctctttttccttccaacacactgttcatcaactggtgcttcctggctgactttggcaatgagaaagtaatcacttgactctctgcctaccttcaaaggttttttaataattagtgcagagataaattatatgaaagaattc

SEQ ID NO: 198509 - DNA, 1000 bp, Homo Sapiens
ccagccttgcatcccagggatgaagccaagttgatcatggtggataagctttttgatgtggatgtgctgctggattcggtttgccagtattttattgaggatttttgcatcaatgttcatcagggatattggtctaaaattctccttttttgttgtgtctctgccatgctttggtatcaggatgatgctggcctcataaaatgagttaggaaggattccctctttttctgttgattggaatagtttcagaaggaatggtaccagctcctccttgtacctctggtagaattcggctgtgaatctgtctgatcctggacttttattgcctcagtttcagagcctgttattggtctattcagagattcaacttcttcctggtttagtgttgggaagatgtatgtgtccaggaatttatccatttcttctagattttctggtttatttacatagaaatgtttatagtattctctgatggtagtttgtatttctgtgggatcggtggtgatatcccctttatcattttttattgcatctatatgattcttctctcttttcttcttttttagtcttgctagcggtctatcaattttgtggattttttcaaaaaaccaggtcctggattcattgattttttgaagggttttttttgtgtctctatttccttcagttctgctctgatcttagttatttcttgccttctgctagtttttgaatgtgtttgctcttgcttctctagttcttttaattgtgttgttagggtgtcaattttagatctttcctgctttctcttgtgggcacttagtgctataaatttccctctacatactgctttaaatgtgtcccagagattccagtatgttgtgtctttgttctcattggtttcaaagaacatctttatttctgccttcatttcattatgtacccagtagtcattcaggagcaggttgttcagtttccatgtaattgagcggttttgagtgagtttcttaattctgaattc

SEQ ID NO: 198510 - DNA, 1000 bp, Homo Sapiens
aagatccacactcttttcatatctttgggcactagttttccctcagctctaatgacctggccatgttggcattcacatggtggaggacctgttgcaaaacagttctaaagcttgaaatcagacaaacacaactgggacattcacttttgcatgtggctcccacccacctccaggataacaactttcttttttcttccactctgtcctctcctttccaacccatccaatctcatgtttaagtaatgtttcctaaagttctaggttacttggaggcagtttgggtttatgcctgttgttgaggattaactattaattacatcctttttccttttcagaaacatcctgagttggatgataaattacatggccactcaatcagtgagcgaatgctgtctctagagagcccagttcccatgcaagaggctgcatcaacagcattttgaaacagcaactgcagctgcattttcttagataatgaaggatggggaagaaaaggaatgccagaagtcagtatttttcttcttccctactcacaattcccaattgtttcccctgtccctcagttttatttctagagcacagcctgccagcaatgcactcaagctgtggagagagattctccacctgtaggagatgactgcccaggccagtcacagcctcttcatttccatttattcccatcttagggaattgaaaatacagcacctaaagaatcaatctctgtgctttctgagaaactggagttgatcctaggggagacaaaacaaatgttagattagctttgccaaatagaattgtcgaatgttctattctatattaaatatatattcctaatgcattccaaaaagattgaggttcacattcaagaatgtagaccatagagcaagataatataaattaagaaaaatgaaacaaaaaagtaaggacagtggatcaatagactgaggataatattgcaaatgccaatttcattccgtgtgcagcaggaaataaggataaa

SEQ ID NO: 198511 - DNA, 1000 bp, Homo Sapiens
cgccctcttcagcctcccagagtgctaggattacaggcgtgagccaccatgcccggcctgctattttttatttttagatacagggtcttgctctgtgaggatggaatgcagtgccacaatcatagctcactgcagtcttcaactcctgggcataagtgatcctcccacctcagtctcccaagtagctaagactgcagttgcatgccactacactcagctaattttttttttttttttttgagatggagtcttgctgtgtcgcccagactagagtgcagtggtgcagtctcggctcactgcaaactctgcctcctgtattcaagcgattctcctgcctcagcctcccgagtagctgggattacaggcatattccaccacgcctggctaatttttgtattttttagtagagacggggtttcatcgcttttggccaggctggtcgggaactcctgaccttaggtgatccacctgcctcagcctcccagagtgctgggattacaggcatgagccaccgcacccagcctcagctaattttcaaaaaaaatttttttgcagagacaaagtcttgctgtgttgcccaggctgatcttgaactcctggcctcaagcgatcctcccaccttggcctcccaaagtgttgagattacaggcatgagccactgcgcccagcccagcacatgattcttgagccagcagctgtaaataagagcaccttcccagtttgataagcacttgttcctaccaactgtttttccctcaaccctcatcgtgatcatttatttatgcaagtgtttttcagcttgagtgtgcgtcagaatcccctgaagagcttgttaaaacacaaggtgctggccccatccagaattgctgattcggtaggtctggggtagaactaggaatttgcattttaacaaatttgcaggtgatactgatgctgcagtttctggggccacactttgtgaacctctgatatgaactgtttaataccgtgtagtgaattc

SEQ ID NO: 198512 - DNA, 1000 bp, Homo Sapiens
aggctttgggcacagagaggagaggaagggaaggcaagaggcagggtaagtgaagggccctcataaggaaggcactcacttaacaattctgcctggggcagctagtttagtcccatagcctaggtctcctttcaggcttcccatactcacccacccacctatgaagaccttcacaatcagaaaacatgcggctctgttctggacctctccaagcaagcactctgcaattctttgaagctctctacaattccaggggttttgctgcaacctaatccatagaaagggctaaatttgtctctatgcactccacagaattacagcaaactgtcagggaaacagacccaaatccttttatttccttaccaccccctgctaggaaacggcagagaaagtccctgggtgctttttgttgctgggtagctaaaatgtgcaacttttagaaatgttcaagtagaaacaagaggcctgaactcactaccccaaaaagaaccagtcccagttcggtagtccgtgcctctccaagtcacaaagtttcaagttccaatcaaatcagaatatcttactcaaaaccgtggctacccaccacttttaaacattttcacaaatggagaaggggcaaagaaagaaaataatttcttcttcctgtacttgtagcagtgtttaattgcagggaggtgggtgactgctcccgggaatcatgcacaacactggcaaaaaactgcctgtggaatgatcggatatgacatccattcatgtgtcccctcattttctttattagtcctgaagacagatgacatgctgacacggaaagtggtctccaatcccttgcatttcccctcacaaaacatacatgaccaatgcaaggtattataatagaaaacagaaaataaaataacctggtaagagtgcggtacaaaaaaagaatatgaagagccgtattgacaactattctcacagatgtatatacgtacagcaaacagcccaaattaaaggagaattc

SEQ ID NO: 198513 - DNA, 1000 bp, Homo Sapiens
ttgagcctttctgttcaggaacagagaatatctgttcattgatttagtttctctttgatctatttctcaaagtttatagtttgcctcatgtaaatcttgttagacatattgtattagatttttacttaagtattttatttttggggtgctaatacaaatggttatgtggttttaatttcaaatgccacttgttaattgctgtgtatagaaaagcagatgattttgtatattatttcctgtgcattgttataatcactagttccagaaattttttgtagattatttgggattttgtgaatatacaatcatgtatcttcatatatctgtgacaaagacagttttatttcttccttcctaacctacgtatgttttatttcctttccagtggtggaaagggacatccttgcctcgtttctgatcttactgagaaaattttgagtttctaaccattaagcctgatgttagctgtaggttttttgtagatttttaaaaaactcaatttgaggaagttttcctattgcttttttgataagagttttttttaaattttattttatcatggttggccattggatattgtcaaatgctttttctgcatatatttatataatctataatgatgtgatttttcctctttagcctgctgatgtgatggatgataataatttattttcaaatgttgaacctggggtaaatcacacttgatcatgctgtattataattcttttcatatattgttggattttatttgctaattatgttaaagagttttgtgtatgtgttaaagaaaggtatcactctgtggttttagttttttcaatgcatttgtctgattttggtattagggtaaaatgctgatctcatggaatgaatcaagtaccctagaacttaaagtattttatttatatatatatatatgaagtattccttatacttttatcttctgaatgatagtgtagagaatttgtataattttctccttagatgtttggtagaattc

SEQ ID NO: 198514 - DNA, 1000 bp, Homo Sapiens
ttctcattttttctatactttttaaccatagcaaaagtgtttttattcgtcattctaaatattgctttcaaggcactagtactaaatggtagtcctactatagattgctttgattttaaagaaatccccattaatgctccagtcagagaattaaaagggatgggaaatagaccagctaaatgaagggttcaaaacagtggccctattcagcacttgcagaacccattaccacttcccaagatgacagagtattcttgcaggtagactagggaaggacaagtcctggctgtcctgcctctcaacagaggaaataaatcaccctacacactggaggatacctttccagactgcacgctgggaacttcattacacaagctgtgcgacacattactatgcatattgttgctgattggacatagatgcatatccacagactatttctgtcattgtcttatgagggagatatctatttttttctctatagacagatacaggcttgaaaacgacacaaagaaaataatactgtgtgcccaaaagatctcgatctttagcaaagtattctcttgactgatgatttgtctaacttgcccgaacctcatctcctggtgcataaaacatgatcctttgattataagattgtttgatagtcacacaatcttatttgatgtgaatatgattgttatcaaacataagtcttattgctccgggtcttcacctcattaaaaagagggcaaagtatttcccagtagaagaattttcagttcctgttcttcattggtaatcctttcagttgattcatgaaagacaaactttatttacttaattttgtgtatatgccatgaatgtagcttaatctaatttagacccgttgtgataatgaaaaaaaattgcaaaggaagacaatcttcaggctggaagtacagtgtcagttttgaagtcaacaacataaaattaatgaaccaaaggaatacaattaatgaacataactattagcaagctt

SEQ ID NO: 198515 - DNA, 1000 bp, Homo Sapiens
ttttctaacaccgtgtcataaagaagcttgtctacatgactttgagaagttgctatgtgaaactacaaaggtgggagtatggccaccccagcacagaattcctgttccacatcatgtctgaatgtactcaaggttgggtgccacttagtggaattggtggcaccaaggagaaaggccttggttgagtcacagcctagcccagcagtcagctctggggctctgcctcatacagaggatgattcactccatgcccctcctggtagaagaagaggttcttcaagtgttccttcccttcagcccagtcagggcagctggagtaaagcagggctgactgtgcacaagtggaggagtctggagtaggcagaggaaagggaaatgagggggctgtctgacagctagaaagcagattcaaggtaggtgggagtgggggaagctagggtacaatgactatatttctaagacgtatgcaaatcagatgtactcagaactaggtttttattgaaaaattattcatcatatggggaaaatgtttccctaaccatcacaaaagggcatataatgaaaaaataaagtctttttttacctcttagattcacagttctccaggctgtttcccctaagacaggcacagtccctccagaagcagtctgtacttacacaagcgtaaacacaggtatcttcaataagttattcaacttctttaggtgtcttagtctattttgtactgttataacagaatatcacaaactggctaatttattataatgagcagaaatttattggctcacagttctggatgctgggaagtccaagatcaaggtgctggcatctggtgaggggcttcttgctgcgccatcacatggtggaaggcagcgtacaaagagaaactgtgtcctcacaagtggcattaatctatttatgagggtggacccctcaggggggcttaaacacctccaattaggccctacatccctatactgttgccttggggattaagctt

SEQ ID NO: 198516 - DNA, 1000 bp, Homo Sapiens
ttatttacgtaaaaggtaacatcagtattaattaggtgagaagaggaaaggcacagaaactaaattacagggcccaaaccaacatgagaaaaatacttgctatagcctggaatctttcactcaagttttatttggtgtgagacttgtaaattatagctttgatccttaacacacgagtatacacaaattcaattctcaggattttaaaatgaaaatccaggaggctgtgggatgctgtatagaggaggggtcatgcctactctctccttccatgagagggaaggggcatggagggggctttgtaatctgccagccctgggcttaaattccaattcaggccctcacaaacagagtcaaatggggcaagcaggtcgcttgccctaccagaagcagacatcctcatccacaacccaggaatggcatccacctgctgaaggagggggagctgcttctatccaaggaaaagtatataaaacactctgcacggtgcctggcaaagtacaggcccttggatggtaaaaccagtggtggcaatacagagataacagtgaagaggaagattttaccaggttttcttagagaacaggatgggacttacagctttgggagaaaaagaaataaacacagtatcttaaatctcatcctatgacattgcaagcaggttactactttgcagatgtgcttattctactttcctatggagcacaattccaaaggtgctatctcatcccacgtgacaggggtcctggcctctcttgctgctccctggcagctgctgttaaagatttagaggatagcaagggtgtggcaagcatggccaggggcaggctgttgcaaggctgccatcctactttccaaagcctccatcgtccactctgcaggttatcaccgaaaatctgtgtgattccacctcaatcttgcatgcctttcgaaggcttccagctctttggttcagtggacagcttccgtcttacaaacaggctgaaccttatgagaattc

SEQ ID NO: 198517 - DNA, 1000 bp, Homo Sapiens
aagaatgcctttgcaatatattcctggagcaaactcttaaccattcttcaaggctcagtttaggcctcacttcctccaggaagccttccccgcgtctagtgtcccactgcttcggcgacttctttactcagagctgtcactgttggagtctaggtccgtgtcctcccacaatcccctgaactccccgaaggcaggaatggggtctgattcacccccgtgtaccaagcacccagcactgggtgcataatgaatgaaggatggatgggggaggagccccccactattaaggcggggtctagtgacaaatgagagggtgtggcctgtgcggagagaagccccggagaggacaaggtgaagagccaatggggaaccagaaatagaggaggggcgtgacctgcagccaataagtggtgggggataaggtgaagggcgtgcccaatggagggtggggccaggagacaatggagtggaggcttctccgggagatcaggaaaggtcgcgtcgcgcgcctcctcccggcctttgggggggtccgtccgcgtgccgtgcccccacctgttagctcctctgctcgccgcccgccgctcccgctctgctacaccggccaccggacgcccagccggcgggagccgtcgccgatgacgtacgtcctcgggcgcgcgcacgctcttacgaaagcgtggggcttcgcgtcagtctccgcggcggcgcgcccccgaggccactgggagcgaagccaggcagggttgagggggcggtgttcgtggtcctgggcccgcccccttcccaaggccacagcgagttgctgggcttcaggggctccaggcggccagggcggcggagactcttgctcacggcctgggcgcggagacgtgggggcgtagcccgcggcctcgggaacgcagtctgcacagagggcagatgcctgcataggcggggcgcagcccgtgtaccaggacgggagccaggatactttaagcgtgtcactctgcaagaattc

SEQ ID NO: 198518 - DNA, 1000 bp, Homo Sapiens
aaactgacattacaaaatataaataaaaattcaacttaataatttaaaagtgaataaaaagtataaacatccttcaattccctcaagtatagatttaagtattaaaattctagaacttgaacaatgtattttggttttgttttgagaacactgataaatttgagccccaatacttggtaagatcaatcttgaacaaaaaaatacaaaactgtattatctagaagctaaccaaatgctggctatgactccaacatgggttattcttagtaatacctacatttgatatatgatagacacattcatacatagataattgataacacagtgatcaaaaaacactatgttctagaatttcaaatacctacataagcctttttctctttaccagtgtaatgatgagagcaagaaagaaaagactagtgatgaatgtgaagagatcattgaaaatcattacgtctgaagcattacattctagaagttttaaagcatttctgacactctagtaatttaataaactagtacaaaaactggaaaataggaaagtaacctgtcagagacctaggctagaggcatattgactgaatataacgatactacaaatataaagtgatctccaatttctatcattaaaaaattaaaatgttttgggttcgtttatacagaaacttcaagagctacaaataattatgttttattacacagtaactggtacatattatgaatcatacattctataaaatgatattaatctagaaattttgctttttcccattcacattttctatttaaattctttacatgatcttcaataaatttcatctaacctacagtatatcattttcacttctgtacgaagattttgcaaatacagaatttttctgaatccatgtataattctggctctagaaactgtatcccaagccacacatacttatttgttcaatatctggacagctgtttatttcattagtcctgcaggcatatgttcataatttctaga

SEQ ID NO: 198519 - DNA, 1000 bp, Homo Sapiens
aatttgaaggtcatgggattctcttcctctttataatactgaaagcatgagtactagtggtgtattcgctttctttgttaattttatgttttggttatgttgcattgtgtttttctgggagggtatgggaggagatgtggaattggctgccattttcctcaaaacttagaactctccataggtgtaggtatctttttataaattatgcatgaaatatagtgagcttttacaatttttatgcctagatttttttttactccagaaatttttatttatcctttgatagttgattgtttcagttaaaaaaaaaaatctacaaagaactagaatctttgttcttcgtatccaccatctgcctcaggtatcgtatatgctgccttgggtaatatttctctgggtttctttttgtctctctcataccatctctttgttattcagttttattttttaggtttccttgactctttccaattaccctattgaattttttcatcttggctctcatatttttatgaggccttttattttgtttcctacccattcctttgtcaaaacatcctgattccattttatacatgcaatatcttctttaatttctttgagaatatcatagtttttgtgttttaattctttcctgcttcctacattaacccttccttttgagatcatgtttcctgtctgcttatcatgaattctcttttttatatttttttattgatcctaggttgctcattcatatttaagagtaaggttcagccaggcatggtggttcacacctgcaatcccagcactttgggaggctgaggtgggtggatcgcttgagcccaggagtttgaggccagcctgggtgacatggagagacccacctattaaaaaaagaaaaaaaaaagaagaagaagattctaaaattagatcaggagcttcgtatgtttttgtatgtgtgggtagggttgtgttttaggatgatcagccaggaaggcagttgttacactgggaattc

SEQ ID NO: 198520 - DNA, 1000 bp, Homo Sapiens
gggaccccacttcctcgggttccgcccctgtagggcttctacagttctgacccctactcccaggcaccccccggtgggccccaaccaagaaggtccctctccaggccctggcctctctgggctctgaccttccaagaacccggccagggaacaagcttgctatcccctcggccatgctgcacccacctgtgcacgtagccaagccggtgcaccgagtctatggccatgacaatctccgccaggtagaagcgcgccatctcggccggaatccgctccccaaacttgctcagcagtgtcagcaggtccccgcccacgtaatactccatgaccaggtactgagaaggggttcgtcatgggtggttggtagtcccctgaggccctgatccatcacggatggctgggacaacccctcccagagacaccccatccttgggcagagacctgcagccccagcccagagataaccatagagatctgccgggccaaatcagagaccacctgcggcccccgcccccgcccctcaaaaaaaaacacaaacaaaaaaactttcctgggatgtcactgggcagattcactccccctgagatgttctgggaaagagaacccagaggccacccaacacccagagaataggtcccagacactccttccctaggcagtggccccgttagaattcctgaagacctatcccattccaggtaagagaccccccgcaacagagacatctttataagagtcccccagatcaccccagaaacgggcagtgaaggacaccatccccgtctcagatagggaaggcccctcatccacctgacacaccctcttaccgcacacagactttcccacagacgtttccgggcagcacccccaatcctagagcttcctctccccacctcctcgtccagtgacagcacgggctcttgtccctcttcctagtcaccccggcccggagctcaccaggtagttctcatcctggaaggcgaagtgcagctgcgtgatc

SEQ ID NO: 198521 - DNA, 1000 bp, Homo Sapiens
catcctttcttacgctgttacatgcttctttctttctttctcaactagatagtaaggcactgatgtgccttttattctgtctaccggccctggccgtaagaagcacttgataaatacaccgataaaatgaataaatgtaaggatgattttttttaaatcatgggctttgatactgactctgaactgctcaccattgggtcctcagagcctaactcatagcctgacacatagtcatgacctcaataaatatttgttaacttagaaattcatgttgacattggataaaagggacaggcatttgaaggaggcgtctgtcaagatttttttttcccatttttcttcagtagttctaatcagcttctccattcatcaactgtgagaattctgaggactcggcatttcccagagttgggataatgatggagtctggcagttgtgagttggaattaagaagcttgtagttattttaaggtggagtgatgggccccagtactgagcaaaaaaagcattgaggctttatgccagtattttatacgtcaaacaattaggctaaagttatcagttatataaaagttcagctaattggctctaaaatttcagactgtatttattgcagggctgctcaagtttttcatttaaaagcatccctgtaaattagaaaaaaatacatctgggcacccatctgagggtgaaaggtgatgtagggaagagtctaccacatcccattgtattcaggaccgaatttaattgtttagtaagccttattttgtacaaggcactgtttctgctgggaaggagtttatagcctagcaggaaaaaataacagacgtatcccagaaacaaaggtctagcagagctcagaagggaaaaaaatctgttggggagtggagggaatcttcttagaatgacagttgtttgaggtgattactgaaaggatttggataagatttcagtgttattgggaatataaggatgggggaagggtgctgtgagtgaattc

SEQ ID NO: 198522 - DNA, 1000 bp, Homo Sapiens
gaagttaaaaaccttgaaaaaaaattagatgaatggctaactagaatgaccaatgcagagaagtccttaaaggacctgatggagctgaaaaccaaggcacgagaactacgtgatgaatgcacaagcctcagtagccaattcgatccactggaagaaagggtatcagtgatggaagatcaaatgaatgaaatgaagtgagaagagaagtttagagaaaaaagaataaaaagaaacgaacaaagcctccaagaaatatgggactatgtgaaaagaccaaatctacgtctgattggtgtacttgaaagtgacggggagaatggaaccaagttggaaaacactctgcaggatattacccaggagaacttccccaatctagcaaggcaggccaacattcagattcaggaaatacagagaatgccacaaagatactcctcgagaagagcaactccaagacacataattgtcagattcaccaaagttgacatgaaggagaaactgttaagggcagccagagagaaaggttggcttacccacaaagggaagcccatcacactaacaactgatctctcagcagaaactctacaagcctgaagagagagggggccgatattcaacattcttaaagaaaaggattttcaacccagaatttcatatccagccaaactaagcttcataagtgaaggagaaataaaatactttacagacaagcaaatgctgagagattttgtcaccaccaggcctgccctaaaagagctcctgaaggaagcactaaacatggaaaggaacaaccggtaccagccactgcaaaaacataccaaattgtaaagaccttcgaggctaggaagaaactgcatcaactaacaagcaaaataaccagctaacatcataatgacaggatcaaattcacacataacaatattaactttaaatgtaaatgggctaaaggctccaattaaaagacacagactggcaaatcggataaacagtcaagacccatcag

SEQ ID NO: 198523 - DNA, 1000 bp, Homo Sapiens
tgctagtctttatcgaaagcttttctctttttttctctctctctcttttttttttgagacaagtctcgcactgtcgcccaggctggagtgtagtggcacaatcttggctcaccacaaactccgcctcccaggttcacgccattctcctgcctcagcctcccgagtagctggaactacaggcgcccgccaccacatctggctaattttttgtattttttagtagagacagagtttcacggtgttagccaggatggtctcaatctcctgaccttgtgatccacccacctcggcctctcaaagtgctgggattacagccatgaaccaccgtgcccggccgaaagcttttctcttttatagctaatttaaatctgcattagcggggccaggtgcaatggctcacacatgtaatcccagaactttgggaggctaagacaggcagataatttcagctcaggagttctagacccgcctgggcaatgtgatgaaaccccatctctacaaaaaaataaaattaaccagacatggtggcacgtacctgtgtggcacgtgcctgtagtcccaactacttgggaggctgaggagaggtttacttgagcccaggaagttgaggatgcagtgaaccatgatcacgccactgcacttcagcctggatgacagaacaagaccctgtctcaaaaaaataaaataaaagaaatattcatttgtctagatggtttttagtttctcacctttagtaatatggtagatgacattgatttttctgatattaaacctttgtattcttacttgatataatttttaaggaaattattttatcaaatattaaaattaaaagggtaacatgcagaaacctagctgtatacagaaaaggcaatattaccactatttggtgaggtgtgctgcgtgacgataacctgaaaagaagcactaggtcataagactggcttcagttcctctgagaatttacaagagccttttctggggagatcactgggcaaga

SEQ ID NO: 198524 - DNA, 1000 bp, Homo Sapiens
aagcaaggacccttaacaatttagtgtcattagcatgtttgatggagtatagtcaagatagcagcagatttatttacagagaatatttatattataaaagctacaaagtaggaattttattctattgatgtattatttggagtgttaattcgtattttttccaatcttgctttctgttttgtttttaggcttgcattgatgacaatgttgatatggtgaagtttctggtagaaaatggagcaaatattaatcaacctgataatgaaggctggataccactacatgcagcagcttcctgtggatatcttgatattgcagagtaagccagttctgtgttttcattttattctaatactgtttgacagacctgaatgtttattgaagtgataaagataaatgagtgaactcttatattactttaattcatgaaaattattctttccaagaaagaaaataagtggttattgggaatccatatattctcagaatcagatcttctttttgtctccccaccctctttggcctttggtacttcgtattaacattagtaattgtacacattctctgtctccatcttttttcttttgagtacagctagagcattttcaaatgattgagggttaatacttagcagtctaactcattcctttataatcataaatttggcaactgggttacattgctatagggagaatatgatacatagttctccagtgagcctgtttacttagtttttctgaagattgtcttttttaaaaaatacattttttagaaaattcaatgagaaatagtcattgtattctctactacctttaatgtgtgggtacacactaagaacatctgattttttaaagcatttaacagtggaagtatagatatcttgaaaaataattttttcattaaattatttttcttattactatctatccacacagtaaacagttttgttgtctctctgctcatatatgaaagcttatcaatgaataaatattgaatatgg

SEQ ID NO: 198525 - DNA, 1000 bp, Homo Sapiens
acagacatggccaaatgtcccctgggtgggagggacgggcaaaattacccccagttgaaagctactaatatgaataaatgattgcaaggaaattctcggctaaaatgttacattgttacctctggacagggagattccagacgacttcttacttttatctttatgctttttcatgagaactttgcatgaggagcatgaaacattttccactaaaaacaaaacaacaaaaatccagtgctatagtgtctctgcttgggcaggaagaagtatggggaaaacaagatagttctggccttagactggagaatcaggtaaaggtgatccatccagaaaaggccagaggatgagccacgttggctgagggtggaggtctgagggcctggaaaatactgagcagcgttctcagctgagtgaaaatgagcagcatgacattatatgtatctgaaaaggacctgtgcctagaaagtttatatcctaagtttctccgttactgtaatccagcccatcaatccctcattaacttcagttcagccttcccttcctttttcagagaagatgctgtgcagacttctgtgcagggagggttcctacgaagcaagttaagaatgatgcatctgtgagctagcagtttcagtaaggaaggctggtcatggtaatgtgtactgagatctgactttcaaggacttcatctttatagagcacttagtctggctttaagaatacaaaggtgcttttcaaatatcaaactaaatctgatgacacttcccacctatggaaaacataaaatcagagagtgatttccctttcattccatttctgatgcttttttatttttttgcagttctgtacacataattaatttcatcagtagcaccctacttaaagtacagaggaaatccacatttgccaaattataaacagacctaatcatgaccttcagggtttgggggcttttctttcaatgttgttaacttgttaatggggagtagatttgtagata

SEQ ID NO: 198526 - DNA, 1000 bp, Homo Sapiens
acttagcaataagaagaacaagttactgatatacacaacaacatagataaatctccagggggttatggtgagtgaaaaaagccaatctcaaaggttacatactatacaattccatttaaaaaacgttcttaaatgacaaaaattatgaaaaagaacagattactggttgcctaatcttttctttcaaagggggtctaaaagcaaaagaaaagtgagtttgccaaaagagggcactatgagggattcctggggtaatactctctatcttagctgtatcaatgtctacattctggttgtgataccatactacagttttgcaaaatattatcatcagggaaacaggacaaagagtgtataggatctctccgtattatttcatctacctgcatgtgaatccacaactatctcaaaataaagttaaaaatatccaaatacattattctcaaggtactagccaattcaactagacaagataaaacaataagatgcataagaaatggaaataaaacaatttttatttgcagatagtacacttagaaaatcccagagggggaaaaattgataacattgacccaaaccataaaagaattcagcaagcttagcaaaatataaaattaatatataaaaatcaatagcatctatctgcacaaataaccagtaagtaaatataacaaatgacaaaatcccatttgcaacgacaatttaaaaataaaacatttaggaataaacaaaaaaaaggtcaaaacctaattttatagaaatactgtaaaacatccctgaaacaaacagaagcaaactggaacaaacagaaagacactccttctcattggctagccgttctcaacttcatcaaggtaccaggtttcaattcacaaatttaatgtaatccccaaaaaattccaatgatcatgtctacagagctagaaaagttcaacttagaattcatatagaaaaataaacatccaagaatagccagaaaaacagtggaaagcaaagaatt

SEQ ID NO: 198527 - DNA, 1000 bp, Homo Sapiens
agtattctaacaagattggctgtaactgaccactagtaaaacttactaaataatgagtgagaacagtatggcaccgcagttctcaaacaggatcctctacactcttaaaaatttaggctcccaaagaacgtttttgtttatgtactatcaatactgaccacatcagaaattaaaactgagaaattctaaaaatattaatttatgatttaaaaataacaatgaactcactgcatgttaacacatattttttaaaacaatatattttcaaaacaaaaaatttagtgagaaaggcattatttcccactttttgcaaatccttaacatctggcttaacagagtataacacagctgaattctcctatgtgcttctggtattcaacctgttgtgatatcatcatgtatcctctagaaaatggcatcaaatccttgtgagataatgagaattttaaaaaggtaaatattttagtattattataaaaatgtttttgacttcacagaccgctctcacattatgagaattcctggtacaggcatatctcattttattgtgcttagctttattgcactgtgcagatgctagtcttaaaaatacacgtaaatctcagggagaaagcagatgctgcagatttttttcggatactctttatcagattaagaaagcttcctccaatttctagtttcctgcgagttttaatgatgagtagacattgagctttatcaaatgctttttctgcatctattcagatactatttttttctcttattgttttaatgtggtatatcacactgaatgttgaacaaacaaaccagaatttcttaaataaatcctcccttttgctcgtattttaagatgtttacaatctatgtcataagaaataaccttgccaggtatctaagttcagtggctttataagaattgggtcatgttaattcttttccattctctagaaaaatctgcataagataggtactaattcttccttaaatgttggaagaattc

SEQ ID NO: 198528 - DNA, 1000 bp, Homo Sapiens
gccacgagtacaatcccatgaacagttccttgtacttatggcaggcaggaaaccgctgacagaggccacaggaaacactctgctcagacttcacagacttcacgatccaagttcgtattaatggattgttgctctataactcttctcttaatctgaagtatttaaaaacaagaatggtgaatatttgtaaatgtagaaaataaatctcaaagagtagtaagagggatttactacttagctacttgtacttggtaaattaatcattatcatgtgacatggtcatcttttgggaggacccagggcggaggacacagagggaaaaagaaggatttagctgctttgcttgaggttttgccttttaaaaagcacaaaggttttacttttccttctaatagaccagtaaagaatattttctcaaactgtaaacctgctgaagcaaaggggacagctagattttggttttaatactgtgcatttttaggcatttttgcctttgttaagaaataattgttttattttgtagaaaaggatttggtattataatgaccttggattttcactaaattgatattaatggccaaaagagatttactttccttattacttgtttaaacaagcagaatataaggtaaggttcatttggtctgaaatacatgatctatttttcacagatcgttatatcggaaaaatcttatgttggacaaaattctacttgggttttagtgtgttagttttgtcccctgtatctggtcttagtgtctcctcttacataattattgaactatcagtagagactaaatgatcatatgtcaacatctttgctaaaagataaaccagtttttatttaaatataaaggtatactttgatttgatttcatattctaagatgtgcatttcagagaaaacacattcactaatatgaatttgagcatctgtagattttgctacaggatagtttttaatcttccatgtagttctgatgccctggttgaaatctgtt

SEQ ID NO: 198529 - DNA, 1000 bp, Homo Sapiens
ctttctttctttctttctttctttctttctttctttctttctttctttctttctttctttctttcctttttagacagagtcttgttctgtcacccaggctggagtgcagtgacacgatcttggctaattgcaatctctgtcacctgggttcaagcaattctcctgcctcagccacccaagtagctggaattataggcatgcaccactaagtccagctagtttttgtatttttagtagagatggggttttgccattttagcgaggctggtcttgaactcctggcctaaagtgatttgatcaccttggcctcccaaagtgctgggattacaggcatgagccactgcgtttggcccactttctgcatttttctaattgcagaaactatatctaatttttgaaactatgttcaccatctggccaggcaccatggctcacacctgtaatttcagcactttgggaggcaaaggcgggcagatcacttgaggtcaggagttcaagaccagactggccaatgtggtgaaaactcatctctactaaaaatacaaaaaaattagccaggcatggtggtgcatgcctgtagtcccagctactcggcaggctgaggcaggagaatcgtttgaacacaggaggtggaggagattgagccactgcatttcagcctgggcgacagagggagactgaaaaaaaaaaaaaaagaaaagaaaagaaagagagaaagagaaactatatccccatgaaatgctatttaacaaatgtttaaaactatttaaatatatataacatagcaggagtaaaagaggtcattttgagtttgaactggagtcggatctatgtggacacatctgccactggtgtgctgggagcagaggcctcctttgtgaggatgggcaccccagaatgtcagagatggttagtcacagctgtttccctagcaccagcagtaggcactcaaaatatgtttttaaaacacattagtgagtgaatgacgggggaggaattc

SEQ ID NO: 198530 - DNA, 1000 bp, Homo Sapiens
cttgcttaaacgtcatgttgtcaggagtatctgttcctgagcccagactggcataggcttctttgacatcctgccgctttccttcattgtccttaccacagctgtagtttcagtcaggcaggtagccatcagcttaaggtctctttttctgtcctagctgcaacactgtgaggagccagatgctgattaccatcttgttaacagtacgtagcatggtgcttaaatcaggtttgaatattgcatgactgagtataagtgagtagagagttgtgtgtcttctgttcttgtaagtggcagctgtggcttctgccaagggtactactagctggggctgcctgcttaaccttggagcctgtctgcctgcctctgccctgctcctggggagttgtgactatccatgctcatctgcctgccatagcctttgttcagacttcttgtcaccgtgaatcccactcctgtggccgggccaccctgttctgagaacagaaaggagcttttccttgctgttattcttttagcagaaaaggaaacctgccctactgcatgcatgttcctggatctactcaagctttttctttttttccagcaagtggagaaactctgaaacacagtgttttgttacctgctttggtaacaatatatcacctcctgtgaagcaccagagtacccctttgtctcctgattatcttaatctttttgagagagacatatgactcctccaagtaaggttaggaatcctaatctgcaggtagtctgaatgcttgggtggaaggtttaaccttcccaaaggtgaaaacaccatcaactttgtgctcagcctctgctcatatttgcagattatcagagatcattattactgtctccatgtcccccgctgacccagtttccaggataaatgtgtagaataattaataaagggcttgacagccaacactcctcttccactcttcccacttctcttcttccttatttcactactgtagtaggtaagagggaattc

SEQ ID NO: 198531 - DNA, 1000 bp, Homo Sapiens
tcctgatcacagtggctttcttatggaaaagacactaatttacatttttcaaataatcataaaatattctgcaatggaaagtatgtaattatacagaaaaggttaatcctaaaattgtagaccccttagggactttttacttgcccattgcaaccctcctaaatgtcaataaaatcacaatctgtaaattagaaagtgagaaaccacctccagagacagctgaggtttggatgaaccacaaggaaatgacttttgcctggaggccaagtaatcttagttaaagggcagggaactctggtgagcattattttgacttgttgaaagggaccatgggtttcataaaaataaatcttttactttctaatatactgcactgaagacaccggtgttacttatatttgaaaaatttcgatgtaaacttgcatttggattttgtgatagagaataataacaacaacaacagcaatgagacaataacaatagcaacaaaatctaactgtagtaataataatatggtgaagaagaagatggaggaggagaaggtgaaggaaaagaagaaactactgctgctgccatcaccaccagataaacttttcttgaaatagatgaccaaaataaataaataaataacagcgacaataataaaaataaatcgggaggagaagaacgagaaagaagagaatgaggaagaaaaagaggaggagaggaaaataaatagtacatagaacaacttcctgtcatctgttggaatcttttaacctatgagttgctagtgcactccaatgtaaaaagagcctactatgtgttaactaacgttctatatactggagacacacatagaaaaaattaatgagacatttttcctgctaatattgggctttgagttaatatggggaggtgaaacatgtgaaaaattacctgttaccccgttatagtgttacatgtgttatattttagccctccatagcagaacagagtgaaagcatgaagacaagaattc

SEQ ID NO: 198532 - DNA, 1000 bp, Homo Sapiens
tactatcattcatttcaaagaatgttttaattttcatctttatttcattgttgacccaatgatcattcaggagcaggttatttaatttccatgtatttgcatggttttgagggttccttttggagttgatttcgaattttattccactgtggtctgagaaattacttgatatgattttgattttcttaaatttgccaagatttgttttgtgcctatcatatggtctatcttggagaatattccatgtactgatgaatagaatgtgtattctgcagttgttgggtagtatgttctgtaaatatctgttaagtccatttgttctagggtgtagtttaagtctattgtttctttgttggcttcctatcttgatgacctgtgcagtgctgtcagaggagtattgaagtcccccactgttactgtgctgccgtctatctcatttcttaggtctagtagtaattgttttataaatttgagagctcccatgttaggtgcatatatatttagaattgtggtattttcctgttgaactaatccttttatcattatataatgtccctctttgtcttttttaattgccattgctttaaagtttgttttgtctgatataagaatagctacttctgctcacttttggagtccattgacatggaatatctttttctacctctttaccttaagtttatgtgagttcttaggtgtcagatgagtctcctgaagacagcagaaacgtggttggtggattcttatccattctgcaattctgtatcttttaagtggagcattcaggccatttacattcaatgttagtattgaaatgtgaggtactgttctattcattgtgctatttgttgtctgaatacctttttttatcatgttattgttatataggtgagatttatgctttaaggaggttctattttggtgtattttgaggatttgtttcaagatttagagctccttttagcagttcttgtagtcctggcttggtagtggggaattc

SEQ ID NO: 198533 - DNA, 1000 bp, Homo Sapiens
cagaactctccacctcaaatgaacagaatatacattcttctcagcaccacatcacaattattctaaaattgatcacataattggaagtaaaacactcctcaccaaatgcaaaagaatggaaatcataacaaacggtttctcagaccacagtgcaatcaaattagaactcaggattaagaaattcattcaaaaccacacaactacatggaaactgaacaacctgctcctgaatgactactggctaaataaataacgaaattaaggcagaaataaataaattctttgaaaccaatgagaacaaatacacaacatagcagaatctctgggacacagctaaagcagtgtttagagggaagtttatatcactaaatgcccacaggagaaagcaggaaggatctaaaatcaacaccctaacatcacaattacaagaactagagaagcaagagcaaacacattcaaaagctagcagaaggcaagaaataactaagatcagaccagaactgaaggagatagagacacgaaaaacccttcaaaaaatcaatgaatccaggagctggttttttgaaaagttcaacaaaattgatagaccgctaaccagaagaataaagaagaaaagagagaagaatcaaatagacacaataaaaaatgataaaagggatatcacaactgatcccacagaaatacaaactactatcagagaatgctataaacacatcaatgcaagtaaactagaaaatctagaagaaacttataaattcctggacatatacatccttccaagactaaaccaggaaaaagtcaaatccctgaatagaccaattacaagttctgaaattggggcagcaattaatagcctaccaaccaaaaaaaaatcccaggtccagatggattcacagcctaattctaccaaaggtacaaagaggagctggtaccattccttctgaaactattccaatcaacagtaaaagagggaatcctccctaactcattttatgaggcc

SEQ ID NO: 198534 - DNA, 1000 bp, Homo Sapiens
atcacaaggtcaggagttcgagaccagcttggcaaacatggtgaaatcccgtctccactgaaaacacaaatattagccaggcatgctggcacgcacctgtaatcccagctgctcaggaggctgagacaggagaatcacttaaacccggaaggcagagtttgcagtgagcaaagatcatgccactgcactccagcctggatgacagagagagactcctgagacaacaacaaaaaaaagaatcttatattttttaatttgtattttgttgatttacagtgaggctgaacattatgcttattggcaatttgtttatgtcctttgctgatttttttctgctggggtgtatgttctagcttactgattcataggaactctttctacttcaaggacatcagtcctttgtattcactggtatatttttctgacttttgtagtattaacagttaaatgattactttatcttaagtttgttatagtatatgtacattgaaaataatcataacgatctggtaaatgttaatttaggttgttttttttttttgagacagagtatcactctgttgctcagactggagtgtgaatggcgcgatctcagctcactgcaacctctgcttcccgggttcaagcgattcttgtgcctcagtttcccaagtagctgggactacaggcgtgtaccaccacattccttacctcaactcctgatctcaggtgatccacccgcctcggcctcccagaatgctaggattacaggcgtgagccactggtcccggcgagccacgtgcccggcctatgttcttgttcttgttctttttcttttctttgtctcactctatcacccacacaggtcactgtgggcttgacctccccagactcaggtgatcctcccaccttagcctctagagtaactgggacacgggcatgccccaccacatccggctaatttttgtatttttttgtagagacagggtttcgccatgttgcccaagctggtcttgaattc

SEQ ID NO: 198535 - DNA, 1000 bp, Homo Sapiens
tgtatgcccagtggggagagagaccactgtaaaccaatagttaattacaaaaaagtatgatagattttatagcacatatgtgcagagtgctgtggagccaaagaggaggaactgatctctgatggtagtcttgaagggtgaataagagttactataagagggggaaaatggagaaaaggtgactgacagggaatgaatgacatctggtgcagatatgcagagaagcttgagaaaacacaactctctctgacaatggcagatctttcgatatggaaggagtgttggatgtgtgggagaaagcagtgaaaaataatactgaacaagtggagtcactaaaaaggatttagatctctttttgctacgcggaatgattgttggaatgaaaattttattgaaataaaaatgggaaaagaatatgaacaaccagtttacagtgaagaaataaatataaatggcttatcattaaaagatatgtgaccttatgcaaataaatgcaagctgaaaaatgtaatttcaaattggataaatctttaaaagtaaataataattacaggttgcaaagttttgggaaaacaggcatgtaacatttactgggaatataattggttaagactttatttattaatttattttttgagacagagtctcactctgttgccaggctggagtgcagtggcatgatctcagctcactgaaacctctgcctcttcagttcaagtgattctcttgcctctgcctcttgagtagccgggattacaggcacgcaccaccacgcctggctagcttttgtatttttagtagagacggggtttcaccatgatgatcaggctagtctcaaactcctgaccttgtgatctgcccgcctcagcctccaaaagtgctgggattacaggcgtgagccaccagcacccggccggtaaagactttatagagccaaggatcagtaagctatggcccatgggccaaatctagcctgcttttgatacagtcctcaagttaa

SEQ ID NO: 198536 - DNA, 1000 bp, Homo Sapiens
gtggaagacagtgtggtgattcctcaaggatctagaaccagaaatactatttgacccagacatcccattactgggtatataccaaaaggattataaatcatgctactataaagacacatgcacacgtatgtttattgcggcactgttcacaatagcaaagacttggaaccaacccaaatgcccatcaatgatgtctgttatacgtatctcatttcttcttcaatgatagactggataaagaaaacatggcacatatacaccatggaatactatgcagccataaaagaggatgagttcatgttctttgcagggacacggatgaagccggaaaccatcattctcagcaaactaacacaggaacagaaaaccaaatactgcatgttttcactcataagtgggagttaaacaatgagaatacatggacacagggagcagaacatcatacactggggcctatcagtgggtggggggctaggggagggatagtattaggagaaatacctaatgtagatgatgggttgatgggtgcagcaaaccaccatggcacgtgtatacctatgtaacacacctgcacattctgcccatgtaccccaaaacttaaagtataatttttctttttttaaaagaccaactattgattggtggtattgctgtgaagaggcttcttctggtaaatttttctttgaaacactgagccttgacttgtcattttccagtgcttgccattagctttatttgcactagtacattttccccttgtctttttgctgttgctgctgcttttcttttttagcactattctaaaaattacacattaataagcaataataataatgcagcctaagcatattgcttgttttctggcaatttggggctaaaaaaacaaagcatactttaactgttatattcacttgacttgtcactaattatacatgtctccagattgaaaagaaaatcatataaagaaagaaatttgatattactaaagctgttagaattc

SEQ ID NO: 198537 - DNA, 1000 bp, Homo Sapiens
gaccatgtgcacaactatatccctagcccctcattcaacgctttgcacaatatgggttgagtatcccttatctgaaatgcttgggaccagaagtgttttggattttggatttctttggatttgggaatatttgcaggtacttagccagttgagcgtcccaagtccaaaaatcccaaatgtcaaatgttccaatgaacacttcctttgagtatcatatttcacaatttggagcattttggatttgagatttggggattaggtctgctaaacctatacatgtgttgaatgactgcataaattaaggaatggagtaggagtgctttggttggggtgggaaccagtgattctgtttcagacagctacccgtgatagtagcagctaaataagagttggggtcaattatggaaccactggccctgttctttctctcaatgttctacacaatgggatcctcagtgtatccactgggggaacgagataaaaatattagagctttcaatgacatttatttgtacctcattattttaaaacatctgtgtttgcatatcatacagaagtacacatatataattcataaataaataaaacatgcatatactggggaaatgcctgctcaaaatttttttattgacaggaggtagaatgaaagatgtttaaaaatcactgctgtgggtcagagagtttccactattattaggcatccaaatcagcaaggagctattttcaaatagttctgtttgaccccaaacctacagaattaaaactccgtgggtttagggcaatggcaaattcagaatgctgatcagatgattatgatggaagcctctgctaaagaaccactgcttttctatcaggattcctaaacctggcttctcatcctaatcataatcatcttaaaaacaaacaacagtcaggcccagtggctcatgcctgtaacctctgcacccagggaagccaagggaggaggatcccttgaggccaggggttcaaaatcagtctg

SEQ ID NO: 198538 - DNA, 1000 bp, Homo Sapiens
ttacatgttaaaaactcaaggccgggtgtggtgtcttacgcctgtaatcccagcactttggcaggctgaggtgggtagatcacttgaggtcaggagtttgagaccagcctggctaacatgatgaaacagcatttctactaaaaatacaaaaaattaatcaagcgtggtggtgggcgcctgtaaccccagctacttgggaggctgaggcaggagaattgtttgaaacccgggaggcagagggtgcagtgagccaagattgtgtcattgcactccagcctgggcaacaagagcaaaactctgtctcaaaacaaaacaaaacaaaaaaacactcttaggaaaaaaggaatagattggatttattccagatttcttatctggaagaagggatccaactataatttataatagtgagacacttgatatattctccttaaaaacaacaaaaacattgcaagaagctagcagccccctcgcggcccctccaagtcactgcccaccacccaggagtgaccctgatcccctgtgtgtggagctcagtaattaagagagtttggcaggaaggctgggatagacgtcgtgactgaggaagaagaacaaaggcgcagacgctgatccacgcgtgtgtggaggcctgatttatgacagcccgggcggtggaaccagcttgggaaacaggagactgtttaataaatgctgctgagacaattcgttattcatgtggaaaaaatgaaattgagtttctgtctcacgtcataaataaaagtcatttgcagaagacagtgtgggagattatgtttatgtcctcactgtgttggggtttcttaagacgcaagagcgccaaccataacagaaaagattgataaattcaactacatgaacattgagaactttgtttatcaagaaatgacataaagaggataaaaacaagtcacagggtgcaaggagatcttttccacgcatacaacagcaaaggatgggtatccaagtataaaaagaattc

SEQ ID NO: 198539 - DNA, 1000 bp, Homo Sapiens
cttgactgtagcttgtttaaaataaaaaccaaaactgtgaaaagaaagaaaaggtcagagaaagtaaacttgatttcagaactgcagaagtataaaaaaataaaattacaaagacaaaatttattcttaggctattaaatctctttggtaaatggtcatttaggctaggaaaatgctataggataatggtctcaagatactcacttcttataactcaaaacgatggccctgaaatcttgacaattacaaattttagctccatgtcaaagaaaagaaaaagcccaatggttcatcatgtgcatcataaacacgcccactccaagctccctgttgtgggtcctggaacacttctaggccatgggggtgaggaggtagccaagaagtagctgcttggagggggaggaggcagaacttgaaccatggactgtgatgcctgcacctgtgaacccagggcctttgtggcaggagagaaaaagtagggaagaggtgtggggaggcaagtcacactgcagcatagggctacaagaagtcaaaaaattctacatttaaattcagcctttcagttctttataaggtgtcttgtcaaggcagaaagattgaagtgtttacttggcagtttttataactttttgaaattcagatgtgtatgtgagcctttgtttctgctcttccctcagacttcacacagttaggagccggtctgcccccaacctctcgatagagcatttataatttataaagcccttttatacgtggtcaccaaatcctcccaaccaccccatttcacagaaagaaacaactaaaaaccatctgagtctcaaggaggttccttgacatatccaaatcacatgggcaataagaagtattgttttacctctcccaggcaggaggcatcttggatacaggttaagaagcaaatcaaggtcacaaccatcatcttaggggatggagttttggcctctcatgcaaccgtcgatgtacaaaagtctgggaggaattc

SEQ ID NO: 198540 - DNA, 1000 bp, Homo Sapiens
cccacaccattgtgccccttgcccagcataaacggttgggagttacctataattgctgtctcattctgggataaccaatttgggtgctatatcccggacaattgtgggtcatacataacagaacttggtatgggttctccaaaattttccctggctgaaatatttattttaagtgtttgctgttttcaccttcaaactctggaaactttttctttccattttgttcactcctatatctcaagcaattgtaacagtgactgatacatagtcggtacttgataaatggttttcgaatgagtgaaagcatttttattatcttcagatatttcatacatataaaataatatatataacttaaatataagatgaaataattaggacatatacccatgtcctaccacacagcttaagagatagattattgttaatattggtgaagcctgtttggtgtccctatctgattatatctcttttcattccctttggaggaaacctccactccagattttgcatttatcattcatcgcatttcattacattttggctacatatagattctttacaatatattatttagtttctgatgtgttttactgtgtgtaaaagttctgtcataatatatgaattatgtggcaacctgcttttttctctcaacattatgttatgatactcatccctattgctggatatagctttatttcatttttactgctgtattatacttaaataaataaacacaccacaatttgtttggccattctcctgtcaatagttagtccagttgtttttaggtctttgttttttataaacgatactgttataaatattgttgtacatgtctctagaaatatatttacaaaattttctctagaatacatatttaagaacttctggacacagataactttatactcagtagtgaaacattgaaagctttctctctaaaagcaggaacaaagcaaggatgcctgctcttgccacttctattcaacatagccct

SEQ ID NO: 198541 - DNA, 1000 bp, Homo Sapiens
agagaaagtgtcacagaggagataatgcttgaactgagatttgaaggaaaatggaaaactagccaaggtgacaaagcagagaggagcataatgggcatgggagagcacatacgcaaaaaaacactgggacatgagataacatggcaagtctgagaaccagcaaatatttccctgcagtatgtggaatgtgaaagatcaggtttggagtgaggaagaagtagatcataaatagcttcggatatcaatcaaaggagtttagcttttattctgttggtggttctgcaggtcaaagtaactccatcttaaatgctaatccatcatgttgacttctgatcaaccctagttctgagaaggcctctaagatttttacttaccatgaatccttcccttaggcaaattccccatggtgtataagccctgcgtctggaggataacagggcaaggatccatcatctcacaggtaccgagacatggcttctgttagtaaggccctattaaatgttgtttcctgtgaaaacggatgtgtcagcctctttcttcagcctctcagctcctcagtctttggggataggtttgcacagacctgctcaccacagaacagtggtagaagccatttagcaatatgaaaaaaataattccactagcaaaatccataatgaacaagaggagcagataactattaggaggaaatgattaatagttcatgaagtaatgaagaatcaactgccatgagcagagacagaagaagaagacaagttcaaagtttattaggaaattggatcagagaatgagaggtgacaagttcggagttcatcaggaaattaaatcaagagtcctcaccaagatttacagaaggttatgattccttctctaatattccatataatttcataggtttttagtaagaaaaaaaggagaaactgccaaatagaagaaataaagctgactacatcatataatcttttctactgtaagtaaaaaaaaaagagagagagaattc

SEQ ID NO: 198542 - DNA, 1000 bp, Homo Sapiens
caccttcccctgcccacaacctggaacttcttccctggactataacttgagaaacaaacttctgttccatttaacctaataggcttttggtctattagttataggagttttgttatagttgaaaaccagtatattgtttaggaggatataaagtagttgggttagagttcacagaaaagataaaacctaatctgggtcttaattaataacaaccacaattaatttagagtctgaatgtgccaggaactacaccaggaagtgatacaaattttctcactgcattgtcatgacagctctttgcattaagtgtcattaaaccctactttgcagatgaaaaacaaccttcagggtggttgggtaatttcccctaagttacacagctaataaatggtaggctcataatctgaacacaggaatttctgcctccaaagcttgtgcacagagaacattgcaggctgctgggggattgtgtgaggaaaggagtggaagtatgtgttatcatggcaggtgggggttgggagtggcagtagctgtgggacctttccagtgacagtgttataaaaaaagagttcccttcactgtccccttattcaacccagtcttgacttctgaaatctgcagtgcactgctcttttctctagccatgtgacagcaatgagaaaggctagaataaattatcaacgtatttagagattacagggaaaccaaaagcccaggctttacccaccatcaaccccaccccggagcaggagcccagcttaactgagagagaactggactaaatagaggtcaaagggcaatcaaatgggtgatcctgcctacgtaagaggagcctagaggagaattggaaaggtgaggggcagggttcctggccaagaaacagatagagaagcccaaataaaggcaaatacacattagtcaagattcccaaccatttgcataggtaatcaagagtgaactctaagccatttggttttgtttggatggccctagaggaatt

SEQ ID NO: 198543 - DNA, 1000 bp, Homo Sapiens
cctcccaggaatcttgcctcagtgtgctggagaagtcaggaactgggcaattttgcctctccttttgtcttcattaaagagcttcagagcttgtgaaatcagtgcagcactggcagcctggggaaaatggaggatcactgtgtgggaatccccttcattggatcactgagcacacagttctatgtttttctttttttttttttttgaaatggagtctcgctcttttgccaaggctggagtgcagtggcgtaatcttggcttactgcaacctctgcctcccaggttcaagcgattctcctgcctcaacctcccgagtagctgggactacaggcgcccaccaccacacctggctaatttttgttttgttttgtttgagacagagtcttgctcttgttgcgtaggctggagtgcaatggcatgatctcaactcactgcaacctccgcctcccgggtgcaagcgattctcctctctcagcctcctgagtagctaggattacaggcgtgagccactgtgcccagcctaatttttttttttttttttttttttttttagtagagacagggtttccccatgttgacaaggctggtctcgaactcctgacctcaagtgatctgcccgcctcggcctcccaaagtgttgagattacaggtgtgagccacagcgcctggcctgagcacacagttctaaatcgctctgttaagagtcagcagccctcagcctctgctctttggaagtaagtgtgagctgggggtgaaagccccagtactgagggctgctgaatgtgagtgtgtgcagaggagagcccattatatcctgtggacacaccaaagtgctccccaagccttgagagtgacttgtgcatctgtgttggggaacaggaagacaaggtgaaagctgggggccaactggtgtgtgtgggcatgccacacaggcattgcggggattctgttgttcaggccaagatgaggcagcagccactgtgagaataccccaagaatt

SEQ ID NO: 198544 - DNA, 1000 bp, Homo Sapiens
tcctacccatttattgtttccatttgcatgaaatatatttttttaccccctcacttttagtctgtgtgtgtctttatatttgggtttcctataagcagcgtatagttgggtcttgtttctttatccattcatcaactctatgccttttaattggagaatcaaatctatttacattcagtgttatttttaataagtaagggcttagtgtgcccattttgttgttcgttttataattcctctctttctttcttcctggttttctttatagttaagtaattttctctgctagtatgtttttattcattgtttctatttttagttaattatttataatttttttttaatttttttattattatactttaagttttagggtacatgcgtggttactatgaagcttacaaaaatcttacagatataacaagttattttaaagagatgacaacttatcttagatcagaaagcaattaatagaaacataaaaaatagaaaagtaatctacaccttttaaccccatcctcccacatttggctttaggttgtctcaatttacatattttatactacccgtctcttgatggattgctgtagttactataatttttgatagatttacctttaggtttcatactagagttatgagtagattgcacacaataattacagtcttagagtatatatgattgtgtacttaattttataaatgggttttatacatacaaatgttttctttttgcacattagtgtttttttacttccatattgaaaaactccttatagtatttcttgtaagatgggtgaagcagtggtgaattctctcagctttgtttgggagaaactttatctctcctttatattggaagaataggttactggatacaatattttttggatagtagttttttgtttcttcttcatcttctctcagtactttgaaaatgtcatcctattccctcctgaactgtacagttttcatttaaaagtctgttgccaaatgaatt

SEQ ID NO: 198545 - DNA, 1000 bp, Homo Sapiens
tgacagaaagcagctttgttttactggtaacatctcccccagggaggtcactacgtgcatcgtgtgatgaaatctggatttttgtcttataagttattcccaggagagcatgaaacttaaaaaaaatttcttggtcaggttccagccaaaagcatatagtatttaatgaataactaatacagataattaacagattaagagaatgtgtgagcccaagcatgaacagagaagttgggagggaaggtatcagcataaaaaaagttggaaatgaacagggcaactggagcatgaatgaaatcaatttaattgtatggatttatatttctttggaagtacattcttatttatttttctgtacgacctaggctgtgtctacattaagtaaagagtatctgtgcctcagatgtctgccagataagctagttaggtttctccataaagaaagctattgctatatctaacggatgattcagtctgttcttccctgcaaaaagaatgttgtctttggtatccagggccttaaaatgtcaggcacagtgattttccaagggcccaaggaacacagatggaggtgcttctctgccaaattttaggggaagcagaattcagcctgatcatcctgggtcttattctgttctcacatggtttagaagcttgcaggagattgatcgtttgccttcatttttccattatatctgggagagattttaagctcagctgttcaaccagcatttggatagcagtacctaaaaaggcagaaagataaagatggagcctagttctcatgaacttttccaaaaccagttggcccccatgttgtttggcacgtgactgaagtctgcctaggactgttgatttaacagcaggtaggaagcaaacagtggagctggacaaaaagagcaggagcctgagttgaaaatcacttgccatcttcatgtttattagtcctggttctcttggtctgtgccacgctgacacctgcctggtgtaagccagaatt

SEQ ID NO: 198546 - DNA, 1000 bp, Homo Sapiens
ggaaggctattgtgctgtgtggggaggagtgggatatttggagaggctgaagagttggctgcatgtacatactttgtcgccatcttttgagcccccacacctaggggggttagtcctcccagaaatgaatgtatgaaagccacagatgagattgggcgtggtgactcatgcctgtaatcccagcactttgggaagccaaggtgggcagatcacttgaggtcaagagttcaagaccagcctggccaacatggcgaaaccctggctctactaaaactacaaaaattagctgggcatggtagtgggaaccagtaatcccagctacttgggaggctgaggcaggagaatcacttgaacccaggaggtggagattgcagtgggccgagacagcgccactgtactccagcctgggcaacagagtgagactccgtctcaaaataaataaataaataaatgaataaataaacaaataaaaaatttttaaaaagccacagatgattgtggtaattctgtggtataaattagatgagagccagtgagagctttggttttgtgctcattttttgggttgagaggaggttactgggaagtgtgttcttggcgcaaggccctggcccagaggctggctcgtctgcttttgagttctcgtcacccctcatcttgtctgcctcgtcactgctgtcacttcagctgtgcgtgtctttcctgggtacaggcattaggctccctgccacggaatctgcatacattaactattgtctgctaaaaattgtgactatttgatttttttccctttaagcatccattttgatttataaactgagccaagctggcagccaggaagactgaagaatcctagtttctaacaaagaaaaatgaaacccagtctcttcttccccacttcatgtctgtgagcaagtctcagctttcagttggcccacccctgaacagtcttgaaagcaatccattttctgtcactcagaggtgccaagcaaaggaattc

SEQ ID NO: 198547 - DNA, 1000 bp, Homo Sapiens
aaacaaatacaatcttttttctttttaaaaaaatattattgtaacattgattataggtaaagtactactttgggtttgtttgtttgtttgttttgagacagggtctcattctgtcactgaggctggagtgcagtggagcaatcatagctcactgcagcctctacttcctgggctcaactgatcctccagcctcagcctccccagtaactaagactacaggcgcatgccaacatgtctggctaatttttgtattttttgtagatttggagtttcaccatgttgcccaggctggtctctaactcctgggctcaagtgacccacccgcctcagcctcccaaagtgctgagattacaaacatgagccactgagcccagcagaaacccagagaaaatcaatatttagtttaaaagcaaacaacaataacccaaagaaaatctccctttggtaggagaagcccttcttcggcatctagcacacatcctctgcaaaagtatttgctctagctggaagttctacagcagtcaagacacacccattcagggctgggtatctttgttagaaggttcttccttgtattgctttgagttacatttctttgtaacttgactcagtctagttcttcctcctagaacaacacataagtcgaattcctctttgacttgatcttcacatagtctatatcttgcctcaagtttctttttgaagtgtgatacacacaagttcccttcattttacacatcatgatttttataccctttatcattcttgtcgcagaacctttaaagttctgcagtttgtcaaatggccttctcagaatcaagctcagaactaaacactaatgtagagcctatcaaactattttgcttcttgttttggacactatgtttctatgcctaaactgtcctttcttttttagcagctacattatattgttgatcattaaggaattcacaatcaactattccttagtctttttcacatggattccaatgaaggaatt

SEQ ID NO: 198548 - DNA, 1000 bp, Homo Sapiens
taattgagagaaagggaaaccattaaattgcaggccagccaaaattcacactgctcttttcctttaatcaacttataaagaactcacttgaagatttcattataccaaaatttaaaaataattccaaaatagcatgaaagtttacttttctctccctcccctccccccactggatacttcttacacaagaatgtttcctcgtcaaaaggattaatgagcaccctgattctagatttttaaataagtatatttccatgataagttacaatataaaagggagggaaagattttgcttaatgtatacatgcacatctctacagagatctggaaaagaattaattaatatatatcaaaaggttaacaggggttatcagtgggcagcagtatttcaggtgtttcttttttgttttttctattttttctccgagaaatgtggaattaaagggggaggagagggtaaagaagaaaaataaagaaattaacgttcagtgggaagtgaataaggatcaagtaaaaccttatttagcctcaaggtagttattaccatctcattttgacagatggggaaactgaggcccagagagattgcatcatgctcaaggagacatagcgactgacaggaaagatctaattccaaagcctataatcttcctgtgtcagaagattatgaacagtctattcatgttcactttcataagagagacagaaataagacaggggtaatttaatcagtttctctttgcttttattccctccaccttttcccctacaatctgtaaatgtattgatattaatctaattatatggttcgttatacaggggagacacacagtgcctacattatcagattcctcagaacccacttcttgttaatgcagtgacatcagtaagcatcttagagaatcattctagcatctctgaccttacttcagtattagtactggtaggttaatagagataacaggagtcagaatgagggagacagaagaccagaggaatt

SEQ ID NO: 198549 - DNA, 1000 bp, Homo Sapiens
ctctgcctccaaggtcaagggattcttgtgcctcagcctcctgagtagctgggattacaggtgcctgccaccatgcctggctaatttttgtattattattaatttttttttgagacagaggcttcactcttgttgcccagactggagtgcaatggtgccatctcagctcaccacaacctctgcctcctgggttcaagtgattctcccgcttcagcttcccaagtagctgagattacaggcatgtgccaccacgcccaactgatattgtatttttagtagagacagggtttctccatgttggtcaggctggtctcgaactcccgacctcaggtgatctgcccaccttggcctccgaaagtgctgggattacaggcgtgagccaccgcgcccggcttaatttttgtatgtttagtagagacagggtttcactatgttggccaggctggtctcaaactcctgacctcaagcaatctacctgcctcagcctcccaaagtgctggaattacaggcgtgagccacagcacccagcctcatttattctttctaacaatcctatgaggtaggtgctgtaatcacctaattttacagttgaggaaacagaggcactgagaagtgaagtaattaccatcattaccatgtattgagctctttctcttttctttttcttttttttttttgagatgaagtctcaccctgtcacccaggctggagtgcagtggtgtgatcttggctcactgcagcctctgcctcccgggttcaagcgattctcctgcctcagcttcccaagtagctgggactacaggtgcacaccaccatgcccggctaatttttgtatttttttttagtagagatggggtttcaccatgttggccaggctggtcttgaactcctgacctcaggtgatctgcccacctcggcctcccaaagtgctgggattacaggcatgagccactgtgcccagccgagctctttgtattgataaggtactacatgaagaatt

SEQ ID NO: 198550 - DNA, 1000 bp, Homo Sapiens
tgacttcaagaatgaagtcgtggaccctcacggtgagtgttacggttcttaaaggtggtgtgtccagagtttgttccttctgatgttcagacatgtttggagttttttccttctggtgggttcgtggtctccttggcctcagaagtgaagctgcagaccttcgtggtgagtgttacagctcataaaggtagtgcagacccaaacagtgagcagcagcaagatttactgcaaagagctaaagaacaaagcttccacagtatggaaggggacccaaacaggttgccactgctggctccggcagcctacttttattccctcatctggccccacccatagcctgctgattggtccattttatagagagctgattggtctgttttacagagcgctgattggtccgttttgacagggtgctgattggtgtgtttacaatccctgagctagacacaaaagttctccaagtccccactagattagctagacatggagcactgattggtgcatttacaagccttgagctagacacagggtgctgattgctgtgtttacaaaccttgagctagacacagagtgctgattggtatatttacaatcctttagctagacataaaggttctccaagtccccactagattagctagatacagagtgccaattggttcatttacaaaccttgagctagacacagagtgctgattggtgtatttacaatcccttagctagacataaaggttctccaagtccccactagattagctagacatagatcactgattggtgcatttacaaaccttgagctagacacagggtgctgattggtgtgtttacaaacctcgagctagacacagagtgctgattggtgcatttacaatcctccagctagacatgaaagttctccaagtccccatctgactcaggagcccagctggcttcacctagtggatccagtgctggggccgcgggtggcgctgcctgccagtcccacgctgcgtgcctgcac

SEQ ID NO: 198551 - DNA, 1000 bp, Homo Sapiens
acctttggaaagcaaaagcttgagctacccaaatttcctggattccctgaggttttccaaagatattctttaatagaattctcaaacgttttgagcacttgtatcccagacttcaagattgaataaatgacatttgaacgtggcttggttctataagtaattgggaaacctatattaaaattcctagaatttgtggcctagaaatcacttagaagaatggaattggagaggtcccttgaagactcccttttactctcaaaatattcttcagaagggctgggcaaggtggctcacgcctgtaatcccagcactctgggaggctgaggcgggcagatcgtgaagtcaggagatcaagaccatcctggctaacacggtgaaaccagtctctactaaaaatacaaaatattagccaggtgtggtggcatgcacctgcggtcccagctgattgggaggctgaggcaggagaatcacttgaacccaggaggtggaggttgcagtgagctgagatcctgccactgtactccagcctgcgcaacagtgagactctgcctcaaaaaaaaaaaaaaaaaaaaaaaaaaaattattcagaatgagacagaaaaaatgtgacctaattctgtgactattcctcttgtttatttctctatatatttctccaattcttgccaagtttcctaagcctatcaagaatttgagctcctaggtacttcttttacttaatatttctcaatggaatgcgttttttataaaaactagttaaatataatatacattaggtctttatttacattaggccaatgtatgtttggtctagtgtaaataaagtatttcacaaaaattcagtaatagaatctatggtaaagatggcagattttggagtcacgctacctagacttgaatcctgttttcctagttgtataactttggccaaagtgtaatgtttatgtcattctgttttcttttagttaaacagggaatatgatgtcgcctatctcatata

SEQ ID NO: 198552 - DNA, 1000 bp, Homo Sapiens
tctgaggaaatttttgatgccttaaagaggctataggaagaagtaggcctctgagtgcatcttggagacttggtaggtagaatctgatagatagaaactgggatatgggtaagaacaatacaggtggaggggatagaataagcaaaagcctggaggctacaaagcctggaagtgtgtttagggaaattgaaagtcattcagtttagctggtaggtaatgatcctgtagtatcagagcacagtattgaagcaaaaacctgaaaattgaggtgatttgccaaactgaagggacattctgttttgaaattgagggtcattctatttcagggccaatgatgtttttattcaatatacagtgcttaaacattatcattgtttattaaacaaaaaaacccccaagaattgatattgcattctcattcctgggaatagtgggggtctttattctttttgtaagagaaaaatgtttcattcttagaacctatatatggtctttttggatgagttcagttttatatagatgttgacagctctaaaaatagcagcactaatggtccagctaagcacgcagtacagcaacctcaaagggcttccagacgcaggcaggggagctctaagtaaaacatgattcctggaactaccttatctgtctttatcagttaaacccataactatattctgacatagccagtttccacaaacaccattgtgaattttattttcctttcattcagatgggcttatttcacattttacaggatgggggatgctaagtaaattctcctgtgagatctcacgccattttctttttaacgttactgaaaagtgtttggcaggtttgtcctttaattaatctgtttatgcatctgtctttcccaccagcctatgagttctaccaggagtttcttgaaatcttttgccatgtttctaagcattgtcctaaggattttacatggattcaccttcataacaattctatgaagttggcactattatgaatt

SEQ ID NO: 198553 - DNA, 1000 bp, Homo Sapiens
gcctgcaagatattcatgactaatctgaataccatacaaaaattgtcctttttatgagcaatcgatttgtttttatcccatggttatggtgagtaaccaatttagagagctaggtagagagagagagaaagagagagagagagagagagagagagacagaaaatgtagctatgttaccaacctaataacagcattgactctcatttttctcatctttaaatgtagaagatttatttaaatataagctcctttctgataaattaacaagctgttgtttccaaattttataatttgatgcaaatttagaaagtcgagtgtgcaggatttttctctctgtatctgtgttggctattatttggccaattcaaaatatccagggattagttttttagttattatattaggcattgtctagccatttcctcaactgctctccattttctttcatgcccttggaatgaaaaggctaagtgtgcatatcatcaacaattgttttctgaagtgttcagccaatgctgatgcttattcaaaattatatctttgtgactttgtctcaactattttgtatgcttcttacattctatttttgaaatgactgagagactaaaggaagtatttatgaagtaatgatattttaaatttcctaaatagtttcagtattttgttgcttatttgttgcttataatttttaaaatttggtttttcaaaagagataaggagaaacactaataaattttctccccagaaataatacataatatccaccccctctggagtatatttctaatcttattgacttcagtcatattaactttcagtctccacaaaccaaaaaattctaatagaaaatctttacaagttttcatattagtacatggtagaatataaggacgactagaaaaatagcagattaaagaatccattctataaaaattataaaaataaaccaaacagggcatcttaattctaggaaccttatttccatacaatagatctggaa

SEQ ID NO: 198554 - DNA, 1000 bp, Homo Sapiens
aagttctagctttattcagtagtgactcttcctgctttctgatctgtattggcctataaagcctgactccacccaagtaccctataaaacatgtatctcctgtcagttatatcttgtcatgtatggcatcagctcatgttatccccaggctttgaatgtccttgtttctttcaaagatttctatttcgtacctttgattcagctctttgctacttttaaaattgggcttggaacagagctattagcatgactaaagtaggtgagacatggcttagcagctgctattacttaaaaagcaaaaggagccttagagattttagttgacaaaaagctcaatatgagtcaataatatttgttgacaccttttagaaaaagtgcctctttgagagcagagaaaaaaaatctacttttgctatcaccataccagcacaccaattagaaacagtaactttgtgttgcatgaataaacagtaatactaacaaaaaagaagatgttgagagaagatgttgacatgatagtgtatattttgcagggaaataccatctgattaggataatgaggtgattatcagataactaaaggattgtcaaatagaagatgggttaggactgttctgtgtggttcaaggaaacagaatcatatcaatttggtaaaagttgtaggcagatcaatttggacctaaaataagatatttttcacattttttaagaaataaaaatggaatgacctgtttttatgatattcaaggactcgaacactacttatcagaaatatagttggttatattaaccataaacaaaatgagcaagatgacatttaagtgtccttacaaactgggggtcccaggatttcatggttaagaagggtcaagttggatcatcatcttccttaattctactacaacttaaagttctctttattgttgacataactatgtcagactattgatttgagctgaaattgcagtcaactcaaaagccaatttttttacacatacct

SEQ ID NO: 198555 - DNA, 1000 bp, Homo Sapiens
gcacattttcagaggctcaaatggctgacatcatctgtagaaactttttttttattattatacttcaagttttagggtacatgtgcacaacgtgcagctttgttacatatgtaacatgtgccatgttatacacccattaactcgtcatttagcattaggtatatctcctaatgctatccctccccactccccccaccccacaacagtccccggtgtgtgatgttccccttcctgtgtccatgtgttctcattgttcaattcccacttatgagtgagaacatgcattgttagtaggcaaggctgttgttgattggttgaatctcagaggcatgtttattggagtgtgtctgtccctgtttgcctgactttcagaatgagggcctgacagtagttggcttgcaaaaagcacattcactgaagtgagtttttgttgatcatttgagcagtcttaaaaatgggttctggtggctacttattaccagggcttcaaaaatcagtcttttcctaagtttgtgggaacttttcaattatcatctccctgccatactgtggtttgctcatttgagcctctgtggtgatgatttcctctggttgctagcatgggcatgttttattacatctaacagtcatcgaattatgtgcattcatgcctgttaagtgtgtcatctatttcctagaagggatcctgatatgtcctttgtctttctcttcttgagagagtgtaagctgtagcttatattgagcagggattttgacaccctgttttgttcattgatatttccaagtggctagagtagtgtctggcatgcccaataaatatcaattgtttgactgatatgccgattctagaattctttttcttgctttctttctttaattacctgcaagtgttgcacatccttttatttctaattgttctttctcttattcatctgttctgattccatttctggctattcttggttcaaattccttgtttttttaatagctattatgaatt

SEQ ID NO: 198556 - DNA, 1000 bp, Homo Sapiens
taggaaaagaataaaacccactaagaaagttgaaagaaggaaataacaaagacaaaagcagacattaataaaaaaggaagaaaacagaaaacagaaaaaggttcaacagaaccagaaactgatttcttacaactattctaatcacagtaaaatccatttaacaaaaggcatgcgcacatgtacacaaaaagtaggaaacacaaaagggaacataactacagatacagcccttgggcttctatttcaagggattattttttcagtaaatttccgttttaaatggataattttctaaaaattatgtaactttgaaaattcactcaagaaatagaaaatctgaatttcaccacactcacaaagcaaataaaaatcctattttcatatataaaagaaaaagccatccaactaatcttaccaacttagtataaggcagataccaaagtcacactaaggcagtttttaaaaattctaaatcaatctcacttgagaaaagacacaaaatgataaagtctaggccaggcatggtggctcacacctatactcttcaggccaaggtaggaggatggcttgataccaggagttggagacaaggctggggaacttaacgggaccctatctctaagaaaaaaaaaattaaaaatagctgggcatgatagcacgcgtctgtgatcccagctacttaggagactaaggcggaggatcacttgagcccaggagtttgaggctgcagtgagccatgattgtgcaactgtactccagcctgggcagcagaatgagatcctgtctcataaaaataaaaatctcagtgtttcagtgatttattgctgtgtaacaaaccaccccaacttagtggcataaaccacagctgagtagaaagtgatataaagtgagcatcctcctcacagtcttgacttttctagtagtgcttctgaagtatcaccattgtgtattcttcttactatatgttgttgatagatgtgctttgtcagttaaagaattc

SEQ ID NO: 198557 - DNA, 1000 bp, Homo Sapiens
attgttgggtaaacaaagaggtgcgttgtttgcttcagggatttgatgatgtttacgagccaaggaccaaaacctactgacaaagaatctgaaaaccctgaagagagaggaatgattgatgagggtcccaacatataggggaaggaatgggaccaagagtacaggaagatacattcagattttttaggagagaggtcagcaaatcttctgcaatggaagacagggaggatgagcacaattattagtacaattctagtttgcagccagagaaggcagaaaattgagataattcatgcttaatgacctctaatatttttttcctgaaatgaagggcagagccatttgatctatgatttagtggaaagtcaagaacaatggttcggtgtttagaatgaacgaggaaggtaaaaagttggatatccattatggatataatgcactttatttttctaaacattttatgcctaatggataattcatactaataccatttgtggtgctcatgtatgattttaaaactgaaagtaccaagaatcatatgacaagaacgataagacacaacaattatctgcagatatcatattaataattaccttttcccttttattttaggtcctcacacttcagcaaatgtaggtgttctaagtagttgcctggatgtaagaacagtaattcctgaaacatctgtatccagtactgtttccagcacacaaactatggtaacccagcagaccattaaaactgaatcatccagtacaaatggggcagttgttaaagatgaaacttcactaacaacattcagtaccaaatctgaaggtttgaaatgtgtttcacatactgtattttgaaccatttatgtatataaattcatcaaacttacttgtcttagatgggagttgcatttcatcttggaattttgttattagtcattttaacttaatttctgtgagcaagagttttcatttgacctaaatttaacttttagaatctttaagaattc
